(19) United States
(12) Patent Application Publication
(10) Pub. No.: US 2005/0196754 A1
(43) Pub. Date: Sep. 8, 2005

(54) Novel nucleic acids and polypeptides

(76) Inventors: Radoje T Drmanac, Los Altos Hills, CA (US); Chenghua Liu, San Jose, CA (US); Y Tom Tang, San Jose, CA (US)

Correspondence Address: NUVELO, INC, 675 ALMANOR AVE., SUNNYVALE, CA, 94085, US

(21) Appl. No.: 10/450,763

(22) PCT Filed: Mar. 30, 2001
(86) PCT No.: PCT/US01/08631

§ 371 Date: Feb. 20, 2004

(30) Foreign Application Priority Data
Mar. 31, 2000 (US) 09/540,217
Aug. 23, 2000 (US) 09/649,167

(51) Int. Cl. C12Q 1/68; C12P 21/06; C07H 21/04; C12N 9/00

(52) U.S. Cl. 435/6; 435/69.1; 435/183; 435/320.1; 435/325; 530/350; 536/23.2

(57) ABSTRACT

The present invention provides novel nucleic acids, novel polypeptide sequences encoded by these nucleic acids and uses thereof.

### 1. TECHNICAL FIELD

[0001] The present invention provides novel polynucleotides and proteins encoded by such polynucleotides, along with uses for these-polynucleotides and proteins, for example in therapeutic, diagnostic and research methods.

### 2. BACKGROUND

[0002] Technology aimed at the discovery of protein factors (including e.g. cytokines, such as lymphokines, interferons, CSFs, chemokines, and interleukins) has matured rapidly over the past decade. The now routine hybridization cloning and expression cloning techniques clone novel polynucleotides “directly” in the sense that they rely on information directly related to the discovered protein (i.e., partial DNA/amino acid sequence of the protein in the case of hybridization cloning; activity of the protein in the case of expression cloning). More recent “indirect” cloning techniques such as signal sequence cloning, which isolates DNA sequences based on the presence of a now well-recognized secretory leader sequence motif, as well as various PCR-based or low stringency hybridization-based cloning techniques, have advanced the state of the art by making available large numbers of DNA/amino acid sequences for proteins that are known to have biological activity, for example, by virtue of their secreted nature in the case of leader sequence cloning, by virtue of their cell or tissue source in the case of PCR-based techniques, or by virtue of structural similarity to other genes of known biological activity.

[0003] Identified polynucleotide and polypeptide sequences have numerous applications in, for example, diagnostics, forensics, gene mapping; identification of mutations responsible for genetic disorders or other traits, to assess biodiversity, and to produce many other types of data and products dependent on DNA and amino acid sequences.

### 3. SUMMARY OF THE INVENTION

[0004] The compositions of the present invention include novel isolated polypeptides, novel isolated polynucleotides encoding such polypeptides, including recombinant DNA molecules, cloned genes or degenerate variants thereof, especially naturally occurring variants such as allelic variants, antisense polynucleotide molecules, and antibodies that specifically recognize one or more epitopes present on such polypeptides, as well as hybridomas producing such antibodies.

[0005] The compositions of the present invention additionally include vectors, including expression vectors, containing the polynucleotides of the invention, cells genetically engineered to contain such polynucleotides and cells genetically engineered to express such polynucleotides.

[0006] The present invention relates to a collection or library of at least one novel nucleic acid sequence assembled from expressed sequence tags (ESTs) isolated mainly by sequencing by hybridization (SBH), and in some cases, sequences obtained from one or more public databases. The invention relates also to the proteins encoded by such polynucleotides, along with therapeutic, diagnostic and research utilities for these polynucleotides and proteins. These nucleic acid sequences are designated as SEQ ID NO: 1-30368. The polypeptides sequences are designated SEQ ID NO: 30369-60736. The nucleic acids and polypeptides are provided in the Sequence Listing. In the nucleic acids provided in the Sequence Listing, A is adenosine; C is cytosine; G is guanine; T is thymine; and N is any of the four bases. In the amino acids provided in the Sequence Listing, * corresponds to the stop codon.

[0007] The nucleic acid sequences of the present invention also include, nucleic acid sequences that hybridize to the complement of SEQ ID NO: 1-30368 under stringent hybridization conditions; nucleic acid sequences which are allelic variants or species homologues of any of the nucleic acid sequences recited above, or nucleic acid sequences that encode a peptide comprising a specific domain or truncation of the peptides encoded by SEQ ID NO: 1-30368. A polynucleotide comprising a nucleotide sequence having at least 90% identity to an identifying sequence of SEQ ID NO: 1-30368 or a degenerate variant or fragment thereof. The identifying sequence can be 100 base pairs in length.

[0008] The nucleic acid sequences of the present invention also include the sequence information from the nucleic acid sequences of SEQ ID NO: 1-30368. The sequence information can be a segment of any one of SEQ ID NO: 1-30368 that uniquely identifies or represents the sequence information of SEQ ID NO: 1-30368.

[0009] A collection as used in this application can be a collection of only one polynucleotide. The collection of sequence information or identifying information of each sequence can be provided on a nucleic acid array. In one embodiment, segments of sequence information is provided on a nucleic acid array to detect the polynucleotide that contains the segment. The array can be designed to detect full-match or mismatch to the polynucleotide that contains the segment. The collection can also be provided in a computer-readable format.

[0010] This invention also includes the reverse or direct complement of any of the nucleic acid sequences recited above; cloning or expression vectors containing the nucleic acid sequences; and host cells or organisms transformed with these expression vectors. Nucleic acid sequences (or their reverse or direct complements) according to the invention have numerous applications in a variety of techniques known to those skilled in the art of molecular biology, such as use as hybridization probes, use as primers for PCR, use in an array, use in computer-readable media, use in sequencing full-length genes, use for chromosome and gene mapping, use in the recombinant production of protein, and use in the generation of anti-sense DNA or RNA, their chemical analogs and the like.

[0011] In a preferred embodiment, the nucleic acid sequences of SEQ ID NO: 1-30368 or novel segments or parts of the nucleic acids of the invention are used as primers in expression assays that are well known in the arL In a particularly preferred embodiment, the nucleic acid sequences of SEQ ID NO: 1-30368 or novel segments or parts of the nucleic acids provided herein are used in diagnostics for identifying expressed genes or, as well known in the art and exemplified by Vollrath et al., Science 258:52-59 (1992), as expressed sequence tags for physical mapping of the human genome.

[0012] The isolated polynucleotides of the invention include, but are not limited to, a polynucleotide comprising any one of the nucleotide sequences set forth in SEQ ID NO: 1-30368; a polynucleotide comprising any of the full length protein coding sequences of SEQ ID NO: 1-30368; and a polynucleotide comprising any of the nucleotide sequences of the mature protein coding sequences of SEQ ID NO: 1-30368. The polynucleotides of the present invention also include, but are not limited to, a polynucleotide that hybridizes under stringent hybridization conditions to (a) the complement of any one of the nucleotide sequences set forth in SEQ ID NO: 1-30368; (b) a nucleotide sequence encoding any one of the amino acid sequences set forth in the Sequence Listing (e.g., SEQ ID NO: 30369-60736); (c) a polynucleotide which is an allelic variant of any polynucleotides recited above; (d) a polynucleotide which encodes a species homolog (e.g. orthologs) of any of the proteins recited above; or (e) a polynucleotide that encodes a polypeptide comprising a specific domain or truncation of any of the polypeptides comprising an amino acid sequence set forth in the Sequence Listing.

[0013] The isolated polypeptides of the invention include, but are not limited to, a polypeptide comprising any of the amino acid sequences set forth in the Sequence Listing; or the corresponding full length or mature protein. Polypeptides of the invention also include polypeptides with biological activity that are encoded by (a) any of the polynucleotides having a nucleotide sequence set forth in SEQ ID NO: 1-30368; or (b) polynucleotides that hybridize to the complement of the polynucleotides of (a) under stringent hybridization conditions. Biologically or immunologically active variants of any of the polypeptide sequences in the Sequence Listing, and “substantial equivalents” thereof (e.g., with at least about 65%, 70%, 75%, 80%, 85%, 90%, 95%, 98% or 99% amino acid sequence identity) that preferably retain biological activity are also contemplated. The polypeptides of the invention may be wholly or partially chemically synthesized but are preferably produced by recombinant means using the genetically engineered cells (e.g. host cells) of the invention.

[0014] The invention also provides compositions comprising a polypeptide of the invention. Polypeptide compositions of the invention may further comprise an acceptable carrier, such as a hydrophilic, e.g., pharmaceutically acceptable, carrier.

[0015] The invention also provides host cells transformed or transfected with a polynucleotide of the invention.

[0016] The invention also relates to methods for producing a polypeptide of the invention comprising growing a culture of the host cells of the invention in a suitable culture medium under conditions permitting expression of the desired polypeptide, and purifying the polypeptide from the culture or from the host cells. Preferred embodiments include those in which the protein produced by such process is a mature form of the protein.

[0017] Polynucleotides according to the invention have numerous applications in a variety of techniques known to those skilled in the art of molecular biology. These techniques include use as hybridization probes, use as oligomers, or primers, for PCR, use for chromosome and gene mapping, use in the recombinant production of protein, and use in generation of anti-sense DNA or RNA, their chemical analogs and the like. For example, when the expression of an mRNA is largely restricted to a particular cell or tissue type, polynucleotides of the invention can be used as hybridization probes to detect the presence of the particular cell or tissue mRNA in a sample using, e.g., in situ hybridization.

[0018] In other exemplary embodiments, the polynucleotides are used in diagnostics as expressed sequence tags for identifying expressed genes or, as well known in the art and exemplified by Vollrath et al., Science 258:52-59 (1992), as expressed sequence tags for physical mapping of the human genome.

[0019] The polypeptides according to the invention can be used in a variety of conventional procedures and methods that are currently applied to other proteins. For example, a polypeptide of the invention can be used to generate an antibody that specifically binds the polypeptide. Such antibodies, particularly monoclonal antibodies, are useful for detecting or quantitating the polypeptide in tissue. The polypeptides of the invention can also be used as molecular weight markers, and as a food supplement.

[0020] Methods are also provided for preventing, treating, or ameliorating a medical condition which comprises the step of administering to a mammalian subject a therapeutically effective amount of a composition comprising a polypeptide of the present invention and a pharmaceutically acceptable carrier.

[0021] In particular, the polypeptides and polynucleotides of the invention can be utilized, for example, in methods for the prevention and/or treatment of disorders involving aberrant protein expression or biological activity.

[0022] The present invention further relates to methods for detecting the presence of the polynucleotides or polypeptides of the invention in a sample. Such methods can, for example, be utilized as part of prognostic and diagnostic evaluation of disorders as recited herein and for the identification of subjects exhibiting a predisposition to such conditions. The invention provides a method for detecting the polynucleotides of the invention in a sample, comprising contacting the sample with a compound that binds to and forms a complex with the polynucleotide of interest for a period sufficient to form the complex and under conditions sufficient to form a complex and detecting the complex such that if a complex is detected, the polynucleotide of interest is detected. The invention also provides a method for detecting the polypeptides of the invention in a sample comprising contacting the sample with a compound that binds to and forms a complex with the polypeptide under conditions and for a period sufficient to form the complex and detecting the formation of the complex such that if a complex is formed, the polypeptide is detected.

[0023] The invention also provides kits comprising polynucleotide probes and/or monoclonal antibodies, and optionally quantitative standards, for carrying out methods of the invention. Furthermore, the invention provides methods for evaluating the efficacy of drugs, and monitoring the progress of patients, involved in clinical trials for the treatment of disorders as recited above.

[0024] The invention also provides methods for the identification of compounds that modulate (i.e., increase or decrease) the expression or activity of the polynucleotides and/or polypeptides of the invention. Such methods can be utilized, for example, for the identification of compounds that can ameliorate symptoms of disorders as recited herein. Such methods can include, but are not limited to, assays for identifying compounds and other substances that interact with (e.g., bind to) the polypeptides of the invention. The invention provides a method for identifying a compound that binds to the polypeptides of the invention comprising contacting the compound with a polypeptide of the invention in a cell for a time sufficient to form a polypeptide/compound complex, wherein the complex drives expression of a reporter gene sequence in the cell; and detecting the complex by detecting the reporter gene sequence expression such that if expression of the reporter gene is detected the compound that binds to a polypeptide of the invention is identified.

[0025] The methods of the invention also provides methods for treatment which involve the administration of the polynucleotides or polypeptides of the invention to individuals exhibiting symptoms or tendencies. In addition, the invention encompasses methods for treating diseases or disorders as recited herein comprising administering compounds and other substances that modulate the overall activity of the target gene products. Compounds and other substances can effect such modulation either on the level of target gene/protein expression or target protein activity.

[0026] The polypeptides of the present invention and the polynucleotides encoding them are also useful for the same functions known to one of skill in the art as the polypeptides and polynucleotides to which they have homology (set forth in the sequence listing). If no homology is set forth for a sequence, then the polypeptides and polynucleotides of the present invention are useful for a variety of applications, as described herein, including use in arrays for detection.

### 4. DETAILED DESCRIPTION OF THE INVENTION

[0027] 4.1 Definitions

[0028] It must be noted that as used herein and in the appended claims, the singular forms “a”, “an” and “the” include plural references unless the context clearly dictates otherwise.

[0029] The term “active” refers to those forms of the polypeptide which retain the biologic and/or immunologic activities of any naturally occurring polypeptide. According to the invention, the terms “biologically active” or “biological activity” refer to a protein or peptide having structural, regulatory or biochemical functions of a naturally occurring molecule. Likewise “immunologically active” or “immunological activity” refers to the capability of the natural, recombinant or synthetic polypeptide to induce a specific immune response in appropriate animals or cells and to bind with specific antibodies.

[0030] The term “activated cells” as used in this application are those cells which are engaged in extracellular or intracellular membrane trafficking, including the export of secretory or enzymatic molecules as part of a normal or disease process.

[0031] The terms “complementary” or “complementarity” refer to the natural binding of polynucleotides by base pairing. For example, the sequence 5′-AGT-3′ binds to the complementary sequence 3′-TCA-5′. Complementarity between two single-stranded molecules may be “partial” such that only some of the nucleic acids bind or it may be “complete” such that total complementarity exists between the single stranded molecules. The degree of complementarity between the nucleic acid strands has significant effects on the efficiency and strength of the hybridization between the nucleic acid strands.

[0032] The term “embryonic stem cells (ES)” refers to a cell that can give rise to many differentiated cell types in an embryo or an adult, including the germ cells. The term “germ line stem cells (GSCs)” refers to stem cells derived from primordial stem cells that provide a steady and continuous source of germ cells for the production of gametes. The term “primordial germ cells (PGCs)” refers to a small population of cells set aside from other cell lineages particularly from the yolk sac, mesenteries, or gonadal ridges during embryogenesis that have the potential to differentiate into germ cells and other cells. PGCs are the source from which GSCs and ES cells are derived The PGCs, the GSCs and the ES cells are capable of self-renewal. Thus these cells not only populate the germ line and give rise to a plurality of terminally differentiated cells that comprise the adult specialized organs, but are able to regenerate themselves.

[0033] The term “expression modulating fragment,” EMF, means a series of nucleotides which modulates the expression of an operably linked ORF or another EMF.

[0034] As used herein, a sequence is said to “modulate the expression of an operably linked sequence” when the expression of the sequence is altered by the presence of the EMF. EMFs include, but are not limited to, promoters, and promoter modulating sequences (inducible elements). One class of EMEs are nucleic acid fragments which induce the expression of an operably linked ORF in response to a specific regulatory factor or physiological event.

[0035] The terms “nucleotide sequence” or “nucleic acid” or “polynucleotide” or “oligonucleotide” are used interchangeably and refer to a heteropolymer of nucleotides or the sequence of these nucleotides. These phrases also refer to DNA or RNA of genomic or synthetic origin which may be single-stranded or double-stranded and may represent the sense or the antisense strand, to peptide nucleic acid (PNA) or to any DNA-like or RNA-like material. In the sequences herein A is adenine, C is cytosine, T is thymine, G is guanine and N is A, C, G or T (U). It is contemplated that where the polynucleotide is RNA, the T (thymine) in the sequences provided herein is substituted with U (uracil). Generally, nucleic acid segments provided by this invention may be assembled from fragments of the genome and short oligonucleotide linkers, or from a series of oligonucleotides, or from individual nucleotides, to provide a synthetic nucleic acid which is capable of being expressed in a recombinant transcriptional unit comprising regulatory elements derived from a microbial or viral operon, or a eukaryotic gene.

[0036] The terms “oligonucleotide fragment” or a “polynucleotide fragment”, “portion,” or “segment” or “probe” or “primer” are used interchangeably and refer to a sequence of nucleotide residues which are at least about 5 nucleotides, more preferably at least about 7 nucleotides, more preferably at least about 9 nucleotides, more preferably at least about 11 nucleotides and most preferably at least about 17 nucleotides. The fragment is preferably less than about 500 nucleotides, preferably less than about 200 nucleotides, more preferably less than about 100 nucleotides, more preferably less than about 50 nucleotides and most preferably less than 30 nucleotides. Preferably the probe is from about 6 nucleotides to about 200 nucleotides, preferably from about 15 to about 50 nucleotides, more preferably from about 17 to 30 nucleotides and most preferably from about 20 to 25 nucleotides. Preferably the fragments can be used in polymerase chain reaction (PCR), various hybridization procedures or microarray procedures to identify or amplify identical or related parts of mRNA or DNA molecules. A fragment or segment may uniquely identify each polynucleotide sequence of the present invention. Preferably the fragment comprises a sequence substantially similar to any one of SEQ ID NO: 1-30368.

[0037] Probes may, for example, be used to determine whether specific mRNA molecules are present in a cell or tissue or to isolate similar nucleic acid sequences from chromosomal DNA as described by Walsh et al. (Walsh, P. S. et al., 1992, PCR Methods Appl 1:241-250). They may be labeled by nick translation, Klenow fill-in reaction, PCR, or other methods well known in the art. Probes of the present invention, their preparation and/or labeling are elaborated in Sambrook, J. et al., 1989, Molecular Cloning: A Laboratory Manual, Cold Spring Harbor Laboratory, NY; or Ausubel, F. M. et al., 1989, Current Protocols in Molecular Biology, John Wiley & Sons, New York N.Y., both of which are incorporated herein by reference in their entirety.

[0038] The nucleic acid sequences of the present invention also include the sequence information from the nucleic acid sequences of SEQ ID NO: 1-30368. The sequence information can be a segment of any one of SEQ ID NO: 1-30368 that uniquely identifies or represents the sequence information of that sequence of SEQ ID NO: 1-30368. One such segment can be a twenty-mer nucleic acid sequence because the probability that a twenty-mer is fully matched in the human genome is 1 in 300. In the human genome, there are three billion base pairs in one set of chromosomes. Because 420 possible twenty-mers exist, there are 300 times more twenty-mers than there are base pairs in a set of human chromosomes. Using the same analysis, the probability for a seventeen-mer to be fully matched in the human genome is approximately 1 in 5. When these segments are used in arrays for expression studies, fifteen-mer segments can be used. The probability that the fifteen-mer is fully matched in the expressed sequences is also approximately one in five because expressed sequences comprise less than approximately 5% of the entire genome sequence.

[0039] Similarly, when using sequence information for detecting a single mismatch, a segment can be a twenty-five mer. The probability that the twenty-five mer would appear in a human genome with a single mismatch is calculated by multiplying the probability for a full match (1÷4²⁵) times the increased probability for mismatch at each nucleotide position (3×25). The probability that an eighteen mer with a single mismatch can be detected in an array for expression studies is approximately one in five. The probability that a twenty-mer with a single mismatch can be detected in a human genome is approximately one in five.

[0040] The term “open reading frame,” ORF, means a series of nucleotide triplets coding for amino acids without any termination codons and is a sequence translatable into protein.

[0041] The terms “operably linked” or “operably associated” refer to functionally related nucleic acid sequences. For example, a promoter is operably associated or operably linked with a coding sequence if the promoter controls the transcription of the coding sequence. While operably linked nucleic acid sequences can be contiguous and in the same reading frame, certain genetic elements e.g. repressor genes are not contiguously linked to the coding sequence but still control transcription/translation of the coding sequence.

[0042] The term “pluripotent” refers to the capability of a cell to differentiate into a number of differentiated cell types that are present in an adult organism. A pluripotent cell is restricted in its differentiation capability in comparison to a totipotent cell.

[0043] The terms “polypeptide” or “peptide” or “amino acid sequence” refer to an oligopeptide, peptide, polypeptide or protein sequence or fragment thereof and to naturally occurring or synthetic molecules. A polypeptide “fragment,” “portion,” or “segment” is a stretch of amino acid residues of at least about 5 amino acids, preferably at least about 7 amino acids, more preferably at least about 9 amino acids and most preferably at least about 17 or more amino acids. The peptide preferably is not greater than about 200 amino acids, more preferably less than 150 amino acids and most preferably less than 100 amino acids. Preferably the peptide is from about 5 to about 200 amino acids. To be active, any polypeptide must have sufficient length to display biological and/or immunological activity.

[0044] The term “naturally occurring polypeptide” refers to polypeptides produced by cells that have not been genetically engineered and specifically contemplates various polypeptides arising from post-translational modifications of the polypeptide including, but not limited to, acetylation, carboxylation, glycosylation, phosphorylation, lipidation and acylation.

[0045] The term “translated protein coding portion” means a sequence which encodes for the full length protein which may include any leader sequence or any processing sequence.

[0046] The term “mature protein coding sequence” means a sequence which encodes a peptide or protein without a signal or leader sequence. The “mature protein portion” means that portion of the protein which does not include a signal or leader sequence. The peptide may have been produced by processing in the cell which removes any leader/signal sequence. The mature protein portion may or may not include an initial methionine residue. The methionine residue may be removed from the protein during processing in the cell. The peptide may be produced synthetically or the protein may have been produced using a polynucleotide only encoding for the mature protein coding sequence.

[0047] The term “derivative” refers to polypeptides chemically modified by such techniques as ubiquitination, labeling (e.g., with radionuclides or various enzymes), covalent polymer attachment such as pegylation (derivatization with polyethylene glycol) and insertion or substitution by chemical synthesis of amino acids such as ornithine, which do not normally occur in human proteins.

[0048] The term “variant”(or “analog”) refers to any polypeptide differing from naturally occurring polypeptides by amino acid insertions, deletions, and substitutions, created using, e.g., recombinant DNA techniques. Guidance in determining which amino acid residues may be replaced, added or deleted without abolishing activities of interest, may be found by comparing the sequence of the particular polypeptide with that of homologous peptides and minimizing the number of amino acid sequence changes made in regions of high homology (conserved regions) or by replacing amino acids with consensus sequence.

[0049] Alternatively, recombinant variants encoding these same or similar polypeptides may be synthesized or selected by making use of the “redundancy” in the genetic code. Various codon substitutions, such as the silent changes which produce various restriction sites, may be introduced to optimize cloning into a plasmid or viral vector or expression in a particular prokaryotic or eukaryotic system. Mutations in the polynucleotide sequence may be reflected in the polypeptide or domains of other peptides added to the polypeptide to modify the properties of any part of the polypeptide, to change characteristics such as ligand-binding affinities, interchain affinities, or degradation/turnover rate.

[0050] Preferably, amino acid “substitutions” are the result of replacing one amino acid with another amino acid having similar structural and/or chemical properties, i.e., conservative amino acid replacements. “Conservative” amino acid substitutions may be made on the basis of similarity in polarity, charge, solubility, hydrophobicity, hydrophilicity, and/or the amphipathic nature of the residues involved. For example, nonpolar (hydrophobic) amino acids include alanine, leucine, isoleucine, valine, proline, phenylalanine, tryptophan, and methionine; polar neutral amino acids include glycine, serine, threonine, cysteine, tyrosine, asparagine, and glutamine; positively charged (basic) amino acids include arginine, lysine, and histidine; and negatively charged (acidic) amino acids include aspartic acid and glutamic acid. “Insertions” or “deletions” are preferably in the range of about 1 to 20 amino acids, more preferably 1 to 10 amino acids. The variation allowed may be experimentally determined by systematically making insertions, deletions, or substitutions of amino acids in a polypeptide molecule using recombinant DNA techniques and assaying the resulting recombinant variants for activity.

[0051] Alternatively, where alteration of function is desired, insertions, deletions or non-conservative alterations can be engineered to produce altered polypeptides. Such alterations can, for example, alter one or more of the biological functions or biochemical characteristics of the polypeptides of the invention. For example, such alterations may change polypeptide characteristics such as ligand-binding affinities, interchain affinities, or degradation/turnover rate. Further, such alterations can be selected so as to generate polypeptides that are better suited for expression, scale up and the like in the host cells chosen for expression. For example, cysteine residues can be deleted or substituted with another amino acid residue in order to eliminate disulfide bridges.

[0052] The terms “purified” or “substantially purified” as used herein denotes that the indicated nucleic acid or polypeptide is present in the substantial absence of other biological macromolecules, e.g., polynucleotides, proteins, and the like. In one embodiment, the polynucleotide or polypeptide is purified such that it constitutes at least 95% by weight, more preferably at least 99% by weight, of the indicated biological macromolecules present (but water, buffers, and other small molecules, especially molecules having a molecular weight of less than 1000 daltons, can be present).

[0053] The term “isolated” as used herein refers to a nucleic acid or polypeptide separated from at least one other component (e.g., nucleic acid or polypeptide) present with the nucleic acid or polypeptide in its natural source. In one embodiment, the nucleic acid or polypeptide is found in the presence of (if anything) only a solvent, buffer, ion, or other component normally present in a solution of the same. The terms “isolated” and “purified” do not encompass nucleic acids or polypeptides present in their natural source.

[0054] The term “recombinant,” when used herein to refer to a polypeptide or protein, means that a polypeptide or protein is derived from recombinant (e.g., microbial, insect, or mammalian) expression systems. “Microbial” refers to recombinant polypeptides or proteins made in bacterial or fungal (e.g., yeast) expression systems. As a product, “recombinant microbial” defines a polypeptide or protein essentially free of native endogenous substances and unaccompanied by associated native glycosylation. Polypeptides or proteins expressed in most bacterial cultures, e.g., E. coli, will be free of glycosylation modifications; polypeptides or proteins expressed in yeast will have a glycosylation pattern in general different from those expressed in mammalian cells.

[0055] The term “recombinant expression vehicle or vector” refers to a plasmid or phage or virus or vector, for expressing a polypeptide from a DNA (RNA) sequence. An expression vehicle can comprise a transcriptional unit comprising an assembly of (1) a genetic element or elements having a regulatory role in gene expression, for example, promoters or enhancers, (2) a structural or coding sequence which is transcribed into mRNA and translated into protein, and (3) appropriate transcription initiation and termination sequences. Structural units intended for use in yeast or eukaryotic expression systems preferably include a leader sequence enabling extracellular secretion of translated protein by a host cell. Alternatively, where recombinant protein is expressed without a leader or transport sequence, it may include an amino terminal methionine residue. This residue may or may not be subsequently cleaved from the expressed recombinant protein to provide a final product.

[0056] The term “recombinant expression system” means host cells which have stably integrated a recombinant transcriptional unit into chromosomal DNA or carry the recombinant transcriptional unit extrachromosomally. Recombinant expression systems as defined herein will express heterologous polypeptides or proteins upon induction of the regulatory elements linked to the DNA segment or synthetic gene to be expressed. This term also means host cells which have stably integrated a recombinant genetic element or elements having a regulatory role in gene expression, for example, promoters or enhancers. Recombinant expression systems as defined herein will express polypeptides or proteins endogenous to the cell upon induction of the regulatory elements linked to the endogenous DNA segment or gene to be expressed. The cells can be prokaryotic or eukaryotic.

[0057] The term “secreted” includes a protein that is transported across or through a membrane, including transport as a result of signal sequences in its amino acid sequence when it is expressed in a suitable host cell. “Secreted” proteins include without limitation proteins secreted wholly (e.g., soluble proteins) or partially (e.g., receptors) from the cell in which they are expressed. “Secreted” proteins also include without limitation proteins that are transported across the membrane of the endoplasmic reticulum. “Secreted” proteins are also intended to include proteins containing non-typical signal sequences (e.g. Interleukin-1 Beta, see Krasney, P. A. and Young, P. R. (1992) Cytokine 4(2):134-143) and factors released from damaged cells (e.g. Interleukin-1 Receptor Antagonist, see Arend, W. P. et. al. (1998) Annu. Rev. Immunol. 16:27-55).

[0058] Where desired, an expression vector may be designed to contain a “signal or leader sequence” which will direct the polypeptide through the membrane of a cell. Such a sequence may be naturally present on the polypeptides of the present invention or provided from heterologous protein sources by recombinant DNA techniques.

[0059] The term “stringent” is used to refer to conditions that are commonly understood in the art as stringent. Stringent conditions can include highly stringent conditions (i.e., hybridization to filter-bound DNA in 0.5 M NaHPO₄, 7% sodium dodecyl sulfate (SDS), 1 mM EDTA at 65° C., and washing in 0.1×SSC/0.1% SDS at 68° C.), and moderately stringent conditions (i.e., washing in 0.2×SSC/0.1% SDS at 42° C.). Other exemplary hybridization conditions are described herein in the examples.

[0060] In instances of hybridization of deoxyoligonucleotides, additional exemplary stringent hybridization conditions include washing in 6×SSC/0.05% sodium pyrophosphate at 37° C. (for 14-base oligonucleotides), 48° C. (for 17-base oligos), 55° C. (for 20-base oligonucleotides), and 60° C. (for 23-base oligonucleotides).

[0061] As used herein, “substantially equivalent” can refer both to nucleotide and amino acid sequences, for example a mutant sequence, that varies from a reference sequence by one or more substitutions, deletions, or additions, the net effect of which does not result in an adverse functional dissimilarity between the reference and subject sequences. Typically, such a substantially equivalent sequence varies from one of those listed herein by no more than about 35% (i.e., the number of individual residue substitutions, additions, and/or deletions in a substantially equivalent sequence, as compared to the corresponding reference sequence, divided by the total number of residues in the substantially equivalent sequence is about 0.35 or less). Such a sequence is said to have 65% sequence identity to the listed sequence. In one embodiment, a substantially equivalent, e.g., mutant, sequence of the invention varies from a listed sequence by no more than 30% (70% sequence identity); in a variation of this embodiment, by no more than 25% (75% sequence identity); and in a further variation of this embodiment, by no more than 20% (80% sequence identity) and in a further variation of this embodiment, by no more than 10% (90% sequence identity) and in a further variation of this embodiment, by no more that 5% (95% sequence identity). Substantially equivalent, e.g., mutant, amino acid sequences according to the invention preferably have at least 80% sequence identity with a listed amino acid sequence, more preferably at least 85% sequence identity, more preferably at least 90% sequence identity, more preferably at least 95% identity, more preferably at least 98% identity, and most preferably at least 99% identity. Substantially equivalent nucleotide sequences of the invention can have lower percent sequence identities, taking into account, for example, the redundancy or degeneracy of the genetic code. Preferably, nucleotide sequence has at least about 65% identity, more preferably at least about 75% identity, more preferably at least about 80% sequence identity, more preferably at least about 85% sequence identity, more preferably at least about 90% sequence identity, and most preferably at least about 95% identity, more preferably at least about 98% sequence identity, and most preferably at least about 99% sequence identity. For the purposes of the present invention, sequences having substantially equivalent biological activity and substantially equivalent expression characteristics are considered substantially equivalent. For the purposes of determining equivalence, truncation of the mature sequence (e.g., via a mutation which creates a spurious stop codon) should be disregarded. Sequence identity may be determined, e.g., using the Jotun Hein method (Hein, J. (1990) Methods Enzymol. 183:626-645). Identity between sequences can also be determined by other methods known in the art, e.g. by varying hybridization conditions.

[0062] The term “totipotent” refers to the capability of a cell to differentiate into all of the cell types of an adult organism.

[0063] The term “transformation” means introducing DNA into a suitable host cell so that the DNA is replicable, either as an extrachromosomal element, or by chromosomal integration. The term “transfection” refers to the taking up of an expression vector by a suitable host cell, whether or not any coding sequences are in fact expressed. The term “infection” refers to the introduction of nucleic acids into a suitable host cell by use of a virus or viral vector.

[0064] As used herein, an “uptake modulating fragment,” UMF, means a series of nucleotides which mediate the uptake of a linked DNA fragment into a cell. UMFs can be readily identified using known UMFs as a target sequence or target motif with the computer-based systems described below. The presence and activity of a UMF can be confirmed by attaching the suspected UMF to a marker sequence. The resulting nucleic acid molecule is then incubated with an appropriate host under appropriate conditions and the uptake of the marker sequence is determined. As described above, a UMF will increase the frequency of uptake of a linked marker sequence.

[0065] Each of the above terms is meant to encompass all that is described for each, unless the context dictates otherwise.

[0066] 4.2 Nucleic Acids of the Invention

[0067] Nucleotide sequences of the invention are set forth in the Sequence Listing.

[0068] The isolated polynucleotides of the invention include a polynucleotide comprising the nucleotide sequences of SEQ ID NO: 1-30368; a polynucleotide encoding any one of the peptide sequences of SEQ ID NO: 30369-60736; and a polynucleotide comprising the nucleotide sequence encoding the mature protein coding sequence of the polypeptides of any one of SEQ ID NO: 30369-60736. The polynucleotides of the present invention also include, but are not limited to, a polynucleotide that hybridizes under stringent conditions to (a) the complement of any of the nucleotides sequences of SEQ ID NO: 1-30368; (b) nucleotide sequences encoding any one of the amino acid sequences set forth in the Sequence Listing; (c) a polynucleotide which is an allelic variant of any polynucleotide recited above; (d) a polynucleotide which encodes a species homolog of any of the proteins recited above; or (e) a polynucleotide that encodes a polypeptide comprising a specific domain or truncation of the polypeptides of SEQ ID NO: 30369-60736. Domains of interest may depend on the nature of the encoded polypeptide; e.g., domains in receptor-like polypeptides include ligand-binding, extracellular, transmembrane, or cytoplasmic domains, or combinations thereof; domains in immunoglobulin-like proteins include the variable immunoglobulin-like domains; domains in enzyme-like polypeptides include catalytic and substrate binding domains; and domains in ligand polypeptides include receptor-binding domains.

[0069] The polynucleotides of the invention include naturally occurring or wholly or partially synthetic DNA, e.g., cDNA and genomic DNA, and RNA, e.g., mRNA. The polynucleotides may include all of the coding region of the cDNA or may represent a portion of the coding region of the cDNA.

[0070] The present invention also provides genes corresponding to the cDNA sequences disclosed herein. The corresponding genes can be isolated in accordance with known methods using the sequence information disclosed herein. Such methods include the preparation of probes or primers from the disclosed sequence information for identification and/or amplification of genes in appropriate genomic libraries or other sources of genomic materials. Further 5′ and 3′ sequence can be obtained using methods known in the art. For example, full length cDNA or genomic DNA that corresponds to any of the polynucleotides of SEQ ID NO: 1-30368 can be obtained by screening appropriate cDNA or genomic DNA libraries under suitable hybridization conditions using any of the polynucleotides of SEQ ID NO: 1-30368 or a portion there of as a probe. Alternatively, the polynucleotides of SEQ ID NO: 1-30368 may be used as the basis for suitable primer(s) that allow identification and/or amplification of genes in appropriate genomic DNA or cDNA libraries.

[0071] The nucleic acid sequences of the invention can be assembled from ESTs and sequences (including cDNA and genomic sequences) obtained from one or more public databases, such as dbEST, gbpri, and UniGene. The EST sequences can provide identifying sequence information, representative fragment or segment information, or novel segment information for the full-length gene.

[0072] The polynucleotides of the invention also provide polynucleotides including nucleotide sequences that are substantially equivalent to the polynucleotides recited above. Polynucleotides according to the invention can have, e.g., at least about 65%, at least about 70%, at least about 75%, at least about 80%, 81%, 82%, 83%, 84%, more typically at least about 85%, 86%, 87%, 88%, 89%, more typically at least about 90%, 91%, 92%, 93%, 94%, and even more typically at least about 95%, 96%, 97%, 98%, 99%, sequence identity to a polynucleotide recited above.

[0073] Included within the scope of the nucleic acid sequences of the invention are nucleic acid sequence fragments that hybridize under stringent conditions to any of the nucleotide sequences of SEQ ID NO: 1-30368, or complements thereof, which fragment is greater than about 5 nucleotides, preferably 7 nucleotides, more preferably greater than 9 nucleotides and most preferably greater than 17 nucleotides. Fragments of, e.g. 15, 17, or 20 nucleotides or more that are selective for (i.e. specifically hybridize to any one of the polynucleotides of the invention) are contemplated. Probes capable of specifically hybridizing to a polynucleotide can differentiate polynucleotide sequences of the invention from other polynucleotide sequences in the same family of genes or can differentiate human genes from genes of other species, and are preferably based on unique nucleotide sequences.

[0074] The sequences falling within the scope of the present invention are not limited to these specific sequences, but also include allelic and species variations thereof. Allelic and species variations can be routinely determined by comparing the sequence provided in SEQ ID NO: 1-30368, a representative fragment thereof, or a nucleotide sequence at least 90% identical, preferably 95% identical, to SEQ ID NO: 1-30368 with a sequence from another isolate of the same species. Furthermore, to accommodate codon variability, the invention includes nucleic acid molecules coding for the same amino acid sequences as do the specific ORFs disclosed herein. In other words, in the coding region of an ORF, substitution of one codon for another codon that encodes the same amino acid is expressly contemplated.

[0075] The nearest neighbor or homology result for the nucleic acids of the present invention, including SEQ ID NO: 1-30368 can be obtained by searching a database using an algorithm or a program. Preferably, a BLAST which stands for Basic Local Alignment Search Tool is used to search for local sequence alignments (Altshul, S. F. J. Mol. Evol. 36 290-300 (1993) and Altschul S. F. et al. J. Mol. Biol. 21:403-410(1990)). Alternatively a FASTA version 3 search against Genpept, using Fastxy algorithm.

[0076] Species homologs (or orthologs) of the disclosed polynucleotides and proteins are also provided by the present invention. Species homologs may be isolated and identified by making suitable probes or primers from the sequences provided herein and screening a suitable nucleic acid source from the desired species.

[0077] The invention also encompasses allelic variants of the disclosed polynucleotides or proteins; that is, naturally occurring alternative forms of the isolated polynucleotide which also encode proteins which are identical, homologous or related to that encoded by the polynucleotides.

[0078] The nucleic acid sequences of the invention are further directed to sequences which encode variants of the described nucleic acids. These amino acid sequence variants may be prepared by methods known in the art by introducing appropriate nucleotide changes into a native or variant polynucleotide. There are two variables in the construction of amino acid sequence variants: the location of the mutation and the nature of the mutation. Nucleic acids encoding the amino acid sequence variants are preferably constructed by mutating the polynucleotide to encode an amino acid sequence that does not occur in nature. These nucleic acid alterations can be made at sites that differ in the nucleic acids from different species (variable positions) or in highly conserved regions (constant regions). Sites at such locations will typically be modified in series, e.g., by substituting first with conservative choices (e.g., hydrophobic amino acid to a different hydrophobic amino acid) and then with more distant choices (e.g., hydrophobic amino acid to a charged amino acid), and then deletions or insertions may be made at the target site. Amino acid sequence deletions generally range from about 1 to 30 residues, preferably about 1 to 10 residues, and are typically contiguous. Amino acid insertions include amino- and/or carboxyl-terminal fusions ranging in length from one to one hundred or more residues, as well as intrasequence insertions of single or multiple amino acid residues. Intrasequence insertions may range generally from about 1 to 10 amino residues, preferably from 1 to 5 residues. Examples of terminal insertions include the heterologous signal sequences necessary for secretion or for intracellular targeting in different host cells and sequences such as FLAG or poly-histidine sequences useful for purifying the expressed protein.

[0079] In a preferred method, polynucleotides encoding the novel amino acid sequences are changed via site-directed mutagenesis. This method uses oligonucleotide sequences to alter a polynucleotide to encode the desired amino acid variant, as well as sufficient adjacent nucleotides on both sides of the changed amino acid to form a stable duplex on either side of the site of being changed. In general, the techniques of site-directed mutagenesis are well known to those of skill in the art and this technique is exemplified by publications such as, Edelman et al., DNA 2:183 (1983). A versatile and efficient method for producing site-specific changes in a polynucleotide sequence was published by Zoller and Smith, Nucleic Acids Res. 10:6487-6500 (1982). PCR may also be used to create amino acid sequence variants of the novel nucleic acids. When small amounts of template DNA are used as starting material, primer(s) that differs slightly in sequence from the corresponding region in the template DNA can generate the desired amino acid variant. PCR amplification results in a population of product DNA fragments that differ from the polynucleotide template encoding the polypeptide at the position specified by the primer. The product DNA fragments replace the corresponding region in the plasmid and this gives a polynucleotide encoding the desired amino acid variant.

[0080] A further technique for generating amino acid variants is the cassette mutagenesis technique described in Wells et al., Gene 34:315 (1985); and other mutagenesis techniques well known in the art, such as, for example, the techniques in Sambrook et al., supra, and Current Protocols in Molecular Biology, Ausubel et al. Due to the inherent degeneracy of the genetic code, other DNA sequences which encode substantially the same or a functionally equivalent amino acid sequence may be used in the practice of the invention for the cloning and expression of these novel nucleic acids. Such DNA sequences include those which are capable of hybridizing to the appropriate novel nucleic acid sequence under stringent conditions.

[0081] Polynucleotides encoding preferred polypeptide truncations of the invention can be used to generate polynucleotides encoding chimeric or fusion proteins comprising one or more domains of the invention and heterologous protein sequences.

[0082] The polynucleotides of the invention additionally include the complement of any of the polynucleotides recited above. The polynucleotide can be DNA (genomic, cDNA, amplified, or synthetic) or RNA. Methods and algorithms for obtaining such polynucleotides are well known to those of skill in the art and can include, for example, methods for determining hybridization conditions that can routinely isolate polynucleotides of the desired sequence identities.

[0083] In accordance with the invention, polynucleotide sequences comprising the mature protein coding sequences corresponding to any one of SEQ ID NO: 1-30368, or functional equivalents thereof, may be used to generate recombinant DNA molecules that direct the expression of that nucleic acid, or a functional equivalent thereof, in appropriate host cells. Also included are the cDNA inserts of any of the clones identified herein.

[0084] A polynucleotide according to the invention can be joined to any of a variety of other nucleotide sequences by well-established recombinant DNA techniques (see Sambrook J et al. (1989) Molecular Cloning: A Laboratory Manual, Cold Spring Harbor Laboratory, NY). Useful nucleotide sequences for joining to polynucleotides include an assortment of vectors, e.g., plasmids, cosmids, lambda phage derivatives, phagemids, and the like, that are well known in the art. Accordingly, the invention also provides a vector including a polynucleotide of the invention and a host cell containing the polynucleotide. In general, the vector contains an origin of replication functional in at least one organism, convenient restriction endonuclease sites, and a selectable marker for the host cell. Vectors according to the invention include expression vectors, replication vectors, probe generation vectors, and sequencing vectors. A host cell according to the invention can be a prokaryotic or eukaryotic cell and can be a unicellular organism or part of a multicellular organism.

[0085] The present invention further provides recombinant constructs comprising a nucleic acid having any of the nucleotide sequences of SEQ ID NO: 1-30368 or a fragment thereof or any other polynucleotides of the invention. In one embodiment, the recombinant constructs of the present invention comprise a vector, such as a plasmid or viral vector, into which a nucleic acid having any of the nucleotide sequences of SEQ ID NO: 1-30368 or a fragment thereof is inserted, in a forward or reverse orientation. In the case of a vector comprising one of the ORFs of the present invention, the vector may further comprise regulatory sequences, including for example, a promoter, operably linked to the ORF. Large numbers of suitable vectors and promoters are known to those of skill in the art and are commercially available for generating the recombinant constructs of the present invention. The following vectors are provided by way of example. Bacterial: pBs, phagescript, PsiX174, pBluescript SK, pBs KS, pNH8a, pNH16a, pNH18a, pNH46a (Stratagene); pTrc99A, pKK223-3, pKK233-3, pDR540, pRIT5 (Pharmacia). Eukaryotic: pWLneo, pSV2cat, pOG44, PXTI, pSG (Stratagene) pSVK3, pBPV, pMSG, pSVL (Pharmacia).

[0086] The isolated polynucleotide of the invention may be operably linked to an expression control sequence such as the pMT2 or pED expression vectors disclosed in Kaufman et al., Nucleic Acids Res. 19, 44854490 (1991), in order to produce the protein recombinantly. Many suitable expression control sequences are known in the art. General methods of expressing recombinant proteins are also known and are exemplified in R. Kaufman, Methods in Enzymology 185, 537-566 (1990). As defined herein “operably linked” means that the isolated polynucleotide of the invention and an expression control sequence are situated within a vector or cell in such a way that the protein is expressed by a host cell which has been transformed (transfected) with the ligated polynucleotide/expression control sequence.

[0087] Promoter regions can be selected from any desired gene using CAT (chloramphenicol transferase) vectors or other vectors with selectable markers. Two appropriate vectors are pKK232-8 and pCM7. Particular named bacterial promoters include lacI, lacZ, T3, T7, gpt, lambda PR, and trc. Eukaryotic promoters include CMV immediate early, HSV thymidine kinase, early and late SV40, LTRs from retrovirus, and mouse metallothionein-I. Selection of the appropriate vector and promoter is well within the level of ordinary skill in the art. Generally, recombinant expression vectors will include origins of replication and selectable markers permitting transformation of the host cell, e.g., the ampicillin resistance gene of E. coli and S. cerevisiae TP1gene, and a promoter derived from a highly-expressed gene to direct transcription of a downstream structural sequence. Such promoters can be derived from operons encoding glycolytic enzymes such as 3-phosphoglycerate kinase (PGK), a-factor, acid phosphatase, or heat shock proteins, among others. The heterologous structural sequence is assembled in appropriate phase with translation initiation and termination sequences, and preferably, a leader sequence capable of directing secretion of translated protein into the periplasmic space or extracellular medium. Optionally, the heterologous sequence can encode a fusion protein including an amino terminal identification peptide imparting desired characteristics, e.g., stabilization or simplified purification of expressed recombinant product. Useful expression vectors for bacterial use are constructed by inserting a structural DNA sequence encoding a desired protein together with suitable translation initiation and termination signals in operable reading phase with a functional promoter. The vector will comprise one or more phenotypic selectable markers and an origin of replication to ensure maintenance of the vector and to, if desirable, provide amplification within the host. Suitable prokaryotic hosts for transformation include E. coli, Bacillus subtilis, Salmonella typhimurium and various species within the genera Pseudomonas, Streptomyces, and Staphylococcus, although others may also be employed as a matter of choice.

[0088] As a representative but non-limiting example, useful expression vectors for bacterial use can comprise a selectable marker and bacterial origin of replication derived from commercially available plasmids comprising genetic elements of the well known cloning vector pBR322 (ATCC 37017). Such commercial vectors include, for example, pKK223-3 (Pharmacia Fine Chemicals, Uppsala, Sweden) and GEM 1 (Promega Biotech, Madison, Wis., USA). These pBR322 “backbone” sections are combined with an appropriate promoter and the structural sequence to be expressed. Following transformation of a suitable host strain and growth of the host strain to an appropriate cell density, the selected promoter is induced or derepressed by appropriate means (e.g., temperature shift or chemical induction) and cells are cultured for an additional period. Cells are typically harvested by centrifugation, disrupted by physical or chemical means, and the resulting crude extract retained for further purification.

[0089] Polynucleotides of the invention can also be used to induce immune responses. For example, as described in Fan et al, Nat. Biotech. 17:870-872 (1999), incorporated herein by reference, nucleic acid sequences encoding a polypeptide may be used to generate antibodies against the encoded polypeptide following topical administration of naked plasmid DNA or following injection, and preferably intramuscular injection of the DNA. The nucleic acid sequences are preferably inserted in a recombinant expression vector and may be in the form of naked DNA.

[0090] 4.3 Antisense

[0091] Another aspect of the invention pertains to isolated antisense nucleic acid molecules that are hybridizable to or complementary to the nucleic acid molecule comprising the nucleotide sequence of SEQ ID NO: 1-30368, or fragments, analogs or derivatives thereof. An “antisense” nucleic acid comprises a nucleotide sequence that is complementary to a “sense” nucleic acid encoding a protein, e.g., complementary to the coding strand of a double-stranded cDNA molecule or complementary to an mRNA sequence. In specific aspects, antisense nucleic acid molecules are provided that comprise a sequence complementary to at least about 10, 25, 50, 100, 250 or 500 nucleotides or an entire coding strand, or to only a portion thereof. Nucleic acid molecules encoding fragments, homologs, derivatives and analogs of a protein of any of SEQ ID NO: 30369-60736 or antisense nucleic acids complementary to a nucleic acid sequence of SEQ ID NO: 1-30368 are additionally provided.

[0092] In one embodiment, an antisense nucleic acid molecule is antisense to a “coding region” of the coding strand of a nucleotide sequence of the invention. The term “coding region” refers to the region of the nucleotide sequence comprising codons which are translated into amino acid residues. In another embodiment, the antisense nucleic acid molecule is antisense to a “noncoding region” of the coding strand of a nucleotide sequence of the invention. The term “noncoding region” refers to 5′ and 3′ sequences which flank the coding region that are not translated into amino acids (i.e., also referred to as 5′ and 3′ untranslated regions).

[0093] Given the coding strand sequences encoding a nucleic acid disclosed herein (e.g., SEQ ID NO: 1-30368), antisense nucleic acids of the invention can be designed according to the rules of Watson and Crick or Hoogsteen base pairing. The antisense nucleic acid molecule can be complementary to the entire coding region of a mRNA, but more preferably is an oligonucleotide that is antisense to only a portion of the coding or noncoding region of a mRNA. For example, the antisense oligonucleotide can be complementary to the region surrounding the translation start site of a mRNA. An antisense oligonucleotide can be, for example, about 5, 10, 15, 20, 25, 30, 35, 40, 45 or 50 nucleotides in length. An antisense nucleic acid of the invention can be constructed using chemical synthesis or enzymatic ligation reactions using procedures known in the art. For example, an antisense nucleic acid (e.g., an antisense oligonucleotide) can be chemically synthesized using naturally occurring nucleotides or variously modified nucleotides designed to increase the biological stability of the molecules or to increase the physical stability of the duplex formed between the antisense and sense nucleic acids, e.g., phosphorothioate derivatives and acridine substituted nucleotides can be used.

[0094] Examples of modified nucleotides that can be used to generate the antisense nucleic acid include: 5-fluorouracil, 5-bromouracil, 5-chlorouracil, 5-iodouracil, hypoxanthine, xanthine, 4-acetylcytosine, 5-(carboxyhydroxylmethyl) uracil, 5-carboxymethylaminomethyl-2-thiouridine, 5-carboxymethylaminomethyluracil, dihydrouracil, beta-D-galactosylqueosine, inosine, N6-isopentenyladenine, 1-methylguanine, 1-methylinosine, 2,2-dimethylguanine, 2-methyladenine, 2-methylguanine, 3-methylcytosine, 5-methylcytosine, N6-adenine, 7-methylguanine, 5-methylaminomethyluracil, 5-methoxyaminomethyl-2-thiouracil, beta-D-mannosylqueosine, 5′-methoxycarboxymethyluracil, 5-methoxyuracil, 2-methylthio-N-6-isopentenyladenine, uracil-5-oxyacetic acid (v), wybutoxosine, pseudouracil, queosine, 2-thiocytosine, 5-methyl-2-thiouracil, 2-thiouracil, 4-thiouracil, 5-methyluracil, uracil-5-oxyacetic acid methylester, uracil-5-oxyacetic acid (v), 5-methyl-2-thiouracil, 3-(3-amino-3-N-2-carboxypropyl) uracil, (acp3)w, and 2,6-diaminopurine. Alternatively, the antisense nucleic acid can be produced biologically using an expression vector into which a nucleic acid has been subcloned in an antisense orientation (i.e., RNA transcribed from the inserted nucleic acid will be of an antisense orientation to a target nucleic acid of interest, described further in the following subsection).

[0095] The antisense nucleic acid molecules of the invention are typically administered to a subject or generated in situ such that they hybridize with or bind to cellular mRNA and/or genomic DNA encoding a protein according to the invention to thereby inhibit expression of the protein, e.g., by inhibiting transcription and/or translation. The hybridization can be by conventional nucleotide complementarity to form a stable duplex, or, for example, in the case of an antisense nucleic acid molecule that binds to DNA duplexes, through specific interactions in the major groove of the double helix. An example of a route of administration of antisense nucleic acid molecules of the invention includes direct injection at a tissue site. Alternatively, antisense nucleic acid molecules can be modified to target selected cells and then administered systemically. For example, for systemic administration, antisense molecules can be modified such that they specifically bind to receptors or antigens expressed on a selected cell surface, e.g., by linking the antisense nucleic acid molecules to peptides or antibodies that bind to cell surface receptors or antigens. The antisense nucleic acid molecules can also be delivered to cells using the vectors described herein. To achieve sufficient intracellular concentrations of antisense molecules, vector constructs in which the antisense nucleic acid molecule is placed under the control of a strong pol II or pol III promoter are preferred.

[0096] In yet another embodiment, the antisense nucleic acid molecule of the invention is an-anomeric nucleic acid molecule. An-anomeric nucleic acid molecule forms specific double-stranded hybrids with complementary RNA in which, contrary to the usual-units, the strands run parallel to each other (Gaultier et al. (1987) Nucleic Acids Res 15: 6625-6641). The antisense nucleic acid molecule can also comprise a 2′-o-methylribonucleotide (Inoue et al. (1987) Nucleic Acids Res 15: 6131-6148) or a chimeric RNA-DNA analogue (Inoue et al. (1987) FEBS Lett 215: 327-330).

[0097] 4.4 Ribozymes and PNA Moieties

[0098] In still another embodiment, an antisense nucleic acid of the invention is a ribozyme. Ribozymes are catalytic RNA molecules with ribonuclease activity that are capable of cleaving a single-stranded nucleic acid, such as a mRNA, to which they have a complementary region. Thus, ribozymes (e.g., hammerhead ribozymes (described in Haselhoff and Gerlach (1988) Nature 334:585-591)) can be used to catalytically cleave a mRNA transcripts to thereby inhibit translation of a mRNA. A ribozyme having specificity for a nucleic acid of the invention can be designed based upon the nucleotide sequence of a DNA disclosed herein (i.e., SEQ ID NO: 1-30368). For example, a derivative of a Tetrahymena L-19 IVS RNA can be constructed in which the nucleotide sequence of the active site is complementary to the nucleotide sequence to be cleaved in an mRNA of SEQ ID NO: 1-30368 (see, e.g., Cech et al. U.S. Pat. No. 4,987,071; and Cech et al. U.S. Pat. No. 5,116,742). Alternatively, polynucleotides of the invention can be used to select a catalytic RNA having a specific ribonuclease activity from a pool of RNA molecules. See, e.g., Bartel et al., (1993) Science 261:1411-1418.

[0099] Alternatively, gene expression can be inhibited by targeting nucleotide sequences complementary to the regulatory region (e.g., promoter and/or enhancers) to form triple helical structures that prevent transcription of the gene in target cells. See generally, Helene. (1991) Anticancer Drug Des. 6: 569-84; Helene. et al. (1992) Ann. N.Y. Acad. Sci. 660:27-36; and Maher (1992) Bioassays 14: 807-15.

[0100] In various embodiments, the nucleic acids of the invention can be modified at the base moiety, sugar moiety or phosphate backbone to improve, e.g., the stability, hybridization, or solubility of the molecule. For example, the deoxyribose phosphate backbone of the nucleic acids can be modified to generate peptide nucleic acids (see Hyrup et al. (1996) Bioorg Med Chem 4: 5-23). As used herein, the terms “peptide nucleic acids” or “PNAs” refer to nucleic acid mimics, e.g., DNA mimics, in which the deoxyribose phosphate backbone is replaced by a pseudopeptide backbone and only the four natural nucleobases are retained. The neutral backbone of PNAs has been shown to allow for specific hybridization to DNA and RNA under conditions of low ionic strength. The synthesis of PNA oligomers can be performed using standard solid phase peptide synthesis protocols as described in Hyrup et al. (1996) above; Perry-O'Keefe et al. (1996) PNAS 93: 14670-675.

[0101] PNAs of the invention can be used in therapeutic and diagnostic applications. For example, PNAs can be used as antisense or antigene agents for sequence-specific modulation of gene expression by, e.g., inducing transcription or translation arrest or inhibiting replication. PNAs of the invention can also be used, e.g., in the analysis of single base pair mutations in a gene by, e.g., PNA directed PCR clamping; as artificial restriction enzymnes when used in combination with other enzymes, e.g., S1 nucleases (Hyrup B. (1996) above); or as probes or primers for DNA sequence and hybridization (Hyrup et al. (1996), above; Perry-OKeefe (1996), above).

[0102] In another embodiment, PNAs of the invention can be modified, e.g., to enhance their stability or cellular uptake, by attaching lipophilic or other helper groups to PNA, by the formation of PNA-DNA chimeras, or by the use of liposomes or other techniques of drug delivery known in the art. For example, PNA-DNA chimeras can be generated that may combine the advantageous properties of PNA and DNA. Such chimeras allow DNA recognition enzymes, e.g., RNase H and DNA polymerases, to interact with the DNA portion while the PNA portion would provide high binding affinity and specificity. PNA-DNA chimeras can be linked using linkers of appropriate lengths selected in terms of base stacking, number of bonds between the nucleobases, and orientation (Hyrup (1996) above). The synthesis of PNA-DNA chimeras can be performed as described in Hyrup (1996) above and Finn et al. (1996) Nucl Acids Res 24: 3357-63. For example, a DNA chain can be synthesized on a solid support using standard phosphoramidite coupling chemistry, and modified nucleoside analogs, e.g., 5′-(4-methoxytrityl)amino-5′-deoxy-thymidine phosphoramidite, can be used between the PNA and the 5′ end of DNA (Mag et al. (1989) Nucl Acid Res 17: 5973-88). PNA monomers are then coupled in a stepwise manner to produce a chimeric molecule with a 5′ PNA segment and a 3′ DNA segment (Finn et al. (1996) above). Alternatively, chimeric molecules can be synthesized with a 5′ DNA segment and a 3′ PNA segment. See, Petersen et al. (1975) Bioorg Med Chem Lett 5: 1119-11124.

[0103] In other embodiments, the oligonucleotide may include other appended groups such as peptides (e.g., for targeting host cell receptors in vivo), or agents facilitating transport across the cell membrane (see, e.g., Letsinger et al., 1989, Proc. Natl. Acad. Sci. U.S.A. 86:6553-6556; Lemaitre et al., 1987, Proc. Natl. Acad. Sci. 84:648-652; PCT Publication No. WO88/09810) or the blood-brain barrier (see, e.g., PCT Publication No. WO89/10134). In addition, oligonucleotides can be modified with hybridization triggered cleavage agents (See, e.g., Krol et al., 1988, BioTechniques 6:958-976) or intercalating agents (see, e.g., Zon, 1988, Pharm. Res. 5:539-549). To this end, the oligonucleotide may be conjugated to another molecule, e.g., a peptide, a hybridization triggered cross-linking agent, a transport agent, a hybridization-triggered cleavage agent, etc.

[0104] 4.5 Hosts

[0105] The present invention further provides host cells genetically engineered to contain the polynucleotides of the invention. For example, such host cells may contain nucleic acids of the invention introduced into the host cell using known transformation, transfection or infection methods. The present invention still further provides host cells genetically engineered to express the polynucleotides of the invention, wherein such polynucleotides are in operative association with a regulatory sequence heterologous to the host cell which drives expression of the polynucleotides in the cell.

[0106] Knowledge of nucleic acid sequences allows for modification of cells to permit, or increase, expression of endogenous polypeptide. Cells can be modified (e.g., by homologous recombination) to provide increased polypeptide expression by replacing, in whole or in part, the naturally occurring promoter with all or part of a heterologous promoter so that the cells express the polypeptide at higher levels. The heterologous promoter is inserted in such a manner that it is operatively linked to the encoding sequences. See, for example, PCT International Publication No. WO94/12650, PCT International Publication No. WO92/20808, and PCT International Publication No. WO91/09955. It is also contemplated that, in addition to heterologous promoter DNA, amplifiable marker DNA (e.g., ada, dhfr, and the multifunctional CAD gene which encodes carbamyl phosphate synthase, aspartate transcarbamylase, and dihydroorotase) and/or intron DNA may be inserted along with the heterologous promoter DNA. If linked to the coding sequence, amplification of the marker DNA by standard selection methods results in co-amplification of the desired protein coding sequences in the cells.

[0107] The host cell can be a higher eukaryotic host cell, such as a mammalian cell, a lower eukaryotic host cell, such as a yeast cell, or the host cell can be a prokaryotic cell, such as a bacterial cell. Introduction of the recombinant construct into the host cell can be effected by calcium phosphate transfection, DEAE, dextran mediated transfection, or electroporation (Davis, L. et al., Basic Methods in Molecular Biology (1986)). The host cells containing one of the polynucleotides of the invention, can be used in conventional manners to produce the gene product encoded by the isolated fragment (in the case of an ORF) or can be used to produce a heterologous protein under the control of the EMF.

[0108] Any host/vector system can be used to express one or more of the ORFs of the present invention. These include, but are not limited to, eukaryotic hosts such as HeLa cells, Cv-1 cell, COS cells, 293 cells, and Sf9 cells, as well as prokaryotic host such as E. coli and B. subtilis. The most preferred cells are those which do not normally express the particular polypeptide or protein or which expresses the polypeptide or protein at low natural level. Mature proteins can be expressed in mammalian cells, yeast, bacteria, or other cells under the control of appropriate promoters. Cell-free translation systems can also be employed to produce such proteins using RNAs derived from the DNA constructs of the present invention. Appropriate cloning and expression vectors for use with prokaryotic and eukaryotic hosts are described by Sambrook, et al., in Molecular Cloning: A Laboratory Manual, Second Edition, Cold Spring Harbor, N.Y. (1989), the disclosure of which is hereby incorporated by reference.

[0109] Various mammalian cell culture systems can also be employed to express recombinant protein. Examples of mammalian expression systems include the COS-7 lines of monkey kidney fibroblasts, described by Gluzman, Cell 23:175 (1981). Other cell lines capable of expressing a compatible vector are, for example, the C127, monkey COS cells, Chinese Hamster Ovary (CHO) cells, human kidney 293 cells, human epidermal A431 cells, human Colo205 cells, 3T3 cells, CV-1 cells, other transformed primate cell lines, normal diploid cells, cell strains derived from in vitro culture of primary tissue, primary explants, HeLa cells, mouse L cells, BHK, HL-60, U937, HaK or Jurkat cells. Mammalian expression vectors will comprise an origin of replication, a suitable promoter and also any necessary ribosome binding sites, polyadenylation site, splice donor and acceptor sites, transcriptional termination sequences, and 5′ flanking nontranscribed sequences. DNA sequences derived from the SV40 viral genome, for example, SV40 origin, early promoter, enhancer, splice, and polyadenylation sites may be used to provide the required nontranscribed genetic elements. Recombinant polypeptides and proteins produced in bacterial culture are usually isolated by initial extraction from cell pellets, followed by one or more salting-out, aqueous ion exchange or size exclusion chromatography steps. Protein refolding steps can be used, as necessary, in completing configuration of the mature protein. Finally, high performance liquid chromatography (HPLC) can be employed for final purification steps. Microbial cells employed in expression of proteins can be disrupted by any convenient method, including freeze-thaw cycling, sonication, mechanical disruption, or use of cell lysing agents.

[0110] Alternatively, it may be possible to produce the protein in lower eukaryotes such as yeast or insects or in prokaryotes such as bacteria. Potentially suitable yeast strains include Saccharomyces cerevisiae, Schizosaccharomyces pombe, Kluyveromyces strains, Candida, or any yeast strain capable of expressing heterologous proteins. Potentially suitable bacterial strains include Escherichia coli, Bacillus subtilis, Salmonella typhimurium, or any bacterial strain capable of expressing heterologous proteins. If the protein is made in yeast or bacteria, it may be necessary to modify the protein produced therein, for example by phosphorylation or glycosylation of the appropriate sites, in order to obtain the functional protein. Such covalent attachments may be accomplished using known chemical or enzymatic methods.

[0111] In another embodiment of the present invention, cells and tissues may be engineered to express an endogenous gene comprising the polynucleotides of the invention under the control of inducible regulatory elements, in which case the regulatory sequences of the endogenous gene may be replaced by homologous recombination. As described herein, gene targeting can be used to replace a gene's existing regulatory region with a regulatory sequence isolated from a different gene or a novel regulatory sequence synthesized by genetic engineering methods. Such regulatory sequences may be comprised of promoters, enhancers, scaffold-attachment regions, negative regulatory elements, transcriptional initiation sites, regulatory protein binding sites or combinations of said sequences. Alternatively, sequences which affect the structure or stability of the RNA or protein produced may be replaced, removed, added, or otherwise modified by targeting. These sequence include polyadenylation signals, mRNA stability elements, splice sites, leader sequences for enhancing or modifying transport or secretion properties of the protein, or other sequences which alter or improve the function or stability of protein or RNA molecules.

[0112] The targeting event may be a simple insertion of the regulatory sequence, placing the gene under the control of the new regulatory sequence, e.g., inserting a new promoter or enhancer or both upstream of a gene. Alternatively, the targeting event may be a simple deletion of a regulatory element, such as the deletion of a tissue-specific negative regulatory element. Alternatively, the targeting event may replace an existing element; for example, a tissue-specific enhancer can be replaced by an enhancer that has broader or different cell-type specificity than the naturally occurring elements. Here, the naturally occurring sequences are deleted and new sequences are added. In all cases, the identification of the targeting event may be facilitated by the use of one or more selectable marker genes that are contiguous with the targeting DNA, allowing for the selection of cells in which the exogenous DNA has integrated into the host cell genome. The identification of the targeting event may also be facilitated by the use of one or more marker genes exhibiting the property of negative, selection, such that the negatively selectable marker is linked to the exogenous DNA, but configured such that the negatively selectable marker flanks the targeting sequence, and such that a correct homologous recombination event with sequences in the host cell genome does not result in the stable integration of the negatively selectable marker. Markers useful for this purpose include the Herpes Simplex Virus thymidine kinase (TK) gene or the bacterial xanthine-guanine phosphoribosyl-transferase (gpt) gene.

[0113] The gene targeting or gene activation techniques which can be used in accordance with this aspect of the invention are more particularly described in U.S. Pat. No. 5,272,071 to Chappel; U.S. Pat. No. 5,578,461 to Sherwin et al.; International Application No. PCT/US92/09627 (WO93/09222) by Selden et al.; and International Application No. PCT/US90/06436 (WO91/06667) by Skoultchi et al., each of which is incorporated by reference herein in its entirety.

[0114] 4.6 Polypeptides of the Invention

[0115] The isolated polypeptides of the invention include, but are not limited to, a polypeptide comprising: the amino acid sequences set forth as any one of SEQ ID NO: 30369-60736 or an amino acid sequence encoded by any one of the nucleotide sequences SEQ ID NO: 1-30368 or the corresponding full length or mature protein. Polypeptides of the invention also include polypeptides preferably with biological or immunological activity that are encoded by: (a) a polynucleotide having any one of the nucleotide sequences set forth in SEQ ID NO: 1-30368 or (b) polynucleotides encoding any one of the amino acid sequences set forth as SEQ ID NO: 30369-60736 or (c) polynucleotides that hybridize to the complement of the polynucleotides of either (a) or (b) under stringent hybridization conditions. The invention also provides biologically active or immunologically active variants of any of the amino acid sequences set forth as SEQ ID NO: 30369-60736 or the corresponding full length or mature protein; and “substantial equivalents” thereof (e.g., with at least about 65%, at least about 70%, at least about 75%, at least about 80%, at least about 85%, 86%, 87%, 88%, 89%, at least about 90%, 91%, 92%, 93%, 94%, typically at least about 95%, 96%, 97%, more typically at least about 98%, or most typically at least about 99% amino acid identity) that retain biological activity. Polypeptides encoded by allelic variants may have a similar, increased, or decreased activity compared to polypeptides comprising SEQ ID NO: 30369-60736.

[0116] Fragments of the proteins of the present invention which are capable of exhibiting biological activity are also encompassed by the present invention. Fragments of the protein may be in linear form or they may be cyclized using known methods, for example, as described in H. U. Saragovi, et al., Bio/Technology 10, 773-778 (1992) and in R. S. McDowell, et al., J. Amer. Chem. Soc. 114, 9245-9253 (1992), both of which are incorporated herein by reference. Such fragments may be fused to carrier molecules such as immunoglobulins for many purposes, including increasing the valency of protein binding sites.

[0117] The present invention also provides both full-length and mature forms (for example, without a signal sequence or precursor sequence) of the disclosed proteins. The protein coding sequence is identified in the sequence listing by translation of the disclosed nucleotide sequences. The mature form of such protein may be obtained by expression of a full-length polynucleotide in a suitable mammalian cell or other host cell. The sequence of the mature form of the protein is also determinable from the amino acid sequence of the full-length form. Where proteins of the present invention are membrane bound, soluble forms of the proteins are also provided. In such forms, part or all of the regions causing the proteins to be membrane bound are deleted so that the proteins are fully secreted from the cell in which they are expressed.

[0118] Protein compositions of the present invention may further comprise an acceptable carrier, such as a hydrophilic, e.g., pharmaceutically acceptable, carrier.

[0119] The present invention further provides isolated polypeptides encoded by the nucleic acid fragments of the present invention or by degenerate variants of the nucleic acid fragments of the present invention. By “degenerate variant” is intended nucleotide fragments which differ from a nucleic acid fragment of the present invention (e.g., an ORF) by nucleotide sequence but, due to the degeneracy of the genetic code, encode an identical polypeptide sequence. Preferred nucleic acid fragments of the present invention are the ORFs that encode proteins.

[0120] A variety of methodologies known in the art can be utilized to obtain any one of the isolated polypeptides or proteins of the present invention. At the simplest level, the amino acid sequence can be synthesized using commercially available peptide synthesizers. The synthetically-constructed protein sequences, by virtue of sharing primary, secondary or tertiary structural and/or conformational characteristics with proteins may possess biological properties in common therewith, including protein activity. This technique is particularly useful in producing small peptides and fragments of larger polypeptides. Fragments are useful, for example, in generating antibodies against the native polypeptide. Thus, they may be employed as biologically active or immunological substitutes for natural, purified proteins in screening of therapeutic compounds and in immunological processes for the development of antibodies.

[0121] The polypeptides and proteins of the present invention can alternatively be purified from cells which have been altered to express the desired polypeptide or protein. As used herein, a cell is said to be altered to express a desired polypeptide or protein when the cell, through genetic manipulation, is made to produce a polypeptide or protein which it normally does not produce or which the cell normally produces at a lower level. One skilled in the art can readily adapt procedures for introducing and expressing either recombinant or synthetic sequences into eukaryotic or prokaryotic cells in order to generate a cell which produces one of the polypeptides or proteins of the present invention.

[0122] The invention also relates to methods for producing a polypeptide comprising growing a culture of host cells of the invention in a suitable culture medium, and purifying the protein from the cells or the culture in which the cells are grown. For example, the methods of the invention include a process for producing a polypeptide in which a host cell containing a suitable expression vector that includes a polynucleotide of the invention is cultured under conditions that allow expression of the encoded polypeptide. The polypeptide can be recovered from the culture, conveniently from the culture medium, or from a lysate prepared from the host cells and further purified. Preferred embodiments include those in which the protein produced by such process is a full length or mature form of the protein.

[0123] In an alternative method, the polypeptide or protein is purified from bacterial cells which naturally produce the polypeptide or protein. One skilled in the art can readily follow known methods for isolating polypeptides and proteins in order to obtain one of the isolated polypeptides or proteins of the present invention. These include, but are not limited to, immunochromatography, HPLC, size-exclusion chromatography, ion-exchange chromatography, and immuno-affinity chromatography. See, e.g., Scopes, Protein Purification: Principles and Practice, Springer-Verlag (1994); Sambrook, et al., in Molecular Cloning: A Laboratory Manual; Ausubel et al., Current Protocols in Molecular Biology. Polypeptide fragments that retain biological/immunological activity include fragments comprising greater than about 100 amino acids, or greater than about 200 amino acids, and fragments that encode specific protein domains.

[0124] The purified polypeptides can be used in in vitro binding assays which are well known in the art to identify molecules which bind to the polypeptides. These molecules include but are not limited to, for e.g., small molecules, molecules from combinatorial libraries, antibodies or other proteins. The molecules identified in the binding assay are then tested for antagonist or agonist activity in in vivo tissue culture or animal models that are well known in the art. In brief, the molecules are titrated into a plurality of cell cultures or animals and then tested for either cell/animal death or prolonged survival of the animal/cells.

[0125] In addition, the peptides of the invention or molecules capable of binding to the peptides may be complexed with toxins, e.g., ricin or cholera, or with other compounds that are toxic to cells. The toxin-binding molecule complex is then targeted to a tumor or other cell by the specificity of the binding molecule for SEQ ID NO: 30369-60736.

[0126] The protein of the invention may also be expressed as a product of transgenic animals, e.g., as a component of the milk of transgenic cows, goats, pigs, or sheep which are characterized by somatic or germ cells containing a nucleotide sequence encoding the protein.

[0127] The proteins provided herein also include proteins characterized by amino acid sequences similar to those of purified proteins but into which modification are naturally provided or deliberately engineered. For example, modifications in the peptide or DNA sequence can be made by those skilled in the art using known techniques. Modifications of interest in the protein sequences may include the alteration, substitution, replacement, insertion or deletion of a selected amino acid residue in the coding sequence. For example, one or more of the cysteine residues may be deleted or replaced with another amino acid to alter the conformation of the molecule. Techniques for such alteration, substitution, replacement, insertion or deletion are well known to those skilled in the art (see, e.g., U.S. Pat. No. 4,518,584). Preferably, such alteration, substitution, replacement, insertion or deletion retains the desired activity of the protein. Regions of the protein that are important for the protein function can be determined by various methods known in the art including the alanine-scanning method which involved systematic substitution of single or strings of amino acids with alanine, followed by testing the resulting alanine-containing variant for biological activity. This type of analysis determines the importance of the substituted amino acid(s) in biological activity. Regions of the protein that are important for protein function may be determined by the eMATRIX program.

[0128] Other fragments and derivatives of the sequences of proteins which would be expected to retain protein activity in whole or in part and are useful for screening or other immunological methodologies may also be easily made by those skilled in the art given the disclosures herein. Such modifications are encompassed by the present invention.

[0129] The protein may also be produced by operably linking the isolated polynucleotide of the invention to suitable control sequences in one or more insect expression vectors, and employing an insect expression system. Materials and methods for baculovirus/insect cell expression systems are commercially available in kit form from, e.g., Invitrogen, San Diego, Calif., U.S.A. (the MaxBat™ kit), and such methods are well known in the art, as described in Summers and Smith, Texas Agricultural Experiment Station Bulletin No. 1555 (1987), incorporated herein by reference. As used herein, an insect cell capable of expressing a polynucleotide of the present invention is “transformed.”

[0130] The protein of the invention may be prepared by culturing transformed host cells under culture conditions suitable to express the recombinant protein. The resulting expressed protein may then be purified from such culture (i.e., from culture medium or cell extracts) using known purification processes, such as gel filtration and ion exchange chromatography. The purification of the protein may also include an affinity column containing agents which will bind to the protein; one or more column steps over such affinity resins as concanavalin A-agarose, heparin-toyopearl™ or Cibacrom blue 3GA Sepharose™; one or more steps involving hydrophobic interaction chromatography using such resins as phenyl ether, butyl ether, or propyl ether; or immunoaffinity chromatography.

[0131] Alternatively, the protein of the invention may also be expressed in a form that will facilitate purification. For example, it may be expressed as a fusion protein, such as those of maltose binding protein (MBP), glutathione-5-transferase (GST) or thioredoxin (TRX), or as a His-tag. Kits for expression and purification of such fusion proteins are commercially available from New England BioLab (Beverly, Mass.), Pharmacia (Piscataway, N.J.) and Invitrogen, respectively. The protein can also be tagged with an epitope and subsequently purified by using a specific antibody directed to such epitope. One such epitope (“FLAG®”) is commercially available from Kodak (New Haven, Conn.).

[0132] Finally, one or more reverse-phase high performance liquid chromatography (RP-HPLC) steps employing hydrophobic RP-HPLC media, e.g., silica gel having pendant methyl or other aliphatic groups, can be employed to further purify the protein. Some or all of the foregoing purification steps, in various combinations, can also be employed to provide a substantially homogeneous isolated recombinant protein. The protein thus purified is substantially free of other mammalian proteins and is defined in accordance with the present invention as an “isolated protein.”

[0133] The polypeptides of the invention include analogs (variants). This embraces fragments, as well as peptides in which one or more amino acids has been deleted, inserted, or substituted. Also, analogs of the polypeptides of the invention embrace fusions of the polypeptides or modifications of the polypeptides of the invention, wherein the polypeptide or analog is fused to another moiety or moieties, e.g., targeting moiety or another therapeutic agent. Such analogs may exhibit improved properties such as activity and/or stability. Examples of moieties which may be fused to the polypeptide or an analog include, for example, targeting moieties which provide for the delivery of polypeptide to pancreatic cells, e.g., antibodies to pancreatic cells, antibodies to immune cells such as T-cells, monocytes, dendritic cells, granulocytes, etc., as well as receptor and ligands expressed on pancreatic or immune cells. Other moieties which may be fused to the polypeptide include therapeutic agents which are used for treatment, for example, immunosuppressive drugs such as cyclosporin, SK506, azathioprine, CD3 antibodies and steroids. Also, polypeptides may be fused to immune modulators, and other cytokines such as alpha or beta interferon.

[0134] 4.6.1 Determining Polypeptide and Polynucleotide Identity and Similarity

[0135] Preferred identity and/or similarity are designed to give the largest match between the sequences tested. Methods to determine identity and similarity are codified in computer programs including, but are not limited to, the GCG program package, including GAP (Devereux, J., et al., Nucleic Acids Research 12(1):387 (1984); Genetics Computer Group, University of Wisconsin, Madison, Wis.), BLASTP, BLASTN, BLASTX, FASTA (Altschul, S. F. et al., J. Molec. Biol. 215:403410 (1990), PSI-BLAST (Altschul S. F. et al., Nucleic Acids Res. vol. 25, pp. 3389-3402, herein incorporated by reference), eMatrix software (Wu et al., J. Comp. Biol., Vol. 6, pp. 219-235 (1999), herein incorporated by reference), eMotif software (Nevill-Manning et al, ISMB-97, Vol. 4, pp. 202-209, herein incorporated by reference), pFam software (Sonnhammer et al., Nucleic Acids Res., Vol. 26(1), pp. 320-322 (1998), herein incorporated by reference) and the Kyte-Doolittle hydrophobocity prediction algorithm (J. Mol. Biol, 157, pp. 105-31 (1982), incorporated herein by reference). The BLAST programs are publicly available from the National Center for Biotechnology Information (NCBI) and other sources (BLAST Manual, Altschul, S., et al. NCB NLM NIH Bethesda, Md. 20894; Altschul, S., et al., J. Mol. Biol. 215:403-410 (1990).

4.7 Chimeric and Fusion Proteins

[0136] The invention also provides chimeric or fusion proteins. As used herein, a “chimeric protein” or “fusion protein” comprises a polypeptide of the invention operatively linked to another polypeptide. Within a fusion protein the polypeptide according to the invention can correspond to all or a portion of a protein according to the invention. In one embodiment, a fusion protein comprises at least one biologically active portion of a protein according to the invention. In another embodiment, a fusion protein comprises at least two biologically active portions of a protein according to the invention. Within the fusion protein, the term “operatively linked” is intended to indicate that the polypeptide according to the invention and the other polypeptide are fused in-frame to each other. The polypeptide can be fused to the N-terminus or C-terminus.

[0137] For example, in one embodiment a fusion protein comprises a polypeptide according to the invention operably linked to the extracellular domain of a second protein.

[0138] In another embodiment, the fusion protein is a GST-fusion protein in which the polypeptide sequences of the invention are fused to the C-terminus of the GST (i.e., glutathione S-transferase) sequences.

[0139] In another embodiment, the fusion protein is an immunoglobulin fusion protein in which the polypeptide sequences according to the invention comprises one or more domains are fused to sequences derived from a member of the immunoglobulin protein family. The immunoglobulin fusion proteins of the invention can be incorporated into pharmaceutical compositions and administered to a subject to inhibit an interaction between a ligand and a protein of the invention on the surface of a cell, to thereby suppress signal transduction in vivo. The immunoglobulin fusion proteins can be used to affect the bioavailability of a cognate ligand. Inhibition of the ligand/protein interaction may be useful therapeutically for both the treatment of proliferative and differentiative disorders, e,g., cancer as well as modulating (e.g. promoting or inhibiting) cell survival. Moreover, the immunoglobulin fusion proteins of the invention can be used as immunogens to produce antibodies in a subject, to purify ligands, and in screening assays to identify molecules that inhibit the interaction of a polypeptide of the invention with a ligand.

[0140] A chimeric or fusion protein of the invention can be produced by standard recombinant DNA techniques. For example, DNA fragments coding for the different polypeptide sequences are ligated together in-frame in accordance with conventional techniques, e.g., by employing blunt-ended or stagger-ended termini for ligation, restriction enzyme digestion to provide for appropriate termini, filling-in of cohesive ends as appropriate, alkaline phosphatase treatment to avoid undesirable joining, and enzymatic ligation. In another embodiment, the fusion gene can be synthesized by conventional techniques including automated DNA synthesizers. Alternatively, PCR amplification of gene fragments can be carried out using anchor primers that give rise to complementary overhangs between two consecutive gene fragments that can subsequently be annealed and reamplified to generate a chimeric gene sequence (see, for example, Ausubel et al. (eds.) CURRENT PROTOCOLS IN MOLECULAR BIOLOGY, John Wiley & Sons, 1992). Moreover, many expression vectors are commercially available that already encode a fusion moiety (e.g., a GST polypeptide). A nucleic acid encoding a polypeptide of the invention can be cloned into such an expression vector such that the fusion moiety is linked in-frame to the protein of the invention.

4.8 Gene Therapy

[0141] Mutations in the polynucleotides of the invention gene may result in loss of normal function of the encoded protein. The invention thus provides gene therapy to restore normal activity of the polypeptides of the invention; or to treat disease states involving polypeptides of the invention. Delivery of a functional gene encoding polypeptides of the invention to appropriate cells is effected ex vivo, in situ, or in vivo by use of vectors, and more particularly viral vectors (e.g., adenovirus, adeno-associated virus, or a retrovirus), or ex vivo by use of physical DNA transfer methods (e.g., liposomes or chemical treatments). See, for example, Anderson, Nature, supplement to vol. 392, no. 6679, pp. 25-20 (1998). For additional reviews of gene therapy technology see Friedmann, Science, 244: 1275-1281 (1989); Verma, Scientific American: 68-84 (1990); and Miller, Nature, 357: 455-460 (1992). Introduction of any one of the nucleotides of the present invention or a gene encoding the polypeptides of the present invention can also be accomplished with extrachromosomal substrates (transient expression) or artificial chromosomes (stable expression). Cells may also be cultured ex vivo in the presence of proteins of the present invention in order to proliferate or to produce a desired effect on or activity in such cells. Treated cells can then be introduced in vivo for therapeutic purposes. Alternatively, it is contemplated that in other human disease states, preventing the expression of or inhibiting the activity of polypeptides of the invention will be useful in treating the disease states. It is contemplated that antisense therapy or gene therapy could be applied to negatively regulate the expression of polypeptides of the invention.

[0142] Other methods inhibiting expression of a protein include the introduction of antisense molecules to the nucleic acids of the present invention, their complements, or their translated RNA sequences, by methods known in the art. Further, the polypeptides of the present invention can be inhibited by using targeted deletion methods, or the insertion of a negative regulatory element such as a silencer, which is tissue specific.

[0143] The present invention still further provides cells genetically engineered in vivo to express the polynucleotides of the invention, wherein such polynucleotides are in operative association with a regulatory sequence heterologous to the host cell which drives expression of the polynucleotides in the cell. These methods can be used to increase or decrease the expression of the polynucleotides of the present invention.

[0144] Knowledge of DNA sequences provided by the invention allows for modification of cells to permit, increase, or decrease, expression of endogenous polypeptide. Cells can be modified (e.g., by homologous recombination) to provide increased polypeptide expression by replacing, in whole or in part, the naturally occurring promoter with all or part of a heterologous promoter so that the cells express the protein at higher levels. The heterologous promoter is inserted in such a manner that it is operatively linked to the desired protein encoding sequences. See, for example, PCT International Publication No. WO 94/12650, PCT International Publication No. WO 92/20808, and PCT International Publication No. WO 91/09955. It is also contemplated that, in addition to heterologous promoter DNA, amplifiable marker DNA (e.g., ada, dhfr, and the multifunctional CAD gene which encodes carbamyl phosphate synthase, aspartate transcarbamylase, and dihydroorotase) and/or intron DNA may be inserted along with the heterologous promoter DNA. If linked to the desired protein coding sequence, amplification of the marker DNA by standard selection methods results in co-amplificationof the desired protein coding sequences in the cells.

[0145] In another embodiment of the present invention, cells and tissues may be engineered to express an endogenous gene comprising the polynucleotides of the invention under the control of inducible regulatory elements, in which case the regulatory sequences of the endogenous gene may be replaced by homologous recombination. As described herein, gene targeting can be used to replace a gene's existing regulatory region with a regulatory sequence isolated from a different gene or a novel regulatory sequence synthesized by genetic engineering methods. Such regulatory sequences may be comprised of promoters, enhancers, scaffold-attachment regions, negative regulatory elements, transcriptional initiation sites, regulatory protein binding sites or combinations of said sequences. Alternatively, sequences which affect the structure or stability of the RNA or protein produced may be replaced, removed, added, or otherwise modified by targeting. These sequences include polyadenylation signals, mRNA stability elements, splice sites, leader sequences for enhancing or modifying transport or secretion properties of the protein, or other sequences which alter or improve the function or stability of protein or RNA molecules.

[0146] The targeting event may be a simple insertion of the regulatory sequence, placing the gene under the control of the new regulatory sequence, e.g., inserting a new promoter or enhancer or both upstream of a gene. Alternatively, the targeting event may be a simple deletion of a regulatory element, such as the deletion of a tissue-specific negative regulatory element. Alternatively, the targeting event may replace an existing element; for example, a tissue-specific enhancer can be replaced by an enhancer that has broader or different cell-type specificity than the naturally occurring elements. Here, the naturally occurring sequences are deleted and new sequences are added. In all cases, the identification of the targeting event may be facilitated by the use of one or more selectable marker genes that are contiguous with the targeting DNA, allowing for the selection of cells in which the exogenous DNA has integrated into the cell genome. The identification of the targeting event may also be facilitated by the use of one or more marker genes exhibiting the property of negative selection, such that the negatively selectable marker is linked to the exogenous DNA, but configured such that the negatively selectable marker flanks the targeting sequence, and such that a correct homologous recombination event with sequences in the host cell genome does not result in the stable integration of the negatively selectable marker. Markers useful for this purpose include the Herpes Sinplex Virus thymidine kinase (TK) gene or the bacterial xanthine-guanine phosphonbosyl-transferase (gpt) gene.

[0147] The gene targeting or gene activation techniques which can be used in accordance with this aspect of the invention are more particularly described in U.S. Pat. No. 5,272,071 to Chappel; U.S. Pat. No. 5,578,461 to Sherwin et al.; International Application No. PCT/US92/09627 (WO93/09222) by Selden et al.; and International Application No. PCT/US90/06436 (WO91/06667) by Skoultchi et al., each of which is incorporated by reference herein in its entirety.

4.9 Transgenic Animals

[0148] In preferred methods to determine biological functions of the polypeptides of the invention in vivo, one or more genes provided by the invention are either over expressed or inactivated in the germ line of animals using homologous recombination [Capecchi, Science 244:1288-1292 (1989)]. Animals in which the gene is over expressed, under the regulatory control of exogenous or endogenous promoter elements, are known as transgenic animals. Animals in which an endogenous gene has been inactivated by homologous recombination are referred to as “knockout” animals. Knockout animals, preferably non-human mammals, can be prepared as described in U.S. Pat. No. 5,557,032, incorporated herein by reference. Transgenic animals are useful to determine the roles polypeptides of the invention play in biological processes, and preferably in disease states. Transgenic animals are useful as model systems to identify compounds that modulate lipid metabolism. Transgenic animals, preferably non-human mammals, are produced using methods as described in U.S. Pat. No. 5,489,743 and PCT Publication No. WO94/28122, incorporated herein by reference.

[0149] Transgenic animals can be prepared wherein all or part of a promoter of the polynucleotides of the invention is either activated or inactivated to alter the level of expression of the polypeptides of the invention. Inactivation can be carried out using homologous recombination methods described above. Activation can be achieved by supplementing or even replacing the homologous promoter to provide for increased protein expression. The homologous promoter can be supplemented by insertion of one or more heterologous enhancer elements known to confer promoter activation in a particular tissue.

[0150] The polynucleotides of the present invention also make possible the development, through, e.g., homologous recombination or knock out strategies, of animals that fail to express polypeptides of the invention or that express a variant polypeptide. Such animals are useful as models for studying the in vivo activities of polypeptide as well as for studying modulators of the polypeptides of the invention.

[0151] In preferred methods to determine biological functions of the polypeptides of the invention in vivo, one or more genes provided by the invention are either over expressed or inactivated in the germ line of animals using homologous recombination [Capecchi, Science 244:1288-1292 (1989)). Animals in which the gene is over expressed, under the regulatory control of exogenous or endogenous promoter elements, are known as transgenic animals. Animals in which an endogenous gene has been inactivated by homologous recombination are referred to as “knockout” animals. Knockout animals, preferably non-human mammals, can be prepared as described in U.S. Pat. No. 5,557,032, incorporated herein by reference. Transgenic animals are useful to determine the roles polypeptides of the invention play in biological processes, and preferably in disease states. Transgenic animals are useful as model systems to identify compounds that modulate lipid metabolism. Transgenic animals, preferably non-human mammals, are produced using methods as described in U.S. Pat. No. 5,489,743 and PCT Publication No. WO94/28122, incorporated herein by reference.

[0152] Transgenic animals can be prepared wherein all or part of the polynucleotides of the invention promoter is either activated or inactivated to alter the level of expression of the polypeptides of the invention. Inactivation can be carried out using homologous recombination methods described above. Activation can be achieved by supplementing or even replacing the homologous promoter to provide for increased protein expression. The homologous promoter can be supplemented by insertion of one or more heterologous enhancer elements known to confer promoter activation in a particular tissue.

[0153] 4.10 Uses and Biological Activity

[0154] The polynucleotides and proteins of the present invention are expected to exhibit one or more of the uses or biological activities (including those associated with assays cited herein) identified herein. Uses or activities described for proteins of the present invention may be provided by administration or use of such proteins or of polynucleotides encoding such proteins (such as, for example, in gene therapies or vectors suitable for introduction of DNA). The mechanism underlying the particular condition or pathology will dictate whether the polypeptides of the invention, the polynucleotides of the invention or modulators (activators or inhibitors) thereof would be beneficial to the subject in need of treatment. Thus, “therapeutic compositions of the invention” include compositions comprising isolated polynucleotides (including recombinant DNA molecules, cloned genes and degenerate variants thereof) or polypeptides of the invention (including full length protein, mature protein and truncations or domains thereof), or compounds and other substances that modulate the overall activity of the target gene products, either at the level of target gene/protein expression or target protein activity. Such modulators include polypeptides, analogs, (variants), including fragments and fusion proteins, antibodies and other binding proteins; chemical compounds that directly or indirectly activate or inhibit the polypeptides of the invention (identified, e.g., via drug screening assays as described herein); antisense polynucleotides and polynucleotides suitable for triple helix formation; and in particular antibodies or other binding partners that specifically recognize one or more epitopes of the polypeptides of the invention.

[0155] The polypeptides of the present invention may likewise be involved in cellular activation or in one of the other physiological pathways described herein.

[0156] 4.10.1 Research uses and Utilities

[0157] The polynucleotides provided by the present invention can be used by the research community for various purposes. The polynucleotides can be used to express recombinant protein for analysis, characterization or therapeutic use; as markers for tissues in which the corresponding protein is preferentially expressed (either constitutively or at a particular stage of tissue differentiation or development or in disease states); as molecular weight markers on gels; as chromosome markers or tags (when labeled) to identify chromosomes or to map related gene positions; to compare with endogenous DNA sequences in patients to identify potential genetic disorders; as probes to hybridize and thus discover novel, related DNA sequences; as a source of information to derive PCR primers for genetic fingerprinting; as a probe to “subtract-out” known sequences in the process of discovering other novel polynucleotides; for selecting and making oligomers for attachment to a “gene chip” or other support, including for examination of expression patterns; to raise anti-protein antibodies using DNA immunization techniques; and as an antigen to raise anti-DNA antibodies or elicit another immune response. Where the polynucleotide encodes a protein which binds or potentially binds to another protein (such as, for example, in a receptor-ligand interaction), the polynucleotide can also be used in interaction trap assays (such as, for example, that described in Gyuris et al., Cell 75:791-803 (1993)) to identify polynucleotides encoding the other protein with which binding occurs or to identify inhibitors of the binding interaction.

[0158] The polypeptides provided by the present invention can similarly be used in assays to determine biological activity, including in a panel of multiple proteins for high-throughput screening; to raise antibodies or to elicit another immune response; as a reagent (including the labeled reagent) in assays designed to quantitatively determine levels of the protein (or its receptor) in biological fluids; as markers for tissues in which the corresponding polypeptide is preferentially expressed (either constitutively or at a particular stage of tissue differentiation or development or in a disease state); and, of course, to isolate correlative receptors or ligands. Proteins involved in these binding interactions can also be used to screen for peptide or small molecule inhibitors or agonists of the binding interaction.

[0159] Any or all of these research utilities are capable of being developed into reagent grade or kit format for commercialization as research products.

[0160] Methods for performing the uses listed above are well known to those skilled in the art. References disclosing such methods include without limitation “Molecular Cloning: A Laboratory Manual”, 2d ed., Cold Spring Harbor Laboratory Press, Sambrook, J., E. F. Fritsch and T. Maniatis eds., 1989, and “Methods in Enzymology: Guide to Molecular Cloning Techniques”, Academic Press, Berger, S. L. and A. R. Kimmel eds., 1987.

[0161] 4.10.2 Nutritional Uses

[0162] Polynucleotides and polypeptides of the present invention can also be used as nutritional sources or supplements. Such uses include without limitation use as a protein or amino acid supplement, use as a carbon source, use as a nitrogen source and use as a source of carbohydrate. In such cases the polypeptide or polynucleotide of the invention can be added to the feed of a particular organism or can be administered as a separate solid or liquid preparation, such as in the form of powder, pills, solutions, suspensions or capsules. In the case of microorganisms, the polypeptide or polynucleotide of the invention can be added to the medium in or on which the microorganism is cultured.

[0163] 4.10.3 Cytokine and Cell Proliferation/Differentiation Activity

[0164] A polypeptide of the present invention may exhibit activity relating to cytokine, cell proliferation (either inducing or inhibiting) or cell differentiation (either inducing or inhibiting) activity or may induce production of other cytokines in certain cell populations. A polynucleotide of the invention can encode a polypeptide exhibiting such attributes. Many protein factors discovered to date, including all known cytokines, have exhibited activity in one or more factor-dependent cell proliferation assays, and hence the assays serve as a convenient confirmation of cytokine activity. The activity of therapeutic compositions of the present invention is evidenced by any one of a number of routine factor dependent cell proliferation assays for cell lines including, without limitation, 32D, DA2, DA1G, T10, B9, B9/11, BaF3, MC9/G, M+(preB M+), 2E8, RB5, DA1, 123, T1165, HT2, CTLL2, TF-1, Mo7e, CMK, HUVEC, and Caco. Therapeutic compositions of the invention can be used in the following:

[0165] Assays for T-cell or thymocyte proliferation include without limitation those described in: Current Protocols in Immunology, Ed by J. E. Coligan, A. M. Kruisbeek, D. H. Margulies, E. M. Shevach, W. Strober, Pub. Greene Publishing Associates and Wiley-Interscience (Chapter 3, In Vitro assays for Mouse Lymphocyte Function 3.1-3.19; Chapter 7, Immunologic studies in Humans); Takai et al., J. Immunol. 137:3494-3500, 1986; Bertagnolli et al., J. Immunol. 145:1706-1712, 1990; Bertagnolli et al., Cellular Immunology 133:327-341, 1991; Bertagnolli, et al., 1. Immunol. 149:3778-3783, 1992; Bowman et al., I. Immunol. 152:1756-1761, 1994.

[0166] Assays for cytokine production and/or proliferation of spleen cells, lymph node cells or thymocytes include, without limitation, those described in: Polyclonal T cell stimulation, Kruisbeek, A. M. and Shevach, E. M. In Current Protocols in Immunology. J. E. e.a. Coligan eds. Vol 1 pp. 3.12.1-3.12.14, John Wiley and Sons, Toronto. 1994; and Measurement of mouse and human interleukin-γ, Schreiber, R. D. In Current Protocols in Immunology. J. E. e.a Coligan eds. Vol 1 pp. 6.8.1-6.8.8, John Wiley and Sons, Toronto. 1994.

[0167] Assays for proliferation and differentiation of hematopoietic and lymphopoietic cells include, without limitation, those described in: Measurement of Human and Murine Interleukin 2 and Interleukin 4, Bottomly, K., Davis, L. S. and Lipsky, P. E. In Current Protocols in Immunology. J. E. e.a Coligan eds. Vol 1 pp. 6.3.1-6.3.12, John Wiley and Sons, Toronto. 1991; deVries et al., J. Exp. Med. 173:1205-1211, 1991; Moreau et al., Nature 336:690-692, 1988; Greenberger et al., Proc. Natl. Acad. Sci. U.S.A. 80:2931-2938, 1983; Measurement of mouse and human interleukin 6-Nordan, R. In Current Protocols in Immunology. J. E. Coligan eds. Vol 1 pp. 6.6.1-6.6.5, John Wiley and Sons, Toronto. 1991; Smith et al., Proc. Natl. Aced. Sci. U.S.A. 83:1857-1861, 1986; Measurement of human Interleukin 11—Bennett, F., Giannotti, J., Clark, S. C. and Turner, K. J. In Current Protocols in Immunology. J. E. Coligan eds. Vol 1 pp. 6.15.1 John Wiley and Sons, Toronto. 1991; Measurement of mouse and human Interleukin 9—Ciarletta, A., Giannotti, J., Clark, S. C. and Turner, K. J. In Current Protocols in Immunology. J. E. Coligan eds. Vol 1 pp. 6.13.1, John Wiley and Sons, Toronto. 1991.

[0168] Assays for T-cell clone responses to antigens (which will identify, among others, proteins that affect APC-T cell interactions as well as direct T-cell effects by measuring proliferation and cytokine production) include, without limitation, those described in: Current Protocols in Immunology, Ed by J. E. Coligan, A. M. Kruisbeek, D. H. Margulies, E. M. Shevach, W Strober, Pub. Greene Publishing Associates and Wiley-Interscience (Chapter 3, In Vitro assays for Mouse Lymphocyte Function; Chapter 6, Cytokines and their cellular receptors; Chapter 7, Immunologic studies in Humans); Weinberger et al., Proc. Natl. Acad. Sci. USA 77:6091-6095, 1980; Weinberger et al., Eur. J. Immun. 11:405-411, 1981; Takai et al., J. Immunol. 137:3494-3500, 1986; Takai et al., J. Immunol. 140:508-512, 1988.

[0169] 4.10.4 Stem Cell Growth Factor Activity

[0170] A polypeptide of the present invention may exhibit stem cell growth factor activity and be involved in the proliferation, differentiation and survival of pluripotent and totipotent stem cells including primordial germ cells, embryonic stem cells, hematopoietic stem cells and/or germ line stem cells. Administration of the polypeptide of the invention to stem cells in vivo or ex vivo is expected to maintain and expand cell populations in a totipotential or pluripotential state which would be useful for re-engineering damaged or diseased tissues, transplantation, manufacture of bio-pharmaceuticals and the development of bio-sensors. The ability to produce large quantities of human cells has important working applications for the production of human proteins which currently must be obtained from non-human sources or donors, implantation of cells to treat diseases such as Parkinson's, Alzheimer's and other neurodegenerative diseases; tissues for grafting such as bone marrow, skin, cartilage, tendons, bone, muscle (including cardiac muscle), blood vessels, cornea, neural cells, gastrointestinal cells and others; and organs for transplantation such as kidney, liver, pancreas (including islet cells), heart and lung.

[0171] It is contemplated that multiple different exogenous growth factors and/or cytokines may be administered in combination with the polypeptide of the invention to achieve the desired effect, including any of the growth factors listed herein, other stem cell maintenance factors, and specifically including stem cell factor (SCF), leukemia inhibitory factor (LIF), Flt-3 ligand (Flt-3L), any of the interleukins, recombinant soluble IL-6 receptor fused to IL-6, macrophage inflammatory protein 1-alpha (MIP-1-alpha), G-CSF, GM-CSF, thrombopoietin (TPO), platelet factor 4 (PF4), platelet-derived growth factor (PDGF), neural growth factors and basic fibroblast growth factor (bFGF).

[0172] Since totipotent stem cells can give rise to virtually any mature cell type, expansion of these cells in culture will facilitate the production of large quantities of mature cells. Techniques for culturing stem cells are known in the art and administration of polypeptides of the invention, optionally with other growth factors and/or cytokines, is expected to enhance the survival and proliferation of the stem cell populations. This can be accomplished by direct administration of the polypeptide of the invention to the culture medium. Alternatively, stroma cells transfected with a polynucleotide that encodes for the polypeptide of the invention can be used as a feeder layer for the stem cell populations in culture or in vivo. Stromal support cells for feeder layers may include embryonic bone marrow fibroblasts, bone marrow stromal cells, fetal liver cells, or cultured embryonic fibroblasts (see U.S. Pat. No. 5,690,926).

[0173] Stem cells themselves can be transfected with a polynucleotide of the invention to induce autocrine expression of the polypeptide of the invention. This will allow for generation of undifferentiated totipotential/pluripotential stem cell lines that are useful as is or that can then be differentiated into the desired mature cell types. These stable cell lines can also serve as a source of undifferentiated totipotential/pluripotential mRNA to create cDNA libraries and templates for polymerase chain reaction experiments. These studies would allow for the isolation and identification of differentially expressed genes in stem cell populations that regulate stem cell proliferation and/or maintenance.

[0174] Expansion and maintenance of totipotent stem cell populations will be useful in the treatment of many pathological conditions. For example, polypeptides of the present invention may be used to manipulate stem cells in culture to give rise to neuroepithelial cells that can be used to augment or replace cells damaged by illness, autoimmune disease, accidental damage or genetic disorders. The polypeptide of the invention may be useful for inducing the proliferation of neural cells and for the regeneration of nerve and brain tissue, i.e. for the treatment of central and peripheral nervous system diseases and neuropathies, as well as mechanical and traumatic disorders which involve degeneration, death or trauma to neural cells or nerve tissue. In addition, the expanded stem cell populations can also be genetically altered for gene therapy purposes and to decrease host rejection of replacement tissues after grafting or implantation.

[0175] Expression of the polypeptide of the invention and its effect on stem cells can also be manipulated to achieve controlled differentiation of the stem cells into more differentiated cell types. A broadly applicable method of obtaining pure populations of a specific differentiated cell type from undifferentiated stem cell populations involves the use of a cell-type specific promoter driving a selectable marker. The selectable marker allows only cells of the desired type to survive. For example, stem cells can be induced to differentiate into cardiomyocytes (Wobus et al., Differentiation, 48: 173-182, (1991); Klug et al., J. Clin. Invest., 98(1): 216-224, (1998)) or skeletal muscle cells (Browder, L. W. In: Principles of Tissue Engineering eds. Lanza et al., Academic Press (1997)). Alternatively, directed differentiation of stem cells can be accomplished by culturing the stem cells in the presence of a differentiation factor such as retinoic acid and an antagonist of the polypeptide of the invention which would inhibit the effects of endogenous stem cell factor activity and allow differentiation to proceed.

[0176] In vitro cultures of stem cells can be used to determine if the polypeptide of the invention exhibits stem cell growth factor activity. Stem cells are isolated from any one of various cell sources (including hematopoietic stem cells and embryonic stem cells) and cultured on a feeder layer, as described by Thompson et al. Proc. Natl. Acad. Sci, U.S.A., 92: 7844-7848 (1995), in the presence of the polypeptide of the invention alone or in combination with other growth factors or cytokines. The ability of the polypeptide of the invention to induce stem cells proliferation is determined by colony formation on semi-solid support e.g. as described by Bernstein et al., Blood, 77: 2316-2321 (1991).

[0177] 4.10.5 Hematopoiesis Regulating Activity

[0178] A polypeptide of the present invention may be involved in regulation of hematopoiesis and, consequently, in the treatment of myeloid or lymphoid cell disorders. Even marginal biological activity in support of colony forming cells or of factor-dependent cell lines indicates involvement in regulating hematopoiesis, e.g. in supporting the growth and proliferation of erythroid progenitor cells alone or in combination with other cytokines, thereby indicating utility, for example, in treating various anemias or for use in conjunction with irradiation/chemotherapy to stimulate the production of erythroid precursors and/or erythroid cells; in supporting the growth and proliferation of myeloid cells such as granulocytes and monocytes/macrophages (i.e., traditional CSF activity) useful, for example, in conjunction with chemotherapy to prevent or treat consequent myelo-suppression; in supporting the growth and proliferation of megakaryocytes and consequently of platelets thereby allowing prevention or treatment of various platelet disorders such as thrombocytopenia, and generally for use in place of or complimentary to platelet transfusions; and/or in supporting the growth and proliferation of hematopoietic stem cells which are capable of maturing to any and all of the above-mentioned hematopoietic cells and therefore find therapeutic utility in various stem cell disorders (such as those usually treated with transplantation, including, without limitation, aplastic anemia and paroxysmal nocturnal hemoglobinuria), as well as in repopulating the stem cell compartment post irradiation/chemotherapy, either in-vivo or ex-vivo (ie., in conjunction with bone marrow transplantation or with peripheral progenitor cell transplantation (homologous or heterologous)) as normal cells or genetically manipulated for gene therapy.

[0179] Therapeutic compositions of the invention can be used in the following:

[0180] Suitable assays for proliferation and differentiation of various hematopoietic lines are cited above.

[0181] Assays for embryonic stem cell differentiation (which will identify, among others, proteins that influence embryonic differentiation hematopoiesis) include, without limitation, those described in: Johansson et al. Cellular Biology 15:141-151, 1995; Keller et al., Molecular and Cellular Biology 13:473486, 1993; McClanahan et al., Blood 81:2903-2915, 1993.

[0182] Assays for stem cell survival and differentiation (which will identify, among others, proteins that regulate lympho-hematopoiesis) include, without limitation, those described in: Methylcellulose colony forming assays, Freshney, M. G. In Culture of Hematopoietic Cells. R. I. Freshney, et al. eds. Vol pp. 265-268, Wiley-Liss, Inc., New York, N.Y. 1994; Hirayama et al., Proc. Natl. Acad. Sci. USA 89:5907-5911, 1992; Primitive hematopoietic colony forming cells with high proliferative potential, McNiece, I. K. and Briddell, R. A. In Culture of Hematopoietic Cells. R. I. Freshney, et al. eds. Vol pp. 23-39, Wiley-Liss, Inc., New York, N.Y. 1994; Neben et al., Experimental Hematology 22:353-359, 1994; Cobblestone area forming cell assay, Ploemacher, R. E. In Culture of Hematopoietic Cells. R. I. Freshney, et al. eds. Vol pp. 1-21, Wiley-Liss, Inc., New York, N.Y. 1994; Long term bone marrow cultures in the presence of stromal cells, Spooncer, E., Dexter, M. and Allen, T. In Culture of Hematopoietic Cells. R. I. Freshney, et al. eds. Vol pp. 163-179, Wiley-Liss, Inc., New York, N.Y. 1994; Long term culture initiating cell assay, Sutherland, H. J. In Culture of Hematopoietic Cells. R. I. Freshney, et al. eds. Vol pp. 139-162, Wiley-Liss, Inc., New York, N.Y. 1994.

[0183] 4.10.6 Tissue Growth Activity

[0184] A polypeptide of the present invention also may be involved in bone, cartilage, tendon, ligament and/or nerve tissue growth or regeneration, as well as in wound healing and tissue repair and replacement, and in healing of burns, incisions and ulcers.

[0185] A polypeptide of the present invention which induces cartilage and/or bone growth in circumstances where bone is not normally formed, has application in the healing of bone fractures and cartilage damage or defects in humans and other animals. Compositions of a polypeptide, antibody, binding partner, or other modulator of the invention may have prophylactic use in closed as well as open fracture reduction and also in the improved fixation of artificial joints. De novo bone formation induced by an osteogenic agent contributes to the repair of congenital, trauma induced, or oncologic resection induced craniofacial defects, and also is useful in cosmetic plastic surgery.

[0186] A polypeptide of this invention may also be involved in attracting bone-forming cells, stimulating growth of bone-forming cells, or inducing differentiation of progenitors of bone-forming cells. Treatment of osteoporosis, osteoarthritis, bone degenerative disorders, or periodontal disease, such as through stimulation of bone and/or cartilage repair or by blocking inflammation or processes of tissue destruction (collagenase activity, osteoclast activity, etc.) mediated by inflammatory processes may also be possible using the composition of the invention.

[0187] Another category of tissue regeneration activity that may involve the polypeptide of the present invention is tendon/ligament formation. Induction of tendon/ligament-like tissue or other tissue formation in circumstances where such tissue is not normally formed, has application in the healing of tendon or ligament tears, deformities and other tendon or ligament defects in humans and other animals. Such a preparation employing a tendon/ligament-like tissue inducing protein may have prophylactic use in preventing damage to tendon or ligament tissue, as well as use in the improved fixation of tendon or ligament to bone or other tissues, and in repairing defects to tendon or ligament tissue. De novo tendon/ligament-like tissue formation induced by a composition of the present invention contributes to the repair of congenital, trauma induced, or other tendon or ligament defects of other origin, and is also useful in cosmetic plastic surgery for attachment or repair of tendons or ligaments. The compositions of the present invention may provide environment to attract tendon- or ligament-forming cells, stimulate growth of tendon- or ligament-forming cells, induce differentiation of progenitors of tendon- or ligament-forming cells, or induce growth of tendon/ligament cells or progenitors ex vivo for return in vivo to effect tissue repair. The compositions of the invention may also be useful in the treatment of tendinitis, carpal tunnel syndrome and other tendon or ligament defects. The compositions may also include an appropriate matrix and/or sequestering agent as a carrier as is well known in the art.

[0188] The compositions of the present invention may also be useful for proliferation of neural cells and for regeneration of nerve and brain tissue, i.e. for the treatment of central and peripheral nervous system diseases and neuropathies, as well as mechanical and traumatic disorders, which involve degeneration, death or trauma to neural cells or nerve tissue. More specifically, a composition may be used in the treatment of diseases of the peripheral nervous system, such as peripheral nerve injuries, peripheral neuropathy and localized neuropathies, and central nervous system diseases, such as Alzheimer's, Parkinson's disease, Huntington's disease, amyotrophic lateral sclerosis, and Shy-Drager syndrome. Further conditions that may be treated in accordance with the present invention include mechanical and traumatic disorders, such as spinal cord disorders, head trauma and cerebrovascular diseases such as stroke. Peripheral neuropathies resulting from chemotherapy or other medical therapies may also be treatable using a composition of the invention.

[0189] Compositions of the invention may also be useful to promote better or faster closure of non-healing wounds, including without limitation pressure ulcers, ulcers associated with vascular insufficiency, surgical and traumatic wounds, and the like.

[0190] Compositions of the present invention may also be involved in the generation or regeneration of other tissues, such as organs (including, for example, pancreas, liver, intestine, kidney, skin, endothelium), muscle (smooth, skeletal or cardiac) and vascular (including vascular endothelium) tissue, or for promoting the growth of cells comprising such tissues. Part of the desired effects may be by inhibition or modulation of fibrotic scarring may allow normal tissue to regenerate. A polypeptide of the present invention may also exhibit angiogenic activity.

[0191] A composition of the present invention may also be useful for gut protection or regeneration and treatment of lung or liver fibrosis, reperfusion injury in various tissues, and conditions resulting from systemic cytokine damage.

[0192] A composition of the present invention may also be useful for promoting or inhibiting differentiation of tissues described above from precursor tissues or cells; or for inhibiting the growth of tissues described above.

[0193] Therapeutic compositions of the invention can be used in the following:

[0194] Assays for tissue generation activity include, without limitation, those described in: International Patent Publication No. WO95/16035 (bone, cartilage, tendon); International Patent Publication No. WO95/05846 (nerve, neuronal); International Patent Publication No. WO91/07491 (skin, endothelium).

[0195] Assays for wound healing activity include, without limitation, those described in: Winter, Epidermal Wound Healing, pps. 71-112 (Maibach, H. I. and Rovee, D. T., eds.), Year Book Medical Publishers, Inc., Chicago, as modified by Eaglstein and Mertz, J. Invest. Dermatol 71:382-84 (1978).

[0196] 4.10.7 Immune Stimulating or Suppressing Activity

[0197] A polypeptide of the present invention may also exhibit immune stimulating or immune suppressing activity, including without limitation the activities for which assays are described herein. A polynucleotide of the invention can encode a polypeptide exhibiting such activities. A protein may be useful in the treatment of various immune deficiencies and disorders (including severe combined immunodeficiency (SCID)), e.g., in regulating (up or down) growth and proliferation of T and/or B lymphocytes, as well as effecting the cytolytic activity of NK cells and other cell populations. These immune deficiencies may be genetic or be caused by viral (e.g., HIV) as well as bacterial or fungal infections, or may result from autoimmune disorders. More specifically, infectious diseases causes by viral, bacterial, fungal or other infection may be treatable using a protein of the present invention, including infections by HIV, hepatitis viruses, herpes viruses, mycobacteria, Leishmania spp., malaria spp. and various fungal infections such as candidiasis. Of course, in this regard, proteins of the present invention may also be useful where a boost to the immune system generally may be desirable, i.e., in the treatment of cancer.

[0198] Autoimmune disorders which may be treated using a protein of the present invention include, for example, connective tissue disease, multiple sclerosis, systemic lupus erythematosus, rheumatoid arritis, autoimmune pulmonary inflammation, Guillain-Barre syndrome, autoimmune thyroiditis, insulin dependent diabetes mellitis, myasthenia gravis, graft-versus-host disease and autoimmune inflammatory eye disease. Such a protein (or antagonists thereof, including antibodies) of the present invention may also to be useful in the treatment of allergic reactions and conditions (e.g., anaphylaxis, serum sickness, drug reactions, food allergies, insect venom allergies, mastocytosis, allergic rhinitis, hypersensitivity pneumonitis, urticaria, angioedema, eczema, atopic dermatitis, allergic contact dermatitis, erythema multiforme, Stevens-Johnson syndrome, allergic conjunctivitis, atopic keratoconjunctivitis, venereal keratoconjunctivitis, giant papillary conjunctivitis and contact allergies), such as asthma (particularly allergic asthma) or other respiratory problems. Other conditions, in which immune suppression is desired (including, for example, organ transplantation), may also be treatable using a protein (or antagonists thereof) of the present invention. The therapeutic effects of the polypeptides or antagonists thereof on allergic reactions can be evaluated by in vivo animals models such as the cumulative contact enhancement test (Lastbom et al., Toxicology 125: 59-66, 1998), skin prick test (Hoffmann et al., Allergy 54: 446-54, 1999), guinea pig slin sensitization test (Vohr et al., Arch. Toxocol. 73: 501-9), and murine local lymph node assay (Kimber et al., J. Toxicol. Environ. Health 53: 563-79).

[0199] Using the proteins of the invention it may also be possible to modulate immune responses, in a number of ways. Down regulation may be in the form of inhibiting or blocking an immune response already in progress or may involve preventing the induction of an immune response. The functions of activated T cells may be inhibited by suppressing T cell responses or by inducing specific tolerance in T cells, or both. Immunosuppression of T cell responses is generally an active, non-antigen-specific, process which requires continuous exposure of the T cells to the suppressive agent. Tolerance, which involves inducing non-responsiveness or anergy in T cells, is distinguishable from immunosuppression in that it is generally antigen-specific and persists after exposure to the tolerizing agent has ceased. Operationally, tolerance can be demonstrated by the lack of a T cell response upon reexposure to specific antigen in the absence of the tolerizing agent.

[0200] Down regulating or preventing one or more antigen functions (including without limitation B lymphocyte antigen functions (such as, for example, B7)), e.g., preventing high level lymphokine synthesis by activated T cells, will be useful in situations of tissue, skin and organ transplantation and in graft-versus-host disease (GVHD). For example, blockage of T cell function should result in reduced tissue destruction in tissue transplantation. Typically, in tissue transplants, rejection of the transplant is initiated through its recognition as foreign by T cells, followed by an immune reaction that destroys the transplant. The administration of a therapeutic composition of the invention may prevent cytokine synthesis by immune cells, such as T cells, and thus acts as an immunosuppressant. Moreover, a lack of costinulation may also be sufficient to anergize the T cells, thereby inducing tolerance in a subject. Induction of long-term tolerance by B lymphocyte antigen-blocking reagents may avoid the necessity of repeated administration of these blocking reagents. To achieve sufficient immunosuppression or tolerance in a subject, it may also be necessary to block the function of a combination of B lymphocyte antigens.

[0201] The efficacy of particular therapeutic compositions in preventing organ transplant rejection or GVHD can be assessed using animal models that are predictive of efficacy in humans. Examples of appropriate systems which can be used include allogeneic cardiac grafts in rats and xenogeneic pancreatic islet cell grafts in mice, both of which have been used to examine the immunosuppressive effects of CTLA4I g fusion proteins in vivo as described in Lenschow et al., Science 257:789-792 (1992) and Turka et al., Proc. Natl. Acad. Sci USA, 89:11102-11105 (1992). In addition, murine models of GVHD (see Paul ed., Fundamental Immunology, Raven Press, New York, 1989, pp. 846-847) can be used to determine the effect of therapeutic compositions of the invention on the development of that disease.

[0202] Blocking antigen function may also be therapeutically useful for treating autoimmune diseases. Many autoimmune disorders are the result of inappropriate activation of T cells that are reactive against self-tissue and which promote the production of cytokines and autoantibodies involved in the pathology of the diseases. Preventing the activation of autoreactive T cells may reduce or eliminate disease symptoms. Administration of reagents which block stimulation of T cells can be used to inhibit T cell activation and prevent production of autoantibodies or T cell-derived cytokines which may be involved in the disease process. Additionally, blocking reagents may induce antigen-specific tolerance of autoreactive T cells which could lead to long-term relief from the disease. The efficacy of blocking reagents in preventing or alleviating autoimmune disorders can be determined using a number of well-characterized animal models of human autoimmune diseases. Examples include murine experimental autoimmune encephalitis, systemic lupus erythmatosis in MRL/lpr/lpr mice or NZB hybrid mice, murine autoimmune collagen arthritis, diabetes mellitus in NOD mice and BB rats, and murine experimental myasthenia gravis (see Paul ed., Fundamental Immunology, Raven Press, New York, 1989, pp. 840-856).

[0203] Upregulation of an antigen function (e.g., a B lymphocyte antigen function), as a means of up regulating immune responses, may also be useful in therapy. Upregulation of immune responses may be in the form of enhancing an existing immune response or eliciting an initial immune response. For example, enhancing an immune response may be useful in cases of viral infection, including systemic viral diseases such as influenza, the common cold, and encephalitis.

[0204] Alternatively, anti-viral immune responses may be enhanced in an infected patient by removing T cells from the patient, costimulating the T cells in vitro with viral antigen-pulsed APCs either expressing a peptide of the present invention or together with a stimulatory form of a soluble peptide of the present invention and reintroducing the in vitro activated T cells into the patient. Another method of enhancing anti-viral immune responses would be to isolate infected cells from a patient, transfect them with a nucleic acid encoding a protein of the present invention as described herein such that the cells express all or a portion of the protein on their surface, and reintroduce the transfected cells into the patient. The infected cells would now be capable of delivering a costimulatory signal to, and thereby activate, T cells in vivo.

[0205] A polypeptide of the present invention may provide the necessary stimulation signal to T cells to induce a T cell mediated immune response against the transfected tumor cells. In addition, tumor cells which lack MHC class I or MHC class II molecules, or which fail to reexpress sufficient mounts of MHC class I or MHC class II molecules, can be transfected with nucleic acid encoding all or a portion of (e.g., a cytoplasmic-domain truncated portion) of an MHC class 1 alpha chain protein and P2 microglobulin protein or an MHC class II alpha chain protein and an MHC class II beta chain protein to thereby express MHC class I or MHC class II proteins on the cell surface. Expression of the appropriate class I or class II MHC in conjunction with a peptide having the activity of a B lymphocyte antigen (e.g., B7-1, B7-2, B7-3) induces a T cell mediated immune response against the transfected tumor cell. Optionally, a gene encoding an antisense construct which blocks expression of an MHC class II associated protein, such as the invariant chain, can also be cotransfected with a DNA encoding a peptide having the activity of a B lymphocyte antigen to promote presentation of tumor associated antigens and induce tumor specific immunity. Thus, the induction of a T cell mediated immune response in a human subject may be sufficient to overcome tumor-specific tolerance in the subject.

[0206] The activity of a protein of the invention may, among other means, be measured by the following methods:

[0207] Suitable assays for thymocyte or splenocyte cytotoxicity include, without limitation, those described in: Current Protocols in Immunology, Ed by J. E. Coligan, A. M. Kruisbeek, D. H. Margulies, E. M. Shevach, W. Strober, Pub. Greene Publishing Associates and Wiley-Interscience (Chapter 3, In Vitro assays for Mouse Lymphocyte Function 3.1-3.19; Chapter 7, Immunologic studies in Humans); Herrmann et al., Proc. Natl. Acad. Sci. USA 78:2488-2492, 1981; Herrmnann et al., J. Immunol. 128:1968-1974, 1982; Handa et al., J. Immunol. 135:1564-1572, 1985; Takai et al., I. Immunol. 137:3494-3500, 1986; Takai et al., J. Immunol. 140:508-512, 1988; Bowman et al., J. Virology 61:1992-1998; Bertagnolli et al., Cellular Immunology 133:327-341, 1991; Brown et al., J. Immunol. 153:3079-3092, 1994.

[0208] Assays for T-cell-dependent immunoglobulin responses and isotype switching (which will identify, among others, proteins that modulate T-cell dependent antibody responses and that affect Th1/Th2 profiles) include, without limitation, those described in: Maliszewski, J. Immunol. 144:3028-3033, 1990; and Assays for B cell function: In vitro antibody production, Mond, J. J. and Brunswick, M. In Current Protocols in Immunology. J. E. e.a. Coligan eds. Vol 1 pp. 3.8.1-3.8.16, John Wiley and Sons, Toronto. 1994.

[0209] Mixed lymphocyte reaction (MLR) assays (which will identify, among others, proteins that generate predominantly Th1 and CTL responses) include, without limitation, those described in: Current Protocols in Immunology, Ed by J. E. Coligan, A. M. Kruisbeek, D. H. Margulies, E. M. Shevach, W. Strober, Pub. Greene Publishing Associates and Wiley-Interscience (Chapter 3, In Vitro assays for Mouse Lymphocyte Function 3.1-3.19; Chapter 7, Immunologic studies in Humans); Takai et al., J. Immunol. 137:3494-3500, 1986; Takai et al., J. Immunol. 140:508-512, 1988; Bertagnolli et al., J. Immunol. 149:3778-3783, 1992.

[0210] Dendritic cell-dependent assays (which will identify, among others, proteins expressed by dendritic cells that activate naive T-cells) include, without limitation, those described in: Guery et al., J. Immunol. 134:536-544, 1995; Inaba et al., Journal of Experimental Medicine 173:549-559, 1991; Macatonia et al., Journal of Immunology 154:5071-5079, 1995; Porgador et al., Journal of Experimental Medicine 182:255-260,1995; Nair et al., Journal of Virology 67:4062-4069, 1993; Huang et al., Science 264:961-965, 1994; Macatonia et al., Journal of Experimental Medicine 169:1255-1264, 1989; Bhardwaj et al., Journal of Clinical Investigation 94:797-807, 1994; and Inaba et al., Journal of Experimental Medicine 172:631-640, 1990.

[0211] Assays for lymphocyte survival/apoptosis (which will identify, among others, proteins that prevent apoptosis after superantigen induction and proteins that regulate lymphocyte homeostasis) include, without limitation, those described in: Darzynkiewicz et al., Cytometry 13:795-808, 1992; Gorczyca et al., Leukemia 7:659-670, 1993; Gorczyca et al., Cancer Research 53:1945-1951, 1993; Itoh et al., Cell 66:233-243, 1991; Zacharchuk, Journal of Immunology 145:40374045, 1990; Zamai et al., Cytometry 14:891-897, 1993; Gorczyca et al., International Journal of Oncology 1:639-648, 1992.

[0212] Assays for proteins that influence early steps of T-cell commitment and development include, without limitation, those described in: Antica et al., Blood 84:111-117, 1994; Fine et al., Cellular Immunology 155:111-122, 1994; Galy et al., Blood 85:2770-2778, 1995; Toki et al., Proc. Nat. Acad. Sci. USA 88:7548-7551, 1991.

[0213] 4.10.8 Activin/Inhibin Activity

[0214] A polypeptide of the present invention may also exhibit activin- or inhibin-related activities. A polynucleotide of the invention may encode a polypeptide exhibiting such characteristics. Inhibins are characterized by their ability to inhibit the release of follicle stimulating hormone (FSH), while activins and are characterized by their ability to stimulate the release of follicle stimulating hormone (FSH). Thus, a polypeptide of the present invention, alone or in heterodirners with a member of the inhibin family, may be useful as a contraceptive based on the ability of inhibins to decrease fertility in female mammals and decrease spermatogenesis in male mammals. Administration of sufficient amounts of other inhibins can induce infertility in these mammals. Alternatively, the polypeptide of the invention, as a homodimer or as a heterodimer with other protein subunits of the inhibin group, may be useful as a fertility inducing therapeutic, based upon the ability of activin molecules in stimulating FSH release from cells of the anterior pituitary. See, for example, U.S. Pat. No. 4,798,885. A polypeptide of the invention may also be useful for advancement of the onset of fertility in sexually immature mammals, so as to increase the lifetime reproductive performance of domestic animals such as, but not limited to, cows, sheep and pigs.

[0215] The activity of a polypeptide of the invention may, among other means, be measured by the following methods.

[0216] Assays for activin/inhibin activity include, without limitation, those described in: Vale et al., Endocrinology 91:562-572, 1972; Ling et al., Nature 321:779-782, 1986; Vale et al., Nature 321:776-779, 1986; Mason et al., Nature 318:659-663, 1985; Forage et al., Proc. Natl. Acad. Sci. USA 83:3091-3095, 1986.

[0217] 4.10.9 Chemotactic/Chemokinetic Activity

[0218] A polypeptide of the present invention may be involved in chemotactic or chemokinetic activity for mammalian cells, including, for example, monocytes, fibroblasts, neutrophils, T-cells, mast cells, eosinophils, epithelial and/or endothelial cells. A polynucleotide of the invention can encode a polypeptide exhibiting such attributes. Chemotactic and chemolinetic receptor activation can be used to mobilize or attract a desired cell population to a desired site of action. Chemotactic or chemokinetic compositions (e.g. proteins, antibodies, binding partners, or modulators of the invention) provide particular advantages in treatment of wounds and other trauma to tissues, as well as in treatment of localized infections. For example, attraction of lymphocytes, monocytes or neutrophils to tumors or sites of infection may result in improved immune responses against the tumor or infecting agent.

[0219] A protein or peptide has chemotactic activity for a particular cell population if it can stimulate, directly or indirectly, the directed orientation or movement of such cell population. Preferably, the protein or peptide has the ability to directly stimulate directed movement of cells. Whether a particular protein has chemotactic activity for a population of cells can be readily determined by employing such protein or peptide in any known assay for cell chemotaxis.

[0220] Therapeutic compositions of the invention can be used in the following:

[0221] Assays for chemotactic activity (which will identify proteins that induce or prevent chemotaxis) consist of assays that measure the ability of a protein to induce the migration of cells across a membrane as well as the ability of a protein to induce the adhesion of one cell population to another cell population. Suitable assays for movement and adhesion include, without limitation, those described in: Current Protocols in Immunology, Ed by J. E. Coligan, A. M. Kruisbeek, D. H. Marguiles, E. M. Shevach, W. Strober, Pub. Greene Publishing Associates and Wiley-Interscience (Chapter 6.12, Measurement of alpha and beta Chemokines 6.12.1-6.12.28; Taub et al. J. Clin. Invest. 95:1370-1376, 1995; Lind et al. APMIS 103:140-146, 1995; Muller et al Eur. J. Immunol. 25:1744-1748; Gruber et al. J. of Immunol. 152:5860-5867, 1994; Johnston et al. J. of Immunol. 153:1762-1768, 1994.

[0222] 4.10.10 Hemostatic and Thrombolytic Activity

[0223] A polypeptide of the invention may also be involved in hemostatis or thrombolysis or thrombosis. A polynucleotide of the invention can encode a polypeptide exhibiting such attributes. Compositions may be usefull in treatment of various coagulation disorders (including hereditary disorders, such as hemophilias) or to enhance coagulation and other hemostatic events in treating wounds resulting from trauma, surgery or other causes. A composition of the invention may also be useful for dissolving or inhibiting formation of thromboses and for treatment and prevention of conditions resulting therefrom (such as, for example, infarction of cardiac and central nervous system vessels (e.g., stroke).

[0224] Therapeutic compositions of the invention can be used in the following:

[0225] Assay for hemostatic and thrombolytic activity include, without limitation, those described in: Linet et al., J. Clin. Pharmacol. 26:131-140, 1986; Burdick et al., Thrombosis Res. 45:413-419, 1987; Humphrey et al., Fibrinolysis 5:71-79(1991); Schaub, Prostaglandins 35:467-474,1988.

[0226] 4.10.11 Cancer Diagnosis and Therapy

[0227] Polypeptides of the invention may be involved in cancer cell generation, proliferation or metastasis. Detection of the presence or amount of polynucleotides or polypeptides of the invention may be useful for the diagnosis and/or prognosis of one or more types of cancer. For example, the presence or increased expression of a polynucleotide/polypeptide of the invention may indicate a hereditary risk of cancer, a precancerous condition, or an ongoing malignancy. Conversely, a defect in the gene or absence of the polypeptide may be associated with a cancer condition. Identification of single nucleotide polymorphisms associated with cancer or a predisposition to cancer may also be useful for diagnosis or prognosis.

[0228] Cancer treatments promote tumor regression by inhibiting tumor cell proliferation, inhibiting angiogenesis (growth of new blood vessels that is necessary to support tumor growth) and/or prohibiting metastasis by reducing tumor cell motility or invasiveness. Therapeutic compositions of the invention may be effective in adult and pediatric oncology including in solid phase tumors/malignancies, locally advanced tumors, human soft tissue sarcomas, metastatic cancer, including lymphatic metastases, blood cell malignancies including multiple myeloma, acute and chronic leukemias, and lymphomas, head and neck cancers including mouth cancer, larynx cancer and thyroid cancer, lung cancers including small cell carcinoma and non-small cell cancers, breast cancers including small cell carcinoma and ductal carcinoma, gastrointestinal cancers including esophageal cancer, stomach cancer, colon cancer, colorectal cancer and polyps associated with colorectal neoplasia, pancreatic cancers, liver cancer, urologic cancers including bladder cancer and prostate cancer, malignancies of the female genital tract including ovarian carcinoma, uterine (including endometrial) cancers, and solid tumor in the ovarian follicle, kidney cancers including renal cell carcinoma, brain cancers including intrinsic brain tumors, neuroblastoma, astrocytic brain tumors, gliomas, metastatic tumor cell invasion in the central nervous system, bone cancers including osteomas, skin cancers including malignant melanoma, tumor progression of human skin keratinocytes, squamous cell carcinoma, basal cell carcinoma, hemangiopericytoma and Karposi's sarcoma.

[0229] Polypeptides, polynucleotides, or modulators of polypeptides of the invention (including inhibitors and stimulators of the biological activity of the polypeptide of the invention) may be administered to treat cancer. Therapeutic compositions can be administered in therapeutically effective dosages alone or in combination with adjuvant cancer therapy such as surgery, chemotherapy, radiotherapy, thermotherapy, and laser therapy, and may provide a beneficial effect, e.g. reducing tumor size, slowing rate of tumor growth, inhibiting metastasis, or otherwise improving overall clinical condition, without necessarily eradicating the cancer.

[0230] The composition can also be administered in therapeutically effective amounts as a portion of an anti-cancer cocktail. An anti-cancer cocktail is a mixture of the polypeptide or modulator of the invention with one or more anti-cancer drugs in addition to a pharmaceutically acceptable carrier for delivery. The use of anti-cancer cocktails as a cancer treatment is routine. Anti-cancer drugs that are well known in the art and can be used as a treatment in combination with the polypeptide or modulator of the invention include: Actinomycin D, Aminoglutethimide, Asparaginase, Bleomycin, Busulfan, Carboplatin, Carmustine, Chlorambucil, Cisplatin (cis-DDP), Cyclophosphamide, Cytarabine HCl (Cytosine arabinoside), Dacarbazine, Dactinomycin, Daunorubicin HCl, Doxorubicin HCl, Estramustine phosphate sodium, Etoposide (V16-213), Floxuridine, 5-Fluorouracil (5-Fu), Flutamide, Hydroxyurea (hydroxycarbamide), Ifosfamide, Interferon Alpha-2a, Interferon Alpha-2b, Leuprolide acetate (LHRH-releasing factor analog), Lomustine, Mechlorethamine HCl (nitrogen mustard), Melphalan, Mercaptopurine, Mesna, Methotrexate (MTX), Mitomycin, Mitoxantrone HCl, Octreotide, Plicamycin, Procarbazine HCl, Streptozocin, Tamoxifen citrate, Thioguanine, Thiotepa, Vinblastine sulfate, Vincristine sulfate, Amsacrine, Azacitidine, Hexamethylmelamine, Interleukin-2, Mitoguazone, Pentostatin, Semustine, Teniposide, and Vindesine sulfate.

[0231] In addition, therapeutic compositions of the invention may be used for prophylactic treatment of cancer. There are hereditary conditions and/or environmental situations (e.g. exposure to carcinogens) known in the art that predispose an individual to developing cancers. Under these circumstances, it may be beneficial to treat these individuals with therapeutically effective doses of the polypeptide of the invention to reduce the risk of developing cancers.

[0232] In vitro models can be used to determine the effective doses of the polypeptide of the invention as a potential cancer treatment. These in vitro models include proliferation assays of cultured tumor cells, growth of cultured tumor cells in soft agar (see Freshney, (1987) Culture of Animal Cells: A Manual of Basic Technique, Wily-Liss, New York, N.Y. Ch 18 and Ch 21), tumor systems in nude mice as described in Giovanella et al., J. Natl. Can. Inst., 52: 921-30 (1974), mobility and invasive potential of tumor cells in Boyden Chamber assays as described in Pilkington et al., Anticancer Res., 17: 4107-9 (1997), and angiogenesis assays such as induction of vascularization of the chick chorioallantoic membrane or induction of vascular endothelial cell migration as described in Ribatta et al., Intl. J. Dev. Biol., 40: 1189-97 (1999) and Li et al., Clin. Exp. Metastasis, 17:423-9 (1999), respectively. Suitable tumor cells lines are available, e.g. from American Type Tissue Culture Collection catalogs.

[0233] 4.10.12 RECEPTOR/LIGAND ACTIVITY

[0234] A polypeptide of the present invention may also demonstrate activity as receptor, receptor ligand or inhibitor or agonist of receptor/ligand interactions. A polynucleotide of the invention can encode a polypeptide exhibiting such characteristics. Examples of such receptors and ligands include, without limitation, cytokine receptors and their ligands, receptor kinases and their ligands, receptor phosphatases and their ligands, receptors involved in cell-cell interactions and their ligands (including without limitation, cellular adhesion molecules (such as selectins, integrins and their ligands) and receptor/ligand pairs involved in antigen presentation, antigen recognition and development of cellular and humoral immune responses. Receptors and ligands are also useful for screening of potential peptide or small molecule inhibitors of the relevant receptor/ligand interaction. A protein of the present invention (including, without limitation, fragments of receptors and ligands) may themselves be useful as inhibitors of receptor/ligand interactions.

[0235] The activity of a polypeptide of the invention may, among other means, be measured by the following methods:

[0236] Suitable assays for receptor-ligand activity include without limitation those described in: Current Protocols in Immunology, Ed by J. E. Coligan, A. M. Kruisbeek, D. H. Margulies, E. M. Shevach, W. Strober, Pub. Greene Publishing Associates and Wiley-Interscience (Chapter 7.28, Measurement of Cellular Adhesion under static conditions 7.28.1-7.28.22), Takai et al., Proc. Natl. Acad. Sci. USA 84:6864-6868, 1987; Bierer et al., J. Exp. Med. 168:1145-1156, 1988; Rosenstein et al., J. Exp. Med. 169:149-160 1989; Stoltenborg et al., J. Immunol. Methods 175:59-68, 1994; Stitt et al., Cell 80:661-670, 1995.

[0237] By way of example, the polypeptides of the invention may be used as a receptor for a ligand(s) thereby transmitting the biological activity of that ligand(s). Ligands may be identified through binding assays, affinity chromatography, dihybrid screening assays, BIAcore assays, gel overlay assays, or other methods known in the art.

[0238] Studies characterizing drugs or proteins as agonist or antagonist or partial agonists or a partial antagonist require the use of other proteins as competing ligands. The polypeptides of the present invention or ligand(s) thereof may be labeled by being coupled to radioisotopes, colorimetric molecules or toxin molecules by conventional methods. (“Guide to Protein Purification” Murray P. Deutscher (ed) Methods in Enzymology Vol. 182 (1990) Academic Press, Inc. San Diego). Examples of radioisotopes include, but are not limited to, tritium and carbon-14. Examples of colorimetric molecules include, but are not limited to, fluorescent molecules such as fluorescamine, or rhodamine or other colorimetric molecules. Examples of toxins include, but are not limited, to ricin.

[0239] 4.10.13 DRUG SCREENING

[0240] This invention is particularly useful for screening chemical compounds by using the novel polypeptides or binding fragments thereof in any of a variety of drug screening techniques. The polypeptides or fragments employed in such a test may either be free in solution, affixed to a solid support, borne on a cell surface or located intracellularly. One method of drug screening utilizes eukaryotic or prokaryotic host cells which are stably transformed with recombinant nucleic acids expressing the polypeptide or a fragment thereof. Drugs are screened against such transformed cells in competitive binding assays. Such cells, either in viable or fixed form, can be used for standard binding assays. One may measure, for example, the formation of complexes between polypeptides of the invention or fragments and the agent being tested or examine the diminution in complex formation between the novel polypeptides and an appropriate cell line, which are well known in the art.

[0241] Sources for test compounds that may be screened for ability to bind to or modulate (i.e., increase or decrease) the activity of polypeptides of the invention include (1) inorganic and organic chemical libraries, (2) natural product libraries, and (3) combinatorial libraries comprised of either random or mimetic peptides, oligonucleotides or organic molecules.

[0242] Chemical libraries may be readily synthesized or purchased from a number of commercial sources, and may include structural analogs of known compounds or compounds that are identified as “hits” or “leads” via natural product screening.

[0243] The sources of natural product libraries are microorganisms (including bacteria and fungi), animals, plants or other vegetation, or marine organisms, and libraries of mixtures for screening may be created by: (1) fermentation and extraction of broths from soil, plant or marine microorganisms or (2) extraction of the organisms themselves. Natural product libraries include polyketides, non-ribosomal peptides, and (non-naturally occurring) variants thereof. For a review, see Science 282:63-68 (1998).

[0244] Combinatorial libraries are composed of large numbers of peptides, oligonucleotides or organic compounds and can be readily prepared by traditional automated synthesis methods, PCR, cloning or proprietary synthetic methods. Of particular interest are peptide and oligonucleotide combinatorial libraries. Still other libraries of interest include peptide, protein, peptidomimetic, multiparallel synthetic collection, recombinatorial, and polypeptide libraries. For a review of combinatorial chemistry and libraries created therefrom, see Myers, Curr. Opin. Biotechnol. 8:701-707 (1997). For reviews and examples of peptidomimetic libraries, see Al-Obeidi et al., Mol. Biotechnol, 9(3):205-23 (1998); Hruby et al., Curr Opin Chem Biol, 1(1): 114-19 (1997); Dorner et al., Bioorg Med Chem, 4(5):709-15 (1996) (alkylated dipeptides).

[0245] Identification of modulators through use of the various libraries described herein permits modification of the candidate “hit” (or “lead”) to optimize the capacity of the “hit” to bind a polypeptide of the invention. The molecules identified in the binding assay are then tested for antagonist or agonist activity in in vivo tissue culture or animal models that are well known in the art. In brief, the molecules are titrated into a plurality of cell cultures or animals and then tested for either cell/animal death or prolonged survival of the animal/cells.

[0246] The binding molecules thus identified may be complexed with toxins, e.g., ricin or cholera, or with other compounds that are toxic to cells such as radioisotopes. The toxin-binding molecule complex is then targeted to a tumor or other cell by the specificity of the binding molecule for a polypeptide of the invention. Alternatively, the binding molecules may be complexed with imaging agents for targeting and imaging purposes.

[0247] 4.10.14 ASSAY FOR RECEPTOR ACTIVITY

[0248] The invention also provides methods to detect specific binding of a polypeptide e.g. a ligand or a receptor. The art provides numerous assays particularly useful for identifying previously unknown binding partners for receptor polypeptides of the invention. For example, expression cloning using mammalian or bacterial cells, or dihybrid screening assays can be used to identify polynucleotides encoding binding partners. As another example, affinity chromatography with the appropriate immobilized polypeptide of the invention can be used to isolate polypeptides that recognize and bind polypeptides of the invention. There are a number of different libraries used for the identification of compounds, and in particular small molecules, that modulate (i.e., increase or decrease) biological activity of a polypeptide of the invention. Ligands for receptor polypeptides of the invention can also be identified by adding exogenous ligands, or cocktails of ligands to two cells populations that are genetically identical except for the expression of the receptor of the invention: one cell population expresses the receptor of the invention whereas the other does not. The responses of the two cell populations to the addition of ligands(s) are then compared. Alternatively, an expression library can be co-expressed with the polypeptide of the invention in cells and assayed for an autocrine response to identify potential ligand(s). As still another example, BIAcore assays, gel overlay assays, or other methods known in the art can be used to identify binding partner polypeptides, including, (1) organic and inorganic chemical libraries, (2) natural product libraries, and (3) combinatorial libraries comprised of random peptides, oligonucleotides or organic molecules.

[0249] The role of downstream intracellular signaling molecules in the signaling cascade of the polypeptide of the invention can be determined. For example, a chimeric protein in which the cytoplasmic domain of the polypeptide of the invention is fused to the extracellular portion of a protein, whose ligand has been identified, is produced in a host cell. The cell is then incubated with the ligand specific for the extracellular portion of the chimeric protein, thereby activating the chimeric receptor. Known downstream proteins involved in intracellular signaling can then be assayed for expected modifications i.e. phosphorylation. Other methods known to those in the art can also be used to identify signaling molecules involved in receptor activity.

[0250] 4.10.15 Anti-Inflammtory Activity

[0251] Compositions of the present invention may also exhibit anti-inflammatory activity. The anti-inflammatory activity may be achieved by providing a stimulus to cells involved in the inflammatory response, by inhibiting or promoting cell-cell interactions (such as, for example, cell adhesion), by inhibiting or promoting chemotaxis of cells involved in the inflammatory process, inhibiting or promoting cell extravasation, or by stimulating or suppressing production of other factors which more directly inhibit or promote an inflammatory response. Compositions with such activities can be used to treat inflammatory conditions including chronic or acute conditions), including without limitation intimation associated with infection (such as septic shock, sepsis or systemic inflammatory response syndrome (SIRS)), ischemia-reperfusion injury, endotoxin lethality, arthritis, complement-mediated hyperacute rejection, nephritis, cytokine or chemokine-induced lung injury, inflammatory bowel disease, Crohn's disease or resulting from over production of cytokines such as TNF or IL-1. Compositions of the invention may also be useful to treat anaphylaxis and hypersensitivity to an antigenic substance or material. Compositions of this invention may be utilized to prevent or treat conditions such as, but not limited to, sepsis, acute pancreatitis, endotoxin shock, cytokine induced shock, rheumatoid arthritis, chronic inflammatory arthritis, pancreatic cell damage from diabetes mellitus type 1, graft versus host disease, inflammatory bowel disease, inflamation associated with pulmonary disease, other autoimmune disease or inflammatory disease, an antiproliferative agent such as for acute or chronic mylegenous leukemia or in the prevention of premature labor secondary to intrauterine infections.

[0252] 4.10.16 LEUKEMIAS

[0253] Leukemias and related disorders may be treated or prevented by administration of a therapeutic that promotes or inhibits function of the polynucleotides and/or polypeptides of the invention. Such leukemias and related disorders include but are not limited to acute leukemia, acute lymphocytic leukemia, acute myelocytic leukemia, myeloblastic, promyelocytic, myelomonocytic, monocytic, erythroleukemia, chronic leukemia, chronic myelocytic (granulocytic) leukemia and chronic lymphocytic leukemia (for a review of such disorders, see Fishman et al., 1985, Medicine, 2d Ed., J. B. Lippincott Co., Philadelphia).

[0254] 4.10.17 NERVOUS SYSTEM DISORDERS

[0255] Nervous system disorders, involving cell types which can be tested for efficacy of intervention with compounds that modulate the activity of the polynucleotides and/or polypeptides of the invention, and which can be treated upon thus observing an indication of therapeutic utility, include but are not limited to nervous system injuries, and diseases or disorders which result in either a disconnection of axons, a diminution or degeneration of neurons, or demyelination. Nervous system lesions which may be treated in a patient (including human and non-human mammalian patients) according to the invention include but are not limited to the following lesions of either the central (including spinal cord, brain) or peripheral nervous systems:
[0256] (i) traumatic lesions, including lesions caused by physical injury or associated with surgery, for example, lesions which sever a portion of the nervous system, or compression injuries;
[0257] (ii) ischemic lesions, in which a lack of oxygen in a portion of the nervous system results in neuronal injury or death, including cerebral infarction or ischemia, or spinal cord infarction or ischemia;
[0258] (iii) infectious lesions, in which a portion of the nervous system is destroyed or injured as a result of infection, for example, by an abscess or associated with infection by human immunodeficiency virus, herpes zoster, or herpes simplex virus or with Lyme disease, tuberculosis, syphilis;
[0259] (iv) degenerative lesions, in which a portion of the nervous system is destroyed or injured as a result of a degenerative process including but not limited to degeneration associated with Parkinson's disease, Alzheimer's disease, Huntington's chorea, or amyotrophic lateral sclerosis;
[0260] (v) lesions associated with nutritional diseases or disorders, in which a portion of the nervous system is destroyed or injured by a nutritional disorder or disorder of metabolism including but not limited to, vitamin B12 deficiency, folic acid deficiency, Wernicke disease, tobacco-alcohol amblyopia, Marchiafava-Bignami disease (primary degeneration of the corpus callosum), and alcoholic cerebellar degeneration;
[0261] (vi) neurological lesions associated with systemic diseases including but not limited to diabetes (diabetic neuropathy, Bell's palsy), systemic lupus erythematosus, carcinoma, or sarcoidosis;
[0262] (vi) lesions caused by toxic substances including alcohol, lead, or particular neurotoxins; and

[0263] (vii) demyelinated lesions in which a portion of the nervous system is destroyed or injured by a demyelinating disease including but not limited to multiple sclerosis, human immunodeficiency virus-associated myelopathy, transverse myelopathy or various etiologies, progressive multifocal leukoencephalopathy, and central pontine myelinolysis.

[0264] Therapeutics which are useful according to the invention for treatment of a nervous system disorder may be selected by testing for biological activity in promoting the survival or differentiation of neurons. For example, and not by way of limitation, therapeutics which elicit any of the following effects may be useful according to the invention:
[0265] (i) increased survival time of neurons in culture;
[0266] (ii) increased sprouting of neurons in culture or in vivo;
[0267] (iii) increased production of a neuron-associated molecule in culture or in vivo, e.g., choline acetyltransferase or acetylcholinesterase with respect to motor neurons; or
[0268] (iv) decreased symptoms of neuron dysfunction in vivo.

[0269] Such effects may be measured by any method known in the art. In preferred, non-limiting embodiments, increased survival of neurons may be measured by the method set forth in Arakawa et al. (1990, J. Neurosci. 10:3507-3515); increased sprouting of neurons may be detected by methods set forth in Pestronk et al. (1980, Exp. Neurol. 70:65-82) or Brown et al. (1981, Ann. Rev. Neurosci. 4:17-42); increased production of neuron-associated molecules may be measured by bioassay, enzymatic assay, antibody binding, Northern blot assay, etc., depending on the molecule to be measured; and motor neuron dysfunction may be measured by assessing the physical manifestation of motor neuron disorder, e.g., weakness, motor neuron conduction velocity, or functional disability.

[0270] In specific embodiments, motor neuron disorders that may be treated according to the invention include but are not limited to disorders such as infarction, infection, exposure to toxin, trauma, surgical damage, degenerative disease or malignancy that may affect motor neurons as well as other components of the nervous system, as well as disorders that selectively affect neurons such as amyotrophic lateral sclerosis, and including but not limited to progressive spinal muscular atrophy, progressive bulbar palsy, primary lateral sclerosis, infantile and juvenile muscular atrophy, progressive bulbar paralysis of childhood (Fazio-Londe syndrome), poliomyelitis and the post polio syndrome, and Hereditary Motorsensory Neuropathy (Charcot-Marie-Tooth Disease).

[0271] 4.10.18 Other Activities

[0272] A polypeptide of the invention may also exhibit one or more of the following additional activities or effects: inhibiting the growth, infection or function of, or killing, infectious agents, including, without limitation, bacteria, viruses, fingi and other parasites; effecting (suppressing or enhancing) bodily characteristics, including, without limitation, height, weight, hair color, eye color, skin, fat to lean ratio or other tissue pigmentation, or organ or body part size or shape (such as, for example, breast augmentation or diminution, change in bone form or shape); effecting biorhythms or circadian cycles or rhythms; effecting the fertility of male or female subjects; effecting the metabolism, catabolism, anabolism, processing, utilization, storage or elimination of dietary fat, lipid, protein, carbohydrate, vitamins, minerals, co-factors or other nutritional factors or component(s); effecting behavioral characteristics, including, without limitation, appetite, libido, stress, cognition (including cognitive disorders), depression (including depressive disorders) and violent behaviors; providing analgesic effects or other pain reducing effects; promoting differentiation and growth of embryonic stem cells in lineages other than hematopoietic lineages; hormonal or endocrine activity; in the case of enzymes, correcting deficiencies of the enzyme and treating deficiency-related diseases; treatment of hyperproliferative disorders (such as, for example, psoriasis); immunoglobulin-like activity (such as, for example, the ability to bind antigens or complement); and the ability to act as an antigen in a vaccine composition to raise an immune response against such protein or another material or entity which is cross-reactive with such protein.

[0273] 4.10.19 Identification of Polymorphisms

[0274] The demonstration of polymorphisms makes possible the identification of such polymorphisms in human subjects and the pharmacogenetic use of this information for diagnosis and treatment. Such polymorphisms may be associated with, e.g., differential predisposition or susceptibility to various disease states (such as disorders involving inflammation or immune response) or a differential response to drug administration, and this genetic information can be used to tailor preventive or therapeutic treatment appropriately. For example, the existence of a polymorphism associated with a predisposition to inflammation or autoimmune disease makes possible the diagnosis of this condition in humans by identifying the presence of the polymorphism.

[0275] Polymorphisms can be identified in a variety of ways known in the art which all generally involve obtaining a sample from a patient, analyzing DNA from the sample, optionally involving isolation or amplification of the DNA, and identifying the presence of the polymorphism in the DNA. For example, PCR may be used to amplify an appropriate fragment of genomic DNA which may then be sequenced. Alternatively, the DNA may be subjected to allele-specific oligonucleotide hybridization (in which appropriate oligonucleotides are hybridized to the DNA under conditions permitting detection of a single base mismatch) or to a single nucleotide extension assay (in which an oligonucleotide that hybridizes immediately adjacent to the position of the polymorphism is extended with one or more labeled nucleotides). In addition, traditional restriction fragment length polymorphism analysis (using restriction enzymes that provide differential digestion of the genomic DNA depending on the presence or absence of the polymorphism) may be performed. Arrays with nucleotide sequences of the present invention can be used to detect polymorphisms. The array can comprise modified nucleotide sequences of the present invention in order to detect the nucleotide sequences of the present invention. In the alternative, any one of the nucleotide sequences of the present invention can be placed on the array to detect changes from those sequences.

[0276] Alternatively a polymorphism resulting in a change in the amino acid sequence could also be detected by detecting a corresponding change in amino acid sequence of the protein, e.g., by an antibody specific to the variant sequence.

[0277] 4.10.20 Arthritis and Inflammation

[0278] The immunosuppressive effects of the compositions of the invention against rheumatoid arthritis are determined in an experimental animal model system. The experimental model system is adjuvant induced arthritis in rats, and the protocol is described by J. Holoshitz, et at., 1983, Science, 219:56, or by B. Waksman et al., 1963, Int. Arch. Allergy Appl. Immunol., 23:129. Induction of the disease can be caused by a single injection, generally intradermally, of a suspension of killed Mycobacterium tuberculosis in complete Freund's adjuvant (CFA). The route of injection can vary, but rats may be injected at the base of the tail with an adjuvant mixture. The polypeptide is administered in phosphate buffered solution (PBS) at a dose of about 1-5 mg/kg. The control consists of administering PBS only.

[0279] The procedure for testing the effects of the test compound would consist of intradermally injecting killed Mycobacterium tuberculosis in CFA followed by immediately administering the test compound and subsequent treatment every other day until day 24. At 14, 15, 18, 20, 22, and 24 days after injection of Mycobacterium CFA, an overall arthritis score may be obtained as described by J. Holoskitz above. An analysis of the data would reveal that the test compound would have a dramatic affect on the swelling of the joints as measured by a decrease of the arthritis score.

4.11 Therapeutic Methods

[0280] The compositions (including polypeptide fragments, analogs, variants and antibodies or other binding partners or modulators including antisense polynucleotides) of the invention have numerous applications in a variety of therapeutic methods. Examples of therapeutic applications include, but are not limited to, those exemplified herein.

[0281] 4.11.1 Example

[0282] One embodiment of the invention is the administration of an effective amount of the polypeptides or other composition of the invention to individuals affected by a disease or disorder that can be modulated by regulating the peptides of the invention. While the mode of administration is not particularly important, parenteral administration is preferred. An exemplary mode of administration is to deliver an intravenous bolus. The dosage of the polypeptides or other composition of the invention will normally be determined by the prescribing physician. It is to be expected that the dosage will vary according to the age, weight, condition and response of the individual patient. Typically, the amount of polypeptide administered per dose will be in the range of about 0.01 μg/kg to 100 mg/kg of body weight, with the preferred dose being about 0.1 μg/kg to 10 mg/kg of patient body weight. For parenteral administration, polypeptides of the invention will be formulated in an injectable form combined with a pharmaceutically acceptable parenteral vehicle. Such vehicles are well known in the art and examples include water, saline, Ringer's solution, dextrose solution, and solutions consisting of small amounts of the human serum albumin. The vehicle may contain minor amounts of additives that maintain the isotonicity and stability of the polypeptide or other active ingredient. The preparation of such solutions is within the skill of the art.

4.12 Pharmaceutical Formulations and Routes of Administration

[0283] A protein or other composition of the present invention (from whatever source derived, including without limitation from recombinant and non-recombinant sources and including antibodies and other binding partners of the polypeptides of the invention) may be administered to a patient in need, by itself, or in pharmaceutical compositions where it is mixed with suitable carriers or excipient(s) at doses to treat or ameliorate a variety of disorders. Such a composition may optionally contain (in addition to protein or other active ingredient and a carrier) diluents, fillers, salts, buffers, stabilizers, solubilizers, and other materials well known in the art. The term “pharmaceutically acceptable” means a non-toxic material that does not interfere with the effectiveness of the biological activity of the active ingredient(s). The characteristics of the carrier will depend on the route of administration. The pharmaceutical composition of the invention may also contain cytokines, lymphokines, or other hematopoietic factors such as M-CSF, GM-CSF, TNF, IL-1, IL-2, IL-3, IL-4, IL-5, IL-6, IL-7, IL-8, IL-9, IL-10, IL-11, IL-12, IL-13, IL-14, IL-15, IFN, TNF0, ThF1, TNF2, G-CSF, Meg-CSF, thrombopoietin, stem cell factor, and erythropoietin. In further compositions, proteins of the invention may be combined with other agents beneficial to the treatment of the disease or disorder in question. These agents include various growth factors such as epidermal growth factor (EGF), platelet-derived growth factor (PDGF), transforming growth factors (TGF-α and TGF-β), insulin-like growth factor (IGF), as well as cytokines described herein.

[0284] The pharmaceutical composition may further contain other agents which either enhance the activity of the protein or other active ingredient or complement its activity or use in treatment. Such additional factors and/or agents may be included in the pharmaceutical composition to produce a synergistic effect with protein or other active ingredient of the invention, or to minimize side effects. Conversely, protein or other active ingredient of the present invention may be included in formulations of the particular clotting factor, cytokine, lymphokine, other hematopoietic factor, thrombolytic or anti-thrombotic factor, or anti-inflammatory agent to minimize side effects of the clotting factor, cytokine, lymphokine, other hematopoietic factor, thrombolytic or anti-thrombotic factor, or anti-inflammatory agent (such as IL-1Ra, IL-1 Hy1, IL-1 Hy2, anti-TNF, corticosteroids, immunosuppressive agents). A protein of the present invention may be active in multimers (e.g., heterodimers or homodimers) or complexes with itself or other proteins. As a result, pharmaceutical compositions of the invention may comprise a protein of the invention in such multimeric or complexed form.

[0285] As an alternative to being included in a pharmaceutical composition of the invention including a first protein, a second protein or a therapeutic agent may be concurrently administered with the first protein (e.g., at the same time, or at differing times provided that therapeutic concentrations of the combination of agents is achieved at the treatment site). Techniques for formulation and administration of the compounds of the instant application may be found in “Remington's Pharmaceutical Sciences,” Mack Publishing Co., Easton, Pa., latest edition. A therapeutically effective dose further refers to that amount of the compound sufficient to result in amelioration of symptoms, e.g., treatment, healing, prevention or amelioration of the relevant medical condition, or an increase in rate of treatment, healing, prevention or amelioration of such conditions. When applied to an individual active ingredient, administered alone, a therapeutically effective dose refers to that ingredient alone. When applied to a combination, a therapeutically effective dose refers to combined amounts of the active ingredients that result in the therapeutic effect, whether administered in combination, serially or simultaneously.

[0286] In practicing the method of treatment or use of the present invention, a therapeutically effective amount of protein or other active ingredient of the present invention is administered to a mammal having a condition to be treated. Protein or other active ingredient of the present invention may be administered in accordance with the method of the invention either alone or in combination with other therapies such as treatments employing cytokines, lymphokines or other hematopoietic factors. When co-administered with one or more cytokines, lymphokines or other hematopoietic factors, protein or other active ingredient of the present invention may be administered either simultaneously with the cytokine(s), lymphokine(s), other hematopoietic factor(s), thrombolytic or anti-thrombotic factors, or sequentially. If administered sequentially, the attending physician will decide on the appropriate sequence of administering protein or other active ingredient of the present invention in combination with cytokine(s), lymphokine(s), other hematopoietic factor(s), thrombolytic or anti-thrombotic factors.

[0287] 4.12.1 Routes of Administration

[0288] Suitable routes of administration may, for example, include oral, rectal, transmucosal, or intestinal administration; parenteral delivery, including intramuscular, subcutaneous, intramedullary injections, as well as intrathecal, direct intraventricular, intravenous, intraperitoneal, intranasal, or intraocular injections. Administration of protein or other active ingredient of the present invention used in the pharmaceutical composition or to practice the method of the present invention can be carried out in a variety of conventional ways, such as oral ingestion, inhalation, topical application or cutaneous, subcutaneous, intraperitoneal, parenteral or intravenous injection. Intravenous administration to the patient is preferred.

[0289] Alternately, one may administer the compound in a local rather than systemic manner, for example, via injection of the compound directly into a arthritic joints or in fibrotic tissue, often in a depot or sustained release formulation. In order to prevent the scarring process frequently occurring as complication of glaucoma surgery, the compounds may be administered topically, for example, as eye drops. Furthermore, one may administer the drug in a targeted drug delivery system, for example, in a liposome coated with a specific antibody, targeting, for example, arthritic or fibrotic tissue. The liposomes will be targeted to and taken up selectively by the afflicted tissue.

[0290] The polypeptides of the invention are administered by any route that delivers an effective dosage to the desired site of action. The determination of a suitable route of administration and an effective dosage for a particular indication is within the level of skill in the art. Preferably for wound treatment, one administers the therapeutic compound directly to the site. Suitable dosage ranges for the polypeptides of the invention can be extrapolated from these dosages or from similar studies in appropriate animal models. Dosages can then be adjusted as necessary by the clinician to provide maximal therapeutic benefit.

[0291] 4.12.2 Compositions/Formulations

[0292] Pharmaceutical compositions for use in accordance with the present invention thus may be formulated in a conventional manner using one or more physiologically acceptable carriers comprising excipients and auxiliaries which facilitate processing of the active compounds into preparations which can be used pharmaceutically. These pharmaceutical compositions may be manufactured in a manner that is itself known, e.g., by means of conventional mixing, dissolving, granulating, dragee-making, levigating, emulsifying, encapsulating, entrapping or lyophilizing processes. Proper formulation is dependent upon the route of administration chosen. When a therapeutically effective amount of protein or other active ingredient of the present invention is administered orally, protein or other active ingredient of the present invention will be in the form of a tablet, capsule, powder, solution or elixir. When administered in tablet form, the pharmaceutical composition of the invention may additionally contain a solid carrier such as a gelatin or an adjuvant. The tablet, capsule, and powder contain from about 5 to 95% protein or other active ingredient of the present invention, and preferably from about 25 to 90% protein or other active ingredient of the present invention. When administered in liquid form, a liquid carrier such as water, petroleum, oils of animal or plant origin such as peanut oil, mineral oil, soybean oil, or sesame oil, or synthetic oils may be added. The liquid form of the pharmaceutical composition may further contain physiological saline solution, dextrose or other saccharide solution, or glycols such as ethylene glycol, propylene glycol or polyethylene glycol. When administered in liquid form, the pharmaceutical composition contains from about 0.5 to 90% by weight of protein or other active ingredient of the present invention, and preferably from about 1 to 50% protein or other active ingredient of the present invention.

[0293] When a therapeutically effective amount of protein or other active ingredient of the present invention is administered by intravenous, cutaneous or subcutaneous injection, protein or other active ingredient of the present invention will be in the form of a pyrogen-free, parenterally acceptable aqueous solution. The preparation of such parenterally acceptable protein or other active ingredient solutions, having due regard to pH, isotonicity, stability, and the like, is within the skill in the art. A preferred pharmaceutical composition for intravenous, cutaneous, or subcutaneous injection should contain, in addition to protein or other active ingredient of the present invention, an isotonic vehicle such as Sodium Chloride Injection, Ringer's Injection, Dextrose Injection, Dextrose and Sodium Chloride Injection, Lactated Ringer's Injection, or other vehicle as known in the art. The pharmaceutical composition of the present invention may also contain stabilizers, preservatives, buffers, antioxidants, or other additives known to those of skill in the art For injection, the agents of the invention may be formulated in aqueous solutions, preferably in physiologically compatible buffers such as Hanks's solution, Ringer's solution, or physiological saline buffer. For transmucosal administration, penetrants appropriate to the barrier to be permeated are used in the formulation. Such penetrants are generally known in the art.

[0294] For oral administration, the compounds can be formulated readily by combining the active compounds with pharmaceutically acceptable carriers well known in the art. Such carriers enable the compounds of the invention to be formulated as tablets, pills, dragees, capsules, liquids, gels, syrups, slurries, suspensions and the like, for oral ingestion by a patient to be treated. Pharmaceutical preparations for oral use can be obtained from a solid excipient, optionally grinding a resulting mixture, and processing the mixture of granules, after adding suitable auxiliaries, if desired, to obtain tablets or dragee cores. Suitable excipients are, in particular, fillers such as sugars, including lactose, sucrose, mannitol, or sorbitol; cellulose preparations such as, for example, maize starch, wheat starch, rice starch, potato starch, gelatin, gum tragacanth, methyl cellulose, hydroxypropylmethyl-cellulose, sodium carboxymethylcellulose, and/or polyvinylpyrrolidone (PVP). If desired, disintegrating agents may be added, such as the cross-linked polyvinyl pyrrolidone, agar, or alginic acid or a salt thereof such as sodium alginate. Dragee cores are provided with suitable coatings. For this purpose, concentrated sugar solutions may be used, which may optionally contain gum arabic, talc, polyvinyl pyrrolidone, carbopol gel, polyethylene glycol, and/or titanium dioxide, lacquer solutions, and suitable organic solvents or solvent mixtures. Dyestuffs or pigments may be added to the tablets or dragee coatings for identification or to characterize different combinations of active compound doses.

[0295] Pharmaceutical preparations which can be used orally include push-fit capsules made of gelatin, as well as soft, sealed capsules made of gelatin and a plasticizer, such as glycerol or sorbitol. The push-fit capsules can contain the active ingredients in admixture with filler such as lactose, binders such as starches, and/or lubricants such as talc or magnesium stearate and, optionally, stabilizers. In soft capsules, the active compounds may be dissolved or suspended in suitable liquids, such as fatty oils, liquid paraffin, or liquid polyethylene glycols. In addition, stabilizers may be added. All formulations for oral administration should be in dosages suitable for such administration. For buccal administration, the compositions may take the form of tablets or lozenges formulated in conventional manner.

[0296] For administration by inhalation, the compounds for use according to the present invention are conveniently delivered in the form of an aerosol spray presentation from pressurized packs or a nebuliser, with the use of a suitable propellant, e.g., dichlorodifluoromethane, trichlorofluoromethane, dichlorotetrafluoroethane, carbon dioxide or other suitable gas. In the case of a pressurized aerosol the dosage unit may be determined by providing a valve to deliver a metered amount. Capsules and cartridges of, e.g., gelatin for use in an inhaler or insufflator may be formulated containing a powder mix of the compound and a suitable powder base such as lactose or starch. The compounds may be formulated for parenteral administration by injection, e.g., by bolus injection or continuous infusion. Formulations for injection may be presented in unit dosage form, e.g., in ampules or in multi-dose containers, with an added preservative. The compositions may take such forms as suspensions, solutions or emulsions in oily or aqueous vehicles, and may contain formulatory agents such as suspending, stabilizing and/or dispersing agents.

[0297] Pharmaceutical formulations for parenteral administration include aqueous solutions of the active compounds in water-soluble form. Additionally, suspensions of the active compounds may be prepared as appropriate oily injection suspensions. Suitable lipophilic solvents or vehicles include fatty oils such as sesame oil, or synthetic fatty acid esters, such as ethyl oleate or triglycerides, or liposomes. Aqueous injection suspensions may contain substances which increase the viscosity of the suspension, such as sodium carboxymethyl cellulose, sorbitol, or dextran. Optionally, the suspension may also contain suitable stabilizers or agents which increase the solubility of the compounds to allow for the preparation of highly concentrated solutions. Alternatively, the active ingredient may be in powder form for constitution with a suitable vehicle, e.g., sterile pyrogen-free water, before use.

[0298] The compounds may also be formulated in rectal compositions such as suppositories or retention enemas, e.g., containing conventional suppository bases such as cocoa butter or other glycerides. In addition to the formulations described previously, the compounds may also be formulated as a depot preparation. Such long acting formulations may be administered by implantation (for example subcutaneously or intramuscularly) or by intramuscular injection. Thus, for example, the compounds may be formulated with suitable polymeric or hydrophobic materials (for example as an emulsion in an acceptable oil) or ion exchange resins, or as sparingly soluble derivatives, for example, as a sparingly soluble salt.

[0299] A pharmaceutical carrier for the hydrophobic compounds of the invention is a co-solvent system comprising benzyl alcohol, a nonpolar surfactant, a water-miscible organic polymer, and an aqueous phase. The co-solvent system may be the VPD co-solvent system. VPD is a solution of 3%/o w/v benzyl alcohol, 8% w/v of the nonpolar surfactant polysorbate 80, and 65% w/v polyethylene glycol 300, made up to volume in absolute ethanol. The VPD co-solvent system (VPD:5W) consists of VPD diluted 1:1 with a 5% dextrose in water solution. This co-solvent system dissolves hydrophobic compounds well, and itself produces low toxicity upon systemic administration. Naturally, the proportions of a co-solvent system may be varied considerably without destroying its solubility and toxicity characteristics. Furthermore, the identity of the co-solvent components may be varied: for example, other low-toxicity nonpolar surfactants may be used instead of polysorbate 80; the fraction size of polyethylene glycol may be varied; other biocompatible polymers may replace polyethylene glycol, e.g. polyvinyl pyrrolidone; and other sugars or polysaccharides may substitute for dextrose. Alternatively, other delivery systems for hydrophobic pharmaceutical compounds may be employed. Liposomes and emulsions are well known examples of delivery vehicles or carriers for hydrophobic drugs. Certain organic solvents such as dimethylsulfoxide also may be employed, although usually at the cost of greater toxicity. Additionally, the compounds may be delivered using a sustained-release system, such as semipermeable matrices of solid hydrophobic polymers containing the therapeutic agent. Various types of sustained-release materials have been established and are well known by those skilled in the art. Sustained-release capsules may, depending on their chemical nature, release the compounds for a few weeks up to over 100 days. Depending on the chemical nature and the biological stability of the therapeutic reagent, additional strategies for protein or other active ingredient stabilization may be employed.

[0300] The pharmaceutical compositions also may comprise suitable solid or gel phase carriers or excipients. Examples of such carriers or excipients include but are not limited to calcium carbonate, calcium phosphate, various sugars, starches, cellulose derivatives, gelatin, and polymers such as polyethylene glycols. Many of the active ingredients of the invention may be provided as salts with pharmaceutically compatible counter ions. Such pharmaceutically acceptable base addition salts are those salts which retain the biological effectiveness and properties of the free acids and which are obtained by reaction with inorganic or organic bases such as sodium hydroxide, magnesium hydroxide, ammonia, trialkylamine, dialkylamine, monoalkylamine, dibasic amino acids, sodium acetate, potassium benzoate, triethanol amine and the like.

[0301] The pharmaceutical composition of the invention may be in the form of a complex of the protein(s) or other active ingredient(s) of present invention along with protein or peptide antigens. The protein and/or peptide antigen will deliver a stimulatory signal to both B and T lymphocytes. B-lymphocytes will respond to antigen through their surface immunoglobulin receptor. T lymphocytes will respond to antigen through the T cell receptor (TCR) following presentation of the antigen by MHC proteins. MHC and structurally related proteins including those encoded by class I and class II MHC genes on host cells will serve to present the peptide antigen(s) to T lymphocytes. The antigen components could also be supplied as purified MHC-peptide complexes alone or with co-stimulatory molecules that can directly signal T cells. Alternatively antibodies able to bind surface immunoglobulin and other molecules on B cells as well as antibodies able to bind the TCR and other molecules on T cells can be combined with the pharmaceutical composition of the invention.

[0302] The pharmaceutical composition of the invention may be in the form of a liposome in which protein of the present invention is combined, in addition to other pharmaceutically acceptable carriers, with amphipathic agents such as lipids which exist in aggregated form as micelles, insoluble monolayers, liquid crystals, or lamellar layers in aqueous solution. Suitable lipids for liposomal formulation include, without limitation, monoglycerides, diglycerides, sulfatides, lysolecithins, phospholipids, saponin, bile acids, and the like. Preparation of such liposomal formulations is within the level of skill in the art, as disclosed, for example, in U.S. Pat. Nos. 4,235,871; 4,501,728; 4,837,028; and 4,737,323, all of which are incorporated herein by reference.

[0303] The amount of protein or other active ingredient of the present invention in the pharmaceutical composition of the present invention will depend upon the nature and severity of the condition being treated, and on the nature of prior treatments which the patient has undergone. Ultimately, the attending physician will decide the amount of protein or other active ingredient of the present invention with which to treat each individual patient. Initially, the attending physician will administer low doses of protein or other active ingredient of the present invention and observe the patient's response. Larger doses of protein or other active ingredient of the present invention may be administered until the optimal therapeutic effect is obtained for the patient, and at that point the dosage is not increased further. It is contemplated that the various pharmaceutical compositions used to practice the method of the present invention should contain about 0.01 μg to about 100 mg (preferably about 0.1 μg to about 10 mg, more preferably about 0.1 μg to about 1 mg) of protein or other active ingredient of the present invention per kg body weight. For compositions of the present invention which are useful for bone, cartilage, tendon or ligament regeneration, the therapeutic method includes administering the composition topically, systematically, or locally as an implant or device. When administered, the therapeutic composition for use in this invention is, of course, in a pyrogen-free, physiologically acceptable form. Further, the composition may desirably be encapsulated or injected in a viscous form for delivery to the site of bone, cartilage or tissue damage. Topical administration may be suitable for wound healing and tissue repair. Therapeutically useful agents other than a protein or other active ingredient of the invention which may also optionally be included in the composition as described above, may alternatively or additionally, be administered simultaneously or sequentially with the composition in the methods of the invention. Preferably for bone and/or cartilage formation, the composition would include a matrix capable of delivering the protein-containing or other active ingredient-containing composition to the site of bone and/or cartilage damage, providing a structure for the developing bone and cartilage and optimally capable of being resorbed into the body. Such matrices may be formed of materials presently in use for other implanted medical applications.

[0304] The choice of matrix material is based on biocompatibility, biodegradability, mechanical properties, cosmetic appearance and interface properties. The particular application of the compositions will define the appropriate formulation. Potential matrices for the compositions may be biodegradable and chemically defined calcium sulfate, tricalcium phosphate, hydroxyapatite, polylactic acid, polyglycolic acid and polyanhydrides. Other potential materials are biodegradable and biologically well-defined, such as bone or dermal collagen. Further matrices are comprised of pure proteins or extracellular matrix components. Other potential matrices are nonbiodegradable and chemically defined, such as sintered hydroxyapatite, bioglass, aluminates, or other ceramics. Matrices may be comprised of combinations of any of the above-mentioned types of material, such as polylactic acid and hydroxyapatite or collagen and tricalcium phosphate. The biocermics may be altered in composition, such as in calcium-aluminate-phosphate and processing to alter pore size, particle size, particle shape, and biodegradability. Presently preferred is a 50:50 (mole weight) copolymer of lactic acid and glycolic acid in the form of porous particles having diameters ranging from 150 to 800 microns. In some applications, it will be useful to utilize a sequestering agent, such as carboxymethyl cellulose or autologous blood clot, to prevent the protein compositions from disassociating from the matrix.

[0305] A preferred family of sequestering agents is cellulosic materials such as alkylcelluloses (including hydroxyalkylcelluloses), including methylcellulose, ethylcellulose, hydroxyethylcellulose, hydroxypropylcellulose, hydroxypropyl-methylcellulose, and carboxymethylcellulose, the most preferred being cationic salts of carboxymethylcellulose (CMC). Other preferred sequestering agents include hyaluronic acid, sodium alginate, poly(ethylene glycol), polyoxyethylene oxide, carboxyvinyl polymer and poly(vinyl alcohol). The amount of sequestering agent useful herein is 0.5-20 wt %, preferably 1-10 wt % based on total formulation weight, which represents the amount necessary to prevent desorption of the protein from the polymer matrix and to provide appropriate handling of the composition, yet not so much that the progenitor cells are prevented from infiltrating the matrix, thereby providing the protein the opportunity to assist the osteogenic activity of the progenitor cells. In further compositions, proteins or other active ingredients of the invention may be combined with other agents beneficial to the treatment of the bone and/or cartilage defect, wound, or tissue in question. These agents include various growth factors such as epidermal growth factor (EGF), platelet derived growth factor (PDGF), transforming growth factors (TGF-α and TGF-β), and insulin-like growth factor (IGF).

[0306] The therapeutic compositions are also presently valuable for veterinary applications. Particularly domestic animals and thoroughbred horses, in addition to humans, are desired patients for such treatment with proteins or other active ingredients of the present invention. The dosage regimen of a protein-containing pharmaceutical composition to be used in tissue regeneration will be determined by the attending physician considering various factors which modify the action of the proteins, e.g., amount of tissue weight desired to be formed, the site of damage, the condition of the damaged tissue, the size of a wound, type of damaged tissue (e.g., bone), the patient's age, sex, and diet, the severity of any infection, time of administration and other clinical factors. The dosage may vary with the type of matrix used in the reconstitution and with inclusion of other proteins in the pharmaceutical composition. For example, the addition of other known growth factors, such as IGF I (insulin like growth factor I), to the final composition, may also effect the dosage. Progress can be monitored by periodic assessment of tissue/bone growth and/or repair, for example, X-rays, histomorphometric determinations and tetracycline labeling.

[0307] Polynucleotides of the present invention can also be used for gene therapy. Such polynucleotides can be introduced either in vivo or ex vivo into cells for expression in a mammalian subject. Polynucleotides of the invention may also be administered by other known methods for introduction of nucleic acid into a cell or organism (including, without limitation, in the form of viral vectors or naked DNA). Cells may also be cultured ex vivo in the presence of proteins of the present invention in order to proliferate or to produce a desired effect on or activity in such cells. Treated cells can then be introduced in vivo for therapeutic purposes.

[0308] 4.12.3 Effective Dosage

[0309] Pharmaceutical compositions suitable for use in the present invention include compositions wherein the active ingredients are contained in an effective amount to achieve its intended purpose. More specifically, a therapeutically effective amount means an amount effective to prevent development of or to alleviate the existing symptoms of the subject being treated. Determination of the effective amount is well within the capability of those skilled in the art, especially in light of the detailed disclosure provided herein. For any compound used in the method of the invention, the therapeutically effective dose can be estimated initially from appropriate in vitro assays. For example, a dose can be formulated in animal models to achieve a circulating concentration range that can be used to more accurately determine useful doses in humans. For example, a dose can be formulated in animal models to achieve a circulating concentration range that includes the IC₅₀ as determined in cell culture (i.e., the concentration of the test compound which achieves a half-maximal inhibition of the protein's biological activity). Such information can be used to more accurately determine useful doses in humans.

[0310] A therapeutically effective dose refers to that amount of the compound that results in amelioration of symptoms or a prolongation of survival in a patient. Toxicity and therapeutic efficacy of such compounds can be determined by standard pharmaceutical procedures in cell cultures or experimental animals, e.g., for determining the LD₅₀ (the dose lethal to 50% of the population) and the ED₅₀ (the dose therapeutically effective in 50% of the population). The dose ratio between toxic and therapeutic effects is the therapeutic index and it can be expressed as the ratio between LD₅₀ and ED₅₀. Compounds which exhibit high therapeutic indices are preferred. The data obtained from these cell culture assays and animal studies can be used in formulating a range of dosage for use in human. The dosage of such compounds lies preferably within a range of circulating concentrations that include the EDso with little or no toxicity. The dosage may vary within this range depending upon the dosage form employed and the route of administration utilized. The exact formulation, route of administration and dosage can be chosen by the individual physician in view of the patient's condition. See, e.g., Fingl et al., 1975, in “The Pharmacological Basis of Therapeutics”, Ch. 1 p.1. Dosage amount and interval may be adjusted individually to provide plasma levels of the active moiety which are sufficient to maintain the desired effects, or minimal effective concentration (MEC). The MEC will vary for each compound but can be estimated from in vitro data. Dosages necessary to achieve the MEC will depend on individual characteristics and route of administration. However, HPLC assays or bioassays can be used to determine plasma concentrations.

[0311] Dosage intervals can also be determined using MEC value. Compounds should be administered using a regimen that maintains plasma levels above the MEC for 10-90% of the time, preferably between 30-90% and most preferably between 50-90%. In cases of local administration or selective uptake, the effective local concentration of the drug may not be related to plasma concentration.

[0312] An exemplary dosage regimen for polypeptides or other compositions of the invention will be in the range of about 0.01 μg/kg to 100 mg/kg of body weight daily, with the preferred dose being about 0.1 μg/kg to 25 mg/kg of patient body weight daily, varying in adults and children. Dosing may be once daily, or equivalent doses may be delivered at longer or shorter intervals.

[0313] The amount of composition administered will, of course, be dependent on the subject being treated, on the subject's age and weight, the severity of the affliction, the manner of administration and the judgment of the prescribing physician.

[0314] 4.12.4 Packaging

[0315] The compositions may, if desired, be presented in a pack or dispenser device which may contain one or more unit dosage forms containing the active ingredient. The pack may, for example, comprise metal or plastic foil, such as a blister pack. The pack or dispenser device may be accompanied by instructions for administration. Compositions comprising a compound of the invention formulated in a compatible pharmaceutical carrier may also be prepared, placed in an appropriate container, and labeled for treatment of an indicated condition.

4.13 Antibodies

[0316] Also included in the invention are antibodies to proteins, or fragments of proteins of the invention. The term “antibody” as used herein refers to immunoglobulin molecules and immunologically active portions of immunoglobulin (Ig) molecules, i.e., molecules that contain an antigen-binding site that specifically binds (immunoreacts with) an antigen. Such antibodies include, but are not limited to, polyclonal, monoclonal, chimeric, single chain, F_{ab}, F_{ab}, and F_{(ab′)2} fragments, and an F_{ab} expression library. In general, an antibody molecule obtained from humans relates to any of the classes IgG, IgM, IgA, IgE and IgD, which differ from one another by the nature of the heavy chain present in the molecule. Certain classes have subclasses as well, such as IgG1, IgG2, and others. Furthermore, in humans, the light chain may be a kappa chain or a lambda chain. Reference herein to antibodies includes a reference to all such classes, subclasses and types of human antibody species.

[0317] An isolated related protein of the invention may be intended to serve as an antigen, or a portion or fragment thereof, and additionally can be used as an immunogen to generate antibodies that immunospecifically bind the antigen, using standard techniques for polyclonal and monoclonal antibody preparation. The full-length protein can be used or, alternatively, the invention provides antigenic peptide fragments of the antigen for use as immunogens. An antigenic peptide fragment comprises at least 6 amino acid residues of the amino acid sequence of the full length protein, (for example the amino acid sequence shown in SEQ ID NO: 30369), and encompasses an epitope thereof such that an antibody raised against the peptide forms a specific immune complex with the full length protein or with any fragment that contains the epitope. Preferably, the antigenic peptide comprises at least 10 amino acid residues, or at least 15 amino acid residues, or at least 20 amino acid residues, or at least 30 amino acid residues. Preferred epitopes encompassed by the antigenic peptide are regions of the protein that are located on its surface; commonly these are hydrophilic regions.

[0318] In certain embodiments of the invention, at least one epitope encompassed by the antigenic peptide is a region on the surface of the protein of the invention that is located on the surface of the protein, e.g., a hydrophilic region. A hydrophobicity analysis of the human related protein sequence will indicate which regions of a related protein are particularly hydrophilic and, therefore, are likely to encode surface residues useful for targeting antibody production. As a means for targeting antibody production, hydropathy plots showing regions of hydrophilicity and hydrophobicity may be generated by any method well known in the art, including, for example, the Kyte Doolittle or the Hopp Woods methods, either with or without Fourier transformation. See, e.g., Hopp and Woods, 1981, Proc. Nat. Acad. Sci. USA 78: 3824-3828; Kyte and Doolittle 1982, J. Mol. Biol. 157: 105-142, each of which is incorporated herein by reference in its entirety. Antibodies that are specific for one or more domains within an antigenic protein, or derivatives, fragments, analogs or homologs thereof, are also provided herein.

[0319] A protein of the invention, or a derivative, fragment, analog, homolog or ortholog thereof, may be utilized as an immunogen in the generation of antibodies that immunospecifically bind these protein components.

[0320] Various procedures known within the art may be used for the production of polyclonal or monoclonal antibodies directed against a protein of the invention, or against derivatives, fragments, analogs homologs or orthologs thereof (see, for example, Antibodies: A Laboratory Manual, Harlow E, and Lane D, 1988, Cold Spring Harbor Laboratory Press, Cold Spring Harbor, N.Y., incorporated herein by reference). Some of these antibodies are discussed below.

[0321] 5.13.1 Polyclonal Antibodies

[0322] For the production of polyclonal antibodies, various suitable host animals (e.g., rabbit, goat, mouse or other mammal) may be immunized by one or more injections with the native protein, a synthetic variant thereof, or a derivative of the foregoing. An appropriate immunogenic preparation can contain, for example, the naturally occurring immunogenic protein, a chemically synthesized polypeptide representing the immunogenic protein, or a recombinantly expressed immunogenic protein. Furthermore, the protein may be conjugated to a second protein known to be immunogenic in the mammal being immunized. Examples of such immunogenic proteins include but are not limited to keyhole limpet hemocyanin, serum albumin, bovine thyroglobulin, and soybean trypsin inhibitor. The preparation can further include an adjuvant. Various adjuvants used to increase the immunological response include, but are not limited to, Freund's (complete and incomplete), mineral gels (e.g., aluminum hydroxide), surface active substances (e.g., lysolecithin, pluronic polyols, polyanions, peptides, oil emulsions, dinitrophenol, etc.), adjuvants usable in humans such as Bacille Calmette-Guerin and Corynebacterium parvum, or similar immunostimulatory agents. Additional examples of adjuvants which can be employed include MPL-TDM adjuvant (monophosphoryl Lipid A, synthetic trehalose dicorynomycolate).

[0323] The polyclonal antibody molecules directed against the immunogenic protein can be isolated from the mammal (e.g., from the blood) and further purified by well known techniques, such as affinity chromatography using protein A or protein G, which provide primarily the IgG fraction of immune serum. Subsequently, or alternatively, the specific antigen which is the target of the immunoglobulin sought, or an epitope thereof, may be immobilized on a column to purify the immune specific antibody by immunoaffinity chromatography. Purification of immunoglobulins is discussed, for example, by D. Wilkinson (The Scientist, published by The Scientist, Inc., Philadelphia Pa., Vol. 14, No. 8 (Apr. 17, 2000), pp. 25-28).

[0324] 5.13.2 Monoclonal Antibodies

[0325] The term “monoclonal antibody” (MAb) or “monoclonal antibody composition”, as used herein, refers to a population of antibody molecules that contain only one molecular species of antibody molecule consisting of a unique light chain gene product and a unique heavy chain gene product. In particular, the complementarity determining regions (CDRs) of the monoclonal antibody are identical in all the molecules of the population. MAbs thus contain an antigen-binding site capable of immunoreacting with a particular epitope of the antigen characterized by a unique binding affinity for it.

[0326] Monoclonal antibodies can be prepared using hybridoma methods, such as those described by Kohler and Milstein, Nature, 256:495 (1975). In a hybridoma method, a mouse, hamster, or other appropriate host animal, is typically immunized with an immunizing agent to elicit lymphocytes that produce or are capable of producing antibodies that will specifically bind to the immunizing agent. Alternatively, the lymphocytes can be immunized in vitro.

[0327] The immunizing agent will typically include the protein antigen, a fragment thereof or a fusion protein thereof. Generally, either peripheral blood lymphocytes are used if cells of human origin are desired, or spleen cells or lymph node cells are used if non-human mammalian sources are desired. The lymphocytes are then fused with an immortalized cell line using a suitable fusing agent, such as polyethylene glycol, to form a hybridoma cell (Goding, Monoclonal Antibodies: Principles and Practice, Academic Press, (1986) pp. 59-103). Immortalized cell lines are usually transformed mammalian cells, particularly myeloma cells of rodent, bovine and human origin. Usually, rat or mouse myeloma cell lines are employed. The hybridoma cells can be cultured in a suitable culture medium that preferably contains one or more substances that inhibit the growth or survival of the unfused, immortalized cells. For example, if the parental cells lack the enzyme hypoxanthine guanine phosphoribosyl transferase (HGPRT or HPRT), the culture medium for the hybridomas typically will include hypoxanthine, aminopterin, and thymidine (“HAT medium”), which substances prevent the growth of HGPRT-deficient cells.

[0328] Preferred immortalized cell lines are those that fuse efficiently, support stable high level expression of antibody by the selected antibody-producing cells, and are sensitive to a medium such as HAT medium. More preferred immortalized cell lines are murine myeloma lines, which can be obtained, for instance, from the Salk Institute Cell Distribution Center, San Diego, Calif. and the American Type Culture Collection, Manassas, Va. Human myeloma and mouse-human heteromyeloma cell lines also have been described for the production of human monoclonal antibodies (Kozbor, J. Immunol., 133:3001 (1984); Brodeur et al., Monoclonal Antibody Production Techniques and Applications, Marcel Dekker, Inc., New York, (1987) pp. 51-63).

[0329] The culture medium in which the hybridoma cells are cultured can then be assayed for the presence of monoclonal antibodies directed against the antigen. Preferably, the binding specificity of monoclonal antibodies produced by the hybridoma cells is determined by immunoprecipitation or by an in vitro binding assay, such as radioimmunoassay (RIA) or enzyme-linked immunoabsorbent assay (ELISA). Such techniques and assays are known in the art. The binding affinity of the monoclonal antibody can, for example, be determined by the Scatchard analysis of Munson and Pollard, Anal. Biochem. 107:220 (1980). Preferably, antibodies having a high degree of specificity and a high binding affinity for the target antigen are isolated.

[0330] After the desired hybridoma cells are identified, the clones can be subcloned by limiting dilution procedures and grown by standard methods. Suitable culture media for this purpose include, for example, Dulbecco's Modified Eagle's Medium and RPMI-1640 medium. Alternatively, the hybridoma cells can be grown in vivo as ascites in a mammal.

[0331] The monoclonal antibodies secreted by the subclones can be isolated or purified from the culture medium or ascites fluid by conventional immunoglobulin purification procedures such as, for example, protein A-Sepharose, hydroxylapatite chromatography, gel electrophoresis, dialysis, or affinity chromatography.

[0332] The monoclonal antibodies can also be made by recombinant DNA methods, such as those described in U.S. Pat. No. 4,816,567. DNA encoding the monoclonal antibodies of the invention can be readily isolated and sequenced using conventional procedures (e.g., by using oligonucleotide probes that are capable of binding specifically to genes encoding the heavy and light chains of murine antibodies). The hybridoma cells of the invention serve as a preferred source of such DNA. Once isolated, the DNA can be placed into expression vectors, which are then transfected into host cells such as simian COS cells, Chinese hamster ovary (CHO) cells, or myeloma cells that do not otherwise produce immunoglobulin protein, to obtain the synthesis of monoclonal antibodies in the recombinant host cells. The DNA also can be modified, for example, by substituting the coding sequence for human heavy and light chain constant domains in place of the homologous murine sequences (U.S. Pat. No. 4,816,567; Morrison, Nature 368 812-13 (1994)) or by covalently joining to the immunoglobulin coding sequence all or part of the coding sequence for a non-immunoglobulin polypeptide. Such a non-immunoglobulin polypeptide can be substituted for the constant domains of an antibody of the invention, or can be substituted for the variable domains of one antigen-combining site of an antibody of the invention to create a chimeric bivalent antibody.

[0333] 5.13.2 Humanized Antibodies

[0334] The antibodies directed against the protein antigens of the invention can further comprise humanized antibodies or human antibodies. These antibodies are suitable for administration to humans without engendering an immune response by the human against the administered immunoglobulin. Humanized forms of antibodies are chimeric immunoglobulins, immunoglobulin chains or fragments thereof (such as Fv, Fab, Fab′, F(ab′)₂ or other antigen-binding subsequences of antibodies) that are principally comprised of the sequence of a human immunoglobulin, and contain minimal sequence derived from a non-human immunoglobulin. Humanization can be performed following the method of Winter and co-workers (Jones et al., Nature, 321:522-525 (1986); Riechmann et al., Nature, 332:323-327 (1988); Verhoeyen et al., Science, 239:1534-1536 (1988)), by substituting rodent CDRs or CDR sequences for the corresponding sequences of a human antibody. (See also U.S. Pat. No. 5,225,539.) In some instances, Fv framework residues of the human immunoglobulin are replaced by corresponding non-human residues. Humanized antibodies can also comprise residues which are found neither in the recipient antibody nor in the imported CDR or framework sequences. In general, the humanized antibody will comprise substantially all of at least one, and typically two, variable domains, in which all or substantially all of the CDR regions correspond to those of a non-human immunoglobulin and all or substantially all of the framework regions are those of a human immunoglobulin consensus sequence. The humanized antibody optimally also will comprise at least a portion of an immunoglobulin constant region (Fc), typically that of a human immunoglobulin (Jones et al., 1986; Riechmann et al., 1988; and Presta, Curr. Op. Struct. Biol., 2:593-596 (1992)).

[0335] 5.13.3 Human Antibodies

[0336] Fully human antibodies relate to antibody molecules in which essentially the entire sequences of both the light chain and the heavy chain, including the CDRs, arise from human genes. Such antibodies are termed “human antibodies”, or “fully human antibodies” herein. Human monoclonal antibodies can be prepared by the trioma technique; the human B-cell hybridoma technique (see Kozbor, et al., 1983 Immunol Today 4: 72) and the EBV hybridoma technique to produce human monoclonal antibodies (see Cole, et al., 1985 In: MONOCLONAL ANTIBODIES AND CANCER THERAPY, Alan R. Liss, Inc., pp. 77-96). Human monoclonal antibodies may be utilized in the practice of the present invention and may be produced by using human hybridomas (see Cote, et al., 1983. Proc Natl Acad Sci USA 80: 2026-2030) or by transforming human B-cells with Epstein Barr Virus in vitro (see Cole, et al., 1985 In: MONOCLONAL ANTIBODIES AND CANCER THERAPY, Alan R. Liss, Inc., pp. 77-96).

[0337] In addition, human antibodies can also be produced using additional techniques, including phage display libraries (Hoogenboom and Winter, J. Mol. Biol., 227:381 (1991); Marks et al., J. Mol. Biol., 222:581 (1991)). Similarly, human antibodies can be made by introducing human immunoglobulin loci into transgenic animals, e.g., mice in which the endogenous immunoglobulin genes have been partially or completely inactivated. Upon challenge, human antibody production is observed, which closely resembles that seen in humans in all respects, including gene rearrangement, assembly, and antibody repertoire. This approach is described, for example, in U.S. Pat. Nos. 5,545,807; 5,545,806; 5,569,825; 5,625,126; 5,633,425; 5,661,016, and in Marks et al. (Bio/Technology 10, 779-783 (1992)); Lonberg et al. (Nature 368 856-859 (1994)); Morrison (Nature 368, 812-13 (1994)); Fishwild et al, (Nature Biotechnology 14, 845-51 (1996)); Neuberger (Nature Biotechnology 14, 826 (1996)); and Lonberg and Huszar (Intern. Rev. Immunol. 13 65-93 (1995)).

[0338] Human antibodies may additionally be produced using transgenic nonhuman animals which are modified so as to produce fully human antibodies rather than the animal's endogenous antibodies in response to challenge by an antigen. (See PCT publication WO94/02602). The endogenous genes encoding the heavy and light immunoglobulin chains in the nonhuman host have been incapacitated, and active loci encoding human heavy and light chain immunoglobulins are inserted into the host's genome. The human genes are incorporated, for example, using yeast artificial chromosomes containing the requisite human DNA segments. An animal which provides all the desired modifications is then obtained as progeny by crossbreeding intermediate transgenic animals containing fewer than the full complement of the modifications. The preferred embodiment of such a nonhuman animal is a mouse, and is termed the Xenomouse™ as disclosed in PCT publications WO 96/33735 and WO 96/34096. This animal produces B cells which secrete fully human immunoglobulins. The antibodies can be obtained directly from the animal after immunization with an immunogen of interest, as, for example, a preparation of a polyclonal antibody, or alternatively from immortalized B cells derived from the animal, such as hybridomas producing monoclonal antibodies. Additionally, the genes encoding the immunoglobulins with human variable regions can be recovered and expressed to obtain the antibodies directly, or can be further modified to obtain analogs of antibodies such as, for example, single chain Fv molecules.

[0339] An example of a method of producing a nonhuman host, exemplified as a mouse, lacking expression of an endogenous immunoglobulin heavy chain is disclosed in U.S. Pat. No. 5,939,598. It can be obtained by a method including deleting the J segment genes from at least one endogenous heavy chain locus in an embryonic stem cell to prevent rearrangement of the locus and to prevent formation of a transcript of a rearranged immunoglobulin heavy chain locus, the deletion being effected by a targeting vector containing a gene encoding a selectable marker; and producing from the embryonic stem cell a transgenic mouse whose somatic and germ cells contain the gene encoding the selectable marker.

[0340] A method for producing an antibody of interest, such as a human antibody, is disclosed in U.S. Pat. No. 5,916,771. It includes introducing an expression vector that contains a nucleotide sequence encoding a heavy chain into one mammalian host cell in culture, introducing an expression vector containing a nucleotide sequence encoding a light chain into another mammalian host cell, and fusing the two cells to form a hybrid cell. The hybrid cell expresses an antibody containing the heavy chain and the light chain.

[0341] In a further improvement on this procedure, a method for identifying a clinically relevant epitope on an immunogen, and a correlative method for selecting an antibody that binds immunospecifically to the relevant epitope with high affinity, are disclosed in PCT publication WO 99/53049.

[0342] 5.13.4 F_{ab} Fragments and Single Chain Antibodies

[0343] According to the invention, techniques can be adapted for the production of single-chain antibodies specific to an antigenic protein of the invention (see e.g., U.S. Pat. No. 4,946,778). In addition, methods can be adapted for the construction of Fab expression libraries (see e.g., Huse, et al., 1989 Science 246: 1275-1281) to allow rapid and effective identification of monoclonal F_{ab} fragments with the desired specificity for a protein or derivatives, fragments, analogs or homologs thereof. Antibody fragments that contain the idiotypes to a protein antigen may be produced by techniques known in the art including, but not limited to: (i) an F_{(ab′)2} fragment produced by pepsin digestion of an antibody molecule; (ii) an F_{ab} fragment generated by reducing the disulfide bridges of an F_{(ab′)2}fragment; (iii) an F_{ab} fragment generated by the treatment of the antibody molecule with papain and a reducing agent and (iv) FV fragments.

[0344] 5.13.5 Bispecific Antibodies

[0345] Bispecific antibodies are monoclonal, preferably human or humanized, antibodies that have binding specificities for at least two different antigens. In the present case, one of the binding specificities is for an antigenic protein of the invention. The second binding target is any other antigen, and advantageously is a cell-surface protein or receptor or receptor subunit.

[0346] Methods for making bispecific antibodies are known in the art. Traditionally, the recombinant production of bispecific antibodies is based on the co-expression of two immunoglobulin heavy-chain/light-chain pairs, where the two heavy chains have different specificities (Milstein and Cuello, Nature, 305:537-539 (1983)). Because of the random assortment of immunoglobulin heavy and light chains, these hybridomas (quadromas) produce a potential mixture of ten different antibody molecules, of which only one has the correct bispecific structure. The purification of the correct molecule is usually accomplished by affinity chromatography steps. Similar procedures are disclosed in WO 93/08829, published 13 May 1993, and in Traunecker et al., 1991 EMBO J., 10:3655-3659.

[0347] Antibody variable domains with the desired binding specificities (antibody-antigen combining sites) can be fused to immunoglobulin constant domain sequences. The fusion preferably is with an immunoglobulin heavy-chain constant domain, comprising at least part of the hinge, CH2, and CH3 regions. It is preferred to have the first heavy-chain constant region (CH1) containing the site necessary for light-chain binding present in at least one of the fusions. DNAs encoding the immunoglobulin heavy-chain fusions and, if desired, the immunoglobulin light chain, are inserted into separate expression vectors, and are co-transfected into a suitable host organism. For further details of generating bispecific antibodies see, for example, Suresh et al., Methods in Enzymology 121:210 (1986).

[0348] According to another approach described in WO 96/27011, the interface between a pair of antibody molecules can be engineered to maximize the percentage of heterodimers which are recovered from recombinant cell culture. The preferred interface comprises at least a part of the CH3 region of an antibody constant domain. In this method, one or more small amino acid side chains from the interface of the first antibody molecule are replaced with larger side chains (e.g. tyrosine or tryptophan). Compensatory “cavities” of identical or similar size to the large side chain(s) are created on the interface of the second antibody molecule by replacing large amino acid side chains with smaller ones (e.g. alanine or threonine). This provides a mechanism for increasing the yield of the heterodimer over other unwanted end-products such as homodimers.

[0349] Bispecific antibodies can be prepared as full length antibodies or antibody fragments (e.g. F(ab′)₂ bispecific antibodies). Techniques for generating bispecific antibodies from antibody fragments have been described in the literature. For example, bispecific antibodies can be prepared using chemical linkage. Brennan et al., Science 229:81 (1985) describe a procedure wherein intact antibodies are proteolytically cleaved to generate F(ab′)₂ fragments. These fragments are reduced in the presence of the dithiol complexing agent sodium arsenite to stabilize vicinal dithiols and prevent intermolecular disulfide formation. The Fab′ fragments generated are then converted to thionitrobenzoate (TNB) derivatives. One of the Fab′-TNB derivatives is then reconverted to the Fab′-thiol by reduction with mercaptoethylamine and is mixed with an equimolar amount of the other Fab′-TNB derivative to form the bispecific antibody. The bispecific antibodies produced can be used as agents for the selective immobilization of enzymes.

[0350] Additionally, Fab′ fragments can be directly recovered from E. coli and chemically coupled to form bispecific antibodies. Shalaby et al., J. Exp. Med. 175:217-225 (1992) describe the production of a fully humanized bispecific antibody F(ab′)₂ molecule. Each Fab′ fragment was separately secreted from E. coli and subjected to directed chemical coupling in vitro to form the bispecific antibody. The bispecific antibody thus formed was able to bind to cells overexpressing the ErbB2 receptor and normal human T cells, as well as trigger the lytic activity of human cytotoxic lymphocytes against human breast tumor targets.

[0351] Various techniques for making and isolating bispecific antibody fragments directly from recombinant cell culture have also been described. For example, bispecific antibodies have been produced using leucine zippers. Kostelny et al., J. Immunol. 148(5):1547-1553 (1992). The leucine zipper peptides from the Fos and Jun proteins were linked to the Fab′ portions of two different antibodies by gene fusion. The antibody homodimers were reduced at the hinge region to form monomers and then re-oxidized to form the antibody heterodimers. This method can also be utilized for the production of antibody homodimers. The “diabody” technology described by Hollinger et al., Proc. Natl. Acad. Sci. USA 90:6444-6448 (1993) has provided an alternative mechanism for making bispecific antibody fragments. The fragments comprise a heavy-chain variable domain (V_{H}) connected to a light-chain variable domain (V_{L}) by a linker which is too short to allow pairing between the two domains on the same chain. Accordingly, the V_{H} and V_{L} domains of one fragment are forced to pair with the complementary V_{L} and V_{H} domains of another fragment, thereby forming two antigen-binding sites. Another strategy for making bispecific antibody fragments by the use of single-chain Fv (sFv) diners has also been reported. See, Gruber et al., J. Immunol. 152:5368 (1994).

[0352] Antibodies with more than two valencies are contemplated. For example, trispecific antibodies can be prepared. Tutt et al., J. Immunol. 147:60 (1991). Exemplary bispecific antibodies can bind to two different epitopes, at least one of which originates in the protein antigen of the invention. Alternatively, an anti-antigenic arm of an immunoglobulin molecule can be combined with an arm which binds to a triggering molecule on a leukocyte such as a T-cell receptor molecule (e.g. CD2, CD3, CD28, or B7), or Fc receptors for IgG (FcγR), such as FcγRI (CD64), FcγRII (CD32) and FcγRIII (CD16) so as to focus cellular defense mechanisms to the cell expressing the particular antigen. Bispecific antibodies can also be used to direct cytotoxic agents to cells which express a particular antigen. These antibodies possess an antigen-binding arm and an arm which binds a cytotoxic agent or a radionuclide chelator, such as EOTUBE, DPTA, DOTA, or TETA. Another bispecific antibody of interest binds the protein antigen described herein and further binds tissue factor (° F.).

5.13.6 Heteroconjugate Antibodies

[0353] Heteroconjugate antibodies are also within the scope of the present invention. Heteroconjugate antibodies are composed of two covalently joined antibodies. Such antibodies have, for example, been proposed to target immune system cells to unwanted cells (U.S. Pat. No. 4,676,980), and for treatment of HIV infection (WO 91/00360; WO 92/200373; EP 03089). It is contemplated that the antibodies can be prepared in vitro using known methods in synthetic protein chemistry, including those involving crosslinking agents. For example, immunotoxins can be constructed using a disulfide exchange reaction or by forming a thioether bond. Examples of suitable reagents for this purpose include iminothiolate and methyl-4-mercaptobutyrimidate and those disclosed, for example, in U.S. Pat. No. 4,676,980.

[0354] 5.13.7 Effector Function Engineering

[0355] It can be desirable to modify the antibody of the invention with respect to effector function, so as to enhance, e.g., the effectiveness of the antibody in treating cancer. For example, cysteine residue(s) can be introduced into the Fc region, thereby allowing interchain disulfide bond formation in this region. The homodimeric antibody thus generated can have improved internalization capability and/or increased complement-mediated cell killing and antibody-dependent cellular cytotoxicity (ADCC). See Caron et al., J. Exp Med., 176: 1191-1195 (1992) and Shopes, J. Immunol., 148: 2918-2922 (1992). Homodimeric antibodies with enhanced anti-tumor activity can also be prepared using heterobifunctional cross-linkers as described in Wolff et al. Cancer Research, 53: 2560-2565 (1993). Alternatively, an antibody can be engineered that has dual Fc regions and can thereby have enhanced complement lysis and ADCC capabilities. See Stevenson et al., Anti-Cancer Drug Design, 3: 219-230 (1989).

[0356] 5.13.8 Immunoconjugates

[0357] The invention also pertains to immunoconjugates comprising an antibody conjugated to a cytotoxic agent such as a chemotherapeutic agent, toxin (e.g., an enzymatically active toxin of bacterial, fungal, plant, or animal origin, or fragments thereof), or a radioactive isotope (i.e., a radioconjugate).

[0358] Chemotherapeutic agents useful in the generation of such immunoconjugates have been described above. Enzymatically active toxins and fragments thereof that can be used include diphtheria A chain, nonbinding active fragments of diphtheria toxin, exotoxin A chain (from Pseudomonas aeruginosa), ricin A chain, abrin A chain, modeccin A chain, alpha-sarcin, Aleurites fordii proteins, dianthin proteins, Phytolaca americana proteins (PAPI, PAPII, and PAP-S), momordica charantia inhibitor, curcin, crotin, sapaonaria officinalis inhibitor, gelonin, mitogellin, restrictocin, phenomycin, enomycin, and the tricothecenes. A variety of radionuclides are available for the production of radioconjugated antibodies. Examples include ²¹²Bi, ¹³¹I, ⁹⁰Y, ⁹⁰Y, and ¹⁸⁶Re.

[0359] Conjugates of the antibody and cytotoxic agent are made using a variety of bifunctional protein-coupling agents such as N-succinimidyl-3-(2-pyridyldithiol)propionate (SPDP), iminothiolane (IT), bifunctional derivatives of imidoesters (such as dimethyl adipimidate HCL), active esters (such as disuccinimidyl suberate), aldehydes (such as glutareldehyde), bis-azido compounds (such as bis (p-azidobenzoyl)hexanediamine), bis-diazonium derivatives (such as bis-(p-diazoniumbenzoyl)-ethylenediamine), diisocyanates (such as tolyene 2,6-diisocyanate), and bis-active fluorine compounds (such as 1,5-difluoro-2,4-dinitrobenzene). For example, a ricin immunotoxin can be prepared as described in Vitetta et al., Science, 238: 1098 (1987). Carbon-14-labeled 1-isothiocyanatobenzyl-3-methyldiethylene triaminepentaacetic acid (MX-DTPA) is an exemplary chelating agent for conjugation of radionucleotide to the antibody. See WO94/11026.

[0360] In another embodiment, the antibody can be conjugated to a “receptor” (such streptavidin) for utilization in tumor pretargeting wherein the antibody-receptor conjugate is administered to the patient, followed by removal of unbound conjugate from the circulation using a clearing agent and then administration of a “ligand” (e.g., avidin) that is in turn conjugated to a cytotoxic agent.

4.14 Computer Readable Sequences

[0361] In one application of this embodiment, a nucleotide sequence of the present invention can be recorded on computer readable media. As used herein, “computer readable media” refers to any medium which can be read and accessed directly by a computer. Such media include, but are not limited to: magnetic storage media, such as floppy discs, hard disc storage medium, and magnetic tape; optical storage media such as CD-ROM; electrical storage media such as RAM and ROM; and hybrids of these categories such as magnetic/optical storage media A skilled artisan can readily appreciate how any of the presently known computer readable mediums can be used to create a manufacture comprising computer readable medium having recorded thereon a nucleotide sequence of the present invention. As used herein, “recorded” refers to a process for storing information on computer readable medium. A skilled artisan can readily adopt any of the presently known methods for recording information on computer readable medium to generate manufactures comprising the nucleotide sequence information of the present invention.

[0362] A variety of data storage structures are available to a skilled artisan for creating a computer readable medium having recorded thereon a nucleotide sequence of the present invention. The choice of the data storage structure will generally be based on the means chosen to access the stored information. In addition, a variety of data processor programs and formats can be used to store the nucleotide sequence information of the present invention on computer readable medium. The sequence information can be represented in a word processing text file, formatted in commercially-available software such as WordPerfect and Microsoft Word, or represented in the form of an ASCII file, stored in a database application, such as DB2, Sybase, Oracle, or the like. A skilled artisan can readily adapt any number of data processor structuring formats (e.g. text file or database) in order to obtain computer readable medium having recorded thereon the nucleotide sequence information of the present invention.

[0363] By providing any of the nucleotide sequences SEQ ID NO: 1-30368 or a representative fragment thereof; or a nucleotide sequence at least 95% identical to any of the nucleotide sequences of SEQ ID NO: 1-30368 in computer readable form, a skilled artisan can routinely access the sequence information for a variety of purposes. Computer software is publicly available which allows a skilled artisan to access sequence information provided in a computer readable medium. The examples which follow demonstrate how software which implements the BLAST (Altschul et al., J. Mol. Biol. 215:403-410 (1990)) and BLAZE (Brutlag et al., Comp. Chem. 17:203-207 (1993)) search algorithms on a Sybase system is used to identify open reading frames (ORFs) within a nucleic acid sequence. Such ORFs may be protein encoding fragments and may be useful in producing commercially important proteins such as enzymes used in fermentation reactions and in the production of commercially useful metabolites.

[0364] As used herein, “a computer-based system” refers to the hardware means, software means, and data storage means used to analyze the nucleotide sequence information of the present invention. The minimum hardware means of the computer-based systems of the present invention comprises a central processing unit (CPU), input means, output means, and data storage means. A skilled artisan can readily appreciate that any one of the currently available computer-based systems are suitable for use in the present invention. As stated above, the computer-based systems of the present invention comprise a data storage means having stored therein a nucleotide sequence of the present invention and the necessary hardware means and software means for supporting and implementing a search means. As used herein, “data storage means” refers to memory which can store nucleotide sequence information of the present invention, or a memory access means which can access manufactures having recorded thereon the nucleotide sequence information of the present invention.

[0365] As used herein, “search means” refers to one or more programs which are implemented on the computer-based system to compare a target sequence or target structural motif with the sequence information stored within the data storage means. Search means are used to identify fragments or regions of a known sequence which match a particular target sequence or target motif. A variety of known algorithms are disclosed publicly and a variety of commercially available software for conducting search means are and can be used in the computer-based systems of the present invention. Examples of such software includes, but is not limited to, Smith-Waterman, MacPattern (EMBL), BLASIN and BLASTA (NPOLYPEPTIDEIA). A skilled artisan can readily recognize that any one of the available algorithms or implementing software packages for conducting homology searches can be adapted for use in the present computer-based systems. As used herein, a “target sequence” can be any nucleic acid or amino acid sequence of six or more nucleotides or two or more amino acids. A skilled artisan can readily recognize that the longer a target sequence is, the less likely a target sequence will be present as a random occurrence in the database. The most preferred sequence length of a target sequence is from about 10 to 300 amino acids, more preferably from about 30 to 100 nucleotide residues. However, it is well recognized that searches for commercially important fragments, such as sequence fragments involved in gene expression and protein processing, may be of shorter length.

[0366] As used herein, “a target structural motif,” or “target motif,” refers to any rationally selected sequence or combination of sequences in which the sequence(s) are chosen based on a three-dimensional configuration which is formed upon the folding of the target motif. There are a variety of target motifs known in the art. Protein target motifs include, but are not limited to, enzyme active sites and signal sequences. Nucleic acid target motifs include, but are not limited to, promoter sequences, hairpin structures and inducible expression elements (protein binding sequences).

4.15 Triple Helix Formation

[0367] In addition, the fragments of the present invention, as broadly described, can be used to control gene expression through triple helix formation or antisense DNA or RNA, both of which methods are based on the binding of a polynucleotide sequence to DNA or RNA. Polynucleotides suitable for use in these methods are preferably 20 to 40 bases in length and are designed to be complementary to a region of the gene involved in transcription (triple helix—see Lee et al., Nucl. Acids Res. 6:3073 (1979); Cooney et al., Science 15241:456 (1988); and Dervan et al., Science 251:1360 (1991)) or to the mRNA itself (antisense—Olnno, J. Neurochem. 56:560 (1991); Oligodeoxynucleotides as Antisense Inhibitors of Gene Expression, CRC Press, Boca Raton, Fla. (1988)). Triple helix-formation optimally results in a shut-off of RNA transcription from DNA, while antisense RNA hybridization blocks translation of an mRNA molecule into polypeptide. Both techniques have been demonstrated to be effective in model systems. Information contained in the sequences of the present invention is necessary for the design of an antisense or triple helix oligonucleotide.

4.16 Diagnostic Assays and Kits

[0368] The present invention further provides methods to identify the presence or expression of one of the ORFs of the present invention, or homolog thereof, in a test sample, using a nucleic acid probe or antibodies of the present invention, optionally conjugated or otherwise associated with a suitable label.

[0369] In general, methods for detecting a polynucleotide of the invention can comprise contacting a sample with a compound that binds to and forms a complex with the polynucleotide for a period sufficient to form the complex, and detecting the complex, so that if a complex is detected, a polynucleotide of the invention is detected in the sample. Such methods can also comprise contacting a sample under stringent hybridization conditions with nucleic acid primers that anneal to a polynucleotide of the invention under such conditions, and amplifying annealed polynucleotides, so that if a polynucleotide is amplified, a polynucleotide of the invention is detected in the sample.

[0370] In general, methods for detecting a polypeptide of the invention can comprise contacting a sample with a compound that binds to and forms a complex with the polypeptide for a period sufficient to form the complex, and detecting the complex, so that if a complex is detected, a polypeptide of the invention is detected in the sample.

[0371] In detail, such methods comprise incubating a test sample with one or more of the antibodies or one or more of the nucleic acid probes of the present invention and assaying for binding of the nucleic acid probes or antibodies to components within the test sample.

[0372] Conditions for incubating a nucleic acid probe or antibody with a test sample vary. Incubation conditions depend on the format employed in the assay, the detection methods employed, and the type and nature of the nucleic acid probe or antibody used in the assay. One skilled in the art will recognize that any one of the commonly available hybridization, amplification or immunological assay formats can readily be adapted to employ the nucleic acid probes or antibodies of the present invention. Examples of such assays can be found in Chard, T., An Introduction to Radioimmunoassay and Related Techniques, Elsevier Science Publishers, Amsterdam, The Netherlands (1986); Bullock, G. R. et al., Techniques in Immunocytochemistry, Academic Press, Orlando, Fla. Vol. 1 (1982), Vol. 2 (1983), Vol. 3 (1985); Tijssen, P., Practice and Theory of immunoassays: Laboratory Techniques in Biochemistry and Molecular Biology, Elsevier Science Publishers, Amsterdam, The Netherlands (1985). The test samples of the present invention include cells, protein or membrane extracts of cells, or biological fluids such as sputum, blood, serum, plasma, or urine. The test sample used in the above-described method will vary based on the assay format, nature of the detection method and the tissues, cells or extracts used as the sample to be assayed. Methods for preparing protein extracts or membrane extracts of cells are well known in the art and can be readily be adapted in order to obtain a sample which is compatible with the system utilized.

[0373] In another embodiment of the present invention, kits are provided which contain the necessary reagents to carry out the assays of the present invention. Specifically, the invention provides a compartment kit to receive, in close confinement, one or more containers which comprises: (a) a first container comprising one of the probes or antibodies of the present invention; and (b) one or more other containers comprising one or more of the following: wash reagents, reagents capable of detecting presence of a bound probe or antibody.

[0374] In detail, a compartment kit includes any kit in which reagents are contained in separate containers. Such containers include small glass containers, plastic containers or strips of plastic or paper. Such containers allows one to efficiently transfer reagents from one compartment to another compartment such that the samples and reagents are not cross-contaminated, and the agents or solutions of each container can be added in a quantitative fashion from one compartment to another. Such containers will include a container which will accept the test sample, a container which contains the antibodies used in the assay, containers which contain wash reagents (such as phosphate buffered saline, Tris-buffers, etc.), and containers which contain the reagents used to detect the bound antibody or probe. Types of detection reagents include labeled nucleic acid probes, labeled secondary antibodies, or in the alternative, if the primary antibody is labeled, the enzymatic, or antibody binding reagents which are capable of reacting with the labeled antibody. One skilled in the art will readily recognize that the disclosed probes and antibodies of the present invention can be readily incorporated into one of the established kit formats which are well known in the art.

4.17 Medical Imaging

[0375] The novel polypeptides and binding partners of the invention are useful in medical imaging of sites expressing the molecules of the invention (e.g., where the polypeptide of the invention is involved in the immune response, for imaging sites of inflammation or infection). See, e.g., Kunkel et al., U.S. Pat. No. 5,413,778. Such methods involve chemical attachment of a labeling or imaging agent, administration of the labeled polypeptide to a subject in a pharmaceutically acceptable carrier, and imaging the labeled polypeptide in vivo at the target site.

4.18 Screening Assays

[0376] Using the isolated proteins and polynucleotides of the invention, the present invention further provides methods of obtaining and identifying agents which bind to a polypeptide encoded by an ORF corresponding to any of the nucleotide sequences set forth in SEQ ID NO: 1-30368, or bind to a specific domain of the polypeptide encoded by the nucleic acid. In detail, said method comprises the steps of:
[0377] (a) contacting an agent with an isolated protein encoded by an ORF of the present invention, or nucleic acid of the invention; and
[0378] (b) determining whether the agent binds to said protein or said nucleic acid.

[0379] In general, therefore, such methods for identifying compounds that bind to a polynucleotide of the invention can comprise contacting a compound with a polynucleotide of the invention for a time sufficient to form a polynucleotide/compound complex, and detecting the complex, so that if a polynucleotide/compound complex is detected, a compound that binds to a polynucleotide of the invention is identified.

[0380] Likewise, in general, therefore, such methods for identifying compounds that bind to a polypeptide of the invention can comprise contacting a compound with a polypeptide of the invention for a time sufficient to form a polypeptide/compound complex, and detecting the complex, so that if a polypeptide/compound complex is detected, a compound that binds to a polynucleotide of the invention is identified.

[0381] Methods for identifying compounds that bind to a polypeptide of the invention can also comprise contacting a compound with a polypeptide of the invention in a cell for a time sufficient to form a polypeptide/compound complex, wherein the complex drives expression of a receptor gene sequence in the cell, and detecting the complex by detecting reporter gene sequence expression, so that if a polypeptide/compound complex is detected, a compound that binds a polypeptide of the invention is identified.

[0382] Compounds identified via such methods can include compounds which modulate the activity of a polypeptide of the invention (that is, increase or decrease its activity, relative to activity observed in the absence of the compound). Alternatively, compounds identified via such methods can include compounds which modulate the expression of a polynucleotide of the invention (that is, increase or decrease expression relative to expression levels observed in the absence of the compound). Compounds, such as compounds identified via the methods of the invention, can be tested using standard assays well known to those of skill in the art for their ability to modulate activity/expression.

[0383] The agents screened in the above assay can be, but are not limited to, peptides, carbohydrates, vitamin derivatives, or other pharmaceutical agents. The agents can be selected and screened at random or rationally selected or designed using protein modeling techniques.

[0384] For random screening, agents such as peptides, carbohydrates, pharmaceutical agents and the like are selected at random and are assayed for their ability to bind to the protein encoded by the ORF of the present invention. Alternatively, agents may be rationally selected or designed. As used herein, an agent is said to be “rationally selected or designed” when the agent is chosen based on the configuration of the particular protein. For example, one skilled in the art can readily adapt currently available procedures to generate peptides, pharmaceutical agents and the like, capable of binding to a specific peptide sequence, in order to generate rationally designed antipeptide peptides, for example see Hurby et al., Application of Synthetic Peptides: Antisense Peptides,” In Synthetic Peptides, A User's Guide, W.H. Freeman, N.Y. (1992), pp. 289-307, and Kaspczak et al., Biochemistry 28:9230-8 (1989), or pharmaceutical agents, or the like.

[0385] In addition to the foregoing, one class of agents of the present invention, as broadly described, can be used to control gene expression through binding to one of the ORFs or EMFs of the present invention. As described above, such agents can be randomly screened or rationally designed/selected. Targeting the ORF or EMF allows a skilled artisan to design sequence specific or element specific agents, modulating the expression of either a single ORF or multiple ORFs which rely on the same EMF for expression control. One class of DNA binding agents are agents which contain base residues which hybridize or form a triple helix formation by binding to DNA or RNA. Such agents can be based on the classic phosphodiester, ribonucleic acid backbone, or can be a variety of sulfhydryl or polymeric derivatives which have base attachment capacity.

[0386] Agents suitable for use in these methods preferably contain 20 to 40 bases and are designed to be complementary to a region of the gene involved in transcription (triple helix—see Lee et al., Nucl. Acids Res. 6:3073 (1979); Cooney et al., Science 241:456 (1988); and Dervan et al., Science 251:1360 (1991)) or to the mRNA itself (antisense—Okano, J. Neurochem. 56:560 (1991); Oligodeoxynucleotides as Antisense Inhibitors of Gene Expression, CRC Press, Boca Raton, Fla. (1988)). Triple helix-formation optimally results in a shut-off of RNA transcription from DNA, while antisense RNA hybridization blocks translation of an mRNA molecule into polypeptide. Both techniques have been demonstrated to be effective in model systems. Information contained in the sequences of the present invention is necessary for the design of an antisense or triple helix oligonucleotide and other DNA binding agents.

[0387] Agents that bind to a protein encoded by one of the ORFs of the present invention can be used as a diagnostic agent. Agents which bind to a protein encoded by one of the ORFs of the present invention can be formulated using known techniques to generate a pharmaceutical composition.

4.19 Use of Nucleic Acids as Probes

[0388] Another aspect of the subject invention is to provide for polypeptide-specific nucleic acid hybridization probes capable of hybridizing with naturally occurring nucleotide sequences. The hybridization probes of the subject invention may be derived from any of the nucleotide sequences SEQ ID NO: 1-30368. Because the corresponding gene is only expressed in a limited number of tissues, a hybridization probe derived from of any of the nucleotide sequences SEQ ID NO: 1-30368 can be used as an indicator of the presence of RNA of cell type of such a tissue in a sample.

[0389] Any suitable hybridization technique can be employed, such as, for example, in situ hybridization. PCR as described in U.S. Pat. Nos. 4,683,195 and 4,965,188 provides additional uses for oligonucleotides based upon the nucleotide sequences. Such probes used in PCR may be of recombinant origin, may be chemically synthesized, or a mixture of both. The probe will comprise a discrete nucleotide sequence for the detection of identical sequences or a degenerate pool of possible sequences for identification of closely related genomic sequences.

[0390] Other means for producing specific hybridization probes for nucleic acids include the cloning of nucleic acid sequences into vectors for the production of mRNA probes. Such vectors are known in the art and are commercially available and may be used to synthesize RNA probes in vitro by means of the addition of the appropriate RNA polymerase as T7 or SP6 RNA polymerase and the appropriate radioactively labeled nucleotides. The nucleotide sequences may be used to construct hybridization probes for mapping their respective genomic sequences. The nucleotide sequence provided herein may be mapped to a chromosome or specific regions of a chromosome using well known genetic and/or chromosomal mapping techniques. These techniques include in situ hybridization, linkage analysis against known chromosomal markers, hybridization screening with libraries or flow-sorted chromosomal preparations specific to known chromosomes, and the like. The technique of fluorescent in situ hybridization of chromosome spreads has been described, among other places, in Verma et al (1988) Human Chromosomes: A Manual of Basic Techniques, Pergamon Press, New York N.Y.

[0391] Fluorescent in situ hybridization of chromosomal preparations and other physical chromosome mapping techniques may be correlated with additional genetic map data. Examples of genetic map data can be found in the 1994 Genome Issue of Science (265:1981f). Correlation between the location of a nucleic acid on a physical chromosomal map and a specific disease (or predisposition to a specific disease) may help delimit the region of DNA associated with that genetic disease. The nucleotide sequences of the subject invention may be used to detect differences in gene sequences between normal, carrier or affected individuals.

[0392] 4.20 Preparation of Support Bound Oligonucleotides

[0393] Oligonucleotides, i.e., small nucleic acid segments, may be readily prepared by, for example, directly synthesizing the oligonucleotide by chemical means, as is commonly practiced using an automated oligonucleotide synthesizer.

[0394] Support bound oligonucleotides may be prepared by any of the methods known to those of skill in the art using any suitable support such as glass, polystyrene or Teflon. One strategy is to precisely spot oligonucleotides synthesized by standard synthesizers. Immobilization can be achieved using passive adsorption (Inouye & Hondo, (1990) J. Clin. Microbiol. 28(6) 1469-72); using UV light (Nagata et al., 1985; Dahlen et al., 1987; Morrissey& Collins, (1989) Mol. Cell Probes 3(2) 189-207) or by covalent binding of base modified DNA (Keller et al., 1988; 1989); all references being specifically incorporated herein.

[0395] Another strategy that may be employed is the use of the strong biotin-streptavidin interaction as a linker. For example, Broude et al. (1994) Proc. Natl. Acad. Sci. USA 91(8) 3072-6, describe the use of biotinylated probes, although these are duplex probes, that are immobilized on streptavidin-coated magnetic beads. Streptavidin-coated beads may be purchased from Dynal, Oslo. Of course, this same linking chemistry is applicableto coating any surface with streptavidin Biotinylated probes may be purchased from various sources, such as, e.g., Operon Technologies (Alameda, Calif.).

[0396] Nunc Laboratories (Naperville, Ill.) is also selling suitable material that could be used. Nunc Laboratories have developed a method by which DNA can be covalently bound to the microwell surface termed Covalink NH. CovaLink NH is a polystyrene surface grafted with secondary amino groups (>NH) that serve as bridge-heads for further covalent coupling. CovaLink Modules may be purchased from Nunc Laboratories. DNA molecules may be bound to CovaLink exclusively at the 5′-end by a phosphoramidate bond, allowing immobilization of more than 1 pmol of DNA (Rasmussen et al., (1991) Anal. Biochem. 198(1) 138-42).

[0397] The use of CovaLink NH strips for covalent binding of DNA molecules at the 5′-end has been described (Rasmussen et al., (1991). In this technology, a phosphoramidate bond is employed (Chu et al., (1983) Nucleic Acids Res. 1 (8) 6513-29). This is beneficial as immobilization using only a single covalent bond is preferred. The phosphoramidate bond joins the DNA to the CovaLink NH secondary amino groups that are positioned at the end of spacer arms covalently grafted onto the polystyrene surface through a 2 nm long spacer arm. To link an oligonucleotide to CovaLink NH via an phosphoramidate bond, the oligonucleotide terminus must have a 5′-end phosphate group. It is, perhaps, even possible for biotin to be covalently bound to CovaLink and then streptavidin used to bind the probes.

[0398] More specifically, the linkage method includes dissolving DNA in water (7.5 ng/ul) and denaturing for 10 min. at 95° C. and cooling on ice for 10 min. Ice-cold 0.1 M 1-methylimidazole, pH 7.0 (1-MeIm₇), is then added to a final concentration of 10 mM 1-MeIm₇. A ss DNA solution is then dispensed into CovaLink NH strips (75 ul/well) standing on ice.

[0399] Carbodiimide 0.2 M 1-ethyl-3-(3-dimethylaminopropyl)-carbodiimide (EDC), dissolved in 10 mM 1-MeIm₇, is made fresh and 25 ul added per well. The strips are incubated for 5 hours at 50° C. After incubation the strips are washed using, e.g., Nunc-Immuno Wash; first the wells are washed 3 times, then they are soaked with washing solution for 5 min., and finally they are washed 3 times (where in the washing solution is 0.4 N NaOH, 0.25% SDS heated to 50° C.).

[0400] It is contemplated that a further suitable method for use with the present invention is that described in PCT Patent Application WO 90/03382 (Southern & Maskos), incorporated herein by reference. This method of preparing an oligonucleotide bound to a support involves attaching a nucleoside 3′-reagent through the phosphate group by a covalent phosphodiester link to aliphatic hydroxyl groups carried by the support. The oligonucleotide is then synthesized on the supported nucleoside and protecting groups removed from the synthetic oligonucleotide chain under standard conditions that do not cleave the oligonucleotide from the support. Suitable reagents include nucleoside phosphoramidite and nucleoside hydrogen phosphorate.

[0401] An on-chip strategy for the preparation of DNA probe for the preparation of DNA probe arrays may be employed. For example, addressable laser-activated photodeprotection may be employed in the chemical synthesis of oligonucleotides directly on a glass surface, as described by Fodor et al. (1991) Science 251(4995) 767-73, incorporated herein by reference. Probes may also be immobilized on nylon supports as described by Van Ness et al. (1991) Nucleic Acids Res. 19(12) 3345-50; or linked to Teflon using the method of Duncan & Cavalier (1988) Anal. Biochem. 169(1) 104-8; all references being specifically incorporated herein.

[0402] To link an oligonucleotide to a nylon support, as described by Van Ness et at (1991), requires activation of the nylon surface via alkylation and selective activation of the 5′-amine of oligonucleotides with cyanuric chloride.

[0403] One particular way to prepare support bound oligonucleotides is to utilize the light-generated synthesis described by Pease et al., (1994) PNAS USA 91(11) 5022-6, incorporated herein by reference). These authors used current photolithographic techniques to generate arrays of immobilized oligonucleotide probes (DNA chips). These methods, in which light is used to direct the synthesis of oligonucleotide probes in high-density, miniaturized arrays, utilize photolabile 5′-protected N-acyl-deoxynucleoside phosphoramidites, surface linker chemistry and versatile combinatorial synthesis strategies. A matrix of 256 spatially defined oligonucleotide probes may be generated in this manner.

[0404] 4.21 Preparation of Nucleic Acid Fragments

[0405] The nucleic acids may be obtained from any appropriate source, such as cDNAs, genomic DNA, chromosomal DNA, microdissected chromosome bands, cosmid or YAC inserts, and RNA, including mRNA without any amplification steps. For example, Sambrook et al. (1989) describes three protocols for the isolation ofhigh molecular weight DNA from mammalian cells (p. 9.14-9.23).

[0406] DNA fragments may be prepared as clones in M13, plasmid or lambda vectors and/or prepared directly from genomic DNA or cDNA by PCR or other amplification methods. Samples may be prepared or dispensed in multiwell plates. About 100-1000 ng of DNA samples may be prepared in 2-500 ml of final volume.

[0407] The nucleic acids would then be fragmented by any of the methods known to those of skill in the art including, for example, using restriction enzymes as described at 9.24-9.28 of Sambrook et al. (1989), shearing by ultrasound and NaOH treatment.

[0408] Low pressure shearing is also appropriate, as described by Schriefer et at (1.990) Nucleic Acids Res. 18(24) 7455-6, incorporated herein by reference). In this method, DNA samples are passed through a small French pressure cell at a variety of low to intermediate pressures. A lever device allows controlled application of low to intermediate pressures to the cell. The results of these studies indicate that low-pressure shearing is a useful alternative to sonic and enzymatic DNA fragmentation methods.

[0409] One particularly suitable way for fragmenting DNA is contemplated to be that using the two base recognition endonuclease, CviJI, described by Fitzgerald et al. (1992) Nucleic Acids Res. 20(14) 3753-62. These authors described an approach for the rapid fragmentation and fractionation of DNA into particular sizes that they contemplated to be suitable for shotgun cloning and sequencing.

[0410] The restriction endonuclease CviJI normally cleaves the recognition sequence PuGCPy between the G and C to leave blunt ends. A typical reaction conditions, which alter the specificity of this enzyme (CviJI**), yield a quasi-random distribution of DNA fragments form the small molecule pUC19 (2688 base pairs). Fitzgerald et al. (1992) quantitatively evaluated the randomness of this fragmentation strategy, using a CviJI** digest ofpUCl9 that was size fractionated by a rapid gel filtration method and directly ligated, without end repair, to a lac Z minus M13 cloning vector. Sequence analysis of 76 clones showed that CviJI** restricts pyGCPy and PuGCPu, in addition to PuGCPy sites, and that new sequence data is accumulated at a rate consistent with random fragmentation.

[0411] As reported in the literature, advantages of this approach compared to sonication and agarose gel fractionation include: smaller amounts of DNA are required (0.2-0.5 ug instead of 2-5 ug); and fewer steps are involved (no preligation, end repair, chemical extraction, or agarose gel electrophoresis and elution are needed.

[0412] Irrespective of the manner in which the nucleic acid fragments are obtained or prepared, it is important to denature the DNA to give single stranded pieces available for hybridization. This is achieved by incubating the DNA solution for 2-5 minutes at 80-90° C. The solution is then cooled quickly to 2° C. to prevent renaturation of the DNA fragments before they are contacted with the chip. Phosphate groups must also be removed from genomic DNA by methods known in the art.

[0413] 4.22 Preparation of DNA Arrays

[0414] Arrays may be prepared by spotting DNA samples on a support such as a nylon membrane. Spotting may be performed by using arrays of metal pins (the positions of which correspond to an array of wells in a microtiter plate) to repeated by transfer of about 20 nl of a DNA solution to a nylon membrane. By offset printing, a density of dots higher than the density of the wells is achieved. One to 25 dots may be accommodated in 1 mm2, depending on the type of label used. By avoiding spotting in some preselected number of rows and columns, separate subsets (subarrays) may be formed. Samples in one subarray may be the same genomic segment of DNA (or the same gene) from different individuals, or may be different, overlapped genomic clones. Each of the subarrays may represent replica spotting of the same samples. In one example, a selected gene segment may be amplified from 64 patients. For each patient, the amplified gene segment may be in one 96-well plate (all 96 wells containing the same sample). A plate for each of the 64 patients is prepared. By using a 96-pin device, all samples may be spotted on one 8×12 cm membrane. Subarrays may contain 64 samples, one from each patient. Where the 96 subarrays are identical, the dot span may be 1 mm² and there may be a 1 mm space between subarrays.

[0415] Another approach is to use membranes or plates (available from NUNC, Naperville, Ill.) which may be partitioned by physical spacers e.g. a plastic grid molded over the membrane, the grid being similar to the sort of membrane applied to the bottom of multiwell plates, or hydrophobic strips. A fixed physical spacer is not preferred for imaging by exposure to flat phosphor-storage screens or x-ray films.

[0416] The present invention is illustrated in the following examples. Upon consideration of the present disclosure, one of skill in the art will appreciate that many other embodiments and variations may be made in the scope of the present invention. Accordingly, it is intended that the broader aspects of the present invention not be limited to the disclosure of the following examples. The present invention is not to be limited in scope by the exemplified embodiments which are intended as illustrations of single aspects of the invention, and compositions and methods which are functionally equivalent are within the scope of the invention. Indeed, numerous modifications and variations in the practice of the invention are expected to occur to those skilled in the art upon consideration of the present preferred embodiments. Consequently, the only limitations which should be placed upon the scope of the invention are those which appear in the appended claims.

[0417] All references cited within the body of the instant specification are hereby incorporated by reference in their entirety.

### 5.0 EXAMPLES

### 5.1 Example 1

[0418] Novel Nucleic Acid Sequences Obtained From Various Libraries A plurality of novel nucleic acids were obtained from cDNA libraries prepared from various human tissues and in some cases isolated from a genomic library derived from human chromosome using standard PCR, SBH sequence signature analysis and Sanger sequencing techniques. The inserts of the library were amplified with PCR using primers specific for the vector sequences which flank the inserts. Clones from cDNA libraries were spotted on nylon membrane filters and screened with oligonucleotide probes (e.g., 7-mers) to obtain signature sequences. The clones were clustered into groups of similar or identical sequences. Representative clones were selected for sequencing.

[0419] In some cases, the 5′ sequence of the amplified inserts was then deduced using a typical Sanger sequencing protocol. PCR products were purified and subjected to fluorescent dye terminator cycle sequencing. Single pass gel sequencing was done using a 377 Applied Biosystems (ABI) sequencer to obtain the novel nucleic acid sequences. In some cases RACE (Rapid Amplification of cDNA Ends) was performed to further extend the sequence in the 5′ direction.

### 5.2 Example 2

[0420] Novel Contigs

[0421] The novel contigs of the invention were assembled from sequences that were obtained from a cDNA library by methods described in Example 1 above, and in some cases sequences obtained from one or more public databases. The sequences for the resulting nucleic acid contigs are designated as SEQ ID NO: 1-30368 and are provided in the attached Sequence Listing. The contigs were assembled using an EST sequence as a seed. Then a recursive algorithm was used to extend the seed EST into an extended assemblage, by pulling additional sequences from different databases (i.e., Hyseq's database containing EST sequences, dbEST version 115, gb pri 115, and UniGene version 103, and exons from public domain genomic sequences predicted by GenScan) that belong to this assemblage. The algorithm terminated when there was no additional sequences from the above databases that would extend the assemblage. Further, the inclusion of component sequences into the assemblage was based on a BLASTN hit to the extending assemblage with BLAST score greater than 300 and percent identity greater than 95%.

[0422] The novel predicted polypeptides (including proteins) encoded by the novel polynucleotides (SEQ ID NO: 1-30368) of the present invention are incorporated in the attached Sequence Listing. A subset the predicted polypeptide sequences contain an unknown amino acid, a stop codon, a possible nucleotide deletion or a possible nucleotide insertion. These sequences have been shown in their entirety with the special characters in Table 2. Table 2 also shows the corresponding start and stop nucleotide locations to each of SEQ ID NO: 1-30368. Table 2 also indicates the method by which the polypeptide was predicted. Method A refers to a polypeptide obtained by using a software program called FASTY (available from http://fastabioch.virginia.edu) which selects a polypeptide based on a comparison of the translated novel polynucleotide to known polynucleotides (W. R Pearson, Methods in Enzymology, 183:63-98 (1990), herein incorporated by reference). Method B refers to a polypeptide obtained by using a software program called GenScan for human/vertebrate sequences (available from Stanford University, Office of Technology Licensing) that predicts the polypeptide based on a probabilistic model of gene structure/compositional properties (C. Burge and S. Karlin, J. Mol. Biol., 268:78-94(1997), incorporated herein by reference). Method C refers to a polypeptide obtained by using a Hyseq proprietary software program that translates the novel polynucleotide and its complementary strand into six possible amino acid sequences (forward and reverse frames) and chooses the polypeptide with the longest open reading frame.

[0423] The nearest neighbor results for SEQ ID NO: 1-30368 were obtained by a BLASTP version 2.0al 19 MP-WashU search against Genpept release 121 and Geneseq release 200103 (Derwent), using BLAST algorithm. The nearest neighbor result showed the closest homologue for SEQ ID NO: 1-30368. The nearest neighbor results for SEQ ID NO: 1-30368 are incorporated in the attached Sequence Listing.

[0424] Using eMatrix software package (Stanford University, Stanford, Calif.) (Wu et al., J. Comp. Biol., Vol. 6 pp. 219-235 (1999) herein incorporated by reference), all the sequences were examined to determine whether they had identifiable signature regions. The attached Sequence Listing provodes the results obtained by eMatrix analysis for each polypeptide as follows: the signature region found in the indicated polypeptide sequences, the description of the signature, the eMatrix p-value(s) and the position(s) of the signature within the polypeptide sequence.

[0425] Using the pFam software program (Sonnhammer et al., Nucleic Acids Res., Vol. 26(1) pp. 320-322 (1998) herein incorporated by reference) all the polypeptide sequences were examined for domains with homology to certain peptide domains. The attached Sequence Listing provides the results obtained by PFAM analysis for each peptide, namely: the name of the domain found, the description, the p-value and the pFam score for the identified domain within the sequence.

[0426] Tables 1 and 2 follow. Table I shows the various tissue sources of SEQ ID NO: 1-30368. Table 2 shows the start and stop nucleotides for the translated amino acid sequence for which each assemblage encodes. Table 2 also provides a correlation between the amino acid sequences set forth in the Sequence Listing, the nucleotide sequences set forth in the Sequence Listing and the SEQ ID NO: in U.S. Ser. No. 09/540,217

1. An isolated polynucleotide comprising a nucleotide sequence selected from the group consisting of SEQ ID NO: 1-30368, a mature protein coding portion of SEQ ID NO: 1-30368, an active domain of SEQ ID NO: 1-30368, and complementary sequences thereof.

2. An isolated polynucleotide encoding a polypeptide with biological activity, wherein said polynucleotide hybridizes to the polynucleotide of claim 1 under stringent hybridization conditions.

3. An isolated polynucleotide encoding a polypeptide with biological activity, wherein said polynucleotide has greater than about 90% sequence identity with the polynucleotide of claim 1.

4. The polynucleotide of claim 1 wherein said polynucleotide is DNA.

5. An isolated polynucleotide of claim 1 wherein said polynucleotide comprises the complementary sequences.

6. A vector comprising the polynucleotide of claim 1.

7. An expression vector comprising the polynucleotide of claim 1.

8. A host cell genetically engineered to comprise the polynucleotide of claim 1.

9. A host cell genetically engineered to comprise the polynucleotide of claim 1 operatively associated with a regulatory sequence that modulates expression of the polynucleotide in the host cell.

10. An isolated polypeptide, wherein the polypeptide is selected from the group consisting of:
(a) a polypeptide encoded by any one of the polynucleotides of claim 1; and
(b) a polypeptide encoded by a polynucleotide hybridizing under stringent conditions with any one of SEQ ID NO: 1-30368.

11. A composition comprising the polypeptide of claim 10 and a carrier.

12. An antibody directed against the polypeptide of claim 10.

13. A method for detecting the polynucleotide of claim 1 in a sample, comprising:
a) contacting the sample with a compound that binds to and forms a complex with the polynucleotide of claim 1 for a period sufficient to form the complex; and
b) detecting the complex, so that if a complex is detected, the polynucleotide of claim 1 is detected.

14. A method for detecting the polynucleotide of claim 1 in a sample, comprising:
a) contacting the sample under stringent hybridization conditions with nucleic acid primers that anneal to the polynucleotide of claim 1 under such conditions;
b) amplifying a product comprising at least a portion of the polynucleotide of claim 1; and
c) detecting said product and thereby the polynucleotide of claim 1 in the sample.

15. The method of claim 14, wherein the polynucleotide is an RNA molecule and the method further comprises reverse transcribing an annealed RNA molecule into a cDNA polynucleotide.

16. A method for detecting the polypeptide of claim 10 in a sample, comprising:
a) contacting the sample with a compound that binds to and forms a complex with the polypeptide under conditions and for a period sufficient to form the complex; and
b) detecting formation of the complex, so that if a complex formation is detected, the polypeptide of claim 10 is detected.

17. A method for identifying a compound that binds to the polypeptide of claim 10, comprising:
a) contacting the compound with the polypeptide of claim 10 under conditions sufficient to form a polypeptide/compound complex; and
b) detecting the complex, so that if the polypeptide/compound complex is detected, a compound that binds to the polypeptide of claim 10 is identified.

18. A method for identifying a compound that binds to the polypeptide of claim 10, comprising:
a) contacting the compound with the polypeptide of claim 10, in a cell, under conditions sufficient to form a polypeptide/compound complex, wherein the complex drives expression of a reporter gene sequence in the cell; and
b) detecting the complex by detecting reporter gene sequence expression, so that if the polypeptide/compound complex is detected, a compound that binds to the polypeptide of claim 10 is identified.

19. A method of producing the polypeptide of claim 10, comprising,
a) culturing a host cell comprising a polynucleotide sequence selected from the group consisting of a polynucleotide sequence of SEQ ID NO: 1-30368, a mature protein coding portion of SEQ ID NO: 1-30368, an active domain of SEQ ID NO: 1-30368, complementary sequences thereof and a polynucleotide sequence hybridizing under stringent conditions to SEQ ID NO: 1-30368, under conditions sufficient to express the polypeptide in said cell; and
b) isolating the polypeptide from the cell culture or cells of step (a).

20. An isolated polypeptide comprising an amino acid sequence selected from the group consisting of SEQ ID NO: 30369-60736, the mature protein portion thereof, or the active domain thereof.

21. The polypeptide of claim 20 wherein the polypeptide is provided on a polypeptide array.

22. A collection of polynucleotides, wherein the collection comprises the sequence information of at least one of SEQ ID NO: 1-30368.

23. The collection of claim 22, wherein the collection is provided on a nucleic acid array.

24. The collection of claim 23, wherein the array detects full-matches to any one of the polynucleotides in the collection.

25. The collection of claim 23, wherein the array detects mismatches to any one of the polynucleotides in the collection.

26. The collection of claim 22, wherein the collection is provided in a computer-readable format.

27. A method of treatment comprising administering to a mammalian subject in need thereof a therapeutic amount of a composition comprising a polypeptide of claim 10 or 20 and a pharmaceutically acceptable carrier.

28. A method of treatment comprising administering to a mammalian subject in need thereof a therapeutic amount of a composition comprising an antibody that specifically binds to a polypeptide of claim 10 or 20 and a pharmaceutically acceptable carrier.

The application's sequence listing, which the Patent Office published only in electronic form, follows.

SEQUENCE LISTING (60736 sequences)

SEQ ID NO: 1 - DNA, 397 bp, Homo sapiens
  SIMILAR (127)..(249): 341254mologous to Bos taurus NADH:ubiquinone oxidoreductase (428 AA),accession number X14338,Smith-Waterman Score=80.
gttgacacatatacatacttgaatgaataacttaattcttaggagacacttaaataagaattatttctgttattgaaacacagttccagttacagggtctttgaaatcatgagagagttgtacagttatatttctgtatagtgtgaagagctatcttattttttgcagattacttactttgttaatatacctccccctcctttaaccaattggtccattattattgtaagcgtattacaaagaatactcctttggaagtcagaagaatgatacctaatctttaatttcttatcaggaactaggttttcattgtatgatggacacgatgtaacccctaaagacagaaaaagaagtgaaaaatagtcctcattctcatggatttatagctgtagtagaa

SEQ ID NO: 2 - DNA, 735 bp, Homo sapiens
atgagtggagatatcagtggcaatggaatgtttttaagggaggaaggaattcagaatacacgtctatacacagcaaagcctgttgatcttgtcatggccatggacctgcaccagtctgtggcccgaaggctggggacccctggggttacatcgtgtccatcatacaatgaaaaactagttcctgataagaaattaaagattaggtatcattcttctgacttccaaaagagtattctttgtaatacgcttacaataataatggaccaattggttaaaggagggggagctatcatggtaaaaggcttgacacagccctgttcaggcttgtccgtgtgccaaaatcaacatacaatacgtacttctgggttttttagagctgaccccaaaatatctatttacccagacgttgacattctcatgagtaataggcaaagctccgaggacatgctgttgattcctacacgaagaaacctcaaacccaggattcaagccaaaaacaatgattctcaagttcctatgaaatcctggatggatgttgaactgggcaacgtactagctgactcccgtggcagatgcgagcctcaacaaagctccagggctggcacttcaagggagcggaggagcctgcctcctatctatggcctacagctcctttgccctgtgatttttggttggcctttgccaactggaagcactggcaggaaatcagaggatgagaagagggacagcaaatga

SEQ ID NO: 3 - DNA, 783 bp, Homo sapiens
  SIMILAR (488)..(736): 361254mologous to Homo sapiens pro-alpha-1 type-I collagen,accession number K03179,Smith-Waterman Score=87.
atgcccagcgagcggagggccggcctccctccctccctcccggaccgcgggcgggcgggcgaacacgacggctcctcaaactcgcggggcggggcggggcggcaagcccgctcaatcgcgcgcagacacagcgaggcgatccgcgctgccggctcggcgcagaaatacgaccagagagacttgcatgcaaacattcctaacagcattgtccacgccaaccagaacgtccaccaaccgcggatgcatgagcagcagggaaatggccatgaaaagaaactgctgagacatgggcctacatggatgaacctcaaaaacgctaggccagcggcatcaattgagctgcaccatctcttcggcgttcacaatcgtacacaacgggccacccgcctgcagacaccactgccgagtccaagggcccccacgaacatccgacagggggccccttacctggtcggctccaccctcagccatcttggaagtggtaaacggccggaagggggaaggggctcgagcgggcagggctcaggcgtagggagccgaccggcggagcgcatcgatggggctcccctgccccggccgcccctccccgcgttcttgaatgccttcgtgttcctggaccctggcacccagcccagggcccccacaggagggaacagcagccaaggcttgctgagccccgcacggggcttcactggagccccaggcccggggacctccttctcagccacgaccacctgccaggagacgcccccgcagctgcccatctgcccacagatgttctaa

SEQ ID NO: 4 - DNA, 1175 bp, Homo sapiens
  SIMILAR (321)..(404): 421254mologous to Homo sapiens Human prostate cancer- associated protein 73,accession number Y48376,Smith-Waterman Score= 75.
tttttttttttttaagtgttccacgattttaataaatgtatacagttatgcaactatcattgcaatctaagtttcaaaatatgttcgacatccaaagttttatttttcatcacccaaaaaagttccttcgtgcctgtttgcagttgatcccactctcacccccaggcaaacatgaatttgcttcctctctagagatttacctttttaagaagtgtcacataaatggaataatgggattttccttgtctggcatctttcacctggcctagcgtttttgaggttcatccatgtaggcccatgtctcagcagttcctttccatgggcaatttccctgctgctcatgcatccgcggttggtggacgttctggttggcgtggacaatgctgttaggaatgtttgcatgcaagtctctctggtcgtatttctcttggcgtgggttccagggagtatggtaggggatgctgaattatagaagaagctgcaccattttacactcctaccaaggatttaggagaattccagcttctctacgtctttgctatcacttgccattgtcctttttattttatcctggcggccgtcacaggcttcctctgattggagacctgtctgccggcgatttggtagttctgaatcccaggagatctgcgggggggagccttgggttagcccccgtcacggaaaagcctcgtgttgtcgcagaccgggacttgctcaagccctggggaacttgggggcccgcggctgaaccaagaaagtaaattttgaccccgacgtaagtccttatggtgtaggggtcgaagtttaaagacttgtttttaaaaacctgaggtctcatcgacagcgtaccgcgccaatctgaagggcgctgtcccgccagcttccgtctccctcccggcagccccggggcgcctgttcggcttctctgagtgttttgtgtgctccctgacgttttaaacccacctgttaatactttgtgaaaaacaggagccacggtagcccgtaaaaactgctcacaatcaccccgccacccagagctcactagtgcgactatttttgtgaaatttcttttggcaacaagtttctcagctctcgggtgatctttaaggcagaagctggctctccgcgtgtcggcgcggaattccagcacactcactagtgtctcaggttaccct

SEQ ID NO: 5 - DNA, 1113 bp, Homo sapiens
  SIMILAR (218)..(84): 371254mologous to Homo sapiens Amino acid sequence of the tumour marker polypeptide ZSIG62,accession number B07510,Smith- Waterman Score=76.
atgaagagacccaattctgacctaagtactaattgttcagggacaaaggtatgtctagacccagcctatggtgaggaagatgagggacttccaggaaggcttcctgaaggagaaggcctgagggagcccacagagtgcgatgggtggacaagcctgcaggccgcagggtggatgagtgttcacacgggaggctcgcaggagatgaggctgcagggccagaaaatagcaatggccaatgctgaatgcttatgccgtgccagaccctgtgcaagtgcactttcctgcccaacagcccaacaagctaggcatcctgataccatcttaccgaggcagctggggcactggaaagcagtgactcgtgtgaagttgctcaacagttaccatggtaggtcacccttcacaaccctgcggcattccaaaacaaggaaggaatctatttggaacaagcaatccatagcaaatcagaatgcccttttccagttccccacccaggtctccttaacagcatttatcacaggcctcaagaggccttgcaagtccttttctgcctccacaggatgccgtttcttaatagtcaccacaggaatggtgtctgccgtgcagccagaaactcaggatggccaacttcgatcctttgacaccatctggcaactgagagcccaaaggaattccattattagtgtgaaccaacgtataaactctctgcagggcttatgtatttattaccagaagggaataaacacagatctaaaaagcacatattttcaaaagcctgatgctggtagaagtcacagtggaagcaggagccacaagctccgaacagagccagccagctcccagcacaaaggacgctgcagtaagacatcaagtataggaggccttgctgttgaacttatgttgctcactgtatctgtcccttggagccagagtatgtctcagcaggccacccagggccctgctagcccatgcagccctttcgtcaaaagagcagaacctccagagtgtctgctgggcaaatggctgcccagctgcagactgatctcctcagcacccccacagctaggtgtgcccactaagtccctcttcccacaggctgataagcagacaaagtga

SEQ ID NO: 6 - DNA, 412 bp, Homo sapiens
cgatgttcagaatccagtatttttggtatgtaccaccccccaccaacagacacatgatgcacatgatacatttccaacaaaggtactctgaggaccacacttcgagaaccatttctaaagcctcagtgacactcagtctttcaagaagcccaggtgagcagtaaacatattccctgaaggctcgctgaggagccctcccactttaaaataaagacttagggagcactgacccacccggagtcagaaataagttcctaaaggcaatggaggaggtgactccatgagtacttcccaaatactcaaggcccttctaccgtgcgcacctttcctttgtcctgccatttttagctcccagcacaaaggacgctgcagtaagacatcaagtataggaggccttgctgttgaacttatg

SEQ ID NO: 7 - DNA, 420 bp, Homo sapiens
  SIMILAR (110)..(12): 631254mologous to Homo sapiens Human secreted protein fragment encoded from gene 42,accession number Y07785,Smith- Waterman Score=123.
atggagtggcaaggggtgtgtgagcaagtaagcacagggtccatccatggtgcacagccaggcacaccggctgctgtggcagggcagacagctccagactctggcacaggcatgagcccgtacaagggtgtggctggaccagcatctagatgtggggaatgcggtggtgcccgaaaactcagagatgccagcaaacatggagccccaagggagcagaagcattgccagtcttcactcctgtggtctggcagacaagagtgtgtcactgcctgcagcttggtgagctggccaggaacatgttacagcgcttttcatacccacccttcggcacgtcccaggttcttgtcccgtgtccaagaagaatcaggttatgtggacaaccggagggttagcaaggtggagaagagttttactgagtga

SEQ ID NO: 8 - DNA, 594 bp, Homo sapiens
  SIMILAR (99)..(13): 681254mologous to Homo sapiens Human secreted protein, SEQ ID NO: 7266,accession number G03185,Smith-Waterman Score=90.
ttgctcatcagttatcgttagtgtccgtgtattttacgtgtggcccaagacagttcttcttgttccagtgtggcccagggaagccaaaagattggacactcctggaggtgcagcacagtatctaacactacctcaatactttttccaccgaactacgtaagacccagcccacagcccagaaaaagaacttcccacaggaaaaggaggaagaggaaaatgtggaggaaattctacgaggaggggattggcccaaccgccaagtcagcatgggatgctgggacaccctggccgtgcgagaaacagaaacgtgagaagttggaagaaaggagcataaagagatgggagaaggcaaaaggcagacactgccacttaagcactagtctagtaagactagtacttaataaagtacaagaaaaaagaacggtcattaacatcctaactctctaaagcacaggagcctttttaaagggcttgaggaagtggcagagacaaactccaagaaagcctggaggaggggatcacacagcagctccctgattcactaattcagaggtggtccccagcatcttgttaagcagactgccaacccccagc

SEQ ID NO: 9 - DNA, 687 bp, Homo sapiens
  SIMILAR (167)..(21): 381254mologous to Homo sapiens Human secreted protein ya11_1,accession number Y26346,Smith-Waterman Score=70.
atgagccaccgcgcctggcctccttgctgcactggtcctaatgccccgagccaagttccactggttcttcttgaagatgtatcgaatgtgtatggtgatgtagaaattgatcgtaataaacacatccataaaaagaggaaactagctgaaggaagagaaaaaaccatgagttcagacgatgaagactgttcggcgaaaggaagaaatcgtcacattgtagtcaataaagccgaacttgctaactccactgaagtgttagaaagctttaaattggccagggagagctgggagttgctctattccctagaattccttgacaaagaatttacaaggatttgcttggcctggaagacggatacttggctttggttaagaatcttcctcactgatatgatcatctatcagggtcaatataaaaaggcgatagccagcctgcatcacttagcagctctccagggatccatttctcagccacagatcacagggcaggggaccctggagcatcagagggcgctcatccagctggcgacgtgccactttgcgctaggggagtacagacgaagagaaggaatggggattaaaactggggctgtggcagttgatcttctgaaagtcgtgaaagacatgattcaaggaattgggaatcttacaaccctcttccattttccactgctaggtgacttctaa

SEQ ID NO: 10 - DNA, 598 bp, Homo sapiens
  SIMILAR (202)..(53): 421254mologous to Homo sapiens Polyproline-rich domain from dynamin,accession number Y56033,Smith-Waterman Score=77.
ggtgggggacccgtcctctgagaagcctgcagcttctcctccagtacccttccagcccacctggctggctgtggggataatgggcacttgggagcattggagggggaggaagcatagagaaagcagcaggagacgcacctggaagcccaggggagggaagtccacctccctgcaagtgtagggcagtgagaggagccctggcaccagcagagcaagaaagaaatgcatgcaccgttcagaataagctgtcaggtcgtctggctgtttaagatttatttattaatggtatgtgacatttagcatttctcaatgcctaagattaaactaatgctttgaatcctgatcatgcttttgagctgctcctcttgggtacttgtggcatcgtgttggcagaccctgagtgacatcttcagcggcgggaaaacgaaatgtatttcactgggatgtcaaatcaacagtgccttgacatctttccacactgctttggaacttgcagtagaccagagagaaattcaacatgtctgtctgtatgaaattggttggtgcagcatgatagagctcaatctcaaggatgcatttgattcctttgagaggctaa

SEQ ID NO: 11 - DNA, 960 bp, Homo sapiens
  SIMILAR (52)..(735): 541254mologous to Homo sapiens Cellular DNA-binding protein RS1,accession number R14163,Smith-Waterman Score=485.
atggggcaggcagctgtccacagccacgggctcctcaacaccagccaccgggctttccaggggcttgaagccaatgacaaagagggtgtcctcacaggccagccatgggggacaacaggggccagagtgaaagacacgcaggcagaaaggaaggcgccacggagtgggaaaaggcggtgtgttcatcatgtgtttactgaaccacagtgtgggcacctcagtgcaaccaatgagaaaacgtggagaagaaggagtttgagagcttatgtaaagatcgaggaatactcaggcttgtcacctggagaagagataagtggagagctggctgaacgtgcccatgtggataggtccaagagagagaagtcagcagctgcacagatgcaaaaactgttggtggggcaaggatttttccccctgcgggccagtggacactgcgcagaagccaattttaatcatgaaaggatttcaccaacaatggttgcctgcaagggaaaagccaccagtagaatgagactggaggcatgtgaaagagctgatgaaggcctgcaagattccgagtccgaaaggtccctgagtagattggaagcagtgacagcacgctcctttgaagaggaaggagagcatttgggcagtagaaaacacagaatgtccgaagaaaaagactgtggtggcggagatgctctctccaatggcatcaagaaacacaggagtctgaatgggggcagcgggctacaaaggaggcatcagtcaactttacagagtggagaatgttgtatcaggaaagaactgtggctgatgattgagctgcgttcgctgacaaggagtaagagtggggatgaggacagttacaatacaggagctgtcccaagcaataagaacaccatggccaacacagcgaggaatgcactgtgcagtgagatggcagtggaaggcacagaacgggcagacatgagactgtga

SEQ ID NO: 12 - DNA, 480 bp, Homo sapiens
  SIMILAR (7)..(456): 291254mologous to Homo sapiens unknown,accession number AF007170,Smith-Waterman Score=179.
gcccctttagctacattagctctgctctggtatcatactgtagtccgcccgttttttgccttggatggcagtgataacaaggcaggcctggatgaagctaaggaaattctccttaaaaaagaagctgcttatccaaattcttccctctttatgtttttcaagggacggatacaacgactagagtgtcaaatcaacagtgccttgacatctttccacactgctttggaacttgcagtagaccagagagaaattcaacatgtctgtctgtatgaaattggttggtgcagcatgatagagctcaatttcaaggatgcatttgattcctttgagaggctaaaaaatgagtccaggtggtcccagtgctattatgcctacttgactgcagtttgtcagggagccactggtgatgtggatggggcacagattgtctttaaagaagttcagaaactcttcaaaaggaaaaacaatcagattggtaac

SEQ ID NO: 13 - DNA, 478 bp, Homo sapiens
  SIMILAR (458)..(318): 321254mologous to Human immunodeficiency virus type 1 tat,accession number Y16021,Smith-Waterman Score=67.
aaggtccaggttgtttttatggcagtctgggttctgcctctccttccctctctgttatttgacccagccgtgtgcctttccattttcttgaatgcgttcattctgagttactaaaagaaatggaaagctgtttaaattattatagattacaacattttattaaaagaggcttgtagaattttagcagcttttcaaatgattaaaaaataaatctacttattgaattgatgataaacccacatcctttgtgccttggtctccagagttcacaccaccctctttgtcattggcttcaagcccctggaaagcccggtggctggtgttgaggagcccgtggctgtggacagctgcctgccccatcctgccgtgctgtgttttcccacggagctggatgtggagaaatggcagtgcacgcagcattgctttagagttgcaagattgcatccctcctcgtgccaagcttgacgtgatcaggctt

SEQ ID NO: 14 - DNA, 1556 bp, Homo sapiens
  SIMILAR (294)..(145): 421254mologous to Homo sapiens Polyproline-rich domain from dynamin,accession number Y56033,Smith-Waterman Score=77.
cccatctcgagaggcgatttcgactcattggtgcccttgtttccccgaggcctcctgcagtgacgtgctgaggagaggagcccaggtctgcgggtgggggacccgtcctctgagaagcctgcagcttctcctccaggacccttccagcccacctggctggctgtggggataatgggcacttgggagcattggagggggaggaagcatagagaaagcagcaggagacgcacctggaagcccaggggagggaagtccacctccctgcaagtgtagggcagtgagaggagccctggcaccagcagagcaagaaagaaatgcatgcaccgttcagaataagctgtcaggtcgtctggctgtttaagatttatttattaatgtgtcaaatcaacagtgccttgacatctttccacactgctttggaacttgcagtagaccagagagaaattcaacatgtctgtctgtatgaaattggttggtgcagcatgatagagctcaatttcaaggatgcatttgattcctttgagaggctaaaaaatgagtccaggtggtcccagtgctattatgcctacttgactgcagtaagggagaagcagaaggtggcagctaacatgtatggagggccttccgtgccaggccccctgcatgaggtttcacacgtcatgtcatctaaacctcacagctgctacaaggggaggcaccttaactccaatggcaactatgtggctaggaagccagccaggtgggctggaagggtcctggaggagaagctgcaggcttctcagaggacgggtcccccacccgcagacctgggctcctctcctcagcacgtcactgcaggaggcctcggggaaacaagggcaccaatgagtcagcaggtgatcttcaggacagcctgtgactcgggaacactgaaggttgaaactgcagcattcaatccattatcaccgtttatgaatgctgaccagaatgtttctagatgggccatcaccaccgagctgttcccccccgtgtcccccatggtacatgacagtgcaatagcacgctgtccttcagaggacagaaaattaatcaggaaacatttactgggcaaccgctatgtgccagggacaggctctggagataaaaagatgagtccaaataaagctttgaatctaaggaaaggaaaaagaaatccagtgacacacataggagagaagaggacactgtcaaccatggaggcagagcctggagtgatgctgccacaagtcaaggaaggccagcagccaccagaggctggaagaggcaaggaagggttctccccacagcctccagagggcttgaaagcactgagaccaggttatggagctcaatggcattatgccgagagcaaagttcacaccaccctctttgtcattggcttcaagcccctggaaagcccggtggctggtgttgaggagcccgtggctgtggacagctgcctgccccatcctgccgtgctgtgttttcccacggagctggatgtggagaaatggcagtgcacgcagcattgctttagagttgcaagattgcatccctag

SEQ ID NO: 15 - DNA, 838 bp, Homo sapiens
  SIMILAR (514)..(1101): 941254mologous to Homo sapiens Human EGPCR polypeptide,accession number Y59300,Smith-Waterman Score=961.
gcaaacgtctgtgtagtgttgatgccacactgcagttgttaacatcgcgtccttttctgccctgttaggttggtttctctcttaaacagggcagcgctgtcatcccattcccccgcctggtccttcctcttccccctagctggttactgaactgactgccattcaggcactgatgggaaatcacttccagaacttgcaaaaccatagagaccggaggttttctgaaggaggctttggtgctgaaacattgctgctgaaacattgttgcagaaatgtggggtggagcctccttcctgcccgtctcacccaggggatgtggtttgcttcccgtgtggtcagcgctgtgctgcgagctctgagaggtcctcctggaattatcctcaccactcggctgagggatgctgtccacacccctctcaccgatgtggacgtgtgcacgcggtgtgtgtgcagaatccaggctatcaggatgctgtgccgtggctgcccctgcgaggcccgtgtgaagccagccccgtgcgtctgtagctaccccttgaggagtaacccgagcggcgtgcttcctgggaagttgctaagctgcgctgaggtgggaggtctgagcatgggggatgcctgggtccccgcgccttcatggacacgctcgtgtgtggtgtgccgtgatgcttgctgtgcagcaggccggctggtggagagctttcgctggcaccgagctcttctccttggtgtggccgtcggctccatcctggtcatccttccctgggcttactgtgacctgggctcctcctcctgtatcaaaggattgctggcagtcagagctcttcagtcgtgtacatga

SEQ ID NO: 16 - DNA, 372 bp, Homo sapiens
atggctggctatagccatgtgattaagttctcaccaacaaaacctgataagcagacttgccagtgtcctagctttgactatggaggtgagtccacatgtactcatcaggagacaatccagcaggcattatttgggctctctgtatctccaggccccctttgtctgaatggctggatgtttactggagacagggagccatgtctaaacctacaaagatctccacgttacaataaccaggcacctgccgaaactttggaaaacaagatctaccctaaacttccaagtggccaggagcagttaaggcaggccaggaaatcccaccaggatgaagtgccagccaagggaccagccagctccatcaatttctcctga

SEQ ID NO: 17 - DNA, 1404 bp, Homo sapiens
  SIMILAR (733)..(1128): 1001254mologous to Bacteriophage P1 non-essential to replication and lytic development,accession number X15639,Smith- Waterman Score=674.
atggttggtcttctcttccatgctccaaaagcccctgagatggcccctctgcgttgctgcattatgaataaaatcatcatggtcaggcgacccaagcagagcacagctgactatggtatgaggaccagtggccctgtggaaagcggtctcagtgctgactcgctgcagcttctttgtagctatgcagcaatcaagaatagtgctgagctcttgatggtggggccccaaggcagatcggcaggtcgagaaataatagacacacgcaagatagcaaaatctgggtccaggggggtcaccgccttctgctcccacggtgccaacaacgcactggatataccggcatttattattaagtttggtgagagggcaggggaaggttacacacatcgcgatacacttataagccagacgtggcgcggcctgcaacgatcagggatctatatggatctaattgggatctgtatggacctgattattggatctatccagtggataatgtggataagtgaaaaaccggccaacgtagccggttggaagggagtcgtattattctacgctttcgatgagaagaccatgttcatagcatttaagctgatcgccctcgacaggaatacaagctgtgcccgtctccgggagctgcatgtgtcagaggttttcaccgtcatcaccgaaacgagcgaggcagctgcggtaaagctcatcagcgtggtcgtgaagcgattcgcagatgtcgaaggccgtggcggcggcacttttgcccatgaattgctcgctgtggagtacgcaggctggatttctcccgcgtttcggctgaaggtaaaccagacatttatcgactatcgaaccggaagattacaacctgctattccgcagagtctccctgaagctctccgtttggctgccgacctggcagagcaaaagcaacggctggagcaaaaaatgcttatggatgcacctaaagtcgaattcgctgaacgcgttgctaccgccagcggggttctaatcggcaactatgccaaagtgctcggcctgggccaaaactatctcttcacctggttgcgtgataacggaattctgatcgcaaccggtgaacgcaggaacgtccccaaacaagaatacatatctcgttcagtcactgaggatgaggtcgaaggccgtggcggcggcacttttgcccatgaattgctcgctgtggagtacgcaggctggatttctcccgcgtttcggctgaaggtaaaccagacatttatcgactatcgaaccggaagattacaacctgctattccgcagagtctccctgaagctctccgtgatgaactacttgcagtcactggccgggactttacatttcttggaggaggagccaaaagtatcaggggaatcaatacaaaaatgggaccctag

SEQ ID NO: 18 - DNA, 2041 bp, Homo sapiens
  SIMILAR (762)..(637): 611254mologous to Homo sapiens Human secreted protein, SEQ ID NO: 7420,accession number G03339,Smith-Waterman Score=114.
ttccatgctccaaaagcccctgagatggcccctctgcgttgctgcattatgaataaaatcatcatggtcaggcgacccaagcagagcacagctgactatggtatgaggaccagtggccctgtggaaagcggtctcagtgctgactcgctgcagcttctttgtagctatgcagcaatcaagaatagtgctgagctcttgatggtggggccccaaggtatgaggccagccagagaaataatagacacacgcaagatagcaaaatctgggtccaggggggtcaccgccttctgctcccacggtgccaacaacgcactggatataccggcatttattattaagtttggtgagagggcaggggaaggttagtgagggatttaggggtctccctacatcaacctctggttccctctggtgctgttttctgagcacactgtgaacttccttgctggtaagggtgcttgtgctgcctcccctatgggaatgcccttttcaacccagcagtcactcagcttgtcagggtccaggtcactccatgaggtcagctggcaaggcatacagatatctgaagatgtgaaagcagctttggatctgggtaatgggcagagatatcagaagatatcagaagaagacaggaagatgcaggaatgtttcaaacttattggagatttgttaagtggttttgaccaaattgctgacagaaatatggacaatgaaggccaggctgatgaggtctcagatggaaatgaggaatttactggcaaaggtcacccttgttataacctgcatctggctgatccagctccacccatggctcaaagtgccccagatacagttcaggccactgccttggaggacacaagctataagacttggtggcttccccatggtgttatgtctgcaggagaacagaatgcaagagtgaaaaaggcttgacagcttccacctaggtttcagagggtgtatgtgttgaaaagcctgagtgcccaggggaaaagcctgccacaagggtcgagctcctacagagagactctactagaacagtgctcatggaaaatgtggggttggagcccctgcacagagtcatcatggtactgctgagtgggattgtgggaaggtggctgagaatggtagagccaccagcggcttgtactctgaacctggaaaagcaaccggcactcaactccaaccagtgagagtagccatgggagctgcacctgcagagccacagggatgggtatgcacaaggccttggcatcccaccccttccatcactgtgccctggatgcagaatatggagacaaaggagattattttggagctctaagatttaatgacagccctgctgggtgtcagacttgtgtggtgcctgttgcccctttcttttggctgatttatctcttttggaattggaatatttacccaatgcctggatcaccattgtatcttggaagtaaataacttgtttttttatcttacaggctcatagttggaagaaacgtgccttgagtctcagattttggaattttgagttgatgctgaaatgagttgagacttttggggaactattgggaagggatgcttgtattctgcagtgcaaaggatgtgagatttgttggggggtcatgggcagaatgaaacagcttgggtattttgtgcccttcaaatatcatgttgaaatgtgaactccaatgttggaggtgggcctagtgggagaggtgtttgggtcatgggggtgggtcctttataaataacttgctgctgtcctcacaataatgagtgagttctctctgtctgtgagttcacatgagatctggttatttaaaagagcctggcagcttctccttttcttgcttgctctctcactcgccatgtgatgccagctcctcttttgccttctgccatgaatggaagcttcctgagccctcacaagaaggctatgatgacgccatgcttcctgtacagcctgcagaaatgcgagtcaaaatgaacctcttttcttgacaaattaaaaaaaaaaaaaaaaaaaaaaaaaaaaaaaaaa

SEQ ID NO: 19 - DNA, 381 bp, Homo sapiens
  SIMILAR (225)..(136): 361254mologous to Homo sapiens 36/8-8 fusion protein with epitope for anti-lectin antibody,accession number X58236,Smith- Waterman Score=58.
atgggagcggttctcacaagatgtgatggtttcataagcggtttctcctttggcttggctctcattctctcttgcctgccgccaggcagatcagcaggtcgagaaataatagacacacacaagatagtgaaaactgggtccaggggggtcaccactttctggtcccatggtgctgccaatgcactggatataccagcatttattattaagtttagtgagggtggggcaagatatcaatcaacagtaacagttgcagcaaaagctggttacaaacaatccgtagaaacaggatgtgaagctagacaaccggttagaccagaaattctcagaagggagtatgccttaaccctgaagaggcctagaagagccgtggcaagatga

SEQ ID NO: 20 - DNA, 755 bp, Homo sapiens
  SIMILAR (452)..(541): 461254mologous to Mus musculus natural killer cell receptor,accession number AF028126,Smith-Waterman Score=64.
ccctgattattgtaaatacaaaattgcatgcaggattgtgtaaagaccaatgccaggttgggctgccagaatgagccaacagcacgtgatgtgcttccccctgcagaaagcctataaacggacatgcagtcagggaggtttcacatcaccaagattcctatcccagaaaagcagatgttcatagctctgggaatggaatgtgacccttgtggagagcctataaacggacgcatgaggggggtgcctgttcatatggataagatagtgctataaataccctcatcttgccacggctcttctaggcctctttagggttaaggcatactcccttctgagaatttctggtctagctgactgtctagcttcatggcctgtttctatggattgtttgtacccagcttatgctgcacctgttactgctgattaatatcttgctaatcataggttatggaaaggctgtgttttctgttataaggctctgttagaaactactgatgcacacactatatcataaattcttatccctgtatactgtacttgtgcatacagatgttatgttaaagaattacttcatccccatgtgaccatctcacctcataatcaaatgaccctaaatccctcactaaccttcccctgccctctcaccaaacttaataataaatgccggtatatccagtgcgttgttggcaccgtgggagcagaaggcggtgacccccctggacccagattctggtatcttgcgtgtgtctattatt

SEQ ID NO: 21 - DNA, 912 bp, Homo sapiens
  SIMILAR (574)..(431): 281254mologous to Homo sapiens Human secreted protein sequence encoded by gene 66 SEQ ID NO:330,accession number Y91657,Smith-Waterman Score=67.
atggtggctgtaaattatgttggagaagaactgtggagttactttaatgcgccatgggaaaaacgagttgacctcgcttggcaattaatggaaatagcagaacagcttacaaacaatgactttgaatttgcactctacctcctggacgtcagctttgacaattttgcagttggtcctagagatgggaaggtaatcattgtggatgctgaaaatgttttggttgctgacaaaagattaattagacaaaataaacctgaaaattgggatgtatggtatgaaagcaagtttgatgactgtgataaggaggcttgcttatcattttcaaaagaaattctttgtgctcgtgccactgtggaccacaattactatgctgtttgtcagaacctcttatccagacatgccacctggcgtggcacttctggaggactccttcatgatccaccaagtgaaattgccaaagatggccggctcgaggccttgctggatgagtgtgccaacccaaagaagcgctatggcagattccaggctgcaaaagaactgcgtgaatacctagcacaattaagtaacaaccatattcctccaacacaccctccatacctctgtgtccctgatggcaactataggagtggctggagctacatcaaactgtgtccatcatttgagtgtcttactgaaacctatgctgccctgcccttcaacagatacatgggaaagagcagaggaatagagggctctctgtacagtcctggaagacctgtaacagccatgtggtcaggactcgttgggggaacagcggttgtcctgcaattaaccaacagtactcctgctgacccagtatccactctagaagctgtaccctttggagccagcatcctgactctggaggggctccacatgagagtgacccactga

SEQ ID NO: 22 - DNA, 679 bp, Homo sapiens
  misc_feature (1)...(679): n = a,t,c or g
ctggaacatcagctgttctctaggtcttaagtctgctgctctaacctacaaattttggacatgccaatctccacagtcacatgggccaattccttagtttctctggagaatcctgactaatgtatgcaatgtctttatttcatcctcattcttaaaggatattttcatcagcaacaccacaccctcctcgatcaccatagctttatgcaacaacaagaaacaaatttattagctaacctaaccactaatgacgcaagagacaattctaaaggactttcaaaaacagcaaacgtagcagcagctgctaccctctaaggggatgagggatgcagattgtccaatttattcggtgaaattggtccatttccattgcttaattggctatttgaaattcctcctctaaatttccagaataaatcactgaaattgacatcgggccagtctgaatttcaagaaatttacctggctggaagacaagagggatctcttcttcagatttgcagtctggggaagacacagcctctactgtactttagaacctgagattgggtggtggaaggagccctgggtcgagtggtaagattcaccttaggttagtattgcgtaagtgccgaagantgtagccaaagatgtaccatagactccatgtttgtatttcncggcttatattggtggtttt

SEQ ID NO: 23 - DNA, 507 bp, Homo sapiens
  SIMILAR (107)..(33): 481254mologous to Chlamydomonas reinhardtii, Peptide Chloroplast, 89 aa orf 3' of fructosediphosphate aldolase,accession number S72951,Smith-Waterman Score=66.
  misc_feature (1)...(507): n = a,t,c or g
cctctactgaaggctactcttcttatcaagtaacgtcttctccatgctcttgacccttgccccttcagacctatggatggtaataacctgcccacacctagtttaccatcagaggacacagcagcacgtgtgccatcctagaagcatagagcagacccttaccagacaaccaaccagctggtnnnnnnnnnnnnnnnnnnnnnnnnnnnnnnnnnnnnnnncacccctactctgtccagacccaactgtcaacagaagccaaagccatctggaggagcatgcaacaacaagaaacaaatttattagctaacctaaccactaatgacgcaagagacaattctaaggactttcaaaacagcaaagtaggagcagctgctacctctagggatgagggagaaactcaaaaatgcatacaaaaaccattgcatgaaaagtgactggatttgtacatagcgtcaggagatgtgcgtagtgtcaaagtatctcatcacacattacttgataatg

SEQ ID NO: 24 - DNA, 330 bp, Homo sapiens
  SIMILAR (130)..(180): 751254mologous to Homo sapiens Human secreted protein sequence encoded by gene 23 SEQ ID NO:146,accession number Y91473,Smith-Waterman Score=77.
atggctaaaaggagccaaggtacagctcaggccatggcttcagaaggtgcaagccccaagccctggcagcttccacaaggtgttgagtctgcgggtacacagaagataagaattaaggcactgctcttcctgccatcatgtgaagaaggacgtgtttgcttccccttccaccatgattgtaagtttcctgagggctcctcagccaagcaaaaatgtaaacacaaggccacaaacatcaacaacaatcaggaacaaatgacaccactaaagaaacaaaataaagtaccagcgaccatccctaaagaaacagagatgtatgaactgacatag

SEQ ID NO: 25 - DNA, 411 bp, Homo sapiens
  SIMILAR (332)..(282): 521254mologous to Lactococcus lactis bacteriophage ul36 ORF65,accession number AF212845,Smith-Waterman Score=47.
atggccacctctaaggcccttctcaagggctgtacccagaccaaagcttccttgcggatccttcaaggtctgaaagctgagcccaaagagccagtgcttgtgcaagtcccagacttcaccaaaaaagggggtgaagttgggccaaagacaaccttacacgccaagctactttctctaaatacccagtggatggaacagcttcatccttctgtccaggatccgtgggtccaggatgcccaatatcctaccataactgcggcagaccctggctgcttcctgccctgtaatgggcatattggcttaaaagcaggggccgcatgctgtactactctccatgtctggaatggccgagggttaggggccattttctctagggcttcactcaatggagaaaagcacatcatctcatga

SEQ ID NO: 26 - DNA, 430 bp, Homo sapiens
  SIMILAR (333)..(286): 431254mologous to Mus musculus HERC2,accession number AF071177,Smith-Waterman Score=39.
  misc_feature (1)...(430): n = a,t,c or g
actcaactatcccccactnnnnnnnnnnnnnnnnnnnnnnnnnnnnnnnnnnnnnnnnnnnnnnnnnnnnnnnnnnnnntcaaaccacatccaaaccatagcaccaggtgttgctttaactgccttctatctactctatcatgcagtcttcacatccatcctatgaggtgcctggtgttattggcccatctcacaggaagaacaccaaggctcagagacgtgatgtgcccatgatcacacagctcatccggtatcaggtcaggacttggccagtgctcttgcctctggagtgcactttctctcttggagaagcccttcccagggctcctgtctgaggagtcattcctgaagccctcccataggtctttacattgactctgctgtgggaaggaccactctatgacattatccaagttactgagtgtgtttt

SEQ ID NO: 27 - DNA, 597 bp, Homo sapiens
  SIMILAR (206)..(12): 421254mologous to Homo sapiens sialoglycoprotein beta (AA 1- 128),accession number X12496,Smith-Waterman Score=111.
atgaggactcatcgcagcaagtcccacagacgggactccattaccccatggctctgtgatgagagctcatctgaagtcacggcagtttccattatggtgaggctctgtgatgagaactcacctgcaatggtggtagtatgcattgtggtggaggcagaggccatccccggatcaggctctgtgaacagaggacaagaatctgagtcttcacatccatcctatgaggtgcctggtgttattggcccatctcacaggaagaacaccaaggctcagagacgtgatgtgcccatgatcacacagctcatccggtatcagtgtctgcttgccatccacggctccaaggctccggaagcctctggagatggagggcaaaccttttgtagcaccttctacgctccagccatatgctccaccgttaaggccaagtccctgccatcaggagcacgctgtgtaaccgacaaggacaaatgcatgtggatttctagggaaatcaaatttgaaagaggcaggaagagtggggaggaggcgattctagtggctcttacgtctgggaagctcctggggcttggtcagcatctggctgctggagatgggtag

SEQ ID NO: 28 - DNA, 896 bp, Homo sapiens
  SIMILAR (156)..(815): 781254mologous to Homo sapiens DC38,accession number AF265440,Smith-Waterman Score=826.
gtttcaaaccaggaccaaccctgagaaaggaactgattttgtcttcaaatattggacaacatgatttggacacaaagactaaacagattcagcagtggattaagaaaaaacacctagtccagattaccataaagaaaggaaaaaatgtagacgtgtcagaaaatgaaatggaggagatatttcatcaaatactccagactatgcctggaatagctacattctcatctaggccacaagctgttcaaggaggaaaagctttaatactctccttcctaattcatgcaaaagcctttagtaccgctgaagacacccagaatgaaggaaaaaagacaaaaaagaataaaacagcttttagtaacgttggaagaaaaattagtcagcgagttattcacttatttgatgagaagggcaatgatttgggaaacatgcaccgagcaaatgtgattagacttatggatgagcgagacctgcgactggttcaaaggaacaccagcacagaacctgcagagtatcagctcatgacaggattgcagatcctccaggagcggcagaggctgagggagatggagaaggcgaaccccaaaactggaccaaccctgagaaaggaactgattttgtcttcaaatattggacaacatgatttggacacaaagactaaacagattcagcagtggattaagaaaaaacacctagtccagattaccataaagaaaggaaaaaatgtagacgtgtcagaaaatgaaatgcaaaaatgaggagaaggcatataaagaaactcaagagacccaggaaagagacactttgaacaaagaccatggaaatgataaggaatcaaatgttctgcatcagtaattttaataaagaaaagcatgctctgagagaaaaaaaaaaaaaaa

SEQ ID NO: 29 - DNA, 1231 bp, Homo sapiens
  SIMILAR (913)..(47): 541254mologous to Homo sapiens DC38,accession number AF265440,Smith-Waterman Score=620.
tttttttttttttctctcagaggcatatttttccgtattaaaattactgatgcagaacatttgattccttatcatttccatggtctttgttcaaagtgtctctttcctgggtctcttgagtttctttatatgccttctcctcatttttgctcaaagcacgaagaacacacattaaagcttttcctccttgaacagcttgtggcctagatgagaatgtagctattccagggcatagtctggagtatttgatgaaatatctcctccatttcattttcttgacccggttacacttttttcctttctttatgggtaatctgggactagggtgttttttcttaatccactggctgaatctgtttaggtctttgtggtccaaatcatggttgtccaatatttggaagaccaaaatccagttcccttctcaggggttgggtcccagttttgggggttccgccttctccatctccctcagcctctgccgctcctggaggatctgcaatcctgtcatgagctgatactctgcaggttctgtgctggtgttcctttgaacccagtcgcaggtctcgctcatccataagtctaatcacatttgctcggtgcatgtttcccaaatcattgcccttctcatcaaataagtgaaataactcgctgaactaatttttccttcccaacgttactaaaagctgttttattccttttttgtcttttttccttcattcctgggtgtcttccagcggtacttaaaggcttttgccatgaattaggaaggagagtcttggggcagaagcaataggggacaactgtgctggtgctgtcttttgcaggatgtgttttaccaaaaacatctaatgcaactattttcaggactttacaggtttgtaggtgttaacctctttagaaaaagagcagccatccttttttaggaagaactgtaatcatccccagttgatgaggagaagctcttctgtagagaagaatgacagttgaaactgagacttctcagtaagagaacttcgtttacttggttcaagtcttaagccacggagcccactaaatgacaaatgagaaaaaaaatcccagtcacttcgcgaccttcccccataaggcctcctcccgcaacagcaggcagcaagaacaacgcatttgtccagcatgtcctgcgcaggcgcccttcgcctggctcgctctgccccacctgtgccaggcaggaattccaccgcactggactaaa

SEQ ID NO: 30 - DNA, 1400 bp, Homo sapiens
  SIMILAR (1400)..(1296): 711254mologous to Homo sapiens Human secreted protein encoded by gene 75,accession number Y76198,Smith-Waterman Score=123.
ttttttttttttttttttctttgtcagaaaatatatttattattgatagtgagtgaaggtaaagatgtgagtattcactatagaggttttatcagccaaggttgccttcatattgataaaaataccttatctcacttgtaatcataaaacattatttccagtagaagaggtacattttctctcctttttgtcttcttgcctgtataatcaccataattaagttataatgaaatagctcttacataatcaaagggaggaaaaggaaaggacggaacccaacatgccacagcctaggacaattccatcccagcactgctggccctccaggatctgttttctggggctctctccacgccaggcactggctggccctcgggatcttatggttttctggggctctctcctcggccccactccaatttaattttagcccccaaccccatcctactttggttaggggtggaggtttcaccaaatgatgggggcttggttcagaagagaaacattttatgggtcagtgcaagttgaatagaaagtcccaaaaaggtgggagaagggctgccccttctcttttaatcatcataagaggggtttactaatactcaagagtgtcctttaatgactgatccctgatcaaggctttggccccttcaaactgctgctgttcaaaacgtgaaatgattctgctgaatccattcttgatagaatgtctttattggccttctcattagggggcttctctttaaatggaaagttttttcactaagaaaaaaaatgttccatctctggaattaaacgttgaatggtgttttgcctcattcctgaaaagtttttatcctccccttcctcaagcatgcctctgtttggcatgattgacacagtgcatatactgggtggccagtagcggagcatttgagggtctggtgggtgttctcacggtaacactgaagaattttggcctgcagatcagcacagactggatgagactcatatcgccaccattcacaagcccacacgctgtgccttcttgatctcaacgtgatggccctgtccaagcaccccttcacctgctgtgtccgtaattgaagtgtggtctctgaatctgcagctgtcacagaggacttgacaaagagaccagagcagggtcctgcacataccaggctctccttggttgccttgagcacagaagaatgcaattttccacaccctgaagctgaggggaaatccagctccatctccacgaaaatagtattttcctcaatcttggtggccaccgtctcatcagctgccagcctggctgagactgggtaatttatgaagaaaggaggtttaattggctcagggttctgcaggctgtccaggaagcagggctggggagccttcaggaaactttcaatcat

SEQ ID NO: 31 - DNA, 203 bp, Homo sapiens
  SIMILAR (73)..(159): 411254mologous to Cynomolgus Epstein-Barr Virus TsB-B6 latent membrane protein 1,accession number AF181716,Smith-Waterman Score= 65.
ccaagagccacatctgtgtgtgcacatgcagataggcagggaatataatcatgagcaattatgtcagtctcagggccacatcgtcctagaagctcttgcatgccaatatcaatcacttagccatccaccagcccctggataatggtaacatgcacagggtagctgccagtattccctttaccatggccagcagcttgtgtgtt

SEQ ID NO: 32 - DNA, 2328 bp, Homo sapiens
  SIMILAR (913)..(2325): 991254mologous to Cloning vector pBACe3.6 levansucrase,accession number U80929,Smith-Waterman Score=2460.
atggggagccccacagtcccacaggttggtgccagctgccataatgctgatagaggctgcaattacagtgctggggagtggtgggcacaggactgtattcccccagaaacttcacataccacggaccatgcaaacctccaactcccaccgcccctggccaggcaagacttgccagcttggacttctagaacagcaaccccacccctacctgaatgctgtggatgggcaaagctctgtgttgccctgggaaccaccctgatgacagactgtgtaactccttttacacccactgttcagagccaggcagaaaaatgtgaaaagagagactggcctagcgtgccagcctacatcctcttcccatgctggatgcttcctgccttcaaacatctgactccaagttcttcagttttggaactcagactggctctgcttgctcttcagccagcagatggcctactgtgggaccttgtgatcattcttgggcatgtctttatcagcagcatgaaaatggatgaatacagtaaattggtaccaatagaacagagcattgctgaaaagatacctgaaaatatggaagggactttggaagtagaaaaggaagaagtagaggagcaggaggaggaggaggagcaggaagtagaggaggaagaatatggagagaagaagaaaactctttttctctgtaagacactgatgaccctaattcttttcagctatgaagagaaaaaactggctgtgcctgactggctgggctgccgcatattcgcgctgccattggtccataatcagctgggggtgggcgtagggagacctacttcagcaggtcctggccggaccagcattgttaacggctgcggttcgaagtggctgtgggtattgctgcggctggtgcgtcgtcgctctagtagttactcaatcaaaaaatttgtaaaacaagccacagttctgacttttacgactgcacttctggcaggaggagcgactcaagccttcgcgaaagaaaataaccaaaaagcatacaaagaaacgtacggcgtctctcatattacacgccatgatatgctgcagatccctaaacagcagcaaaacgaaaaataccaagtgcctcaattcgatcaatcaacgattattaatattgagtctgcaaaaggacttgatgtgtgggacagctggccgctgcaaaacgctgacggaacagtagctgaatacaacggctatcacgttgtgtttgctcttgcgggaagcccgaaagacgctgatgacacatcaatctacatgttttatcaaaaggtcggcgacaactcaatcgacagctggaaaaacgcgggccgtgtctttaaagacagcgataagttcgacgccaacgatccgatcctgaaagatcagacgcaagaatggtccggttctgcaacctttacatctgacggaaaaatccgtttattctacactgactattccggtaaacattacggcaaacaaagcctgacaacagcgcaggtaaatgtgtcaaaatctgatgacacactcaaaatcaacggagtggaagatcacaaaacgatttttgacggagacggaaaaacatatcagaacgttcagcagtttatcgatgaaggcaattatacatccggcgacaaccatacgctgagagaccctcactacgttgaagacaaaggccataaataccttgtattcgaagccaacacgggaacagaaaacggataccaaggcgaagaatctttatttaacaaagcgtactacggcggcggcacgaacttcttccgtaaagaaagccagaagcttcagcagagcgctaaaaaacgcgatgctgagttagcgaacggcgccctcggtatcatagagttaaataatgattacacattgaaaaaagtaatgaagccgctgatcacttcaaacacggtaactgatgaaatcgagcgcgcgaatgttttcaaaatgaacggcaaatggtacttgttcactgattcacgcggttcaaaaatgacgatcgatggtattaactcaaacgatatttacatgcttggttatgtatcaaactctttaaccggcccttacaagccgctgaacaaaacagggcttgtgctgcaaatgggtcttgatccaaacgatgtgacattcacttactctcacttcgcagtgccgcaagccaaaggcaacaatgtggttatcacaagctacatgacaaacagaggcttcttcgaggataaaaaggcaacatttgcgccaagcttcttaatgaacatcaaaggcaataaaacatccgttgtcaaaaacagcatcctggagcaaggacagctgacagtcaactaa

SEQ ID NO: 33 - DNA, 759 bp, Homo sapiens
  SIMILAR (695)..(450): 391254mologous to Zea mays P protein,accession number U57002,Smith-Waterman Score=97.
atgggctctatggtagctcttttccaggatcccacagcctggggtagcaagtcgtgccaagctgtctctctgctatatcccgaagtccgacaccctgctggtcagcctctgagggccatccagcctccatctcccaacactaagttcacttcgtgtctttcacgacaaggagggaacttattccttggagacctgaaaggacacgagacttttcaggagcttaccaatcagtcagccttagtcatccccgagcagatgtgtggcagtattgtggtggacctttactggacactctgccaatccctaaccccagtgccgcccggacctgaggccgcacaccactcccgcttcaccagtatccctctgcgaaaacggtggagacgcgcccgtccgcccctcaggggcctcttcccggacctgtcagacggccccgcggacgcttttcagtcagggcagcttcgccgcaaacgtccggacactcgcccggccccaacgtacctagagcgacgacgcaccagccgcagcaatacccacagccacttcgaaccgcagccgttaacaatgctggtccggccaggacctgctgaagctagaggtggctttgatggcaactgcaggtccatcaactcgcagatgagcaacagtgcacaccagctgcctcgttctgatgtcctgcactgccctttggaacctaagacatgtgatgccagttcacttctgctctccaaatctcagaaaaaatctcatgatcaatgctaa

SEQ ID NO: 34 - DNA, 2121 bp, Homo sapiens
  SIMILAR (939)..(859): 551254mologous to Homo sapiens Human secreted protein encoded by gene 20,accession number Y36243,Smith-Waterman Score=83.
ttttttttctcttctagtagcctttattttctcttgtttttcatcataccgtggtacaaaaaggtaagagaggatttcattgcctgcctctcctggacctcatggcctgtagagtgaggatggtgcgttgagatgaggcactgactcctccatcctggtcagcggccatgggccctttgctgtccttatagacaatgcaaagtgtgtccaactgctcggggctctgctgaggtttgtgtgagaagcatttgtgattctggaaaactttccctttcccaggatgaccccagtgatgatgatgctctacccaggagcttggcttgggtctgtccagaagggctgctgctgtggccatgggcacacagagccctgtccctggcccagcagggagaagtggagacccttggactggaagtgctggcccctctcactcagcccctttccaagtacctcattgccaagcacagtgtggggaatgaggattcggggaaaatagcacatgggattgctctgggatcagtgtccacagttcctggaactagtagaggtggtgttgttgcagcaataatggccaatgtgtgtgacactcagcctgtgacagccaggaccccagtcaccaggttcaaagccgcacaggtagttgtccagcagcgctgcccagtgatgggagacccgatggaagcactgtggtggcatggatttgacaatcagtgtggtatctcctgtgtgcagaacatgcatggcacaggcattgactgggtgctgcagtttctgaagacatctcattgcccactgcaaccagatagtcctgacccactaaattcaaagctgtttcttggagctcagccccacacagcccatcaccaccagagacatacccaagactgggtaatttataaaggaaagaggtttaattgagtcacagttctgcatagctggggaggcctcaggaaactcacaatcatggcagaaggggaagcaaacacgtccttcttcacatggcagcaggaagaagtgccaagcaaagggggaaaattcccttacaaaaccatcagattcgtgagaactcactatcaggagaaaagcatgaagaccctcttccacacagtggccacggtgatcttcaaatgcaaatctgacccaattgcctataaccaaagccccctccagcccgcagtcttcgtgcttcaggtctactttcatgcggacgacgcctccctgaccacactactccgtgcccagccccgcatgccacctgctcatccctccatccccctcactgcaccacccagtaccagagagccatcccatcctcagagaactttctactggactgtgagctccctgagggcggcattggactctgccctgctcctcaccgctaccccatgcctggttgacgcaggaagctgtgtgggggctgaacaagtgaaggagccactgacggggcggaagtggagcaattgctgctctggcaaagcaaaatatgaaatgctagatgtgccgctgttacggcggttgtgccagtcctacccacagccaggaagagtgagaaaggctcagaaacagccccaacaggtagaagctgtgaccctgcagtcccaacagcccccctgcttcttggctgcccctgccggaaacacgcagggcccaagcctggaagcaggagcccaggcagtacccagcaactccctgcaggaggtggtagtaaacagctgcgctctggagaatgaccaccgacctcaagctcccagggagcacagagacacgcaatggattggttttctcatctgtaaaatggggatgttaacaggggaggtggttgggctggctaagccatcagcgtcggggagaggagctgggacagaagagctgcaacagcaaacaaggttgcgcagccaggacatacttccacagactgtaaaccagggcccaacccactgcgagcagggcgtgctgcggtgcgggcaaggcgacctcggcagctggatggttcttgacagttattggcagggccttgctactgaggacgagcgggggaagggaaaaggaagaaagccaattttgtttcgattgctgctgacagctgtcataggaaagcggaggcgtgtgcccacgtaa

SEQ ID NO: 35 - DNA, 449 bp, Homo sapiens
  SIMILAR (62)..(103): 851254mologous to Homo sapiens Polypeptide fragment encoded by gene 151,accession number W89017,Smith-Waterman Score=67.
gcccactagtccagcgcggtggaattcgccagcatgtgaagaaggatgtgtttgcttccccttccaccatgattgtaagtttcctgaggcctccccagacatgctgaactagcgtgctggcccttctcaaagtgtcccatgaaaaagttattccacacctcctccctgaccttgtcgtgcagacgcttccaggatgaactccaactcgccgagccaccgcagctcctcagctgactaaaagagttaatgatcctccaggttaaaactcctccttgagcacacaccttctctcaacaaatgacaatacttggcaaactgaactcctcccacgagtcgccctctgctaggaggaattgctggctgctccctgcttattgcattctctcagagcagctgtctcaaaggaggctgctcccatgccgatctttttgtgcccaacttacagggag

SEQ ID NO: 36 - DNA, 396 bp, Homo sapiens
  SIMILAR (160)..(116): 931254mologous to Homo sapiens Human secreted protein encoded by gene 20,accession number Y36243,Smith-Waterman Score=69.
ggcagtaaaggtgagtctgggagaaagaaccggtcagacttagttcagctccaccctttcctcctgggagacatacctgagattgaaaaaggtttaattggctcacaattcagtatggctggggagccctcaggaaacttacaatcatggcggaaggggaagcaaacacatccttcttcacatggcagcagcgagaagtgccaagcaaaagggggaaaatccccttataaaaacttcagatctcatgacaactcactatcacaagaacagcatggagtagctctgaccatggcctcaggcatcggtagcccctcccatgggctctttgacagatcaacatggcctgctatccagaaagtttcttcaccaacagtggctgtttttttccagtggtaa

SEQ ID NO: 37 - DNA, 432 bp, Homo sapiens
  SIMILAR (159)..(19): 401254mologous to Arabidopsis thaliana F5D14.5,accession number AC007767,Smith-Waterman Score=73.
ggagccctgcagctatcaccaactagctccacccacactatcaagtcgcactccccaccaccaccactctgtggttgtttccacagtagctctgaccatggcctcaggcatcggtagcccctcccatgggctctttgacagatcaacatggcctgctatccagaaagtttcttcaccaacagtggctgtttttttccagtggtaaacatgctctctataacgaggtctaaacttcagccttggcttaagggtaggggaaccctcctagtccttagatccacttttcctcagcttagatgtagcagcttctttttttaatttttgcagctgctacttctagatcccttttacaggtaggtgtcttatcacttttactagttaataattctttttattaaatttttccttttcaaataattggtatgcttttca

SEQ ID NO: 38 - DNA, 483 bp, Homo sapiens
  SIMILAR (66)..(116): 821254mologous to Homo sapiens Polypeptide fragment encoded by gene 151,accession number W89017,Smith-Waterman Score=73.
cttttcccccttttgctcagcacttcttgctgctgccatgtgaagaaggatgtgtttgcctcctcttccatcatgattgtaagtttcctgaggcctccccagacatgctgaactgttgaaagcctccacaatcaagcttttattaaagaacgagtactaccattgtgaccacagaagatagaattcgacaccaagagcgtgctggcccttctcaaagtgtcccatgaaaaagttattccacacctcctccctgaccttgtcgtgcagacgcttccaggatgaactccaactcgccgagccaccgcagctcctcagctgactaaaagagttaatgatcctccaggttaaaactcctccttgagcacacaccttctctcaacaaatgacaatacttggcaaactgaactcctcccacgagtcgccctctgctaggaggaattgctggctgctccctgcttattgcattctctcagagcagctgtc

SEQ ID NO: 39 - DNA, 1125 bp, Homo sapiens
  SIMILAR (738)..(833): 401254mologous to Homo sapiens A human collagen 1 (alpha2) protein fragment,accession number Y84549,Smith-Waterman Score=58.
atgggcgaaatctgtaatactgacaaatgctggccagaatgtggaccaacaggagctctcatcatcgctgagcaatgtggaacccacgggggagaaggttctactctggaggggagccgtccagatgtcccccaagacctcttttccccaactctaggattctacggttctacatccagcttcagcttgcttaatgaaatagaaccagaagagcaaacgcctcctaacacttcctgtattaatgtacacaaggcagctgatacctgtgcatatcgaaacttggggaattcccaggtggagagaggcaagtcagcacactgcggacaaggtcacatgaatccaaaggtgatacgaaaagaaaatgtaggttccaagccagagtttaatagagaggtcgtgtttctcttggggctggaggctggaggcctcatcccaggtgccgaggggccaccagaagacatggggctagtgcggggaccaccagcggtggcagcaggaccacccccaaggtggctgtctccagagttctgcctcttgcagtacagcgaggaggaggggtgcaaggagcccctgtggttaaaggtggaggcggaggtgtccacgctgtaccggttcatgcccacagggttcaccaggaagctagctttttctttgcttgaaaatcaaaacattcgcccacttccaagcatcagaatcctctccggcttgccacagttcctgtttggcagcaagtttgaggccaacctggatgttctggttcccagggaagtcatttttcaaggagcccactggcaccacatgtggaagcttctgaaggtttacagcctggaaagtcaaaaaagagaagaggacatatccaaaaggttgccaaactttcttaaaagtagccgcaggccatgggaggatctgattctgatgctgagaaaatctccggagatgtctaaggaatatagagcaagccccctgagcctttctgctgcccttcggtctaaggacagacagtctaggcatcgctgtgtaacctccacattccacattcgtgaagtccgctgctgcaagagccagggcctgcctctgtgcatgcatgaaacagcagcccacatctgcccttccctgctggcttaa

SEQ ID NO: 40 - DNA, 831 bp, Homo sapiens
  SIMILAR (83)..(199): 351254mologous to Human immunodeficiency virus type 1 envelope glycoprotein,accession number AF025926,Smith-Waterman Score=69.
atgggcatggttaggaagcaggccctggaacggacggagtgggctcttgtctgcagacaagcgtggtctagcagaatgggatactccacaactgtctcaccaactcagtgccagtacacatgctctagaggacttctggactcgcagctacaactgtacaagtgcacacaagccctaccagagatccactcactcgggcacgtctgcccatcacttatcacagttaaatacagccattacgtgctggctgcggcaacgctgtttatctgggacaataacgagtccctgaggactggattgctctcagtctcgacttgtaaaagtggaaccagagattttatgagaatttctggaatggtttccctaacctctgaggttgacaacgtggaagtgtttcattattttccattacacatccaagggaagaagttctgggctgtaggggctatcatgacaatttttgtaataagcatctactacgagccaggagcccactggcaccacatgtggaagcttctgaaggtttacagcctggaaagtcaaaaaagagaagaggacatatccaaaaggttgccaaactttcttaaaagtagccgcaggccatgggaggatctgattctgatgctgagaaaatctccggagatgtctaaggaatatagagcaagccccctgagcctttctgctgcccttcggtctaaggacagacagtctaggcatcgctgtgtaacctccacattccacattcgtgaagtccgctgctgcaagagccagggcctgcctctgtgcatgcatgaaacagcagcccacatctgcccttccctgctggcttaa

SEQ ID NO: 41 - DNA, 710 bp, Homo sapiens
ttttgagcccccttaaaggaagaacatataggttctgaaatcgggtaaagattgggccacctaagagttcctttaaaacggccgccctcttttatttatatatttaatagattttagttagttttcttccttttttgattattttcttaatttgttctcttctattcttattcatttattctctgtactcatcagaatgggatactcccacaactgtctcaccaactcagtgccagtacacatgctctaggagggacttcttggacttcgcagctacaactgtacaagtgcacacaagtgaatctaccctgttatcctccacccactgattgaggtatcgtaattgcacatttctcttaaccatgacaggagaaagcaaacagtggaaacaggaatcatggggtgatctttctcactttccctcttgttttcattgggtttgtccataccattctaattatcatggaaaggggctctggcatataggaggggattgtctcactggacttccggatcaccggaaaaccatcagggttgaaatttcatctgagtctttcctgacgcccagcaaatattccccctcggattattttacaccttgagggcattttggtcttcagttcaacactcttgctctgttcccaaatggggcgctatttaggggaatttaaagagaaagctgagaagaataaacatttaccgagttctct

SEQ ID NO: 42 - DNA, 354 bp, Homo sapiens
  SIMILAR (97)..(354): 901254mologous to Homo sapiens MBIP,accession number AB038523,Smith-Waterman Score=394.
atggctgctgccacggagcttaatcgcccgagcagcggtgacaggaacctggagcgaagatgcagacccaacctctcccgagaggtgctctacgaaatctttcgctccctacacaccctggttggacagccttttttagcaaaacttcagtctccgattaaagaggagaatacaactgctgttgaagagataggaagaacagaaatggggaacaaaaatgaagtaaatgacaaattttccattggcgacctacaagaggaagaaaagcacaaagaaagtgatttaagagatgtgaaaaagacacagatccattttgatccagaagtagttcagataaaggctggaaaagcagaa

SEQ ID NO: 43 - DNA, 456 bp, Homo sapiens
  SIMILAR (64)..(192): 971254mologous to Homo sapiens MBIP,accession number AB038523,Smith-Waterman Score=211.
gagggggcggggttgtgagcaaatcttggtggtggtggtggtggggcggcctgagaagatatcatggctgctgccacggagcttaatcgcccgagcagcggtgacaggaacctggagcgaagatgcagccccaacctctcccgagaggtgctctacgaaatctttcgctccctacacaccctggttggacaggggagaggtggcctgagggactgggaatatggaaaccatccggtccctcctcgccattctttttctctagcagaggccgggggcagctaggcctgcagaggtgtgggatgcggtcccgaaaccgaggtgtggaaggagcccgggcccaacctcctcggtcggagtgaggaggacggcggtaccggatgcagagtcgtttaccttgcagctgtcctccccaagagtgggtgaggttggcctaagtgaaaacccggctccgagagg

SEQ ID NO: 44 - DNA, 1286 bp, Homo sapiens
  SIMILAR (364)..(684): 851254mologous to Homo sapiens MBIP,accession number AB038523,Smith-Waterman Score=439.
atggctgctgccacggagcttaatcgcccgagcagcggtgacaggaacctggagcgaagatgcagacccaacctctcccgagaggtgctctacgaaatctttcgctccctacacaccctggttggacagaggccgggggcagctaggcctgcagaggtgtgggatgcggtcccgaagccgaggtgtggaaggagcccgggcccagcctcctcggtcggagtgaggaggacggcggtaccggttgcagagtcgtttaccttgcagctgtcctccccaagagtgggtgaggttggcctaagtgaaaacccggctccgagagaggcaggcttggagagaatgaatgtggaaaagcttcactgcgagtttaggaggcgcttagcgttcagggtcctttttcctccaacttactctttatgggaattggttgcaaaacttcagtctccgattaaagaggagaatacaactgctgttgaagagataggaagaacagaaatggggaacaaaaatgaagtaaatgacaaattttccattggcgacctacaagaggaagaaaagcacaaagaaagtgatttaagagatgtgaaaaagacacagatccattttgatccagaagtagttcagataaaggctggaaaagcagaaattgacagacgaatatctgcatttattgaaagaaagcaagcttgaaatcaatgaaaacaacgtcaggggaattttgcaatgttattgattgtaatcaagtttctagagttgtgaatacatacggaccacagactagacctgaaggaattccagggtcaggtcataaacctaacagcatgcttcgagactgtggtaatcaggctgtagaagaacgactacaaaatattgaggcccacttgcggttacagacaggcgagtggaaactagtcatgaacaatgagtgtgcattcttgcttcttaaatggctaaggaacgaaccagttttgacatgctgcaaatccggcaaagtctgggttaacaaaaaaattcccgagagagagaaagagaaagaaaatctgatgggcccagttcatcttttcaagctagggcacttcatagggcactggcctatgggtgggccacccttgcttcagagtaataaccaaacagtgacaaccaaacagaggattttgcaagcagtgcacctctgttggcagcagcagcccagggtggtagctgttctgaaggaaagacatgggtttgacactgaggagagtgaagggaaagctcaaaggacattggagtatacagagccagatctgtag

SEQ ID NO: 45 - DNA, 652 bp, Homo sapiens
ttttttttttttccaagaggcttttattggctctattagtcaactttaattccttaaagaagtctgtttatatttgaaagcatgccactcgagtcaaacccttgttaaataaccagtttctccaattgtgtccggagcgtactttactcaattgttaaaagctgtaaatagctcaagaagggggggtttcttgactcgataaagggaagacttagctttccaaaaaaaactgtctcttttcgttcctttcttttttctatagccaaagtcagccaattggggctgtagtctatttcctttgggttgagggtgttttctggtatcgtcccttcgtggttcacaggttctggtgccagctcatttggctcccggccatgcaatgccccggagaagagcctcctgtccctctaggtgcagggcagctggcaggagtcagagcagacaagagagaactctggaatattacacttcagtattttccctcccattagctttgaccgtgcctgaaaattcctccatttgtgcgtcatccgttggtgtcccagcctttctgacgatctcctcagctggtcaggtggcctgaaaacagagctccagccatccacgacagcgccacgggcccgagggacgaggacctgcctctctggcccac

SEQ ID NO: 46 - DNA, 432 bp, Homo sapiens
  SIMILAR (91)..(267): 351254mologous to Homo sapiens PNAS-31,accession number AF274956,Smith-Waterman Score=64.
atgaagaagggaggggctctccctgttgggccttatcaaacggcagctgccagagggagaacggaacaaacgcacgatgcccattacgtggtcggcagtgaaagggtgcctgggaaagggcacacagctttactgatgggtggccagtggggagtgcccccatcgggcattccaccagtcggctccgatggtcctggcctcctcatgtttatctggcccagggacaccaaggctcagagagtgaaccacgaagggacgataccagaaaacaccctcaacccaaaggaaatagactacagccccaattggctgactttggggggaaactttagagatgatgagattgctggaaaagatacctttgctactgacaagcgacctcctgaactattgatccagtgtcaatggaatggaggcctctggcctccctga

SEQ ID NO: 47 - DNA, 249 bp, Homo sapiens
  SIMILAR (108)..(1): 401254mologous to Cnemidophorus tigris cytochrome b oxidase,accession number AF006268,Smith-Waterman Score=57.
atgaaggaaagagagaccagcaaagacatccagagagaagcccaaggtgaacttggtcatcatattaacccctatgcaataacaaaacatccaggcttgatctaccagagcttatcagtttggccaagtgtggatcttgctgcatatgaacagcctgccatttccttccttgtgtacacactgcctgtggaaaatggacaagggaagttacatttctatcaagagctgaaacaagcaattttgctttag

SEQ ID NO: 48 - DNA, 798 bp, Homo sapiens
  SIMILAR (4)..(339): 431254mologous to Arabidopsis thaliana putative mitotic control protein dis3,accession number AC007584,Smith-Waterman Score =211.
atgaagatcgtgcgcgagcactacctgcgagacgacatcggctgcggtgcgcccgggtgcgcagcgtgtggaggggcgcacgaggggccggccctggagccgcagccccaggacccggcgagcagcgtctgcccgcaaccgcactacttgctgcccgacactaatgtgttactgcaccagattgatgttcttgaggaccctgccatcaggaatgtaattgtgctacaaacagttcttcaagaagtgagaaatcgcagtgcccccgtatataaacgcatccgagatgtgactaataaccaagagaagcatttctatactttcactaatgagcaccatagattcaagacctttgaactcattctgcttgagatttcaagaattttgaatactggcttagatatggaaactctgtctatttgtgtacggctttgtgaacaaggaattaacccagaagctttatcatcggttattaaggagcttcgcaaggctactgaagcactgaagcgagtacagcaccaagaggatggtgctaaaccattcatgagggatgaattcagtcaactcccaccaggccccacctccaacattggagattacaatggagattacaacattggaaattacatttcaagggttaagcccccatggctgctttcgtgggctggcattgttgagtgtctgcagcttttcaaggctcagggtacaagctgtcagtggatctaccattctggggttggagaacggtggccctcttctcacagctccattcggcagttccccagtgaggacattgtgtag

SEQ ID NO: 49 - DNA, 2243 bp, Homo sapiens
  SIMILAR (77)..(208): 501254mologous to Arabidopsis thaliana putative protein,accession number AL161515,Smith-Waterman Score=130.
ctcggccttagccatggcgagtagcagcggtgctggggcggcggcggcggccgcggcggcgaatctgaatgcggtgcgggagaccatggacgttctgcttgagatttcaagaattttgaatactggcttagatatggaaactctgtctatttgtgtacggctttgtgaacaaggaattaacccagaagctttatcatcggttattaagggagcttcgcaaggctactgaagcactgaaggctgctgaaaatatgacaagcttgactttctggagaaattcctgatgagatatgtcaagctctgcaagagggttagaagattgcattgtagttgagaatgtacaatgaaattactgcatgcagcagtgtagaaaaattttactttttaaaagaattataaaaccatagctttataaatcagtgggaaagtggcttacagagagacctatcagatgtgtttacatcacatcttattcactttttttaacagctctaatgctttggcattgctatgttcatattcatgtattccctatttatagctctgatagctttaattttctaagcagtctgtctatcagatgtgcacatctgctgtgccaggttgaagtatagtggaacccatcagtagtaatgtgtagtagttatgacttgttgacatttccattataaactttaattttgaattgtttatgcattataactgtggatttatattgtattgggctgaaagttgacaagatttcagccaccacttgtgaatttttatttagattcattatgtatatcagaatcttgttttttgaaataagagcatggaaaacatttcttgttaatctactcttgaacaaagaatatttagtttttcaaacagtttgttgggcagctaatagtgtgaaccaggtcatttttgtattgagtaaaaaaatcaaactttgagaaacttggattttaaaagtaatgacaatgcttaggttagtattatttgtaatttgaatcatttacatctaatgagaatgttagttgagaatgttttctaaaagttccacatcctataaataacggaataaaaaatattgtaaaatgaaacaacaaacatgcaaaattcctatttacttttattacataaaagtaattttagtgcttacctaataaatcttgaatggttatttaataaattattagatgggtgatgtgtttcaaaagatacttgctattttttgaagaaataaggatttccagtcattaaacaaaactaaacaatcttattagatgggtgatgtgtttcaaaggatacttgctattttttgaagaaataaggatttcccagtcattaaacaaaactaaacaatcaaatgttctatattagggatctcaaggtattggctttttttaaaaaaacctttttaacatcttgatgtcaaggattataagtatggcttttcagaattgttttgtttgtcattattcttgcctttaaaattttaactcatcaaagtgaagattagaaataaattttagaaaatgtagaatagtattgattctgtccctgtaatagaatctcagtggagtttttttgcaaaactaatatggatttcatctgattttattatttcttaaattttagattttattgagtaccatttatatgattgtacaagcattcactctttagtagcattttttgtttttcagacaagctgaagtggttttattaagatttggtaatatttaaatagcaaccttctctgcctttttttttttttaatatagaattttgaccattttgactttttaaatgcctggcatctttaccaaccaagtaaactggaagatctgttactggtagaacaggttgaggagacagtaggaatttgtaaaaagtcatttgatttataatcaacactacaaatactatgtgttatttataaaatcataaagaacacttttgtcagactccaaaatttgtatatacttccaggccataagagttgatggtattatttatgactttgtagattaaggttatttatgtatgaaacaaagcaggaaaatatattgagaagggatcgtgtttacagaggacttctttaaagtgtcacatttttaaaatgtaaacatatttttaatgcatacttaagtaatatttaagaaactaaacaaaataatgatacaattgcagtgttgtgcttgttgtcaatgacaaaaataaaaccattttggtggtaaaaaaaaaaaaaaaaa

SEQ ID NO: 50 - DNA, 225 bp, Homo sapiens
  SIMILAR (215)..(84): 361254mologous to Triticum turgidum subsp. durum lipid transfer protein,accession number AJ297768,Smith-Waterman Score=62.
atgagtgaacttcagcagcaggaaggctacagtggcagcacagcttggagagtgcctccatctactgggggaaaaagagggatacaaaagcagtactttgatcttgactcagtgacaagtctgccatggcagcacagtgtggagacactgatgcttgaaagaatgagaggggaacaggtacacaatgttgctttggagcatgccatggtgaggcccaagcactga

SEQ ID NO: 51 - DNA, 2673 bp, Homo sapiens
  SIMILAR (160)..(1461): 951254mologous to Homo sapiens meningioma-expressed antigen 5s splice variant,accession number AF307332,Smith-Waterman Score= 2138.
atgattaaaacgagatctttccctaacagaatagatccactgcgtttgctgccaattgatggggcaaatgatctcttttttcagccacctccactgactcctacctccaaagtttatactatcagaccttattttcctaaggatgaggtaattgtctctctacctaccaacttggtgtatgggtatggtcccaaagttgtttctaaagaaattccagtagagtccatcgaagaggtttctaagattattaagagagctccagtaatctgggataacattcatgctaatgattatgatcagaagagactgtttctgggcccgtacaaaggaagatccacagaactcatcccacggttaaaaggagtcctcactaatccaaattgtgaatttgaagccaactacgttgctatccacacccttgccacctggtacaaatcaaacatgaatggagtgagaaaagatgtagtgatgactgacagtgaagatagtactgtgtccatccagataaaattagaaaatgaaggcagtgatgaagatattgaaactgatgtactctatagtccacagatggctctaaagctagcattaacagaatggttgcaagagtttggtgtgcctcatcaatacagcagtaggcaagttgcacacagtggagctaaagcaagtgtagttgatgggactcctttagttgcagcaccctctttaaatgccacaaccgtagtaacaacagtttatcaggagcccattatgagccagggagcagccttgagtggtgagcctactactctgaccaaggaagaagaaaagaaacagcctgatgaagaacccatggacatggtggtggaaaaacaagaagaaacggaccacaagaatgacaatcaaatactgagtgaaattgttgaagcgaaaatggcagaggaattgaaaccaatggacactgataaagagagcatagctgaatcaaaatccccagagatgtccatgcaagaagattgtattagtgacattgcccccatgcaaactgatgaacagacaaacaaggagcagtttgtgccaggtccaaatgaaaagcctttgtacactgcggaaccagtgaccctggaggatttgcagttacttgctgatctattctaccttccttacgagcatggacccaaaggagcacagatgttacgggaatttcaatggcttcgagcaaatagtagtgttgtcagtgtcaattgcaaaggaaaagactctgaaaaaattgaagaatggcggtcacgagcagccaagtttgaagagatgtgtggactagtgatgggaatgttcactcggctctccaattgtgccaacaggacaattctttatgacatgtactcctatgtttgggatatcaagagtataatgtctatggtgaagtcttttgtacagtggttagcaaagctcatcgtggagacggacacctttggaagcagagttcgagtccgaggagccgagacgggcctctacatctgcatgaacaagaaggggaagctgatcgccaaggtgaggccccagcaggcaggtggtccgcgggacctagggagtggcttgggctggctggactcctccaagacagtcctgggctctgatcccaacaagagcaacggcaaaggcaaggactgcgtcttcacggagattgtgctggagaacaactacacagcgctgcagaatgccaagtacgagggctggtacatggccttcacccgcaagcccggccccgcaagggcccccagacgcggcagcaccagcgtgcaggtccacttcatgaagcggctgccccggggccaccacaccacggagcagagctgccctttcggccccgacagcacagtagagcgcccagggccgccgtgtgagcgccctatcccagccatcagcgctccatcccacggccgggcggaagcggggcccaggtgccatgcgggccaggcccgcaaggagagtttgtccgattcccgagacctggacggctcctacgaccagctcacggagacagagctagaagctctaggcctgggaagtgccatgtggtgtcctgcatgtccaccaaaccacttggctgcccgggcatcctctctttcccacatggggagattatcaccaggaacaccaccagttagtgagcacttgtatctgccacaggcttggcaggcactgtctcctctaaagcccatggggagagccatcatcaaccactttaaccccaaaattgagtcctacgctgctgtgaatcacatatcccaactgtcagaggagcagatgtctctaattcagcctccaaatcagagggtcataaagacctttaaggctcattacatatggtactctatgcaaaggactgtcaatgctgtgggagaaaacccaattggagagaatatcatgaaaatctggaaggattacaacactgaagatgccatcactgttacagaaaaagccatgggcgagcaacacaaatatcctagccaactcgacctgacatactatacgccacactcgctcttcttcaccccagcagtacaagcacgttatcttgtgccgattttccacaaaggctactacacgaagtactacccatatcttttcgattggaaccagaccaccctcaggaatacgatcccaagttacaaagactatgaaactccgacctaa

SEQ ID NO: 52 - DNA, 258 bp, Homo sapiens
  SIMILAR (214)..(146): 471254mologous to Schizosaccharomyces pombe putative cholinephosphate cytidylyltransferase,accession number AL023777,Smith-Waterman Score=71.
atggtgctggaggtggtgagagccaactatgacacgctcacgctgaagctgcaggatggcctggaccagtatgagcgctactcagagcagcacaaggaagctgccttcttcaaagagctggcagtaagagaagatgctattcgaggtagtattgcctacttctcctttgcagccatggagacagcccttgcacagctccagctgggcctggggtttgacgtgtgttcccagcagcagatctggctcattattccttaa

SEQ ID NO: 53 - DNA, 624 bp, Homo sapiens
  SIMILAR (410)..(204): 291254mologous to Hepatitis B virus precore/core protein,accession number AB014389,Smith-Waterman Score=65.
atggacactaaagacaaacgtacttttgcttttattcttattactagaaatctttctaattttactttaggatatgcgcctaccataggaagtagaacattcaagacgaaaacatcaactgtccttggtgtttcagtcttcgggacctctttgtcacattctgggatacagaagccatttgcctatggctgtggaaagtactcagtaaatattggctggctggctggctggctggctggctgcataaaaggatggaggaaagggaaggaaggaaggaagctaaaaaaagatggagaacttccccagatgccccacaagtctaggaattgtttccagaccagcataagcaatggcaaggctgagggactggctatgggggatgtagcagtggacaagagcctcgctaagtgtggaaacggggaacagagggaagctggggaacttctcagaggggataaagttccaatttcaaggcaaagaaacttaaggcccagagaggccgaacaagtggcaaaggccaaacagtcagccaggaacagaaggggaagcaaagcaactcgaatttattatgtgtcaactgtgggctatgagcttcactatcagtcatccacagacatcatctaa

SEQ ID NO: 54 - DNA, 395 bp, Homo sapiens
  SIMILAR (181)..(279): 441254mologous to Homo sapiens Human secreted protein encoded by gene 63,accession number Y36286,Smith-Waterman Score=60.
atagtgaagctcatagcccacagttgacacataataaattcgagttgctttgcttccccttctgttcctggctgactgtttggcctttgccacttgttcggcctctctgggccttaagtttctttgccttgaaattggaactttctttggtgaaacaaccagaaaatgcttcagcccagaaacttggtcagtacttggatgggggatcacctgggactacccaaggatgtgggctgtctgctagactatagccccttgagggcaaggtgggcgccttgctcatggttccatcctaagccccagcacagtagtgggtgcatggtgagccattagtgaatctttgtggaatgaaggtgggagaaaataaaatacctgtacttcacagggtattgaag

SEQ ID NO: 55 - DNA, 399 bp, Homo sapiens
  SIMILAR (351)..(103): 431254mologous to Mycobacterium avium Gsa protein,accession number AJ251811,Smith-Waterman Score=118.
ttttttctttttaattaaaattttattttacatgtttttaaaattcacaatagatattttatcctaaaataaagtaaaaccgagaggtgacagcgtgctggcagtcctcacagccctcgcttgctctccccgcctcctctgcctgggctcctactttggcggcacttgaggagcccttcagcccaccgctgcactgtgggagcccctttctgggctggccaaggccgggtgggcgtgggcttggcgggccccgcactcggagcagccggccagcctaagcctcccacccactccaagggctcctgtgcggcccgagcctcctcgacgagcaccaccccctgctccacggcgcccagtcccatcgaccacccaagggctgaggaatgcaagcgcaccgtg

SEQ ID NO: 56 - DNA, 379 bp, Homo sapiens
  SIMILAR (245)..(120): 621254mologous to Homo sapiens Human secreted protein, SEQ ID NO: 7131,accession number G03050,Smith-Waterman Score=122.
gtgttgcttgctggatcatattgtgtacggaattggtgggttcttggtctcactgacttcaagaatgaagccgcggaccctggcggtgttacagctcttaagttggcgcgacaggagtttgttccttctgatgttcggatgtgttcagtttcttccttctgctgggttcgtggtctcgctggctcaggagtgaagctgcagaccttcgcgctgagggagcgggctccggccttggccagcccagaaaggggcctcctacagtgcagtggtgggccgaaggactcctcaagtgccgccaaagtgggagcccaggcagaggaggcgccgagagcaagcgagggctgtgaggactgccggcacgctgtcacttctcaatatg

SEQ ID NO: 57 - DNA, 267 bp, Homo sapiens
  SIMILAR (34)..(228): 451254mologous to Mus musculus T-box 1,accession number AF326960,Smith-Waterman Score=111.
atggcgggctgcaggtcccgagccctgccccgcagggaggcagctaaggtccggcgagaaatggagcgcagcgccagtgggccggcgctgctgggggacctagtacaccctccgcagccgctggcccggcccagaaaggggctcccacagtgcagcggtgggctgaagggctcctcaagtgcccccaaagggggagcccaggcagaagaggcgccgagagccagggagggctgtgaggactgccagcacgctgtcacctttcagtag

SEQ ID NO: 58 - DNA, 447 bp, Homo sapiens
  SIMILAR (131)..(340): 411254mologous to Streptomyces coelicolor A3(2) putative acyltransferase,accession number AL391515,Smith-Waterman Score=123.
atgcgcttgcactcctcagcccttgggcggtcgatgggactgggcgccgtggagcagggggcggcgctcgtcggggaggctccggctgcacaggaacccacggaggcgggggaaggctcaggcatggcgggctgcagtcccaaggcctgccccgcgggaaggcagctaaggcccgggccggccggctgctccgagtgcggggccgccaagcccacgcccccccggaactccagctggcccgcaagcgccgcgcgcagccccggttcccgctcgcgcgtctccctccacacctccctgcaagctgagggagcgggctgcggccttcgccagcccagaaaggggctcccacagtgcagcggtgggctgaagggctcctcaagtgccgccaaagtgggagcccaggcagaggaggcgccgagagcgagcgagagctgtgaggactgctag

SEQ ID NO: 59 - DNA, 579 bp, Homo sapiens
  SIMILAR (506)..(339): 401254mologous to cercopithicine herpesvirus 15 EBNA2-like protein,accession number AF200187,Smith-Waterman Score=98.
atgatctcctttgacctcatgtctcacatccaggtcacagtgatgccaaaggtctttgggcctgtgatgagaggggctgccatgaaggattttgcagaaaagaagtccacagcaaaggccctggaagatgtaaaggcaaacttttactgtgaattatgtgacaagcagtatcacaaacaccaggagtttgacaatcatattaattcttatgaccatgctcataagcagactcaggagcccagctggcttcacccagtggatcccacaccggggtgcaggtggagctgcctgccagtcctgcaccatgcgcccacactcctcagcccttgggtggtcgatgggactgggcgctatggagcagggggtggcactcgttggggaggctccggcggcacaggggcgcacggagcagctgagggacccagctccggccttggccagcccaggaaggggctctcactgtgcagcggcgggctgaagggctcctcaagtgccgccaaagtggaagcccaggcagaggaggcgctgagagtgagcgagggctgtgaggactgccagcacgctgtcacctctcaatag

SEQ ID NO: 60 - DNA, 1059 bp, Homo sapiens
  SIMILAR (302)..(216): 891254mologous to Homo sapiens Human secreted protein, SEQ ID NO: 7141,accession number G03060,Smith-Waterman Score=133.
atgcccagtccagaaatcaaagtaaataaccttaaaccaaacacagatgaattggctttcctaactcaacccagatggtgtgtccggaattggtgggttcttggtctcactgacttcaagaatgaagccgcggaccctcaaggtgttacagctcttaaggttgcgcgtctggagtttgttccttctgatgttcggatgtgtttggagtttcttccttctggagtgaagctgcagaccttcacggtgagtgttacagctcttaaggcggcgcgtctggagttgttcgttcctcctggtgggctcgtgggctcgctggcttcaggagtgaagctgcagatcttcgtgctgagtgttacagcttataaaagcagtgtggacccaaagagtgagcagtatcaagatttattgcaaagagcgagagaacaaagcttccacagtgtggaaagggacccgagcgggccttgggtggtcgataggactggccgtggtggagcagggggcggcgctcgtcggggaggctcgggctgcacaggaacccacggaggcggggtaaggctcaggcatggcgggttgcagtcccgaggcctgccccgcgggaaggcagctaaggcccggcgagaaatcgagcgcagcaccggtgggctggcactgctgggggacccagtacacccttcacagccgctggcccgggtgctaagtcccttattgcccggggccagcagggccagccagctgcttccgagtgcggggcccgccaagcccacgcccacccggaactccagctggcccgcaggcgccgcacgcagccccggttcccgctcgcgtttctccctccacacctccctgcaagctgagggagtgggctccggccttggccagcccagaaaggggctcccacagtgcagcggtgggctgaagggctcctcaggtgctgccaaagtgggagcccaggcagaggaggcaccgagagcgagcgagggcggtgcggacttccagcacgctgtcacctctcaatgggaccatctagtttcaggaaaacaagctcagggctcccactga

SEQ ID NO: 61 - DNA, 816 bp, Homo sapiens
  SIMILAR (427)..(543): 351254mologous to Homo sapiens Human secreted protein encoded by gene 94 clone HMKDD07,accession number Y02743,Smith-Waterman Score=68.
atgctggcagtcctcacagccttcgctcgctctcggcgcctcctctgcctgggctcccactttggccgcacttcaggagcccttcagcccactgctgcactgtgggagcccctttctgggctggccaagaccggagccgtctccctcagcttgcagggagacttgtcacagactttatcttcagtagtaggtagagacaggaatgctaagaaaggagagatgatcatgctggtaaatgtggctggaacccatgcaaatgggctttctccacatgatggagaagatggctgccaggacatcagccatattggattagggcacactcaagtgatttcatttcactttaactacctccttaaaggccctatcttcacatacacccatattcccagggactggagaactgcaacttccagtgagtccctctgtgtgtctggatcagggaatgcaattaaagccgagtacttcgagtcaccttttaaaaacagtgaagccacgaatgaaacgacagtccttgctccacatgaaacaatctttcgagccgaagatctatctgtgattcttaaagcgtatgtgttggtgacgtccttaacccctttgcgtgcattcattcattcgacgggcacagtttggaatccaccaaagaaaaaacgcttcactgtcaagcctgcttctccctggagccatcaagggaaggtatatgctgggatgaggatgggacccagttatggacttgaaaagagcaagtgttgtttctctgaactggatcctggaagtgtattgcccgtgaacttcacagaagctcttaaaaattaa

SEQ ID NO: 62 - DNA, 558 bp, Homo sapiens
  SIMILAR (164)..(3): 701254mologous to Homo sapiens Human secreted protein, SEQ ID NO: 7678,accession number G03597,Smith-Waterman Score=155.
atgaagccgcggaccctcgcggtgagtgttacagctcttaaggtggcgcgtctggagtttgttccttctgatgttcggatgtgttcagagtttcttccttctggtgggctcgtggtctcgctggcttcaggagtgaagctgcagaccttcgcggtgagtgttacagctcgtaacagtgtggacccaaagaactcaggagcccagctggcttcacccagtggatccagcaccagggctgcaagtggagctgcctgccagtcccggtgccgtgtgcccgcactcctcagcccttgggtggtcgatgggactgggcgccgtggagcagggggtggcgctcgtcggggaggctcgggccgcacaggagcccatggaggggctgagggagtgggctccggccttggccagctcagaaaggggctcccacagtgcagcggcgggctgaagggctcctcaagtgccgccaaagtgggagcccaggcagaggaggcgcagagagctagcgagggctgtgaggactgccagcacgctgtcacctctcagtgtccaggaaggaaataa

SEQ ID NO: 63 - DNA, 540 bp, Homo sapiens
  SIMILAR (28)..(351): 381254mologous to Mus musculus T-box 1,accession number AF326960,Smith-Waterman Score=140.
atggcgggctgcaggtcccgagccctgccccacggaaaggcagctaaggcccggcgagaaattgagcgcagcgccggtgggctggcgctgctgggggacccagtataccctctgcagctgctggcccgggtgctaagcccctcattgcccggggccggtggggcgggccagccggctgctccaagtgcagggcccgccaagcccacgcccacccggaactccagccggcccgcaagcgccgcacgcagccccggttcccgctcgcgcctctccctgcaagctgagggagtgggctccggccttggccagcctagaaaggggctcccacagtgcagcggtgggctgaagggctccccaagtgccgccaaagtggaagcccaggcagaggaggcgctgagagcgagggagggctgtgaggactgccagcacgctgtcacctctcactgggattacagcaggtgctcagctgacatcggtgagggaatgggagtgattcgtcatcacagtaaccgtgtacttcagttctctgacggcagctga

SEQ ID NO: 64 - DNA, 555 bp, Homo sapiens
  SIMILAR (94)..(213): 451254mologous to Homo sapiens Human secreted protein, SEQ ID NO: 6956,accession number G02875,Smith-Waterman Score=74.
atgctggcagtcctcacagccctggctctctctcagcgcctcctctgcctgggctcctactttggtggcactcgaggagcccttcatcccaccgctgcactgtgggagcccctttctgagctggccaaggcccaagcccactccctcagcttgcagggaggtgtggagggagagtcaggagcaggaatcggggctgcgcgcggcgcttgcgggccagctggagttccggcaatatttcagtatctcagtagcaatgagcacactcagatcccagattttggagtcaaatatcactctccacccacaaatctgcagctcctggaggaaatagcacctccaggactggggcagggagtagggatccctgagaaccaagctactgtgaatactgctgctcctctgggtctagctgcccagtggggttaccacactccagatgacattttcttgctgcattctcacatgacagaagagtacaaagagggacaaatgctgtgtcctgacctggtagaggaggtggaagggccaggtggttctcggaagcctcttttataa

SEQ ID NO: 65 - DNA, 648 bp, Homo sapiens
  SIMILAR (186)..(157): 701254mologous to Homo sapiens Human secreted protein, SEQ ID NO: 7083,accession number G03002,Smith-Waterman Score=39.
atgaagccgcagaccctcacggtgagtgttacagcttttaaggtggcgcatctggagtttgttccttctgatgttcagatgtgttcggagtttcttccttctggtgggttcgtggtctcgctggcttcaggagtgaagcttcagacctttgcggtgagttttacagctcataaaagcagtgtggacccaaagaactcagaagcccagctggcttcacccagtggattctgcaccagggctgcagatggagctgcctgccagtcccgtgccatgcacctgcactcctcagcccttgggtggtcgatgggactgggcactgtggagcagggggtggcgcttgttgaggaggcttgggccgcacaggagcccacggaggagctgagggagcgggctctggccttggccagcccagaaaggggctcccatagtgcagcggtgggccaaagggctcctcaagtgccaccaaagtgggagcccaggcagaggaggcgccgagagcgagcgagggctgtgaggactgccagcacgctgtcacctctcaatcccccctctaaacaggacaccctaactgctgttggcaatttggctgatgaccactctagctacttcctgctggataggggtgaagaaggggccctgcagttgtag

SEQ ID NO: 66 - DNA, 798 bp, Homo sapiens
  SIMILAR (634)..(347): 351254mologous to Caenorhabditis elegans contains similarity to Pfam domain: PF01391 (Collagen triple helix repeat (20 copies)), Score=61.3, E-value=6.6e-15, N=3; PF01484 (Nematode cuticle collagen N-ter,accession number Z54238,Smith-Waterman Score=110.
atggacgactctaatgagcatgttggtattgaaagaagaaaggcacagcaggaagtgacaagccaggaggagccgcctcaccagaagctagccctggcagcacctttatcttggactttaagccttcaggactatggaggaacccttgggtggtcgatgggactgggcgcagtggagcacggggtggcgctcattggggaggctcgggtggcacaggagcccacggagtggaggggaggctcaggcatggcgggctgcaggtcccgagccctgctcgcgggaaggcagctaaggcccggcgagaaattgagcacagcagctgctggcccaggtgctaagcttctcactgcccggggccggtggggccggccgggcgagtgcggggtccgcggagcctacgcccactcggaacttgcgctggcccgcaagcaccgggcgcggcccggttcccgcccgcgcctctccctccaaacctccctgaaagctgagggagctagctccgggcttggccagcccagaaaggggctcccacagtgtagcggcgggctgaagggctcctcaagtgccgccaaagtgggagcccaggcagaggaggtgccgagagcgagcgagggctgtgagggctgccagcaggctgtcacctctcagcctgactcattttccaacccttcccttgccttctggacagtcccctgcttccctagctctgacatcctcatgaccttctgtctccagcattgtcaggcccttggaccagctcacggcagccaggacacagaggcattgtgccattcctag

SEQ ID NO: 67 - DNA, 1455 bp, Homo sapiens
  SIMILAR (173)..(403): 411254mologous to Hylobates moloch dopamine receptor D4,accession number AB032918,Smith-Waterman Score=109.
atgaagccgtgggccctcgcggtgagtgttacagctcttaaggtagcgcgtctggagtttgttccttctgatgctcggatgtgttcggagtttcttccttctgccgctggccggggtgctaagcccctcattgcccggggccggcagggccagctggctgctcccagtgcggggcccgccaagcccacgcccacccggaactccagctggcccgcaagcgccgtgcgcagcccgggttcccgctcgcgcctctccctccacacctgcctgcaagctgagggagccggcttcggccttgcccagcccagaaaggagctctcacagtgcagcggtgggctgaagggctcctcaagtgccgccaaagtgggagcccaggcagaggaggcgccgagagcgagcgagggctgtgaggactgccagcacgctgtcacctctcactatgcaatgcttttcataggaactcgggaatgtttgtgttctggacagatcgccaaaagtgactccatacatcacatgagccactcccaggggcagccagagctgcctcctctgcctgcttctgctaatgaggaaccgtctggactctatcagactgtcatgtcacacagcttttacccgcccttgatgcaacgcacgtcatggaccttggctgcacccttcaaagaacagcatcaccaccgtggacccagtgattccatcgccaacaactactccttgatggcccaggacctgaagctgaaagatctgctgaaggtctaccaaccggccaccatcagtgtccctagggacaggaccggtcaggggctgccatcatcaggaaatagaagctcatcagagcccatgaggaaaaaaacgaagttttcctccagaaacaaagaggattccactaggatcaagttggccttcaagacgtcaatcttctcacccatgaagaaggaggtaaagacatctttgacgttcccaggaagcagaccaatgagtccagaacagcagctcgatgtcatgttacagcaggagatggaaatggaaagtaaagaaaagaagccatctgaatcggacctggagagatactattactatctgaccaatggaattcgcaaagacatgattgcccctgaggagggtgaagtgatggttcggatttcaaagctgatttctaacacgctgctgacgagtcccttcctggagcccctgatggtggtcctcgtgcaggagaaggagaatgactattactgtagcctcatgaaaagcatcgttgattacatcctcatggacccaatggagagaaaacggctctttattgagagcatcccccgcttgtttcctcaaagagtgatccgggcccctgtgccctggcacagtgtctacaggagcgccaagaagtggaacgaggagcatctgcacacggtgaaccccatgatgctcaggctgaaagaactgtggtttgcagagtaa

SEQ ID NO: 68 - DNA, 1278 bp, Homo sapiens
  SIMILAR (905)..(594): 341254mologous to Plasmodium falciparum merozoite surface protein 2,accession number AF217014,Smith-Waterman Score=118.
atgtttctgcaggctgcacaaaaagcatggaacccgcatctgcttctggtgaggactcaggctgcttccactcatggcagaagagctgacccccatgtgggtcggtgtggggagaccccacagagctggggtaaaggagaatcacttgctctcgctcccctgagccttactaaagcagcacttgaggactgttcacagatcagcccctcccatcaggggacattgttgtgtctcctcatcctggacctgaggacaggaaagctttccctggagcacactgaagagcccagtgatgtcccctcccatctcctctatcggtggagcatcagctctgcgatcactgaagtctttcaggctctcgcttcctctgattccacctcgcagccagtaaatgtccacaccaaggaggatatgaaagtacaagacatagccctggtccttccatcgaggaagtcaaggaatgcatgcaggacgacaactagtacttgcaaggcacttcttatgcgccagctggcagccagagttattctgcaaaactgtgtttccaagtcctcaagaggaatacatgtcccccagaaaaacctaaccctgccagtgagaggtgacagcgtgctggcagtcctcacagccctgctcgctctcggcgcctcctctgcctgggctcccactttggcggcacttgaggagccctttagcccaccgctgcactgtgggagccccttgctgggctggccaaggccggagccggctccctcagcttgcagggaggctttagctgccttcccgcggggcagggctcgggacctgcagcccgccatgcctgagcctcccccacctccgtgggctcctgtgcagccggagtctccccgacaagcgccaccccctgctccgcggagcccagtcccatcgaccacccaagggctgaggagtgcaggcacacggcaccgcactggcaggcagctccacctgcagccccggtgggggatccactgggtgaagccagctgggctcctgagtctggtggggacgtggagaacctttatgtgtagctcagggattgtaaatacaccaatgggcactctgtatctagctcaagttaagtttcctgctgaatatttcgaaactctttgcaaactgacttcagcacctctgtgggatattcccttccactgccaacccttagttgtcagaaactctgtctttgggaagcatgctacattttctagaacaaatctagatactttagaaatgatggatgatgatgatgatgatgaatga

SEQ ID NO: 69 - DNA, 3206 bp, Homo sapiens
  SIMILAR (298)..(1890): 901254mologous to Homo sapiens putative p150,accession number U93564,Smith-Waterman Score=2552.
atgcgaacagcaggggcagagcgtttgagatggagtgaacagttagtcaaaggtcctaaggcaaaaagtgctcagcattttggagaaatgaccaatgtggcaagaatatcacgcttcggagcagaggagtacgagagcctgtacacgagccacatctggatccccagcagctggtgctcactcactgaaggtcctgagtgtgatgtcactgatgacatcacggccactgtgccatacaaccttcgtgtcagggccacattgggctcacagacctcagcctggagcatcctgaagcatccctttaatagaaactcaatgttggaagttctggccagggcaatcaggcaggagaaggaaataaagggtattcaattaggaaaagaggaagtcaaattgtccctgtttgcagatgacatgattgtatatctagaaaaccccattgtctcagcccaaaatctccttaagctgataagcaacttcagcaaagtctcaggatacaaaatcaatgtgcaaaaatcacagtcattcttatacaccaataacagacaaacagggagccaaatcatgagtgaactcccattcacaattgcttcaaagagaataaaatacctaggaatccaacttacaagggatgtgaaggacctcttcaaggagaactacaaaccactgctcaatgaaataaaagaggatacaaacaaatggaagaacattccatgctcatggataggaagaatcaatatcatgaaaatggccatactacccaaggtaatttatagattcaatgccacccccatcaagctaccaacgactttcttcacagaactggaaaaaactactttaaagttcatatggaatcaaaaaagagcccgcatcgccaagtcaatcctaagccaaaagaacaaagcaagaataaagctggaggcatcactattcaaactatactacaaggctacagtaaccgaaacagcatggtactggtaccaaaacagagatatagatcaatggaacagaacagagccctcagaaataatgccgcatatctacaactatctgatctttgacaaacctgagaaaaacaagcaatggggaaaggattccctatttaataaatggtgctgggaaaactggctagccatatgtagaaagctgaaactggatcccttccttacaccttatacaaaaatcaattcaagatggattaaagacttaaatgttagacctaaagccataaaagtcctagaagaaaacctaggcaataccattcaggacataggcatgggcaaggacttcatgactaaaacaccaaaagcaatggcaacaaaagccaaaattgacaaatgggatataattaacctaaagagcttctgcacagcagaagaaactaccatcagagtgaacaggcaacctacagaatgggagaaaaattttgcaatctacccatctgacaaaggactaatatccagattctacaaagaactcaaacaaatttacaagaaaaaaaaaaccatcaaaaagtgggcaaaggatatgaacagacacttctcaaacggagacatttatgcagccaacagacacatgaaaaaatgctcatcatcactggtcatcagagaaatgcaaatcaaaatcacaatgagataccatctcataccagttagaatggcaatcattaaaaagtcaggaaacaacaggtgttggagaggatgtggagaaataggaacacttttacactgttggtgggactgtaaactagttcaaccattgtggaagacagtgtggcgattcctcaaggatctagaactagaaataccatttgactcagcaatcccattactgggtatatacccaaaagattataaatcatgctgctataaagacacatgtacacagctacgcggcggcggcggagcgcaggcctcgtgccgttacggccatcacggcggccgcagtggcgtcctggagccctcctcaggtagctcttcaacaagcaggcataaacacttctctgatgagggacgcgatggggaaaggctttgttctctgaaaactccctgtaggaactgcctttcttctgagtgtccacttgtgtccggaattggtgggttcttgatctcactgacttcaagaatgaagccgcagaccctcgcggtgagtgttacagctcttaaggtggcgcgtctggagtctgtcccttctgatgttcggatgtgttcagagtttcttccttctggagtgaagctgcagatcttcacggtgagtgttacagctcttaaggcggcgcgtctggagttgttcgttcctcctggtgggctcgtggtctcgctggcttcaggagtgaagctgcagaccttcgcgggctgccggtggagctgcgtgccagtcctgcgccctgcgtccgcactcctcagcccttgggtggtcgatgggattgggcgccctggagcagagggtggtccttgttggggaggctcgggccgcacaggagcccatggaggggctgagggagccggctccagtcttggccagcccagaaaggggctcccgcagtgcagcggtgggctgaagggctcctcaagtgcggccaaagtgggagcccaggcagaggacgcgcccagagtgagcgagggctgtgaggactgccagcatgctgtcacctctcacactgaccccagggaaggcagatttagcccagaacatgccccacccctttccaatccaagaccagtgatcagggtggcccttctggtcctgcagtatctgggtctgaaaggcaagtataactccatcaccagtaaccagggtgtagagactatctgtgtgggcccttctgttcttgggaaatcaaccctgtctggggctggctttgactctcctgttgtcttgccaacagccatccttacccgacctgggatggagatcaccaaagatggcttccacctggttattgagctggaggacctggggccccagtttgagttccttgtggcctactggaggagggagcctggtgccgaggtgagactccagccttggcctttgggtcaggcttcgggaaagaaggcacagatttctgaggctctcggtattcagtttcccaagaccaaatcctcagaagaagaatccaattggtcttgctcgtcttatcaggccaagcttcaggggttgctggtagccagctcgcctctgattggacccttctcaggccaagg

SEQ ID NO: 70 - DNA, 1092 bp, Homo sapiens
  SIMILAR (361)..(711): 291254mologous to Leishmania major L8453.1,accession number AC008054,Smith-Waterman Score=96.
atggtgacaaaacaggctgtccccgatccagctcacagcgtactctggtactctctgcctgactcaggagcccagttggcttcacccagtggatcccgcagcggggctgcagatggagctgcctgccagtcccgcgccgtgcgcccgcactcctcagcccttgggtggttgatgggactgggcgccgtggagcaggggatggcgctcctcgaggaggctcgggccgcacaggagcccactgagggagtgggaggctcaggcatggcgggctgcaggtcccgagccctgccccacgggaaggcagctgaggcccggcgagaaatcgagcgcagcgccggtgggctggcactgctgggggacccagtacaccctccacagccgctggcccgggtgctaagcccctcattgcccgggtccggcagggccggccggctgctccgagtgcagggccggccggctgctccgagtgcagggccggccggctgctccgagtgcagggccggccggctgctccgagtgcagggccggccggctgctccgagtgcagggccggccggctgctccgagtgcagggccggccggctgctccgagtgcagggccggccggctgctccgactcagaaaggggctcccacagtgcagcggtgggctgaagggggctcctcaagtgccgccaaagtgggagcccagacagaggaggcgcccagagcgagcgagggctgtgaggactgcctgcacgctgtcacctctcagtatctttataaaagagaaagtagattaaaaaatgattgtggcctctgggaagaacatgtttacttattcctggattcaggtcatgttagcgaacaaggattaatggcacatccaattaagaccataaataaaactgcatttggtttaatatcccatctcaatggctcacctgaagtggaccagctgcttcccgtggaagaggggcaggatatgatgaaagatgcagatgaacagccaggtgaaggcgaggtcctgagcacaggagcctctgtccccatgatgccaggaagcatcagtgaacgaccacggctaatccggttgccacgtcaggcgctgtaa

SEQ ID NO: 71 - DNA, 1112 bp, Homo sapiens
  SIMILAR (662)..(495): 421254mologous to Bordetella bronchiseptica pertactin,accession number AF156773,Smith-Waterman Score=101.
gagcagcagcaagatttattgcaaagagcgaacaaacaaagcatcccggtgtggaaggggacccgagtgggttgtcactgctggctcgggcagcctgcttttattctcatctggccccacccacatcctgctgactggtagagccgagtggtctgttttgacagggtgccgattggtgcgtttacaatccctgagctagacacaaaggttctccatgtccccaccagattaactagatacagagtgttgacaaaaaggttttccaagtccccaccagagtagctagatacagagtgtctattggtgcattcacaaaccctgagctagacacaaggtgctgattggtgtgtttacaaaccttgagctagatacagagtgccaattggtttatttacaatcccttagctagacataaaggttctccaagtccccaccagactcaggagcccagctggctttcacccagtggatcctgcacaggggctgcaggtagagctgcctgccagtcctgcgccagtcccgtgccgtgtgcctgcaatcctcagcccttgggtggtcaatgggactgggcaccatggagcagggggcggagctcgtcggggaggctcaggcggcacaggagcccacggaggggaggggggaggctcaggcatggcgggctgcaggtccccagccctgccccgcaggaaggcagctaaggcccagtgagaaatcgagcacagcagctgctggtccaggtgctaagcccctcattgcccggggctggtgggggcccgccggccgctccgagtgcggggtccgccgagcccacgcccacccggaactcgcgctggcccgcaagcaccacgcgcagcccggttcccgcctgcacctctccctccacacctcctcccaagctgagggagccggctccgaccttggccagctcaggaaggggctcccacagtgcagcggcgggctgaaggggctcctcaagtgctgccaaagtgggagcccaggcagaggaggcgccaagagcgagcgagggctgtgaggactgccagcaggctgtcacctctcagtgggagagtggaatgcttgatatggagcctatagaggaatcgctgttgtag

SEQ ID NO: 72 - DNA, 975 bp, Homo sapiens
  SIMILAR (676)..(789): 841254mologous to Homo sapiens hypothetical protein,accession number AL162044,Smith-Waterman Score=171.
ctttcatacatttttgtaagttatgtttccatgtctcgtgtgtgatgttgtgtactgttgacatgaaatactccttttttggtaaagatggattggcttaacagattagagctacagaaagtatgacttagcacgctggtaaggccacaaaaacccaagcaagttcccccagtttcgtatcctgtaaatagagataagttagtttttctgtttcagagagtggttatggaaaacgtactaggctttaaaatgattgttaatctcagtgtggggacatttggtttggggacatcagttcaggagtaaatgtatctgatcctgctttgaataaatgcaacttgaaagccttggaattttaccagatcgaatctgggccaaatagaaagcattttaagaaagaaagatggatcaacctagtggaagaagtttcatgcaagtattatgtgaaaaatatagtcctgaaaattttccttatcgccgtggcccggggatgggagtccatgtcccagccacacctcagggctctcctatgaaagatcgccctcaacctccccaaggtactagtgttgaacagcctgtggaataacctgtgcaggagatgaaaaagaaattgctgctttctgcgctcatgtgtcggaactagatctttctgacaacaaactcgaagactggcatgagtgcagcggtgggctgaagggctcctcaagtgccgccaaagtgggagcccaggcagaggaggcgccaagagcgagcgagggctgtgaggactgccagcacgctgtcaccactgccagcacgctgtcacctctcagcatggccacagtcaaaagtagcctcagtggtgaggaccatgagaagagcggagtaaaatgtacaaggtggatgctgcatggatactctgttgacagacttacttctgagctcaggtacctttggggacacccagaaacgcttaagaggctagttgccctgtga

SEQ ID NO: 73 - DNA, 1622 bp, Homo sapiens
  SIMILAR (736)..(530): 661254mologous to Plasmodium lophurae histidine-rich protein,accession number X01469,Smith-Waterman Score=334.
atgattgatgtcactgaggccccgcctttccagaccaagccagtgttcatcttacatacgttgattgatgtcactgaggccctgcctttctggaccaagccaatgttcatcttacataggttgattgatgtcactgaggccctgcctttccggaccaagccaatgttcatcttgcatatgttgattgatgtcactgaggccccgcctttccggaccaagccaatgttcatcttacatatgttaattgatgtcgccgaggccctgcctttccggaccaagccaatgttcatcttgcatatgttgattgatgtcaccgaggccccgcctttccggaccaagccaatgttcatcttacgcagatgcgagtctccggacttgatcaagcgccctctagggggctttcctgtgcctgcagacacaaggcacagcagcgctcccacgtcctccctggcagggtgtgcacacccgatgccaccttccatgtcaggatattggaatcattcgggtccacatccaggggaccacctgcattctcataataataccaatgatgatggccatgatgatggtgatgaagatgacgatgatgatggtgatgatgatggtgatgaagattacgatgacgatgatggtgatgatgatggcattgaagatgatggtgatgatgatggtgatgaagatgatggcaatgaagatgatggtgatgatgatggccatgatgatgcatgggagcatgatccccgcgtcaccaggctgctggctggcccagtggagaagagagcagccgccctgggggagctgttctggggagagggcaaaaaagggacagggaaggctttgaaggggatgctggtgcagtccctcaggcgccccacctctcaggaagatgggccccgctggggggcccgtggtgtggaggccacgctgctgcccgggctgagggacccgaacctgcaggccccagaaaataaaagggtggccaccgttattagtttaaaaaggcgtttgcttgagaagaggtgccttcagtccagtgaagagcgctgggctgctacccgaagcatctgcacgggaaggaaacgagatgagtcggtgactcgttgccacaggggcacgcatggtgtctctgtgtctcctctggtcttagaagtgagaggtgacagcgtgctggcagtcctcacagccctcgcttgctctccccgcctcctctgcctgggctcctactttggcggcacttgaggagcccttcagccctccgctgcactgtgggagcccctttctgggctggccaaggccggagccctctccttcagcttgcggggaggtgtggagggagaggcgcgagcgggaaccggggctgtgcgcggcgcttgcgggccagctggaagttcctggtgggcgtgggcttggcaggccccgcactcggagcagcaggccggccctgccggccccggggaatgaggggcttagcacccgggccagcggctgcggagggtgtactgggtcccccagcagtgcccgcccaccccgcgctgcgctcgatttctcaccgggccttagctgcctccccgcggggcagggctcgggacctgcagcctcgccactgcctgacaccctccgca

SEQ ID NO: 74 - DNA, 1074 bp, Homo sapiens
  SIMILAR (460)..(615): 401254mologous to Pseudomonas putida putative 6- phosphogluconolactonase,accession number AJ279003,Smith-Waterman Score=69.
atgcagcctccggaggccggtcttggccatgtgctgggtaaggtaacaccatggctgtgtcttgagaccaccccaacctcagttcacttgaatgaagaattttataatctcaactctaagggacctgtcaaattagtccagggctccaagaaatgtgaattccaaggacaaggtagccctgaaatgcctgcctcatgggatcctgccctgtcagtagtaagcatcttcaaagtggctcctgcaggttggtctcctcaatcacagagttcagacagaaccctgacaccagccacgtgtaccatgcggtcagccaaatgtgctttggaggtagcaccagcatctctagggcagccagtcatttctctagaatggtgtagaacaacagcaccaggaactgaaaggaacctgcagtacaacacagcagacgcttcaccttctctgtccccagagagatggatgccatccaatgagcacccctgggccagtggcatcagacagtcactgttccaggctctgttctcggcgctgggggtacaaggcggccaccagattgctccacttagatgtgtcatggacacctgcaccttaactcatctcacacctctgccggcttttcctgcagcttggattatcttcattccccggctgtccatgctgttgggttcttcttctccctcacactcaccatgttcagttcctcaccaagcctgtcagctctgtctccctccgtttccttgttttcctgctgaagtcgccaggagccccttcacgcacacccccaccccgaactctggaaaaaggcaagaaataaaagcggagctcttttggaggttggctagttaccgtatggatgaggagcccactgtgatgggaataaagccccgggaacagcagcagattcctagcatgtttcaaactgtgtggatgcggggaggggtcatggcagcggagccatctagaaagattgtcagcagcccttggatagtggaaatgattaatcacttcagcacaaaagaacacaaagagagatttgttaagaataagcaggggacagagtgccagctccaggggtga

SEQ ID NO: 75 - DNA, 467 bp, Homo sapiens
  SIMILAR (121)..(32): 501254mologous to Terebratulina retusa ATPase subunit 8,accession number AJ245743,Smith-Waterman Score=61.
gaagagatgaaggttgggcttgcccttggagggtgcgtagcgatggaagggcatcccagagaaagagaagatgtggaatgatgatgagaggggtgcgcatcatgcatatgggggccagttgggagacagcctgtgctagcgtcattctagaggggaagaaagagggggccccggtggagccaaagaacagtaatctttcaggaagaaaggaaaaggccagcaacagcaacaaaaacttcctgcagatgtggaatttgaaggaatccagagaaagcaagcctatttttagcaggaggaataaaattcttaaattgaaagcaaatcggagagggttctatggcgctctctgcgaggggccgagcgtggattcgggtctgatgattactttgactgcagaaacagtgggggctgtaatctccgaagcagcggacactcacagcgacggttggcccagtcctttgatttag

SEQ ID NO: 76 - DNA, 440 bp, Homo sapiens
  SIMILAR (1)..(66): 561254mologous to Bacillus halodurans hypothetical protein,accession number AB031212,Smith-Waterman Score=68.
tttgttttgaatttgagacattttctagaatattgctgggggaatgaggcttcagtactttacagaatcgttgcctgcacatcttggaaacacttgctgggattacttcttcaggttaacccaacagaaggctaaagaaggtatattgctgttgacagtgagcgactgtaaacatcctcgactggaagctgtgaagccacagatgggctttcagtcggatgtttgcagctgcctactgcctcggacttcaaggggctactttaggagcaattatcttgtttactaaaactgaataccttgctatctctttgatacatttttacaaagctgaattaaaatggtataaattaaatcactttaaaaccatgtctgtacatttttagagggcttcagcagggcattgaggaggcgctctgtgtatgcataaaatttgctatata

SEQ ID NO: 77 - DNA, 483 bp, Homo sapiens
  SIMILAR (102)..(140): 531254mologous to Schistosoma mansoni eukaryotic translation initiation factor 5A,accession number Z48724,Smith-Waterman Score= 40.
atgggggtggaactcatgatggaattggagcctttacaagggaatgaagagacaagagctctctttatgccacgtgaggatacagcaaggccccaatctgcaagccaggaagagtcgtcacgagaaccagaccatgcaggaactctgatcgtggacatttcaacctccagaactgtgatccaaaatgcatatgtatctttggaagaaactctgaagtaaaggccggaatattctttgtttaaaacattaaaaacaaaacagaccaaagcatcaagcaagaagtttcctggcaataaactaagcacagcattattttttaaggaacacaaattaagtgttcaacctgtggcaaatttgtactttctccctgaattatgttgttatcaaagaaaaaaattgggaagcatggcaaaatatcatcaaaactgaaactagaattaaacaaaactaaattaaaatgaaataaaatgatgtccattctta

SEQ ID NO: 78 - DNA, 978 bp, Homo sapiens
  SIMILAR (730)..(861): 421254mologous to Homo sapiens PRO1048,accession number AF119842,Smith-Waterman Score=71.
atgtctgtgcagaggtgctgctggctcctctttgagtgtgagatccctctgcagtcacacaacctcacccagttacgaagagctagtcacctcaactgcattgtcccaagacaggcagagaagccattccctgtgtccacagaggaaggagaaagtggaggaggtgtttatggagcagctgaagctgtgataagacttctgagcttgcttctgaataccacagccccgggcacagcaaagccaagaaccctgtggatgacgctctccacgggtgtctcacagcctcttccaggacagctgagccgggaccagcagccttgctcatgccaccccctgcagacgcagtccctgagaaagacaaaacaaggtcacaattccaactggcatgacactgctgtcctgtatacaaccgaaaatgcactcatcccttccagaagagaagagattgctttgataactgtgaagaaaatgcaacctgttaagacctttcattgtgagatctgggctggtgttcatgtgctcagagacctgtggagtgttggaaaacacctggaggaggcactgctgtcagacagccagggtgaagcgtgtgcactgaagacgagatcagatcgactcatggaggcatccggcagagcttacggcaggacccatgatgaagggagggcctgtggagggtttattcaagacaaatcaggagcagatgtctccatttcaatcctacacaggcatggaggaccacatgctccctggtcacaggtggccgcagcctaccgtggcagcacagggggcaaggtagaagccagccctggactggcccccatcccattgcaggtgcacttatactcacccacatggggacaattcggacaccccagtgaccctaacatgtgcagtctggggacatgggaggacatgagcgccgcagagaaaacccatgcagacctgccgagaaggtgtaatctgcacagacagtag

SEQ ID NO: 79 - DNA, 741 bp, Homo sapiens
  SIMILAR (552)..(64): 301254mologous to Oryza sativa similar to Arabidopsis thaliana DNA-directed RNA polymerase (EC 2.7.7.6) II largest chain (JDMU1),accession number AC084218,Smith-Waterman Score=115.
gctgaggctgatcccggaaccaagctttgagaaccactgtgttagactataaatatccctcttggattcaggttcatgaaggaactgtgttagattatatacatccctcttggattcaggctcatgaaggaactgtgttagactatatacctctctcttggattcaggttcataaaggaactgtgttagactatatacatccctcttggattcaggttcatccctcttggattcaggttcgtgaaggaactgtgttagattatatacatccctcttggattcaggttcgtgaaggaactgtgttagagtatatacatctctcttggattcaggttcgtgaaggaactgtgttagactatatacatctctcttggattcaggttcgtgaaggaactgtgttagactatatacatccctcctggattcaggttcgtgaaggaactgtgttagactatatacatccctcctggattcaggttcgtgaaggaactgtgttagactgtatacatctctcttggattcaggttcgtgaaggaactgtgttagactgtatacatccctcttggattcaggttcgtgaaggaactgtgttagactgtatacatccctcttggattcaggttcgtgaaggaactgtgttagactgtatacatccctcttggattcaggttcgtgaaggaactgtgttagactatatacatcctcttggattcaggttcgtgaaggaactgtgttcccagc

SEQ ID NO: 80 - DNA, 1296 bp, Homo sapiens
  SIMILAR (642)..(511): 401254mologous to Homo sapiens Human secreted protein sequence encoded by gene 11 SEQ ID NO:72,accession number B24447,Smith-Waterman Score=68.
atgttggataagagtgaaaggccacggggaaaccatggcatgacagctggtggggcacgagcactgagagaagccacagaggggccacatcaaacgttccaacaacccatcaggaacggaaaagaagctgctgacattctggagaagaaacaggtagagctcaggctgtcctgctctcctttgcgggtacattcttttaacaaatgcaaggtgagcagatggcaaattggtcttcatctccccaaaacttatcaaaaaaaaacagcggaactcatggcaaactatatacacacacgagcacatgcacgaaccccaggcttcctgaaatctaaactaactgccagtttcctgagacagggtccagacgtatctgcgaacttgaggcattctgggtgctgcaagagctctgggaaaattggtcctggggatgaagggctccctggtgtcctatatacatgccgtgccatctccagtgccccaggtcgacttcagactgctgtgctggcaacgagaaatttccagccagtggatcttagcttgctgggctccgtggggctgggacctgctgagcaagaccacttggctttctggtctcagcccctttccagatcacaccagctcctcagcaatggatccaaaccagaagaagaaatctctgaattgcccaaaatatcacaccaactcatcagtaatggatccaaacaagaagaaatctctgaaatgccagaaaaggaatttaaaaggtttttatgtagaaatatgaaaacttatgatcataaagatttgtatgtgaatgtttatagcagctttattcataactgccccaaactgaaaacaatccaaatatacctgaactggggagtggaaaaacaattggctgactacatcaattctatagctcctgccatgcaaaattcaatcatcagagacgttgatcctatcatcctcctcccgccagcgaaggatattttgttggtccgctgcattagtgacatcacaaagatgggacctgatgctagaaaaatcatcggtaccttagatgccctgggtcacatttataggttccagggattaggacctgttatcttgggtggccattattcagcctactacagaggttccaccaaccacgcagctagcttagcgaagagcagcaattcaactcatgaagagcagatgtgttcctctttccatggtgaagatggtgctgcaggcttgcaggcactggggcgtgtgattgaagacattgctatttccggctgccacggagcatggaggcaccttgtggggctgtag

SEQ ID NO: 81 - DNA, 329 bp, Homo sapiens
acctgacctttacacggtggaactcctcaggctcaaccttagatcctcttcttccaccctagctgcttaaatcatctcaaccacccatattgccttgcctctatgctgagagctttcagatttatacgacagcccagaatttcctccaatctcctgagccatgtaagtacctgctttgcacaagcacctcatactaaggttgcttagaacatcactgcctttcctaatgtgcttgagatttttgcattttcccttccagatccactctctacccatgaggctgacatagttgactacatccactggcttccttggctttacctttgccg

SEQ ID NO: 82 - DNA, 576 bp, Homo sapiens
  SIMILAR (243)..(133): 411254mologous to Homo sapiens PRO2523,accession number AF130074,Smith-Waterman Score=84.
tttttttaattcacattgagtatgagtcatcccctgcatggaggcttctacagaggctctatgagatgccagcccgttctggccagcagagatgaagcggtggataaaagaggccaagttcttcccataccagggggcagagagtgcacccgagacctaaggaatgagcgagcaacagctgagcggggcagagagaggaggacagcagctctgggtggggcggggcggggcaggtggggagggacggctgtgttcggggagggaacggctgtgctcccggaagggccgtgccctgggccctggcgagtccagacgacagagctgtggcaggttctgcttggcttctgcctgaaagtgctcctttttctctccacccccttgcctctgaggaaggcacaacttcatggaaaggacacctaatgactttcaggatcagcctttcacgtcatttttacacagagcaaaggacttgctcagtgacctccctccattccctgcagggctgcgcgtgtggaccgcagtgagagaaagcggggctgtattcgctccacactgctcgggccgagtccagcctgc

SEQ ID NO: 83 - DNA, 733 bp, Homo sapiens
  SIMILAR (180)..(377): 281254mologous to Homo sapiens hXR1prim2 amino terminal sequence,accession number R33743,Smith-Waterman Score=67.
acaaaacgaaaagaagaaaattaaaccctttcttttgttttcaaagttccaaggaaacttcttttatgacaactgcttggaattgaacgtaacagttcctaggattgacttaggaagtaggaagacaagagagactttctttttcctggggactgcacagccatgtcaggtgaagctcagaaggagcaggtaaagaagagatgatggttttggaagaacagctggccccatctgcactcgccttggatgctgcagagcctgggacaaaggggacagcactctcggctgccttagatctatggaggccagctggcccttttcatagggctgggctaacaaccactgatgcacatatcaccagggcagaaaagtctcacaaactattttttaaaagatcctattacgtaccaagcagtatgctcaatgttgaggactcaaaaattaaggcaaaattcttatttcaaggatcttactgccttgtgaagggagaaaagcaaacaaatggacaactacagtataatatgaaaaaggaccgaaacggtgaagttcattcgactcagcaacctttgctaagagcttactacaaggacacccaggtgaccaggacccagtccctgctaagagcttactaccaggacacccaggtgaccaggacccagtccctgctaagagcttactacaaggacaccagacaaatgacatgcacagatgacctgtttggtcatctcttaag

SEQ ID NO: 84 - DNA, 575 bp, Homo sapiens
  SIMILAR (433)..(158): 651254mologous to Homo sapiens Human secreted protein, SEQ ID NO: 5656,accession number G01575,Smith-Waterman Score=245.
ttcacttatagccaatatttaataggtcccattttaactgatgtgtaaaaaatgtctttatgatctgttaccacccaaaagaatgcatcataactttcaagaatatgttctttgacttctaacctctgctcttctttagaattacctttgctgcggccagtacatgctccttgttaatgactctacatttactcgcacaagcgttcgtcctggactcttctgctaatcgatgaacaaacagtaaacagttcagatggacctctcccgtgccccattcccagcccgagaagggatggaatctcaccaataagtcaccacttttctccagacgaagttggaggcttctttcgcttgaagactcgctttagaaagccacgggggagccttccgctttaatctgtttcctctgggagactatggtcgacagcgccatcctctctgtcaagtaccagctgcctcagcttccgaggtgcttctctgtatcgcacacaagctccggggacactggggccagcggaaaacaatccggtccgtatgacgcttcttcaggcagaaaaacctcagtccgaacgttc

SEQ ID NO: 85 - DNA, 267 bp, Homo sapiens
  SIMILAR (112)..(207): 441254mologous to Trypanosoma cruzi P-glycoprotein,accession number Z49222,Smith-Waterman Score=68.
atggtggaaggggaagcaaacacgtccttcttcacgtggcagcagcaaggagaagtgccgagcaaagagggaaaagccccttataaaaccatcagctctcgtgagaactcattcactatcatgagaacagcagcgtcagggtcttgtgaactgttcttcctgaagaccttggattcgcccatccctgtcactctgtggtccctgcctccaccctttctcaggacgtcctcacctcctacctgggccactgaaatagcacccccatga

SEQ ID NO: 86 - DNA, 1095 bp, Homo sapiens
  SIMILAR (319)..(402): 531254mologous to Homo sapiens PRO0889,accession number AF119839,Smith-Waterman Score=78.
atgaaggactggagacctaggaggaaaaaatggtttcctgggccaggtccagggccccattgctgtgaggaacctagggacttggtgtcctacatcctagctgctccagccatggctaaaaggggccaagctctgaagagggaagaggaagatcagggtgccagcgtggttggcttctactgcacttgtggaggaggaggggtaggagatgaaaaagaagaagaagatgatcatcgattatgtactcactctgtatcaagcactgttctaagtacttttgcatgcatcactacttcgtccagtttttatgataaccctttgagaatctctcacaagacttcagtcaaggtgtttgccagggctgtattcatctgcagcctcaactggggaaggatttgcttctgcactcactgccacggctgccagcagtcctcagttcctcactacgtgggcctctccacaggctgcctcacagcatggcagctggcttctccgagtgaggagtttaagagtgaaaaagaccctgattctcttgaaggagacttacacaggctgagaattaaccttctctggcattctgccactcataagtacaggctgcacctgggcttcagttcagttggccttctggctgccagtgatgagggactttttaaaggcttccatggaggccctttgactctcacacttgggtttaaattggtggttaatagatttgatcctggcatctatacttagtgcatcaatggtgcttagcaataccctcccaattcaacaatctttcaagttacttttccacctgtactctcaaatactagatacatcacagaagttaatgcattcgcttctacttatatgctgtcctgggtcactacaagtaaaagtgttagcaatttcactgcaggagcacatctgagactatcttcagggaagagattctgatggaaccactggtgagtgagcaaactccagaatcccatcctcagactcaggtgtatataattactactgctatcaactgtcttagattgggctcttgcagctgaccctgagaattagattcctgtccaagtgattgcctgagggagtgctctc

SEQ ID NO: 87 - DNA, 391 bp, Homo sapiens
  misc_feature (1)...(391): n = a,t,c or g
ggcacgaggagtctcgctctgtttcccaggctggagtgcagtggcgctatcttggctcactgcaacgtccgcctcccaggttcaagcgattctcatgcctcagccctccgagtagctgggaccacaggtgtacgacatcatgactggctaatttttgtatatttagtagagacggggtttcatcatgttgaactcctgacctcaagtgatctgcccacctcagcctcccaaagtgctgggattacaggtgtgagccaccatgcctggccgtggtttgctcttaatgtttttaaggatggttgtgaatccccctggccccataataaattggaattttatactgcttactataatttttttaacactggaacaactttgagaccacctctgn

SEQ ID NO: 88 - DNA, 411 bp, Homo sapiens
  SIMILAR (1)..(411): 1001254mologous to Homo sapiens membrane cofactor protein, CD46, MCP,accession number S51940,Smith-Waterman Score=754.
ccagatccattttcacttattggagagagcacgatttattgtggtgacaattcagtgtggagtcgtgctgctccagagtgtaaagtggtcaaatgtcgatttccagtagtcgaaaatggaaaacagatatcaggatttggaaaaaaattttactacaaagcaacagttatgtttgaatgcgataagggtttttacctcgatggcagcgacacaattgtctgtgacagtaacagtacttgggatcccccagttccaaagtgtcttaaaggtcctaggcctacttacaagcctccagtctcaaattatccaggatatcctaaacctgaggaaggaatacttgacagtttggatgtttgggtcattgctgtgattgttattgccatagttgttggagttgcagtaatttgtgtt

SEQ ID NO: 89 - DNA, 479 bp, Homo sapiens
  SIMILAR (422)..(466): 641254mologous to Homo sapiens CD46,accession number D84105,Smith-Waterman Score=50.
  misc_feature (1)...(479): n = a,t,c or g
atcagtagcaatttggagcggtaagccccaatatgtgaaaaggttttgtgtacaccacctccaaaaataaaaaatggaaaacacacctttagtgaagtagaagtatttgagtatcttgatgcagtaacttatagttgtgatcctgcacctggaccagatccattttcacttattggagagagcacgatttattgtggtgacaattcagtgtggagtcgtgctgctccagagtgtaaagtggtcaaatgtcgatttccagtagtcgaaaatggaaaacagatatcaggatttggaaaaaaattttactacaaagcaacagttatgtttgaatgcgataagggtttttacctcgatggcagcgacacaattgtctgtgacagtaacagtacttggggtcccccagttccaaagtgttcttaaagggtatcctaaacctgagggagggattanttggacagtttgggtgtttgggtccttgc

SEQ ID NO: 90 - DNA, 1437 bp, Homo sapiens
  SIMILAR (418)..(795): 881254mologous to Homo sapiens Human CR1 protein LHR-C SCR fragment,accession number Y55754,Smith-Waterman Score=605.
atggggaaaaaacagaacagaaaaactggaaactctaaaaagcagagcacctctcctcctccaaaggaacgcagttcctcaccagcaatggaacaaagctggacagagaatgactttgacgagctgagagaagaaggcttcagacgatcaaattactctgagctacgggaggacattcaaaccaaaggcaaagaagttgaaaactttgaaaaaaatttagaagaatgtataactagagtaaccaatacagagaagtgcttaaaggagctgatggagctgaaaaccaaggctcgagaactacgtgaagaatgcagaagcctcaggagccgatgcgatctactggaagaaagggtatcagcaatggaagatgaaatgaatgaaatgaaatttcaattaaaaggcagctctgctagttactgtgttttggctggaatggaaagcctttggaatagcagtgttccagtgtgtgaacgtaaatcatgtgaaactcctccagttccagtgaatggcatggtgcatgtgatcacagacatccatgttggatccagaatcaactattcttgtactacagggcaccgactcattggtcactcatctgctgaatgtatcctctcaggcaatactgcccattggagcacgaagccgccaatttgtcaacgaattccttgtgggctacccccaaccatcgccaatggagatttcattagcaccaacagagagaattttcactatggatcagtggtgacctaccgctgcaatcttggaagcagagggagaaaggtgtttgagcttgtggtgtgtcagccgcctccagaaatcctgcatggtgagcataccccaagccatcaggacaacttttcacctgggcaggaagtgttctacagctgtgagcctggctatgacctcagaggggctgcgtctctgcactgcacaccccagggagactggagccctgaagccccgagatgtgcagtgaaatcctgtgatgacttcttgggtcaactccctcatggccgtgtgctatttccacttaatctccagcttggggcaaaggtgtcctttgtctgtgatgaaggccgcgacacagccgtcccccattatgcctttccggccgttgcccttcgacttttccccgtcacatctttgattctgtcctacctcattttttcaggggacctgcagaatggaatcacaggaagtcctcctacagactcatcagggatattaccttggtatgagccagaggacaagctgaaaaccagagtggtttgctctcctaaaagccaaggagtgagaactcttcaggcagaagagagtgagggcagagtgatcagtagctctcacgttatcaagagggtaattcaaactattaaggaagagactgttaggaggagtttaacaaggaggaggccctttaatgactcagaaagtagttga

SEQ ID NO: 91 - DNA, 434 bp, Homo sapiens
  SIMILAR (144)..(431): 881254mologous to Homo sapiens (human) CR1 protein,accession number P92219,Smith-Waterman Score=418.
ggaatctcgaaggagttagaaatgaaaaaagtagatcactatggagattatgtgactttgaagtgtgaagatgggtatactctggaaggcagtccctggagccagtgccaggcggatgacagatgggaccctcctctggccaaatgtacctctcgtgcacatgatgctctcatagttgaaaaggcaataatgcacatgaaaaccctaaagaagtggctatccatttacattctcaaggaggcagcagcgttcatccccgaactctgcaaacaaatgaagaaaatagcagggtccttccttgacaaagtactatacagctgaagaacatctcgaatacaattttggtgggaaaggagccaattgatttcaacagaatcagatctgagcttcataaaggctttgaagtgacttcacagagacgccgacatgtgccc

SEQ ID NO: 92 - DNA, 843 bp, Homo sapiens
  SIMILAR (385)..(609): 1001254mologous to Homo sapiens CR1 C-term,accession number X05309,Smith-Waterman Score=427.
atggggcagatcccggtgaaacccgaccttcaagctgaagacagtttaaagcctagctacaagttccaggcattatcaaatgctaagagctattaccatgctgttacaccccctctgggcttcggggtcgtggggacccctgtttgggcaccaacacattcccttcagtgtgacatgcctggtccagccacaagccttgcacggagcccgctcctgtgccagtgcttggcgcggccagctggaacccccacttgctcactcacacaccccctcccagaggctgagcatgtagtcgcggcagccatgggctctgcatcagagcacaagcctggcacggcctgggtgggccaagtagatgaggtgtctcctgcattgatcctggatatcttttgtccaaatcctccagctatccttaatgggagacacacaggaactccctctggagatattccctatggaaaagaaatatcttacacatgtgacccccacccagacagagggatgaccttcaacctcattggggagagcaccatccgctgcacaagtgaccctcatgggaatggggtttggagcagccctgcccctcgctgtgaactttctgttcgtgctgttatcccccagactcatactgtatcaccaagaataatggatacacataagcaacgaataataccacttgacagtggtagaagcaggaggcagacaaatcacaggcagatggggcggatcccggtgaaacccgaccttcaagctgaagacagtttaaagcctagctacaagttccaggggccctctgaacgatccaaaaagccagccctcaggaaggaaaattttgaaacttga

SEQ ID NO: 93 - DNA, 2798 bp, Homo sapiens
  SIMILAR (1)..(171): 631254mologous to Homo sapiens Gag-Pro-Pol-Env protein,accession number AF164611,Smith-Waterman Score=168.
ggttttcagggacaacaacccccactgtcccaagtgcctcagggaatgagccagttaccacagtacaacaattgtcccccgccacaagcggcagtgcagctgtggatttatgtactataaaggcagtctctctgcttccaggggagcccccacaaaaaatctccacaggggtatatggcccactgcctgaggggactgtaggactaatcttaggtagatcaagtctaagtctgaagggagttcaaattcgtactgatgtggttgattcagactataatggcgaaattcaattggttattagctcttcaattccttggagtgccagtccaggagacaggattgcgcaattattactcctgccttatattaaggttggaaatagtgagataaaaagaacaggagggtttggaagcactgatccaacaggaaaggctgcatattgggcaagtcgggtctcagagaacagacctgcgtgtaaggccattattcaaggaaaacagtttgaaggaaatcagactactacttctgcagaacaacattttactggtaaaaagaacagcccacatgaaggaaaactgatttggtggaaagataataaaaataagacatgggaaatagggaaggtggtgacgtgggggagaggttttgcttgtgtttcaccaggagaaaatcagcttcctgtttggatacccactagacatttgaagatctacgatgaacccatcggagatgcaaagaaaagcgccaccgcggagatggaaacaccagtcacatggatggataatcctattgaagtatatgttaatgatagtgtatgggtacctggccccacagatgatcattgccctgccaaacctgaggaagaagggatgatgataaatatttccattgggtatcattatcctcctatctgcctagggagagcaccaggatgtttaatgcctgcagtccaaaattggttggtagaagtacctactgtcagtcccatcagtagattcacttatcacatggtaagcgggatgtcactcaggccacgggtaaattatttacaagacttttcttatcaaagatcattaaaatttagacctaaagggaaaccttgccccaaggaaattcccaaaggatcaaaaaatacagaagttttagtttgggaagaatgtgtggccaatagtgcggtgatattacaaaacagtgaattcggaactattatagattgggcacctcgaggtcaattctaccacaattgcacaggacaaactcagtcgtgtcccagtgcacaatgtattctgctggtgagggcaagagaagccgtgtggatttctatgtccatggaccaaccgtgggaggccttgccatccgtccatattttgactgaagtattaaaagccattttaaatagatccaaaagattcatttttactttaattacagtgattatgggattaattgcagtcacagctacggctgctatggcaggagttgcattgcactcttctgttcagtcagtaaactttgttaatgattggcaaaaaaattctacaagattgtggaattcacaatctggtattgatcaaaaattggcaaaccaaattaatgatcttagacaaactgtcatttggatgggagacaggcttatgaacttagaccatcgtttccagttacagtgtgactggaatatctcagatttttgtattacaccccaagtttataatgagtctgagcatcactgggacatggtcagatgccatctacagggaacagaagataatctcactttagacatttccaaattaaaggaacaaatttttgaaacatcaaaagcccatttaaatttggtgccaggaactgaggcaatcgcaggagttgctgatggcctcacaaatcttaaccctgtcacttgggttaagaccatcggaaatcaatgcaatgtcccggaatggcttccatttgccaggcctaccaacctaactgatgactttgagtttcccattgggacatatctgaactatgaatgccgccctggttattccggaagaccgttttctatcatctgcctaaaaaactcagtctggacaagtgctaaggacaagtgcaaaacgtaaatcaatgtcgtaatccttccagatcctgtgaatggcatggcacatgtgatcaaagacatccagttcagatcccaaattaaatattcttgtcctaaaggacgatcaatgagacagaaagttaacaaggatatccaggaattgaactcagctctgcaccaagcagacctaatagacatctacagaactctccaccccaaatcaacagaatatacattcttttcagcaccacaccacacttattccaaaattgaccacatagttggaagtaaagcgctccacagcaaatgtaaaagaaaagaaattataacaaactgtctctcagaccacagtgcaatcaaactagaactcaggattaagaaactcactcgaaacagctcaactacatggaaactgaacaacccgctcctgaatgactactgggtacataacgaaatgaaagcagaaataaagatgttctttgaaaccaacaagaacaaaaacacaacataccagaatctctgggacacatttaaagcagtgtgtaaagggaaatttatagcactaaatgcccacaaaagaaagcaggaaagatctaaaattgacaccctaacatcacaattaaaagaactagagaagcaagagcaaacacattcaaaagctagcagaaggcaagaaataactaagatcagagcagaactgaaggaaatagagacataa

SEQ ID NO: 94 - DNA, 9038 bp, Homo sapiens
  SIMILAR (1651)..(8355): 921254mologous to Homo sapiens (human) CR1 protein,accession number P92219,Smith-Waterman Score=11232.
  misc_feature (1)...(9038): n = a,t,c or g
caaaccaggttgtggaatctattcagcctctctgctctgctggagtggttgatttagtctggtaagtggcatattcagctcccaccatctgctttcccctttcttcttcctcctttgaagatatctgtaggggacaacacaaattactgcaactcccaacaactatggcaaatanacaatccacagccaatgaccccaaacatcccaaactgtccaagtattcccttccctcaggtttaaggatacccctggataatttgagactggaggcttgtaagtaggcctaggacctgaggcactggacgctggagattttgtagtggaagaagtcgacactttaagacactttggaactgggggatcccaagtactgttactgtcacagacaattgtgtcgctgccatcgaggtaaaaacccttatcgcattcaaacataactgttgctttgtagtaaaatttttttccaaatcctgatatctgttttccattttcgactactggaaatcgacatttgaccactttacactctggagcagcacgactccacactgaattgtcaccacaataaatcgtgctctctccaataagtgaaaatggatctggtccaggtgcaggatcacaactattagttactgcatcaagatactcaaatacttctacttcactaaaggtgtgtttttccccattttttatttttggaggtggtgtacacaaaaccttttcacatattggggggcttaccgctccaaattgctactgatcctttaaggttcacaatataggatttcttcaccaattaaggtattaaccctcattacaaataaagtgcatctgataaccaaactcgtaagtcccatttgcagggactgcttggccatttaaaaggatcccgtatatatggacatgtttctctataacaggcgtcatctgagacaggtagccatgtatgattccgatcacaaatagtatgggtggcaagaggaggtatatagaagtgatccttttttacacttataatctactcgttcaccaatctcatagtagggttttggtttaccaatgagctccatagcttcaaatgttggtggctcctcacaggcatcggcagcgcgagcagcaccacgaccgccagcagggatcctccgcagcagaaggggagaccgggcgccggctgcccaacaggctcccggcttctcggagaagagacccccatcctcccgaagcacatctacaaaccagatttgatctcgaagaaaactgaaataagaggaaaagcgcagtgcaaagaggagtgaccaatccttgtgctccgcgcccagagcatggggagggctgcggggttccgggacaaaatgcttttgaccagcttccccttcatgggcaaggccatgtttactccccatttgcattgtttctaacgagtttcgctggcagagcccaccttgctgacccaggtgcagcagcagagcttgacaatgcttgggcttccgatggatcccgcgtgtgaggccctgcgcttccttccagacaaaggcggtggatgatggcaactcacctccaaacaccctgcttgacttttcctcggactcagaagggacttccctgctcggctggctttcggtttctctgctcacctccggataaatcacggggtctcccgcgccgctcatggcgcctcccgtccgtctcgagcgtcccttttccttcccggcgctttcctggggttgcttctggcggccctgggtgttgctgctgtcctccttctccgatcaatggcaatgtcccggaatgggcttccattttgccaggggcttaccaaacctaactgatgaatttgagtttcccattggggacatatcctgaactatgaatgcccgcccctggttattcccggaagaccgttttcctatcatctgccctaaaaaactcagtctgggacaagtgctaaggacaagtgcaaacgttaaatcatgttcgtaatccttccagatcctgtgaatgggcatggcacatgtggattcaaagacatccagtttcggattcccaaatttaaatattcttgttcctaaaggataccgactcattgggtttcctcgtctgccacatggcatcatctcaggcaacactgtcatttgggataataaaacacctgtttgtgacagaattccttgtgggctaccccccaccatcaccaatggagatttcattagcaccaacagagagaattttcactatggatcagtggtgacctaccgctgcaatcctggaagcggagggagaaaggtgtttgagcttgtgggtgagccctccatatactgcaccagcaatgacgatcaagtgggcatctggagcggccccgcccctcagtgcattatacctaacaaatgcacgcctccaaatgtggaaaatggaatattggtatctgacaacagaagcttattttccttaaatgaagttgtggagtttaggtgtcagcctggctttgtcatgaaaggaccccgccgtgtgaagtgccaggccctgaacaaatgggagccggagctaccaagctgctccagggtatgtcagccacctccagatgtcctgcatgctgagcgtacccaaagggacaaggacaacttttcacctgggcaggaagtgttctacagctgtgagcccggctacgacctcagaggggctgcgtctatgcgctgcacaccccagggagactggagccctgcagcccccacatgtgaagtgaaatcctgtgatgacttcatgggccaacttcttaatggccgtgtgctatttccagtaaatctccagcttggagcaaaagtggattttgtttgtgatgaaggatttcaattaaaaggcagctctgctagttactgtgtcttggctggaatggaaagcctttggaatagcagtgttccagtgtgtgaacaaatcttttgtccaagtcctccagttattcctaatgggagacacacaggaaaacctctggaagtctttccctttggaaaagcagtaaattacacatgcgacccccacccagacagagggacgagcttcgacctcattggagagagcaccatccgctgcacaagtgaccctcaagggaatggggtttggagcagccctgcccctcgctgtggaattctgggtcactgtcaagccccagatcattttctgtttgccaagttgaaaacccaaaccaatgcatctgactttcccattgggacatctttaaagtacgaatgccgtcctgagtactacgggaggccattctctatcacatgtctagataacctggtctggtcaagtcccaaagatgtctgtaaacgtaaatcatgtaaaactcctccagatccagtgaatggcatggtgcatgtgatcacagacatccaggttggatccagaatcaactattcttgtactacagggcaccgactcattggtcactcatctgctgaatgtatcctctcgggcaatgctgcccattggagcacgaagccgccaatttgtcaacgaattccttgtgggctaccccccaccatcgccaatggagatttcattagcaccaacagagagaattttcactatggatcagtggtgacctaccgctgcaatcctggaagcggagggagaaaggtgtttgagcttgtgggtgagccctccatatactgcaccagcaatgacgatcaagtgggcatctggagcggcccggcccctcagtgcattatacctaacaaatgcacgcctccaaatgtggaaaatggaatattggtatctgacaacagaagcttattttccttaaatgaagttgtggagtttaggtgtcagcctggctttgtcatgaaaggaccccgccgtgtgaagtgccaggccctgaacaaatgggagccggagctaccaagctgctccagggtatgtcagccacctccagatgtcctgcatgctgagcgtacccaaagggacaaggacaacttttcacccgggcaggaagtgttctacagctgtgagcccggctatgacctcagaggggctgcgtctatgcgctgcacaccccagggagactggagccctgcagcccccacatgtgaagtgaaatcctgtgatgacttcatgggccaacttcttaatggccgtgtgctatttccagtaaatctccagcttggagcaaaagtggattttgtttgtgatgaaggatttcaattaaaaggcagctctgctagttattgtgtcttggctggaatggaaagcctttggaatagcagtgttccagtgtgtgaacaaatcttttgtccaagtcctccagttattcctaatgggagacacacaggaaaacctctggaagtctttccctttggaaaagcagtaaattacacatgcgacccccacccagacagagggacgagcttcgacctcattggagagagcaccatccgctgcacaagtgaccctcaagggaatggggtttggagcagccctgcccctcgctgtggaattctgggtcactgtcaagccccagatcattttctgtttgccaagttgaaaacccaaaccaatgcatctgactttcccattgggacatctttaaagtacgaatgccgtcctgagtactacgggaggccattctctatcacatgtctagataacctggtctggtcaagtcccaaagatgtctgtaaacgtaaatcatgtaaaactcctccagatccagtgaatggcatggtgcatgtgatcacagacatccaggttggatccagaatcaactattcttgtactacagggcaccgactcattggtcactcatctgctgaatgtatcctctcaggcaatactgcccattggagcacgaagccgccaatttgtcaacgaattccttgtgggctacccccaaccatcgccaatggagatttcattagcaccaacagagagaattttcactatggatcagtggtgacctaccgctgcaatcttggaagcagagggagaaaggtgtttgagcttgtgggtgagccctccatatactgcaccagcaatgacgatcaagtgggcatctggagcggccccgcccctcagtgcattatacctaacaaatgcacgcctccaaatgtggaaaatggaatattggtatctgacaacagaagcttattttccttaaatgaagttgtggagtttaggtgtcagcctggctttgtcatgaaaggaccccgccgtgtgaagtgccaggccctgaacaaatgggagccagagttaccaagctgctccagggtgtgtcagccgcctccagaaatcctgcatggtgagcataccccaagccatcaggacaacttttcacctgggcaggaagtgttctacagctgtgagcctggctatgacctcagaggggctgcgtctctgcactgcacaccccagggagactggagccctgaagccccgagatgtgcagtgaaatcctgtgatgacttcttgggtcaactccctcatggccgtgtgctatttccacttaatctccagcttggggcaaaggtgtcctttgtctgtgatgaagggtttcgcttaaagggcagttccgttagtcattgtgtcttggttggaatgagaagcctttggaataacagtgttcctgtgtgtgaacatatcttttgtccaaatcctccagctatccttaatgggagacacacaggaactccctctggagatattccctatggaaaagaaatatcttacacatgtgacccccacccagacagagggatgaccttcaacctcattggggagagcaccatccgctgcacaagtgaccctcatgggaatggggtttggagcagccctgcccctcgctgtgaactttctgttcgtgctggtcactgtaaaaccccagagcagtttccatttgccagtcctacgatcccaattaatgactttgagtttccagtcgggacatctttgaattatgaatgccgtcctgggtattttgggaaaatgttctctatctcctgcctagaaaacttggtctggtcaagtgttgaagacaactgtagacgaaaatcatgtggacctccaccagaacccttcaatggaatggtgcatataaacacagatacacagtttggatcaacagttaattattcttgtaatgaagggtttcgactcattggttccccatctactacttgtctcgtctcaggcaataatgtcacatgggataagaaggcacctatttgtgagatcatatcttgtgagccacctccaaccatatccaatggagacttctacagcaacaatagaacatcttttcacaatggaacggtggtaacttaccagtgccacactggaccagatggagaacagctgtttgagcttgtgggagaacggtcaatatattgcaccagcaaagatgatcaagttggtgtttggagcagccctccccctcggtgtatttctactaataaatgcacagctccagaagttgaaaatgcaattagagtaccaggaaacaggagtttcttttccctcactgagatcatcagatttagatgtcagcccgggtttgtcatggtagggtcccacactgtgcagtgccagaccaatggcagatgggggcccaagctgccacactgctccagggtgtgtcagccgcctccagaaatcctgcatggtgagcataccctaagccatcaggacaacttttcacctgggcaggaagtgttctacagctgtgagcccagctatgacctcagaggggctgcgtctctgcactgcacgccccagggagactggagccctgaagcccctagatgtacagtgaaatcctgtgatgacttcctgggccaactccctcatggccgtgtgctacttccacttaatctccagcttggggcaaaggtgtcctttgtttgcgatgaagggttccgattaaaaggcaggtctgctagtcattgtgtcttggctggaatgaaagccctttggaatagcagtgttccagtgtgtgaacaaatcttttgtccaaatcctccagctatccttaatgggagacacacaggaactccctttggagatattccctatggaaaagaaatatcttacgcatgcgacacccacccagacagagggatgaccttcaacctcattggggagagctccatccgctgcacaagtgaccctcaagggaatggggtttggagcagccctgcccctcgctgtgaactttctgttcctgctgcctgcccacatccacccaagatccaaaacgggcattacattggaggacacgtatctctatatcttcctgggatgacaatcagctacacttgtgaccccggctacctgttagtgggaaagggcttcattttctgtacagaccagggaatctggagccaattggatcattattgcaaagaagtaaattgtagcttcccactgtttatgaatggaatctcgaaggagttagaaatgaaaaaagtatatcactatggagattatgtgactttgaagtgtgaagatgggtatactctggaaggcagtccctggagccagtgccaggcggatgacagatgggaccctcctctggccaaatgtacctctcgtgcacatgatgctctcatagttggcactttatctggtacgatcttctttattttactcatcattttcctctcttggataattctaaagcacagaaaaggcaataatgcacatgaaaaccctaaagaagtggctatccatttacattctcaaggaggcagcagcgttcatccccgaactctgcaaacaaatgaagaaaatagcagggtccttccttgacaaagtactatacagctgaagaacatctcgaatacaattttggtgggaaaggagccaattgatttcaacagaatcagatctgagcttcataaagtctttgaagtgacttcacagagacgcagacatgtgcacttgaagatgctgccccttccctggtacctagcaaagctcctgcctctttgtgtgcgtcactgtgaaacccccacccttctgcctcgtgctaaacgcacacagtatctagtcaggggaaaagactgcatttaggagatagaaaatagtttggattacttaaaggaataaggtgttgcctgggaatttctggtttgtaaggtggtcactgttcttttttaaaatatttgtaatatggaatgggctcagtaagaagagcttgggaaaatgcagaaagttatggaaaaataagtcacttataattatggctacctactggataaccactccctaatattttgattcatttctggcctattcttctttcacatatgtgtttttttacataccgtacttttcccccttacgtttgtttccttttattttatagagcagaaccctagtcttttaaacagtttagagtgaaatatatgctatatcagtttttactttctctagggagaaaaattaatttactagaaaggcatgaaatgatcatgggaagagtggttaagactactgaagagaaatatttggaaaataagatttcgatatcttctttttttttgagatggagtctggctctgtctcccaggctggagtgcagtggcgtaatctcggctcactgcaacgtccgcctcccgggttcaagcaattctcctgcctcagcatccagggttagctgggattacaggcgtgtgccaccacgcccggctatttattttgttttattttattttcatttttagtagagacaggggtttcaccgtgttagccaggatggtctcgatctcctgacctcaagtgacccacccgcctctgcctcccaaagtgctgggattacaggcatgagccaccacaccctgcctagagtagtctttactctaggaggtggttctttcccctaaggtgtggtttttcaattgaatgcctatgatgttaaaaagttctctccactctggctaggtcagaacctcatatttctcagcactgtgcaacctctagtatctccattctttnntttttttttttttttttttttgagacagagtcttgctctgtcacccaggctggag

SEQ ID NO: 95 - DNA, 1014 bp, Homo sapiens
  SIMILAR (553)..(945): 721254mologous to Mus musculus Pro-Pol-dUTPase polyprotein,accession number Y12713,Smith-Waterman Score=498.
atggagaacactgatagtccttggcatgagctgtttagggagttatccaaaataaatgcatttgacacacttgattcattgctcatgagaggcaaggagtttagtgactctacacataatacctttgaccatatgtggagaaccaaggaacataataaagctggttggttgcccctaaattcagtggaaaaagtgatgaaagaaaattatgaactcaaggattctgtctcccagcttcagaagcagatattgaacctcaaatctgctaggattgccctgactgagaggcttatctcctgtagaaagagaactgaaattgtggacaaacagacacaagctcttatcatgctagtggctgacctgcaacagaagatgcatgcacagcctcgccagggagacctctggccttttaccagggtaactgtgcattgggaaaagggaaatgatcagacactttggggactactggacactggctctgagctgacgttgattccaggggacccaaaatgtcactgtggtcctccagttaaagtaggagcttatagaggtcagaagacagatggatcttggagaatgacagtggattattgtaagcttaaccaagtggtgactccaattgcagctgttgtaccagatgtgatttcattgcttgagcaaattaacacatttcctggtacctggtatgcagccactggcttggcaagtgcctttttctccatctctatccataaggcccataagaagcaatttgacttcaactggcaaggccagcaatatacctttacagtcctacctcaggggcatatcaactttccagctttgcatcataatcttatttggaaagatcttgattgctttttgctttcacaagatatcacactggtccattacattgatgacattatgctgattggatctggttcaagtgatcctcccacctcatcttccagagtagctgaaactacaggtaccaaggagatggtcaaactgaagagcatccagaatttttga

SEQ ID NO: 96 - DNA, 1197 bp, Homo sapiens
  SIMILAR (895)..(1158): 781254mologous to Homo sapiens PRO2221,accession number AF116695,Smith-Waterman Score=344.
atggtggcagcaagatgcttggaccgaaagccactctgtcttacatcattagcaaatcctggcagcttggccctgaaaccgtatctagaatctgcccatttttcccaacctctgggtcaagccactggtagctcacacctgggtgatcacagtgtcctacagtcacctgctcccaccttccccactgtggtccgttctcagcccaacaagagtgatcctgttaaggaagctgttcagaggactgtgagggtctggcacacacgggctccagcacgcgggccaagcgccgtggcccccggggaccccacacctgctgctccctctgcaggagagctcctccctgaccccacgtggctcctgaccccggttcctccgggttatgaggactatttccgaaggaaagaaagtgacttgcccaaggtcacctggcgagttccaacaagagcagaaccaagacccaagtgtcctgcccacctctcccgctctgagcagagtcactcctctcagaagtttctatctaactgtgtagttggggcttcgcttgaagaaattacagaggaagaggaagaggaagatgaaaataagtcagctatgctggaagcttcctcaaccaaagtgaaggaaggcacattccagattgtgggcacgctgtccaagcctgacagcccgcggcctgactttgcggtggagacgtactctcattctgaattcagaattccatcggatgaatttaacaaagagattgaaataatttttaaaaatcaagcagaaactccggagctgaaaaatgcaattgccatactgaagaatgaatcagagtcctttaataacaaaattgatcaaagaagaaagaatgagcttgaaaaccccctattaaaaaatacagtcagaggaaaaaaacagagcacctcttcttctccaaaggatcgcagctccttgccagcaacagaacaaagctggacggagaatgactttgacgagttgacagaagtaggcttcagaaggtcggtaataacaaacttctccgagctaaaggaggatgttcgaacacatcgcaaggaagctaaaaaccttgaaaaaagattagatgaatggctaactagaataaacagtgtagagaagaccttaaatgacctgaaggagctgaaaaccatggcacgagaacttcatgatgcatgcacaagcttcagtagctga

SEQ ID NO: 97 - DNA, 606 bp, Homo sapiens
  SIMILAR (356)..(18): 321254mologous to Pichia angusta unidentified reading frame,accession number U00889,Smith-Waterman Score=87.
agcgcggctcccaccatggctgaagaagaggaaactgctgctctcacggagaaggttatccggacccagagggtgtttataaacctgttggattcctacagcagcggaaacatcgggaagtttctatctaactgtgtagttggggcttcgcttgaagaaattacagaggaagaggaagaggaagattataataagtcagctatgctggaagcttcctcaaccaaagtgaaggaaggcacattccagattgtgggcacgctgtccaagcctgacagcccgctgactgactttgcggtggagacgtactctgccatctctcaagaagaccttctcatgcgcctgctggagtgtgatgttattatttataacatcactgagagctcacagcaaatggaggaagccatctgggcagtctctggtcagtgaggtgtactcttttatctccagggatgctattgtagtgctgcctacttcacctaatagtcatctaggaacactagacaaagtagggctatagaaaaactggtctgagacttacctaaagtatgaaataaatgataataatatggatagatacttctgaagaatagaatatttattaattat

SEQ ID NO: 98 - DNA, 423 bp, Homo sapiens
  SIMILAR (79)..(408): 261254mologous to Rattus norvegicus KPL2,accession number AF102129,Smith-Waterman Score=88.
atgtgtcaaacccaaaatgtgctgctttcagacctagcttttcagggccgttaccccctgaaccggttcagtccacctgtgtcgaagctacttggcacaaatgtgtcaggggctcaagctgaaaaacgcggaaaatcagggatccctggagaaaaggggtcccagacttccgtaaatttcctgtcggttcaggccataaggtgcccaagccggtaccaagcactgaaaggtgaactgccacaagccagacgccaggaacagaagaaccgaaagaaactgcaagagtttgagccaaaaggatggactgttggagtagctgagggtgaagctgccggaactcctcaaagtggaacagcaaagccagcaccagagatggacaagaaaaacaaactatcaacgaaaattcgcagaaatcaaagttag

SEQ ID NO: 99 - DNA, 651 bp, Homo sapiens
  SIMILAR (609)..(322): 291254mologous to Vibrio cholerae conserved hypothetical protein,accession number AE004352,Smith-Waterman Score=80.
atgggtgttgagaagatcatagcccaaaagattgacagaggccgcagggcatataagaaacatatgggacctactgagcacgtcacacttagagcctgctgtaaggaatctgaaccccatgaaatgataaggctaaccctgcttattcctgtgaaccaaccagtgatctctgactgctgctcagaagaaacaagagggatagacctagcttttcagggccgttaccccctgaaccggttcagtccacctgtgtcgaagctacttggcacaaatgtgtcaggggctcaagctgaaaaacgcggaaaatcagggatccctggagaaaaggggtcccagacttccgtaaatttcctgtcggttcaggccataaggtgcccaagccggtaccaagcactgaaaggtgaactgccacaagccagaaggaaggaggtggtatccatgttccctgaaaaacaggctctgctgacaaatctcagacgccaggaacagaagaaccgaaagaaactgcaagagtttgagccaaaaggatggactgttggagtagctgagggtgaagctgccggaactcctcaaagtggaacagcaaagccagcaccagagatggacaagaaaaacaaactatcaacgaaaattcgcagaaatcaaagttag

SEQ ID NO: 100 - DNA, 828 bp, Homo sapiens
  SIMILAR (535)..(702): 351254mologous to Drosophila melanogaster, Peptide, 72 aa preprocorazonin,accession number S74038,Smith-Waterman Score=66.
ccacctctacaaaaaaattagccaggcatggtggtggagcctgtagccccagctactctggtagcttctctgaggctaacctgtcttctaggcagcaaatctctccccatgcctcaggtctcttctctgcggggagatttttctccccaggacatcctctcttccaggtacaagtcaactaactttatgaagtgcctacggagtgtctcctctcctcccctctctgccccagcactcttcgaaaaggagaaggagcaggccttgctggggcagccactcccacaaccagctgatagcattatcacaccagggcaggccagagagctgctggccatggccctcctgattacaggagtaaagtgcatccaagaagcaccttctctccctctcagttcttttttctattctttacagtcccatggtgacctcatcctctcccttaccttcgactatcacttccacgtggaagccttccaagtctttatctccacttctgacctctttctcaagctgcagatccacactgccagctgcctgctaaccagttccattgagggtgaggaccacccttattcctcagggtggtcctcaatagccagagctgctcagcctgctctgcagaacctgaaggtctcatcatcgcataacactcttctagtgtctcttgtagagctgaagagctggagaagccttagaagtctctgcttcaatgttcggaagtttatttttaaaggaccatccgagtggccacacagaataacaaatggccattcacagctgaagaacagagctgagtttgcaccatatatcaaagatgccaaagcttcc

SEQ ID NO: 101 - DNA, 943 bp, Homo sapiens
  SIMILAR (716)..(525): 321254mologous to Homo sapiens PRO0806,accession number AF113013,Smith-Waterman Score=68.
ctttacccctttgctttttggcaataacccttgtgcagagccaaccccattctcctgacctaaccagttctcacctggccatgcggcctttccgggtgtcaggcaggtctctccggttaggtaagggaggcctcatccttcttacctgactgctctgagtgcagatctatgctgcttcccatcttctccaggagcctgatctattaccttgggcttggaacgcacctaacaaaggctaccatgaggaggcccctcggtacctgttcatctggacacatcgtgcagacccccgcaccccgtgtggctcccggttaatcttcagggtgcaatcaatttcttcctcagaggccagacttcattgttctaagcctttctcagatccacatcttggggctgctggggtccctgcatctgtgtcctggtggtcagtttgaagcaccagcagacagcagcgctaaaggcaccttacctggatgtgggggcctgctgggtgccagccccctgctaggctctgggaataggacaatggccagaacagataagatccctgtctgctgggagccaaagagagaaaccagcacagctgggccaggtgcatttagaaacctggctgaaaactgcaggtctgatgaggagcacaaaggtcgggtccctagagaacaggagcctttgaaggaagagggtggagctgattgcagactgccgaatcttgaaggggtccacagaggggctgcagggggcagcaagtcagccaggctttcttctctcaagtcagagaagaaaggccagggctactggatcctggaatgtgtgaggtccttggcccagtggatgtctggtggccttggtgtatcttattggcacggccacgttcacaggacccgtggggggccctgctgggaccacacctgcattgatgttcgcctggatgcggccagtctcc

SEQ ID NO: 102 - DNA, 376 bp, Homo sapiens
agcctaattaggatatgtcacacacaaaaattattggagagagcagttgtaagttgagactaaaatgaagccccttctcttgagtgtttctgccaaaataagaaatacaaacacatcccgattacacagtaacaaggcaagcacggctgaaggaagaaagttatcagtggagacccgctgcatagcatggtcacaaccatggcaggtaaggtggagtgtagacagccttgtcagccagccttctcagctctctctccagcctctcctgacttgacttggtataaagatcttagtgagctgaagccactaatagaagcccaaatcccagttaacttttacgatgctgtccctgctgtagctctctctcatttttctc

SEQ ID NO: 103 - DNA, 546 bp, Homo sapiens
  SIMILAR (181)..(324): 351254mologous to Homo sapiens Amino acid sequence of a human secreted protein,accession number Y19450,Smith-Waterman Score=62.
attcattaagcatctttaaatcagaacacacgcaatattcaagctattctgtaaactccccgaagcagaaatattgtcttatttactactaaatccccagtatctagtataatgagatctatgatggatactaaagagatattataataagtaattacccatttttacagaaaattatgttttttatcatcccgcatccatgcagtcatggctacatcctcttgcctctaccttatgccatgcctactggccagaggcctagcgctaccctgatgtcctaaagagtttctgctgctgctgccactaccaacaccaccacactgctatatgatgaggagacctgtacactgtgccactgacaaggaggggatattagcacctaagcatttccaggcagcagctggggaagccagaacctccacagacagatctggtgcacaggcacaaaggtcagttactccttgtcagtggcacagtgtacaggactcctcaacatatagcagtgtggtggtggtggtagtggcagcagcagcagaaactctttag

SEQ ID NO: 104 - DNA, 3900 bp, Homo sapiens
  SIMILAR (370)..(1314): 551254mologous to Rattus norvegicus tumor suppressor pHyde,accession number AF335281,Smith-Waterman Score=929.
ggagaaaatttacagaaacccagagccaaaggtgctctcaggggatcccctgaaacattcaaagccattgcggccccagaagcttgggtaggcggggaagcagctggagtgcgaccgccgcggcagccaccctgcaaccgccagtcggaggtgcagtccgtaggccctggcccccgggtgggcccttggggagtcggcgccgctcccggggagctgcaaggctcgcccctgcccggcgtggagggcgcggggggcgcggaggatattcttggtgatcttggaagtgtccgtatcatggaatcaatctctatgatgggaagccctaagagccttagtgaaacttttttacctaatggcataaatggtatcaaagatgcaaggaaggtcactgtaggtgtgattggaagtggagattttgccaaatccttgaccattcgacttattagatgcggctatcatgtggtcataggaagtagaaatcctaagtttgcttctgaattttttcctcatgtggtagatgtcactcatcatgaagatgctctcacaaaaacaaatataatatttgttgctatacacagagaacattatacctccctgtgggacctgagacatctgcttgtgggtaaaatcctgattgatgtgagcaataacatgaggataaaccagtacccagaatccaatgctgaatatttggcttcattattcccagattctttgattgtcaaaggatttaatgttgtctcagcttgggcacttcagttaggacctaaggatgccagccggcaggtttatatatgcagcaacaatattcaagcgcgacaacaggttattgaacttgcccgccagttgaatttcattcccattgacttgggatccttatcatcagccagagagattgaaaatttacccctacgactctttactctctggagagggccagtggtggtagctataagcttggccacattttttttcctttattcctttgtcagagatgtgattcatccatatgctagaaaccaacagagtgacttttacaaaattcctatagagattgtgaataaaaccttacctatagttgccattactttgctctccctagtatacctcgcaggtcttctggcagctgcttatcaactttattacggcaccaagtataggagatttccaccttggttggaaacctggttacagtgtagaaaacagcttggattactaagttttttcttcgctatggtccatgttgcctacagcctctgcttaccgatgagaaggtcagagagatatttgtttctcaacatggcttatcagcagtctacacttggatatgtcgctctgctcataagtactttccatgttttaatttatggatggaaacgagcttttgaggaagagtactacagattttatacaccaccaaactttgttcttgctcttgttttgccctcaattgtaattctggatctgtctgtggaggttctggcttccccagctgctgcctggaaatgcttaggtgctaatatcctgagaggaggattgtcagagatagtactccccatagagtggcagcaggacaggaagatccccccactctccaccccgccgccaccggccatgtggacagaggaagccggggcgaccgccgaggcccaggaatccggcatcaggaacaagtctagcagttccagtcaaatcccggtggttggggtggtgacggaggacgatgaggcgcaggattccattgatcccccagagagccctgatcgtgccttaaaagccgcgaattcctggaggaaccctgtcctgcctcacactaatggtgtggggccactgtgggaattcctgttgaggcttctcaaatctcaggctgcgtcaggaaccctgtctcttgcgttcacatcctggagccttggagagttccttgggagtgggacatggatgaagctggaaaccataattctcagcaaactaacacaggaacagaaatccaaacactgcatgttctcactgataagtgggagcttgccatttttgaaaaagaaagtgtcggatgaaataacttatgctgaagatactgctaattcaattgcacttctgggtgacttaatgaaaataccaagttctgaattgaggatacaaatttgtaagtgtattgttgatttttatcatgcagaaccaccaaagaagcatattccagaagttaattgtactataatgatgaaagcacaagcagccagtggaatctgtactcacctcaatgacccagatccctctggacagcttttatttcgttcatcagaaatactttggaacttgctggaaaaatcttcaaaagaagaagtcatacaacagcttagtaacttggaatgtttgctggctttgaaggaagtatttaaaaatctgtttatgagaggtttcagtcattatgaccgtcagcttagaaatgacatattagtgatcactacaattatagctcaaaatcctgaagcaccaatgattgaatgtggctttaccaaggatttgatactgtttgccacctttaatgaagttaaaagtcaaaatcttttggtaaaaggacttaagctttctaattcctatgaagattttgagttgaagaaattactattcaacgtaattgtgatcttatgtaaagatttacctactgtacagctattaattgatggcaaagttattttggctttgtttacctatgttaagaagcctgagaagcaaaaaataattgactggtctgcagcacagcatgaagaattacaactgcatgcaattgccactttgtcatcagtggctcctttattaatagaagaatacatgtcatgccagggaaatgctcgagtccttgcatttctagaatggtgtgagagtgaagatccgtttttcagtcatggtaacagttttcatggtacaggtggccgaggcaacaagtttgcccagatgcgttacagtttaagactcctgagagccgtggtctaccttgaagatgagactgtaaacaaagatctttgtgaaaagggaacaattcagcaaatgataggtcttcatgacctgtatcttttgcgacctcctatctcatcctgtgacttagaatgccgtgaccatctgggaatgcagcacagtacccctctttatgacagaacaatacagaaagacaaagtacaccagattggctacaggttaagattaggctttcaaatcatttctcccattaatcaaaactttacagaggagacagtgatttttaccattcattcaactggtttgcacagaggggaagggaagggaaaaagggaagggagcattgcttttggcagtgtggggaagattggagaaatatggaatgaaatatatgaagaaataaaattagaaaaattaagaccagtcactacagataaaaaagctttggaagctattacaacagcatcagaaaatattggaaagatggttgcttctctgcaaagtgatataattgaaagccaagcatgccaagacatgcaaaatgaacaaaaagtatatgcaaaaatacaggccacgcacaagcaaagagagctggctaataaatcatgggaagatttcttggctagaacatcaaacgctaaaacgttaaagaaagcaaaaagccttcaagaaaaagctatagaagcctccagataccataaacgaccacaaaatgcaatatttcaccaaacacatattaaaggccttaacacaacggtgccctctggtggagtagtaacagtggaaagcactcctgcccgattagtaggaggacctctggttgatacggatattgctcttaaaaaactgcccattcgaggaggagccttgcagagggtgaaagcagttaaaattgtggatgcaccaaaaaagagtattcctacgtaa

SEQ ID NO: 105 - DNA, 951 bp, Homo sapiens
  SIMILAR (1)..(72): 1001254mologous to Homo sapiens UDP-glucose:glycoprotein glucosyltransferase 1 precursor,accession number AF227905,Smith- Waterman Score=134.
atggtgaacgaagacttgctgagtgatggaacgagtgagaatgaatctggattttgggattccttcaaatggccagggatgagagcgtctacaggggccactcctgagagcctggtgaccgtcactgccaccaagggggaacgtgggcccagagtgttcaagggaaagctggagcagctccgaaggccaacgaagccatcgactctcctgctgctgctccaaggcaggctccagcaagccatgagggcccgggtgctcgccgtcatgaaggctgccattcatatttcacacctgcctgcctggcactttctggcttctgacaccggcagcgagatgtcacttatgcctgaacgcacacactcataccttggggccaggatcgtggcaggtggcaacccagctttgagtgctgcgtcttctggggctgcagcggcccactgtgagcaggagggtggctccagacatgaccagcaggctctaaggctcatcagcgtcttctggagcctgcacgatacacacacaggcacaggctacaccatggagacccatctgcagggtgccaagcccttgcatgcttgggcctctgacggatctgtccccgctgctaaccaggcacagggcagctctcgcaggtcttccagtcagctagcacagaccctggccagtgtcatgactctgtgccctgggaatcacacaccctctctggccatggcagaggagctcatgatggaggcatccttgggcttcaggggatggtccctgaatgggtgtggggctggggctgaaggaccgcctgtgggctggggcgctgaaaatgggagaggaactgagccatttgtgtttcccagatggggcctgctgcactgtgcacagcgtgtccttgccctcagagtcacccttggggccagagtccttgtggctgtaactcacagggtcattggctggggctag

SEQ ID NO: 106 - DNA, 279 bp, Homo sapiens
  SIMILAR (129)..(254): 1001254mologous to Escherichia coli yeiK,accession number U00007,Smith-Waterman Score=235.
atgggcgatactatagctgtgctccggtgcgtgccttcgctgaagtcaagtgcagtgtcagcggctcaagattctgatctcagcttgtacctgggcagtaaagtagcattcctggtggcagtagattggtcatctggagaaccactactggctgagcatgccctacctgaccacagggcaggagtaggctacactgtagtgcacagggcagaggcctttgaggccatgaagacagccaacacttccaagttcccctcacatagatttgttgtagactag

SEQ ID NO: 107 - DNA, 381 bp, Homo sapiens
tcagcctgtcacactttgataagatatatttgggggaatatcatgagtttttggcttatttgttaaacacctggatttttatggcctaactttagttgttgactaagcaaagtatttgttgactaatgtgactgagttgtgaaacgtctcgaaatggcatttcaattgtcagtgaagggggtggcatagacatatgattccttcatatccactcaactgagtctggcgtctccttgaatgcaggcatgcggaatgtccatgtgcctggcatcttggcggtggtcagtaaatgtttgtcaaaaggagctgaagtgtataccgtttctttgacttcttctgtgagtcaagcaccaggttcatctgagtgaaaaaatgcaatgt

SEQ ID NO: 108 - DNA, 819 bp, Homo sapiens
  SIMILAR (1)..(687): 611254mologous to Homo sapiens Gag-Pro-Pol-Env protein,accession number AF164611,Smith-Waterman Score=751.
atgacgtcttgggtggttcctcaattaaccaaagatcaacccattcctgaggccattacagtgttcactgatggctccagtaatggcaatgctggttacataggtcctacagacaaacttatttctacctcttatgcttctgctcaaaaggtggagttaattgctgtgattactgccttacaggatttcctcaaacctttaaatattgtctcagattctgcttatgttgtacatgccactaaaaatatagaaactgctgctatcaaacacattgataattctgaattggcttctttattttcaaggttacaacaggtggttcaccaacgtagacaccctttctatattacacatattgggtctcataccactttaccaggacccatgtctgctggtaaccataaagtcaactgtttggtctcttttacaacccaagaagctcaggagttccataatctcactcatgtcaatgccgctggattaaaagataaatttgctcttacctggaaacaggctaagtttattgttcacggctgctctcagtgccaggtcttcgtacttccaaatcaggaaccttgtgttaatcctagaggcctaactcctaatgctttatggaaaatggatgtgactcatgttagctcctttggcatactgtcatatgtgcatgtctctgcagataccttctcagtttcctctcacactgatttacctgctacacataattattcttattgggcttatgtgcctcttcctccacttattcgacctctcaccagggtagatgctcctgcacaaatctacactaacgatagtgtgtga

SEQ ID NO: 109 - DNA, 960 bp, Homo sapiens
  SIMILAR (580)..(855): 501254mologous to Homo sapiens Gag-Pro-Pol-Env protein,accession number AF164611,Smith-Waterman Score=273.
atgggtcacaaagagtctaaacatcatgcttatctctgctatattaaactcccgttaaaacagggaagtgtccagtcagaggaggcccgtttgcaggctcagctaaatcggactaatggcattctaattactcaggctcagctcacaggctctgatagtttctctgatacttatgcccaattaaactttgatgctcttaccacagaacaagtaacaaaggtgtgtatgagagcttgggataaattacgtgccccaggccaagctcctgtttcttttactacagttaaacaaggtcatgctgaactataccctgattttttagctaaattacaagatgctgttgaaaaatttgtctctgatgagagtgctcaaggtttggtgggcctggtgttaggtggggcatccacctctgctaaaggaatcaccattcatactggtctcattaattctgattccactgatgagattaaattaatcgtgtctgccaaggttcctgtttccgttccggccatttcctctcacactgatttacctgctccacaaaattattcttattgggcttatgtgccttttcctccacttattcgacctctcacctggctggatgctcctgcagaaatctacactaatgacagtgtgtggattcctggagctacagatgactgttgccctgctaaaccaggagaagaaggccctgcatttaatgttactatgggttacagatacccccctctgtgcctcagacatgcacctggttgtatccatctagaaacccaaatctgggctgcttatcttccggagagatcagctacagaggaaccgggacatttggtctccagcatctccctttctcctttaagaaaaatgaaagggggagtaatgggagataccccacactttcaatataaacctggggaaaaccatgccctaaaaattttgaggccccatctaaaactttaa

SEQ ID NO: 110 - DNA, 705 bp, Homo sapiens
  SIMILAR (256)..(600): 541254mologous to Human endogenous retrovirus K pol/env,accession number X92887,Smith-Waterman Score=357.
atggaccggaaattaactctcacagataaagttcaaggcagcaaatctctgcagattaaattccaacccagcaaggccgcacgtctggatctgttccttcgtctcagtgcgctcgtgggctcgctgccttcagcagtgaagctgcagacctccgcagtgagtgttacagcttataaagccagttgtacgcatcagagtgagcagcagcaagatctcttgcaaagagctaaagaacatagcttccacagtgtggaagtttcctctcacactgatttacctgctccacaaaattattcttattgggcttatgtgccttttcctccacttattcgacctctcacctggctggatgctcctgcagaaatctacactaatgacagtgtgtggattcctggagctacagatgactgttgccctgctaaaccaggagaagaaggccctgcatttaatgttactatgggttacagatacccccctctgtgcctcagacatgcacctggttgtatccatctagaaacccaaatctgggctgcttatcttccggagagatcagctacagaggaaccgggacatttggtctccagcatctccctttctcctttaagaaaaatgaaagggggagtaatgggagataccccacactttcaatataaacctggggaaaaccatgccctaaaaattttgaggccccatctaaaactttaa

SEQ ID NO: 111 - DNA, 2747 bp, Homo sapiens
  SIMILAR (442)..(1239): 981254mologous to Homo sapiens cardiac potassium channel subunit (Kv6.2),accession number AJ011021,Smith-Waterman Score= 1303.
gttacaacaggtggcttgccaatgtagacaccctttctatattacacatattagatctcataccactttaccaggatccatgtctgccggtaaccataaagtcgactgtttggtctcttttacaacccaagaagctcaggagttccataatctcactcatgtcaatgctgctggattaaaagataaattttctcttatctggaaacaggctaagtttattgttcacagctgccctcagtgccaggtcttcgtacttccaaatcaggaaactggcattaatcctagaggcctaactcctaatgctttatggcaaatggatgtgactcatgttagctcctttggcagactgtcatatgtgcatgtctctgtagataccttctcaggttttatctgggctacttgccaaacaggggaaggcacggcccatgttaaaaaacatctgtattcttgctttgcagttatggggcttccatatcaaataaagacagacaatgcccctgcatatgttagtaaggcttttgatacatttatgcaacagtggggaatttcccatattactggaatcccttgcaatcctcagggacaagctgtggtggaatgggccaatcgcactttaaaaacccaactgtccaaacagtctgaacaaccaaaacatgatttaactactccccacttccaattacatttggcattgtttactttaaattttttaaatgttcctaaagataatattctaactgcagctgaatgccattatacaggcaaaaaattcttcttaaatgaaggcaagccagtgttatggaaaaactcccaaaccaatacctgggaacctggcacaattataacgtggggaagaggatatgcttgtgtttcaccaggagatcatcaatcccctgtgtgggtacccaccagaagactcaagcttcgggtgaatactgacaatgaaaaccacagaggaaagacgtctgtgtcagagactgccctcagacatgtttcctctcacactgatttacctgctacacatgattattcttattgggcttatgtgccttttcctccacttattcgacctctcacctggatagatgctcctgcagaaatctacactaatgatagtgtgtggatgcctggagctacagatgaccactgccccactcaaccaggagaagaaggcactgcatttaatgttaccatgggttataaatacccctctctgtgcctcggacatacacctggttgtatccatctacaaactcaagtctgggctgcttatcttctggagagatcagctacagaggaaccgggacatttagtctctggcctctccctttcttgtttaaaacaaatgaaagggggagtaatgggagataccccatactttcaatataaacctgcaggaaaaccatgccctaaaaattttgagggcccatctaaaactttaatttgggaagactgtgttaactcacatgcagtaatattaaaaaatgactcatatggtttagtaatagactgggcaccaaagggctattttaaaaaacaattgctcctctggtggaagggaatgcctggaggctacttattttatttctcattgggaggacaaggatcatcatcctactttgcataggagggtcagctcattctttcccttataatgggaagataaaggcattacccacccccccaccccgaggcctcatatgatactccccattctgagcccagaacacccagaactttggaaattggctattgccatgtctggactgcaagtatgggaaggggaaactattctgtctgttgtccccaataccgttgctctccctcagtatcaacataaatgcagactttctgctttgcttacttccaacctgactgttcccatacagagttgtgttaagcctccttacatgctgttagtgggaaatatcaaaatttggacgagcaatcaaactgtccaatgcattaacagtcatttatacacttgtattaactcccattttgactctgggaaaagtgtaatgttggttcgagctcaagaaggaatctggattccggtaactttgcccagactttgggaatcctccccgtcaatacatttaattaatgaagtgttacagcaaattctaaaaagatctaagagatttgttttcactttaattgctgtgatcatgggcctaattacagtcactgcactggccactactgctggaatggcattacaccaatctattcaaacggctcattttgttaatgattggcaagccaattccacccaaatgtggaattctcaacaaggcattgatcaaaaatttgctaatcaaattaatgatttaagacagtctgttatttggcttggagattgggtagtgagtcttgaacatcgcatgcaaatgcagtgcgattggaatacttctgatttctgtatcaccccgtattcctgtaatgaaactgatcattcatgggaaatggtcaaaggacaccttctaggtagggaagataatttatcattggacataactgaattaaagaaacaaatttttgaagcctctcaagctcatttatccattgtgcctggagctgaggcattagatcaggcagcagaaaatctttctggactaaaccccacgacttggattaagtctattgggggctccactgtagtaaattttggaattatgtttctctgtttaactggcttgtctttagtgtgccagaccagtcaaagaatcctgcatcaaaattga

SEQ ID NO: 112 - DNA, 1022 bp, Homo sapiens
tttccacctgcagaagcaagggactgggggtgaaccatggactgaagccacagcgcacatttctcagtgtgcaattgcagcccagggaaagggtgaaaggagcagtggtcactgaatgtactgtctcttttccacaacatgcatgtctttcttgaaaatgaaaatgactacttggagcatctcctaaccaggttaggcaaagaatgtgtggacacgagactcagagggccattcagagaggatggtcatggtcctactatccaacaacagcctgacgcctgctcactggagacaccgccaagcaggtgcaggcatccagtgggaacctggagcaaggcgggcaggtcagggcagcgggaagggaccttaacagaccttctagtcggcgactttgaagattcttcaagacaatagccagttctgaagattcatccccgtttcttcactgtaaaagtaacacgttttttgtagatgacttggaaaatacagacagccatatgttagaagtaaacaaaaccactcctaacccgtctacttcttaaaagccagtacttaacatttgaagcgtatttcttttcatcgctttgttttaaggtttttgtggaatatttttcatcatttctatttagagggtccctttttcttcacttaacatcaataccgtaagcatttcttcctgttgctaagttcacgtgcaccccttccctaactgcataatactgggtcatatgggggtatcataattgacataaccaatgcccaaatatgggaacatttaggattggctctctctcttcaatttttcattttaggactggcattaccatctactttcccgaggcacgggacttttgttcctgttccaggattgtttctctaggggatcaattcctaggaagtggggatttgcttggattctcagggtgatacatatgccaaatagtataccagagtattgaaggtacttgtttctaggaatcccactttgacatatcgacgatgagaataattaatattcaaat

SEQ ID NO: 113 - DNA, 330 bp, Homo sapiens
  SIMILAR (1)..(1062): 961254mologous to Cloning vector pZC320 SopA,accession number U26464,Smith-Waterman Score=1749.
atggctctgcagaccttcagtaacacgaacaatcacaataggtctgggattgttggatttctggtggaagctggcgaggaggctgccttttctgtaggagatagcacaggaacagagtcagctgaatggatgaagtctctaacacctggctcacatttgattacgccggcacccctacagtacatgagtcataaaatagctcctggaagagccagttccatcaagtcttctcagcaactctccattaccttccccagagacctggagagatggcgccagagaacagcccagcaggaatctgtgggagtgaaaagcaaacaggaagcctga

SEQ ID NO: 114 - DNA, 618 bp, Homo sapiens
  SIMILAR (273)..(401): 441254mologous to Oryza sativa hypothetical protein,accession number AP002870,Smith-Waterman Score=63.
attcagtcatataagcagaggcagcaggaccatgctgattctgtgggaccaggcccgggctctaccagccaggcctctgaacatgtcaacttgagaactgaacagaagtatcccctgcacaccgcagaggctgtagaaccaatactgcctgcactggccaactgtgggggcagtggcttcacaccccccagtgtcaccctgaaagacatcctcatgcacaacctgcagtgtgtagggaacatgaacgcaccagatagtatccccacctcagcagacggtggaggcccctgctcggccctggacctgcaggccttcttccaacaactgtcagaccccacaggaatggaaaggaaggcttctggagacacatactggagggaacaaggggacaaaaaaggcaagctgacatcaaccccaaaccccaataattcggaggagagtatccctggcagtccagtgcccctacatgaagtggtgtccatgctgtgcgtgaacatgctccgcagtcttgagaccattacacggctggacaaaggaatgcctggccaagccaccaatgggaaatactttgcaatgcaaatgagtcctccaaagccaagcattcccctctcctgctaa

SEQ ID NO: 115 - DNA, 426 bp, Homo sapiens
  SIMILAR (1)..(762): 991254mologous to Homo sapiens organic-cation transporter like 4,accession number AB011082,Smith-Waterman Score=1275.
atggtagaaggcaaaggagaagcaggcaccttcttcacagggcagcaggacgacggaaacaatcgagctttccaggaaagcagcgaggcaccctctctgctgtggcagatgcagcaggtgcaggcaggccctccattcccccggtccttgccatgccccatgagggacgcagaggtgggacactgtccctactgcatggatgagaaacccaagccccagggcccgcctcgggccacacagccggcggggacagaagaggcgcccagtgccattctgggtgacagcactcctaccgacgcagacaacagctccagcagcacacccaccctgagctcctcttcagccggaaacctgctgctcccacagacttccgtgttcaaagaaacagcaactccacccatcagccgcccaggccaaaagacttag

SEQ ID NO: 116 - DNA, 410 bp, Homo sapiens
  SIMILAR (369)..(274): 401254mologous to Schistosoma mansoni ribosomal protein L37,accession number AF035770,Smith-Waterman Score=68.
ttcttgggggcttacaagcaccatgagatattgcatattaggttgaccgcatggaatcagtcttcttaactgcaacatagccaggtttggaggcaaagacagttgttattcctgctaaatggtcagtgaggaaaatgccaacaggcccttccttaggaagtcctcactggatgccaaaggacaagacaaccagtgcagccccgatgcaccggtggtgcacaggctcatgtgagtggatactgcgttgtccatggatgctgggtctgctcatgcccctggagtttcttcagatctgaccttctcgccccagtccccatcagttctcctccccactggatatccacaatccttgaagctcaggtggtaggactagtaaggaatttggttctcactcacaatacttcttccag

SEQ ID NO: 117 - DNA, 432 bp, Homo sapiens
  SIMILAR (1)..(879): 1001254mologous to Homo sapiens dJ845O24.4 (Heterogenous Nuclear Ribonucleoprotein HNRNP C1 LIKE protein),accession number AL022101,Smith-Waterman Score=1489.
acttccgggtcgacccacgcgtccgatccgccactacgtgtccatcctgctgcagagcgacaagaagctcacccaggaacaagtatctgacagtcaagtcctaattcgaagcagagtcctcagggaaaatggaaaatacattcccaaacagtctttcttgacacgaaaatattatttcaacaacccagaggatggatttttcaaaaaaactaaacggaaggtagtgccaccttctcctatgactgatcctactatgttgacagacatgatgaaagggaatgtaacaaatgtcctccctatgattcttattgggggatggatcaacatgacattctcaggctttgtcacaaccaaggtcccatttccactgaccctccgttttaagcctatgttacagcaaggaatcgagctactcacattagatgcatcctg

SEQ ID NO: 118 - DNA, 1162 bp, Homo sapiens
  SIMILAR (1)..(945): 921254mologous to Homo sapiens putative p150,accession number U93564,Smith-Waterman Score=1563.
gcacgagcccagctgaaggcaataagcttggtctcaccgctgcagcagaggttctgtgctagccgggcataggggcgagagaaggcccagaggcgacagtcagagagaagcaactgcgccccggtgaagagaagctcgcccattcaccggctgggagccagctttcagtgaagatgggcagggccagaaactgttgcttgactccaacatctgcctctgggtggtcctacccatcgttatcactcttcgtagacatgatccgccactacgtgtccatcctgctaggagagcgacaataatctcacccagggaacaagtatctgacaggggacgaggcacccacagtccctcttcccattaagccctgccaagaagatttgatgtgggcccgtgttaacctttttgacctgttacaagttgaacccacagggatttcattgggttgcctgaacattgaagggcgattttttatggattacgtaattccctttcctattgatcttgcattgttgttgggggccaaacgcatcatgaaaggaagctctccactgggcccttttcagcatgcaaaccacggggccacgtactgcttggcacctcctgttacctgcagcagctcctcgatgctacggaggaagggcagccccccaagggcaaggcctcatcccttatcccgacctgtcttgaaggatacttgcagtgaaagcccaagtccttggaagctttccccagtggaagggactaggactagggggccccacgcttcaactgggtagtggccacaagcctgggcagcttttaggagccgctaaccttcccgacacctccctcaccacaccaggaccctgaagtgaggaggaggggctggaaacctggggtgggttggcccaaaggagaacctcaggctccctgggcctggccccaaggtcctttcctggcccaagggtagcttagccccatcccagactggtcctgaagtctgtccctccattggcatgaagtctgcccctcagcagtccggcctcacaggctgtactttcatggtgctctctaccttctggcccccatcccaggaacattgcgtgagtgaattgcgcaagcatactagcatgtgatattagggagtttgcaataaattattgatgctgatgtaaaaaaaaaa

SEQ ID NO: 119 - DNA, 381 bp, Homo sapiens
  SIMILAR (105)..(1): 771254mologous to Homo sapiens Human secreted protein, SEQ ID NO: 7771,accession number G03690,Smith-Waterman Score=148.
atgctggcagctgtgccaatggaaaagggctacctggaagccaggtatgttcaacatggaggctccaccttcccttttctttgtcacgacatgtacattaaagaacaagggagcaccattacccaagaatacagtaccagtgatgcccctggcattgtggaaacagtgcctctgctctctgcactgggtacagggggagaagaagctcacggggtccttgcagaccatgagagcctggcctggataaaacctcctggggccctagttctctggcccagtctcctgggcagcagctccccaggcatggagcagctcctgctggcctctgacagctgctctgacagtgccaggagggctgtgaaggttatggatgtggcctag

SEQ ID NO: 120 - DNA, 175 bp, Homo sapiens
  SIMILAR (28)..(108): 481254mologous to Drosophila melanogaster putative transcription factor,accession number AJ278709,Smith-Waterman Score =61.
tcaccctagcctctggttggttgctttttgcaaccaatcagatgcttgcacaggagtgtgacctttgtaacttctcttcatcttccggttggctgctttctgcaaccaatcagactgatggcagactaccacttcagtttcatgagatgaacgtgaagtggccaatgggaaacct

SEQ ID NO: 121 - DNA, 399 bp, Homo sapiens
  SIMILAR (1)..(477): 831254mologous to Homo sapiens unknown protein,accession number M22334,Smith-Waterman Score=700.
atgactcacagagaatggaggagagcagcaggacaatcatccacctgggagtggtgcagagccaaggcaggccccccacccctgagaaacagtcaaaataatacagatgacttcagtatgtcagcccatggacctttcaaagaacttttttcgcagtggcctcctgcatttcatgaagagcaagaagcaactgagtttaaatacatacaccaccacggctacttaggcaatgtaattgcaaaaacaaacgaaacatgccatgatgaccttgtacccgaagtccgaaatggcagattgtttgccctaaaggctgtaccgtacatacttgccttaacccacctacattgtgtgcccaagaatcccagtgcagacagccccaagccacttcctttaggctaa

SEQ ID NO: 122 - DNA, 1106 bp, Homo sapiens
  SIMILAR (414)..(274): 331254mologous to Homo sapiens Human secreted protein encoded by gene 45 clone HTEDS39,accession number Y02694,Smith-Waterman Score=74.
atggaggtgggtactctggggcacgcccaggaggccgaatatgtgatgggtgaagaagacgtccgtcatctcaagtactgcattttgattgggtcgcgcctgaagaagcctcacttcctgtccttggtcagctgccacatctttacagaggaaagagcatgtgcaaaggccctgaggtgggagtatgagaccaaggaaggcaagtgcctgggatacagtgagaaaggggaaaggagagctcaggaggaggagggcatccgcaaaagcagccagagaaaaacagagtcttccggggcttctccaagctttccagggttctatcctgcaaaatcctccccaactggccgggcacctgagttgcagacagtgcagggagccttccactacaatgtacagcagagtgagtccacagatggcttcaaagaagaaccacccttgacctggtccttgaaggatcagcacaagtttatcagccctggaggcataagggagagaatccagagagttgagcacatcaaagttaaccctggtcagggagacagggccatccttgagggtcttccagagaccctaaaacagaggtttctggaggctagagaaaggaaggaaggaagtgaagaagagaatggagagaccaacaactgtgctgattgtcccaagaaggaccgcatctggaagaatgcctgcagttggggttcttccagaataaagaggcgttttgccatgttgcccaggcctcctagtcacctggacccacaggtcatgagcagaggccatggctcatggctgtgatagcgaccccccagcccaatcctgggacaatcctggttcccacagcactcaccgaaagtgttgactccaagctcacagcaggaaccccaggagcagcagagccctcatggcgtccgtccgttggccagctgcctatccaggagtccagatcaataggactggccaaaggtcttgaaatagagattggtcaagctgccctcctgagcctgatagtgggactggaagcagaagaagggacattcttagctctgggtcctgtggagatcaggaggttaaggagatcaaagatcatgggatcttggagtccactgtga

SEQ ID NO: 123 - DNA, 894 bp, Homo sapiens
atggtggtaaaagactcttccagattgtggcttactagttcccgcccagggcctcagaatcttctacctgtagttggaaaacaagagctgccagcagcagatgtagtaagaatgcgtagggccgccaagactcttactcaagtccttgtgattgttgtggccgtcatgtcaagtttcagattcagaaacacgactttattaactcatccacaaatgatcggggtagctgattgtaaaccagaagtggtttgggttgtttatcggttgcaaagagtggaaactcactcaggcttgtttgagttaaaggggattcacggaaaaataatggacacattcagaaataaaagacttcagggttttagagtcacctgtaaaggtggattttcacctcctcaaggctcttgtatgccagctgcttcccccaaattgttgaatcagacatttctggttcccaaatcccttccaaaagatatggaaaatggatataaaatatgcgtgcagatccagaaaaaggctccacctctgtctcctctgaatcatggggactttgtgaaatttattgcccacaagggacaaaagagcaaaacagatgcccaggttgctcagagagcaaaacttgcagcaaatgaatgtgcactagttctttgtcttggagcatccttggagatgctggagtatgaggagagaagagtgaggcctggggagggtgaaggcacatctaacatgggttatggagaaaggaaattggataaagatcacagagaagaagattatgatggtgccggtgtcactgagagatctactgacccgatgttgccttcttttgctgccttgtgtgtgctgtacgtatcctgcgttaggacccttgctttggcagcgttagctacaaagtag

SEQ ID NO: 124 - DNA, 3498 bp, Homo sapiens
  SIMILAR (579)..(1478): 881254mologous to Homo sapiens dJ71L16.5 (KIAA0267 LIKE putative Na(+)/H(+) exchanger),accession number AL022165,Smith- Waterman Score=1403.
atggctgggggtgtgtggggccggagccgggcccgggaggctcccgtgggggctctaaccctgacagcactgactgaaggaatccgggccaggcaggggcagccccagggacccccttccgcaggccctcagcccaagtcctgggaggtcaaacctgaggctgagccacagacccaggcactcaccgccccctctgaggcagagcctggacgtggggccaccgtccctgaagctggcagcgagccctgctccctcaacagtgccctggaaccagcccctgaggggccccaccaggttccccagagttcctgggaggagggagttcttgccgacctcgcgttgtacacggctgcctgcctggaggaggctggctttgcagggacccaggcgacagtgctcaccctgtcctcagccctggaggcccggggcgagcggttggaggaccaggtgcatgctctggtgcgtgggctgctggcgcagccccctccaaaccctcagggtagcagccgagctctgcgcagcctaagccgtaaccagcgtgtaaatgggcaggtgctggtgcaactgctgtgggcgctgaagggtgtcttcgaggccggagccccaggcactggcggtaggtgctccagccattaccagggggccacacgtgctcttggggagatgctggctgtttcgggctgcgtgggagccacgaggggcttctacccacatctgctgcttgcgctggtcacacagctgcacaagctggcccgcagcccgtgctcccccgacatgcccaagatttgggttctgtcccaccgagggccaccacatagccatgccagctgtgctgtggaggccttgaaggcgctgctcaccggggatggaggccgcatggtggtcacgtgcatggagcaggcaggaggctggaggaggctggtgggagcccacacccacctggagggcgtcctgctgctggccagaccttcgtacaccacgtctttgtcaagcaccagttactgcacgcatcagctgagcacggaggggataggcacggacgcaacacttttggaacttagacgctaccttctgggggctgaggacaggaaatgtggcattgaggatttgtgggtcatcatcctgtgccagtgtgttaaggtgacatcagcgtgttggaagctggtggcaatgaggagcgggaaggcctcctgcaccctggagaccgtgtgggaagacaagcacaagtatgaggaggccgagcggcgcttctacgaacacgaggccacacaggcggccgcctccgcccagcagctgccagccgaggggccagccatgaatgggcccggccaggacgaccctgaggacgctgatgaggcggaagccctgacggcagcagcaggcgtgatcccaggaagagccaggacagcaggaagcccctgcagaaaaagaggaagcgctccccaagaggggctcggccccgcggaccctgcctcctggctctcggccgaacgcgtgtggctggacaagttacttttcgaccaggcagagagctcctaccgccagaagctggcagatgtggctgcccgggcagcctggcctcctgccttggccccttggggtctctgcacccatggaaaccaggtggcctgccaccacgtgacctgggggatctgggtcaacaagtcctccttcgaccaggctgagcgggccttcgtggagtggtctcaggccctgttgctggcccccgacggcagccgcaggcagggactcccaacacaggccagcaggtggccgtccccgacctggcccaccagcccagcccaccggtcaatggccagcccccgctggcagcctgcaggcactggttcgggaggtgtggctggagaagcccggtatgatgcagccgagaggggcttctacgaggccctgtttgacggccatcccccagggaagaaggatgcagaggccccctggctcagcaagcctgcctacgacagcgccgagtgccgccaccacgctgccgaggccctgcgggtggcctggtgcctcgaagctgcctccctgtctcaccgacccggtcctcggtctggcctgtccgtgtccagcctgagacccaacagaaaaatggctacaaacttcctagcacatgagaagatctggttcgacaagttcaaatatgacgacgcagaaaggagattctacgagcagatgaacgggcctgtgcaggagaacggcgccagcgtgatcctccgtgacattgcgagagccagagagaacatccagaaatccctggctggatgctgggatcacaggcctgagccaccgcgcatggccgtgactgcttttaaacgcctttcgatggaagacgatgacggtggcctctcgatgtcagggccgcgctgccaccccctcccgccccaggcagcaggactgggctctgagctgagggcaggagcagctggcggctcgcagcgcgaccgtgggaaccactggatccatgcggattctagtgacagggggctctgggctggtaggcaaagcatccagaaggtggtagcagatggagctggacttcctggagaggactgggtgtttgtctcctctaaagacgccgatctcacggatacagcacagacccgcgccctgtttgagaaggtccaacccacacacgtcatccatcttgctgcaatggtggggggcctgttccggaatatcaaatacaatttggacttctggaggaaaaacgtgcacatgaacgacaacgtcctgcactcggccttcgaggtgggcgcccgcaaggtggtgtcctgcctgtccacctgtatcttccctgacaagacgacctacccgatagatgagaccatgatccacaatgggcctccccacaacagcaattttgggtactcgtatgccaagaggatgatcgacgtgcagaacagggcctacttccagcagtacggctgcaccttcaccgctgtcatccccaccaacgtcttcgggccccacgacaacttcaacatcgaggatggccacgtgctgcctggcctcatccacaaggtgcacctggccaagagcagcggctcagccctgacggtgtggggtacagggaatccgcggaggcagttcatatactcgctggacctggcccagctctttatctgggtcctgcgggagtacaatgaagtggagcccatcatcctctccgtgggcgaggaagatgaggtctccatcaaggaggcagccgaggcggtggtggaggccatggacttccatggggaagtcaccgtatcctctggctccagtgctgggggttgggcggggctccccttgggcgggctcagtggccacccggtcctccagtttgatacaaccaagtcggatgggcagtttaagaagacagccagtaacagcaagctgaggacctacctgcccgacttccggttcacacccttcaagcaggcggtgaaggagacctgtgcttggttcactgacaactacgagcaggcccggaagtga

SEQ ID NO: 125 - DNA, 1912 bp, Homo sapiens
  SIMILAR (1)..(657): 1001254mologous to synthetic construct chloramphenicol acetyltransferase,accession number A02739,Smith-Waterman Score= 1206.
tttttttttttttttttttgccggtctcaagtctttaatcgtggctttggacctcacgcacgcgcgcacgctacacacactcaggcttcagatcttgttgaaagctgcgatatcgacactctgcacgttgctccccaaacttggtgatcccctcccccagcaagtcggtccccaccttggcgtcctccatcatacactgaatctgtagctttccggatacccgtagcccacggggcaccaggttgggaagccccccagagacaaccctttcaagttggatagagcgcacaaaggcctccagctgagccatgtccgtctcatcatcccaaggctttgacatccagcaaggatggagggacttggccaccaagtggcaggctttcttgggccttcttctcccgcgtaatgaccgtaggccgctccttccgctagctgtggcccgcctctcttgtccttccttcctcattgtcactgccaaaacaggtcaagtgtcatcatccctcgcattccctctgctggtgtgggtgggcttcttgggctggggggctccacttgggcgcatgggagataacgtgctgggttctgttggcccgttgcccggttggccaggcgaggctcttctccagcactgttcagcccgggcttccaggcttggagatggcctgctgcaagctcctgtaccacgccacgcagactctggttctccacttccagactggcaatccggacgacgagctcaccgtggtctccgctggtgccgcttggaggccccggggccctgagcttccagccagggatttctggatgttctctctgcgtctcgcaatgtcacggaggatcacgctggcgccgttctcctggcgggaaggcaacctgcaacaggcccgttcatctgctcgtagaatctcctttctgcgtcgtcatatttgaacttgtcgaaccagatcttctcatgtgctaggaagtttgtagccatttttctgttgggtctcaggctggacacggacaggccagaccgaggaccgggtcggtgagacagggaggcagcttcgaggcaccaggccacacgcagggcctcggcagcgtggtggcggcactcggcgctgtcgtaggcaggcttgctgagccagggggcctctgcatccttcttccctgggggatggccgtcaaacagggcctcgtagaagcccctctcggctgcatcataccgggcttctccagccacacctcccgaaccagtgcctgcaggctgccagcgggggctggccattgaccggtgggctgggctggtgggccaggtcggggacggccacctgctggcctgtgttgggagtccctgcctgcggctgccgtcgggggccagcaacagggcctgagaccactccacgaaggcccgctcagcctggtcgaaggaggacttgttgacccagatcccccaggtcacgtggtggcaggccacctggtttccatgggtgcagagaccccaaggggccaaggcaggaggccaggctgcccgggcagccacatctgccagcttctggcggtaggagctctctgcctggtcgaaaagtaacttgtccagccacacgcgttcggccgagagccaggaggcagggtccgcggggccgagcccctcttggggagcgcttcctctttttctgcaggggcttcctgctgtcctggctcttcctgggatcacgcctgctgctgccgtcagggcttccgcctcatcagcgtcctcagggtcgtcctggccgggcccattcatggctggcccctcggctggcagctgctgggcggaggcggccgcctgtgtggcctcgtgttcgtagaagcgccgctcggcctcctcatacttgtgcttgtcttcccacacggtctccagggtgcaggaggccttcccgctcctcat

SEQ ID NO: 126 - DNA, 2160 bp, Homo sapiens
  SIMILAR (46)..(477): 941254mologous to Cloning vector pZC320 SopA,accession number U26464,Smith-Waterman Score=724.
atgaaggcagaaataaagatgttctttgaaaccaacgagaacaaagacaccacataccagaatctctgggacgcattcaaagcagtgtgtagagggaaatttatagcactaaacgcctacaagagaaagcaggaaagatccaaaattgacaccctaacatcacaattaaaagaactagaaaagcaagagcaatcacattcaaaagctggcagaaggcaagaaataactaaaatcagagcagaactgaaggaaatagagacacaaaaaacccttcaaaaaatcaatgaatccaggagctggttttttgaaaggatcaacaaaattgatagaccgctagcaagactaataaagaaaaaaagagagaagaatcaaatagacacaataaaaaatgataaaggggatatcaccaccgatcccacagaaatacaaactaccatcagagaatactacaaacacctctacgcaaataaactagaaaatctagaagaaatggatacattcctcgacacatacaccctcccaagactaaaccaggaagaagttggatctctgaatacaccaataacaggctctgaaattgtggcaataatcaatagtttaccaaccaaaaagagtccaggaccagatggattcacagccgaattctaccagaggtacaaggaggaactggtaccattccttctgaaactattccaatcaatagaaaaagagggaatcctccctaactcattttatgaggccagcatcattctgataccaaagccgggcagagacacaacgaaaaaagagaattttagaccaatatccttgatgaacattgatgcaaaaatcctcaataaaatactggcaaaccgaatccagcagcacatcaaaaagcttatccaccatgatcaagtgggcttcatccctgggatgcaaggctggttcaatatacgcaaatcaataaatgtaatccagcatataaacagagccaaagacaaaaaccacatgattatctcaatagatgcagaaaaagcctttgacaaaattcaacaacccttcatgctaaaaactctcaataaattaggtattgatgggacgtatttcagaataataagagctatctatgacaaacccacagccaatatcatactgaatgggcaaaaactggaagcattccctttgaaaactggcacaagacagggatgccctctctcaccgctcctattcaacatagtgttggaagttctggccagggcaatcaggcaggagaaggaaataaagggtattcaattaggaaaagaggaagtcaaattgtccctgtttgcagacgacatgattgtttatctagaaaaccccattgtctcagcccaaaatctccttaagccgataagcaacttcagcaaagtctcaggatacaaaatcaatgtacaaaaatcacaagcattcttatacaccaacaacagacaaacagagagccaaatcatgagtgaactcccattcacaattgcttcaaagagaataaaatacctaggaatccaacttacaagggatgtgaaggacctcttcaaggagaactacaaaccactgctcaaggaaataaaagaggacacaaacaaatggaagaacattccgtgctcatgggtaggaagaatcaatatcgtgaaaatggccatactgcccaagaatgggccagccaactgtgacatcccttggatcggagatttagaactagaaagtattctttctacattattagggaagaaaaggagttacttggcggtaagaattataatgggaaagcccaaagaagcctctgatactactccatcaactctggacaacacattaaatcaaaaacaatattgcatcctggaggaaatgacagagattagagtccatcttgaagatcaaaaggatgcagggttagaagccacaccctatccctatttaattgaccagtcttacatctataaaagccatgtggcttcttggtatgaatttttgggcaaccgacaattctaccaagtagcagccccaattgtagctgctgtacaaattgtggtgtctttgctagagcaagttaacacggtgtctaatacatgctgtgaaactgataagaaatacacatattggtttctgccagcagtccttggcacagagctcctcaagccttcataa

SEQ ID NO: 127 - DNA, 1776 bp, Homo sapiens
  SIMILAR (686)..(2086): 821254mologous to Homo sapiens putative p150,accession number U93564,Smith-Waterman Score=1990.
atgcctcagggcctgcagatgccaaagaaaggaccactcctcaggcaccaccacatcatggcaacatctcagcagctcaaagacgtggcagctcctcatcctgaggcacttgaatctgtgacctctgttgtacacaaagccagggatatagggaaaggggagaggaaatatcctcctcaacacactgcaaaagaacaactctgcactgctgctgtgtttcctggcacactggaggcctttggccaacttccccgaaccctgtctcagcagcttctggctcattgctcgctgacacggccacctctgctcctgccaaggaaatctgctggcctttgcttcccctccccacctccatctcactcagttcctcctcaggccacaggcatgcctgagtggcaaatggcagcaaagaggaaggtgaaaaaggaaggaagaacgggaggaagggagcccgagagaaaacattcagaggagggagtttatgtacattatccaaatggatgtcaggtccctgtcgacaaagattttaattgtgtgtggccctttctccttataacttatggaactggtccaaatgaggctgacttggtagccaatctggcatccgctattgaacctgcatacctaaggaagttactgcttaactcaactctcctgcttctgcctggagggaacactgcccatcctgtacactgccggaggctggaaaaggtgtcaagagatttgtgcctggccaagaccttggaggatgatggtgttgcacttcgtctagttattcagcacagaactgtactcaacctgattgaactcccacggaggggtaggcttccaaacgcaactgaatttcattttggtgcagcacctttctgcctcaaggccttagctttgatagctttagaaaataatggatatggtaacactacgcagggtttaaagtgccctgtttgggccaggtgtcttcacactgagaaaagcggcgttccacggtcacagccaggtgagtgcactcgcccatcggcatgggcatccgaggagagcagggctgtggggagcagccccttcactggcagtgagaaaggtgctcatttgaatatcaagcaacggaccagtgaaaattggcaaaggccagaaaagcgaccttcagaaggagccagcaccccagctcctgcctcagggcgatatgaagaccccaggaaggaaattatgctgagaaaaggagatcacacctctgtccagcctgcaccggccccttggcatgccctgaagacacaaggcctaaatcaaggtcaaagacacagccctcctggttgtgaagattccaaaggctcccagctgcatgaggagggttacccagaatgtcagatttggagcaattcagcgagaacccttcaaaattcagtgtggtatgtggaagagggtcaccctcatctagcagatgtgggcaggaagagaagtccacttgtgcttgctgccagaggagatggccactgccaattgaggctgatcatgaagagtgggttcctggagtcctcagcagagcactggctattcatggacaaggacagaaacagaagaaaaaaagacccagagaaggcaagaaggtcatatggagacagagatcggatttgtagagccacaaaccaaggaacgcctggagccaccgaagctgggagaggcaaggaaggatgctcccttagagcctttaaaggaaacgcagccctgctgaacactgatttcaaacttctggcctctggaactgtacagaatacattatag

SEQ ID NO: 128 - DNA, 567 bp, Homo sapiens
  SIMILAR (37)..(447): 721254mologous to Homo sapiens nuclear pore complex interacting protein NPIP,accession number AF132984,Smith-Waterman Score=492.
atgtcagatttggagcaattcagcgagaacccttcaaaattcagtgtggtatgtggaagcagatgtgggcaggaagagaagtccacttgtgcttgctgccagaggagatggccactgccaattgaggctgatcatgaagagtgggttcctggagtcctcagcagagcactggctattcatggacaaggacagaatgggccagccaactgtgacatcccttggatcggagatttagaactagaaagtattctttctacattattagggaagaaaaggagttacttggcggtaacaatgtttaccaccgtgaatggaacttgtttgattaaccctgatcagaggatgaaaacactaaagaaccaagtgagaaagagggaagagaaccgcatagggaagagcagagcgagtagacgagccgaacgcagagcccgcgaggggcgagtggaagctccctgcgggcaggtacccgaccaccgccctgccctgggcgtggcggcctcgggctcagggaccgcttcggcgctagacggccgcgtccggaggaaacgggcgctggtgaaagcctag

SEQ ID NO: 129 - DNA, 728 bp, Homo sapiens
  SIMILAR (26)..(526): 431254mologous to Homo sapiens Human secreted protein, SEQ ID NO: 4800,accession number G00719,Smith-Waterman Score=159.
ccctccaggggagccagacttcgagtcttccttgtgtcaaacatgcctgggtgaacatgctttccaaagaggggttctccctcaggagaacgagtcatgttcatgggaaactcaatctgggtgtgaagtgagagagccatgtaatcatgccaacatcctgaccaagcccgatccaagaaccttctggactaatgatgatccaggtattaattggaaaaatacaacctgtttcctgttatgtacaggatacattctgtagtaaagctctacacaaaggcaaggaaagcaaatccctgggtctgcattcagcagcagatgaaaaactcagcgtgcattgtaagggtaatgttgctccaaaaatctttaagcactggaatcacacaagagatgaggatctgtttcatgtttcaatcacaaaagtggtatcagtaggaataaagaatagacgagagagagttgaattccagagattttttctgcaggaggtttatggttttggattaaggtttctgactttgaccttgttaaggataaatatgcttgagatttcgtacaatacgcttgattcttcttctgcaaaaaagacgaggattccaggtttgggaaagcataatattaactcaggagctctcattactgacatgagaaaaatgattaaaaagaggagcctgaaaccacgaacaatcttggttatttaccaagtttgttcttgtggaggaaaaaaataa

SEQ ID NO: 130 - DNA, 615 bp, Homo sapiens
  SIMILAR (609)..(553): 891254mologous to Homo sapiens myocyte enhancer-binding factor 2, MEF2,accession number S57212,Smith-Waterman Score=98.
atgctgctcgacacagttcaaatcacccatgaattattttatgtaattgaggaatatgggcataaatacaatatactaacaggtgactgcaatattaaattttctgttttaaaaggaaactcttcaaactgggtcttcgaaatagaaaaacagtcttgtaatgttttaaagaggtggagacactctctacatacaaagggcagagtgtccttgcctgctgtaaatgttttagcagctgtggaaactttcaacaaaattgacttcagcaactcagagcgatgtgcaaaaactgggcttttcatcgtgaagactaagcacttactaaagagatggagactctgtggcatagctcggagctgggggctccttctcacagctctgcccaatgaacttttcgatggcaactctgttagattacaaatctcagcatcctttagggtttgctttctaaatgagctgcccgtgggagagatggctatttatctgtttgactttccgaagagtcttagagaaagcctcactgagagggttaagactcagggctgtgacctcggaatcgtccgcatcggggtctgggctgtcacagccattaaggccctttttctcaacgtctga

SEQ ID NO: 131 - DNA, 420 bp, Homo sapiens
  SIMILAR (82)..(240): 921254mologous to Homo sapiens enhancer binding factor 2C,accession number L08895,Smith-Waterman Score=267.
atggcgatggtccggcggcaaggtagacgctacgatggaggtattcaaggcctttgtctaggtttgaactttccaaattatgtatttcagacgttgagaaagaagggccttaatggctgtgacagcccagaccccgatgcggacgattccgtaggtcacagccctgagtctgaggacaagtacaggaaaattaacgaagatattgatctaatgatcagcaggcaaagattgtgtgcattgaacaagaaagaaaacaaaggctgtgaaagccccgatcccgactcctcttatgcactcaccccacgcactgaagaaaaatacaaaaaaattaatgaagaatttgataatatgatcaagagtcataaaattcctaatgggcaggcacaggaaaaggatgatgatgaaaatatacattcttga

SEQ ID NO: 132 - DNA, 4336 bp, Homo sapiens
  SIMILAR (661)..(2079): 1001254mologous to Homo sapiens enhancer binding factor 2C,accession number L08895,Smith-Waterman Score=2475.
  misc_feature (1)...(4336): n = a,t,c or g
aagatgcatggtgaaatggtgagatcagaaaggggccctgcatttgataaaaatgcaaaaaacaaaataaaaatagcatgaaagaaactagtatatacaatggatgtcagttgacccaatagattgctaatgtattaaaaacaatttagggtgttgcaatgtgatatgttctaaccccacaggttatccttttgacagctgaccttaaacttataaaatgtaagcagagtaaaagaaaacaganagaanatagttactcaaatgtgcaactgcacaaatatacccccctcccgctattaagataacaaaacttctgctattaccataatattatatatattagaaagctatacacaagcatgttaatttcacagatttttttaaaagattcttaatattttatataattagaaatacacacatttcaaaaacaaacttctacaaagagaaaacagttatcttggttagcaaagcatggagttcttcatggcttagggtagtgctttctatacacaaagtcctttttggttttttacaggactgtttaaaatattagcgacgctatcaaggaaaaaatacataatttcagggacgagagaaagaaaaggaaggaaaaaatacataatttcagggacgagagagagaagaaaaacggggactatggggagaaaaaagattcagattacgaggattatggatgaacgtaacagacaggtgacatttacaaagaggaaatttgggttgatgaagaaggcttatgagctgagcgtgctgtgtgactgtgagattgcgctgatcatcttcaacagcaccaacaagctgttccagtatgccagcaccgacatggacaaagtgcttctcaagtacacggagtacaacgagccgcatgagagccggacaaactcagacatcgtggagacgttgagaaagaagggccttaatggctgtgacagcccagaccccgatgcggacgattccgtaggtcacagccctgagtctgaggacaagtacaggaaaattaacgaagatattgatctaatgatcagcaggcaaagattgtgtgctgttccacctcccaacttcgagatgccagtctccatcccagtgtccagccacaacagtttggtgtacagcaaccctgtcagctcactgggaaaccccaacctattgccactggctcacccttctctgcagaggaatagtatgtctcctggtgtaacacatcgacctccaagtgcaggtaacacaggtggtctgatgggtggagacctcacgtctggtgcaggcaccagtgcagggaacgggtatggcaatccccgaaactcaccaggtctgctggtctcacctggtaacttgaacaagaatatgcaagcaaaatctcctcccccaatgaatttaggaatgaataaccgtaaaccagatctccgagttcttattccaccaggcagcaagaatacgatgccatcagtgtctgaggatgtcgacctgcttttgaatcaaaggataaataactcccagtcggctcagtcattggctaccccagtggtttccgtagcaactcctactttaccaggacaaggaatgggaggatatccatcagccatttcaacaacatatggtaccgagtactctctgagtagtgcagacctgtcatctctgtctgggtttaacaccgccagcgctcttcaccttggttcagtaactggctggcaacagcaacacctacataacatgccaccatctgccctcagtcagttgggagcttgcactagcactcatttatctcagagttcaaatctctccctgccttctactcaaagcctcaacatcaagtcagaacctgtttctcctcctagagaccgtaccaccaccccttcgagatacccacaacacacgcgccacgaggcggggagatctcctgttgacagcttgagcagctgtagcagttcgtacgacgggagcgaccgagaggatcaccggaacgaattccactcccccattggactcaccagaccttcgccggacgaaagggaaagtccctcagtcaagcgcatgcgactttctgaaggatgggcaacatgatcagattattacttactagtttttttttttttcttgcagtgtgtgtgtgtgctataccttaatggggaaggggggtcgatatgcattatatgtgccgtgtgtggaaaaaaaaaaagtcaggtactctgttttgtaaaagtacttttaaattgcctcagtgatacagtataaagataaacagaaatgctgagataagcttagcacttgagttgtacaacagaacacttgtacaaaatagattttaaggctaacttcttttcactgttgtgctcctttgcaaaatgtatgttacaatagatagtgtcatgttgcaggttcaacgttatttacatgtaaatagacaaaaggaaacatttgccaaaagcggcagatctttactgaaagagagagcagctgttatgcaacatatagaaaaatgtatagatgcttggacagacccggtaatgggtggccattggtaaatgttaggaacacaccaggtcacctgacatcccaagaatgctcacaaacctgcaggcatatcattggcgtatggcactcattaaaaaggatcagagaccattaaaagaggaccatacctattaaaaaaaaatgtggagttggagggctaacatatttaattaaataaataaataaatctgggtctgcatctcttattaaataaaaatataaaaatatgtacattacattttgcttattttcatataaaaggtaagacagagtttgcaaagcatttgtggctttttgtagtttacttaagccaaaatgtgtttttttccccttgatagcttcgctaatattttaaacagtcctgtaaaaaaccaaaaaggactttttgtatagaaagcactaccctaagccatgaagaactccatgctttgctaaccaagataactgttttctctttgtagaagttttgtttttgaaatgtgtatttctaattatataaaatattaagaatcttttaaaaaaatctgtgaaattaacatgcttgtgtatagctttctaatatatataatattatggtaatagcagaagttttgttatcttaatagcgggaggggggtatatttgtgcagttgcacatttgagtaactattttctttctgttttcttttactctgcttacattttataagtttaaggtcagctgtcaaaaggataacctgtggggttagaacatatcacattgcaacaccctaaattgtttttaatacattagcaatctattgggtcaactgacatccattgtatatactagtttctttcatgctatttttattttgttttttgcatttttatcaaatgcagggcccctttctgatctcaccatttcaccatgcatcttggaattcagtaagtgcatatcctaacttgcccatattctaaatcatctggttggttttcagcctagaatttgatacgctttttagaaatatgcccagaatagaaaagctatgttggggcacatgtcctgcaaatatggccctagaaacaagtgatatggaatttacttggtgaataagttataaattcccacagaagaaaaatgtgaaagactgggtgctagacaagaaggaagcaggtaaagggatagttgctttgtcatccgtttttaattattttaactgacccttgacaatcttgtcagcaatataggactgttgaacaatcccggtgtgtcaggacccccaaatgtcacttctgcataaagcatgtatgtcatctattttttcttcaataaagagatttaatagccatttcaagaaatcccataaagaacctctctatgtccctttttttaatttaaaaaaatgactcttgtctaatattcgtctataagggattaattttcagaccctttaataagtgagtgccataagaaagtcaatatatattgtttaaaagatatttcagtctaggaaagattttccttctcttggaatgtgaagatctgtcgattcatctccaatcatatgcattgacatacacagcaaagaagatataggcagtaatatcaacactgctatatcatgtgtaggacatttcttatccattttttctcttttacttgcatagttgctatgtgtttctcattgtaaaaggctgccgctgggtggcagaagccaagagaccttattaactaggctatatttttcttaacttgatctgaaatccacaattagaccacaatgcacctttggttgtatccataaaggatgctagcctgccttgtactaatgttttatatatt

SEQ ID NO: 133 - DNA, 1123 bp, Homo sapiens
  SIMILAR (244)..(1038): 301254mologous to Sus scrofa ribonuclease inhibitor,accession number M58700,Smith-Waterman Score=212.
atgacgcctaactggcgcgcgaatggacttgtgcccctacccacatggctgagtcatgaggggactgcccgagatgcgcctgggaccccgtctgttcttgctacacgcagcgagagaaagcggcatatatctgtgctgttctctgaagcatccccgctcacgcgatggcaccgctatccgcgcaactacaccagagagatactcaccgtcactggtcagaccgacgcatcggctctctctacagcacctcgttctgagcagtctccagatatgccgcacacatctacgttgctgcgagcgaaagcgctatctgcacgctttccacacgagactactgtcgtgacagctgaaataataactcgaccaaagcgcaacgagacacagcagcataataaacgaaaagagctcatcactaccccgatgagccgagcacagcagactgaccccaacaacagaccagagcgagcagagcaacggaaaagctggactgaacagcagagaacatcaaccagcagaggcacaaacaggacacatccatataacaacaaacatcccgaaaaggaatttatatgggttggtaaacctgggccttgtggtactcaatcatccttgcttcagtgattcactaagtaaccccttgcgagttgatttctccagcctctgggatttatttgcattgttatgcaatggggtgggaacacctcacttgctgttctggctcctcagcaggagcaagggcgaagctgacagcacggactgtcagtatgaggaggcaccagtcgcagagcccccgcgatgcgtgccgccaccgacgctgcacagagcacggtcatgcggcgctactggcgcgcgaatggggttgagcccctaccctcatggactgatgtcatgtaggggattgcccctgagaagcgccggaggaccccgtcggaacttgctacacgcagcgagagtaagcggcatatatctgtggtgttctctgaagcatgcccgctcaggcgagggctacgctagccgcgctactacgccgagagaactgcccgacactagtcagccgatgcatggctctctctacagccctcgttctgtggaatctcctgatatgcgagacacatattcgtag

SEQ ID NO: 134 - DNA, 583 bp, Homo sapiens
  SIMILAR (94)..(174): 551254mologous to Ovis aries T-cell receptor alpha chain variable region,accession number U78035,Smith-Waterman Score=69.
atgggccttagatgcgactctgagacttcctggcttcaggtgagattcagcacaataccagctgtggtggctacagggacagacttcttctgcccaagaaaagtggaggaaaaagtaaagaggactctatcatgcacctcaggtaccagctcagccacagagagcatcaagtgggctcttggggcccccgattctaggacttggctcttggatggcatttctggacctgccctgggtcagaggggagcccactgccctcaaagacacagacaaacatctacaagtatcaagaccatccaggaaaacatgacctcatcaaataaactaaataaagcaccagggaccaatcctggagaaacagagatatgtgacttttcagacagagaaatcaaaatggctgtgctgaggaaagtcaaagaaattcaagataacacagagaaggaattcagaatcctatctgattagcttaacaaagagattgaaataattacaaagaatcaagcagaaattctggagctgaaaaatgcaactgccatattgaaaaatgcatcaaagtccattaatagcaggtgtgatcaagctg

SEQ ID NO: 135 - DNA, 502 bp, Homo sapiens
  SIMILAR (13)..(2082): 761254mologous to Rattus norvegicus dendrin,accession number X96589,Smith-Waterman Score=2703.
agcagttgcagggaccagtgttccatgggcacacgttcggtcatgtgggctcaggagtcacacagacctgaattcctattacagctcagaggagctgtgcgtccttgagagaatgattgaagcacatggggttgaaaagcagcgcatacaacagaagttgcacaaagccgtccttgtcatcttccacacaggaggacagagaacaaaaacgtcccaaccaatatggaatgtgaacctcagagagggtaggcaacttggcggaaaacagaagaaacagatccacttggaccccaagcctggcctccttccatcaggccacccaatcctgaatttgaaacacagtgaattgcatcatgctccgcagtcttcatcatggaagagggagggactggaccttgaagaaagggtagaatttgggcagatcaagaagaatgcagggacacttcagaagaggagaggatgcgagccaaggcatggagacacaaacattggggacatattt

SEQ ID NO: 136 - DNA, 434 bp, Homo sapiens
  SIMILAR (15)..(212): 1001254mologous to Homo sapiens dJ20N2.1 (novel protein similar to yeast and bacterial cytosine deaminase),accession number AL031320,Smith-Waterman Score=351.
  misc_feature (1)...(434): n = a,t,c or g
gcgtggtggaattcggcaagagtccctctgaagtatttgaacacactgtgttgtatgtcactgtggagccgtgcattatgtgtgcagctgctctccgcctgatgaaaatcccgctggttgtatatggctgtcagaatgaacgatttggtggttgtggctctgttctaaatattgcctctgctgacctaccaaacactgggagaccatttcagaatcacctggaggcttctgtgcctgactctgctcagtccctgccccagaccatctgaatcagaaggcagggggccaacagtgctgtgtttccagagagttccaactggttctcctgagcagcaatggttgagaaccactgctctcatcccactgtatccctggatatcgggctgaggaagcagtggaaatgttaaagaccttctacaaacaagaaaatccan

SEQ ID NO: 137 - DNA, 575 bp, Homo sapiens
  SIMILAR (299)..(189): 971254mologous to Homo sapiens dJ20N2.1 (novel protein similar to yeast and bacterial cytosine deaminase),accession number AL031320,Smith-Waterman Score=195.
  misc_feature (1)...(575): n = a,t,c or g
cattgtcagacttctaaaaagtgctaatttgttcccttaacagagcaaatgatgagagaccccattttcctgcagattaaaaacaatatataaacatatgattcaacgatgtcaacagctttcagtctatgaatcttgtccaggtcactttgggtcacttggttctttcatcagaacatgttcaagatctgctgacattcctttttccgaactttcgattttggtgcatttggattttcttgtttgtagaaggtctttaacatttccactgcttcctcagcccgatatccagggatacagtgggatgagagcagtggttctcaaccattgctgctcaggagaaccagttggaactctctggaaacacagcactgttggccccctgccttctgattcagatggtctggggcagggactgagcagagtcaggcacagaagcctccaggtgattctaacgggcagtccgggatgagaactgctgagttacaggcctcgaaggaaactgcaccgccctgaaatggtctcccagtgtttggtaggtcagcagaggcaatatttagaacagagccncaacc

SEQ ID NO: 138 - DNA, 758 bp, Homo sapiens
  SIMILAR (259)..(113): 381254mologous to Synechococcus sp. PCC 7942 electron transfer protein,accession number AF118842,Smith-Waterman Score=71.
cggactgcccgttagaatcacctggaggcttctgtgcctgactctgctcagtccctgccccagaccatctgaatcagaaggcagggggccaacagtgctgtgtttccagagagttccaactggttctcctgagcagcaatggttgagaaccactgctctcatcccacgtaagaggagagggctctgagtgtgcgagtggagtggagggggacctctggggagctccagcacttaacacagcaggaagcagggggcagctgtgacgggactggctggcagtggttaggatggtaaaatgcctgcttggtcgggtaacatactgagaggatttgagatgagcaagataattggggctcatcgtggcattgtggctgatgtaatcaatgtcctgatctgtttcagcagcttctgggggccacaacaaagacacattgatgaagaccctctctgggccccagaagaagattgaggacaaagcaccagtagcgcagattggggtgaagaaaattatagaggtaggaggcaaaccccaggtaagtaccgtaactggagtcacagttggctagaacatcaagataagaaggtgagaagtggtggccgtgccctgggggccctgaaaggatgctagtttgtcttgcagagccaatgggaaattgacacgttgcctgagctgtaatgtgggcttcagcctccttgcccacctgagaccaggcgttagcatttttggtagaaatgttcagtagttttgttcggggcat

SEQ ID NO: 139 - DNA, 487 bp, Homo sapiens
  SIMILAR (3476)..(4423): 591254mologous to Homo sapiens Human secreted protein clone dd119_4 protein sequence SEQ ID NO:108,accession number Y53051,Smith-Waterman Score=845.
aaaccctggcgctccagcagtttctcagcttcctgtgcggttttcttgatctgtccccatgttatggggattgcacccacacggttcgttcatctccatgaggtagaactttccactgataatgagaaacaggccccttctaatagaaggcacagagaaagcaaatggaggcttctcaaaccttcaatttgcactgtacaggtgggtccgctagatgctgtggctcatgatagatcttcagatgtttggtgggcacccacacaggcacctgattgtcacctggagagacacaagcaaatcttcttccccatataattatctttcctttttcccagctctttgtatgtgcattcctccaccatgtatcttgtccagcctttttattttccttttgtcctgttaggtgttgtttcactgcagttatgggttgatctttttgtaaatttaaaaattttaatgttaataaagctaaatgcaattaaaaaaa

SEQ ID NO: 140 - DNA, 852 bp, Homo sapiens
  SIMILAR (103)..(726): 981254mologous to Cloning vector pZC320 SopA,accession number U26464,Smith-Waterman Score=1085.
  misc_feature (1)...(852): n = a,t,c or g
atgctaaacttacaacctggattcccggagcaggccctgatgggatccataaacatgttaaagtttggtcaaggaaagtccctaggatccccatctggctctgaagggctacgtgttttgctcgtggaaggtaacgacccccagggaacagcctcaatgtatcacggatgggtaccagatcttcatattcatgcagaagacactctcctgcctttctatcttggggaaaaggacgatgtcacttatgcaataaagcccacttgctggccggggcttgacattattccttcctgtctggctctgcaccgtattgaaactgagttaatgggcaaatttgatgaaggtaaactgcccaccgatccacacctgatgctccgactggccattgaaactgttgctcatgactatgatgtcatagttattgacagcgcgcctaacctgggtatcggcacgattaatgtcgtatgtgctgctgatgtgctgattgttcccacgcctgctgagttgtttgactacacctccgcactgcagtttttcgatatgcttcgtgatctgctcaagaacgttgatcttaaagggttcgagcctgatgtacgtattttgcttaccaaatacagcantagtaatggctctcagtccccgtggatggaggagcaaattcgggatgcctggggaagcatggttctaaaaaatgttgtacgtgaaacggatgaaagtggtaaagggatggcggctgcagccatgtcaactcaaattcagcctgtggggcacaacccaacattaaactcccaaaagtggcaccttgtgcctatgaccaaggatggtgggttccctccaaggcaagtggcatga

SEQ ID NO: 141 - DNA, 1151 bp, Homo sapiens
  SIMILAR (534)..(749): 561254mologous to Baboon endogenous virus strain M7 gag-pol precursor polyprotein,accession number D10032,Smith-Waterman Score= 212.
atgggtccctccagtctcctgttccgtggtcatacacatcttgagggcatcctcacggttcattcatctcctgcaaaaatacaagcattccctcacccatacattagtaaatctactgaaacagaagcaaaaacttgtggctgtagctgggaggctactgataatgagaaacaggccccttctaagagaaggcacaaggaaagcaaatcgaggcttttcaaaccttcaattcgcactgtacagacattcgggtgtcctttgacgatgcatccttcactttcacgtgctcttgcattccttcaccgaggtctttgtcgccccacattgagcagccaggaatgttggtgtgatcagacccaacaccaggtcgtgtgggtgacaaagtccggtggagtcaaaggattgagaaaaagacagtttgagagagaaaggtgggacaccaggggagccatcacaatcatggaggctacgaaggccctgagctctgggagcccacgctatttattggtaatccaacaaagaaacatatgggtccggagcagcttacactggctctggtattcgtgggtcctagagggctgattcttggaccttcaggtggctgcttagaagctagtagtgaaagcagtgggccagatttgtgggcagcatgggttgtgtgggtgattgcaataacagtggtggagcaacccactgggacccaagccatcccagatagaggtccagctggatggtggctgcagctatatcatcttgaacttggtttgagagtggggcacagcccagtgttaaactatcaaagtgatgccagctgtgggcctgtgacaagagaaatcagcatgggctgcttatgcatgccccttaggcaaacagcatgggcagaagctgtaaggagtgtgatccactcaattttcagtctcacagaagcccatagcagggcagtgggtattgtccaagggatggcggctgcagccatgtcaactcaaattcagcctgtggggcacaacccaacattaaactcccaaaagtggcaccttgggcctatgaccagggatggttgggagtacaatatggaatgtacacaggcagaagagcctgtccatgtggccactactaccactggcccatggcgagttctgccaggtttctga

SEQ ID NO: 142 - DNA, 414 bp, Homo sapiens
  SIMILAR (196)..(303): 361254mologous to Homo sapiens Extended human secreted protein sequence, SEQ ID NO. 446,accession number Y36061,Smith- Waterman Score=62.
atgttaactgctgaacttgagagtgattcacacagtgtttccactgagcacaccaagcccgatgaaattcaattctacaaacagaaatcacggatgggtgatggaggtgatgagaagttacttgctggtgtcattgtctttgcctcacaaaacccagtggggtatgaccaggacaggattgaggaatcacaggggattcagtgggcagagtccctgttgtggtgtgttggccgaagttcacatgtgggcacggggctgaggtctgagatgagctggggtctgatatctgcaagcaggcgaggagcacctgaaagggaagagacaacagtggccaatgagaaggcagtttctgtggacctggatttctcttcaaattctaacttcctagctgagtattttgagtggagggtctag

SEQ ID NO: 143 - DNA, 962 bp, Homo sapiens
  SIMILAR (118)..(5): 441254mologous to Homo sapiens Human apolipoprotein E mutant protein fragment 3,accession number Y20287,Smith-Waterman Score=73.
atgcaagccttggaaccccagccaggcctgcatgagtactctcagacagttgcaaagcagttctactccccttaccttggggtcgacacctaccctcactatgcccttgatcagcaggaagaagttagagcagtctttgctctttttccatcttcaattgccaacatcttgaggcccagtcccaaggctcaagaccacttgcaccagcagcgtgcatcagcaggacagcagaagcaggacgagagctgccaggaagacacctaccctggccggaagacacctactctggcaggaagacatgtacccctgaagattgagaaagaggccgtctgggcatttcaaggaaatcacttctcttctaacaacaagcagccagaaagagcagacagtaaaacacagataagacagctcaggcacagaagaatctggagcaggagcctcagtctcctatcaaaaggagaagaacctgaagaaaacacttctcttccttctctctgcctaggggcagtgaccttggattcaaccaccatcatcccttccagacaccagaggggggagtcccacaaggcagaaggtgcccctgtgacccatccacttctcttccatgttctttacctccttgctcaggaagccataaagttgagctgagtggaaggtgaatttcattgcaaagtttacacaggctctgctgacaggttcatgaaaacactactgaatatgttacataccaccaaggctcacagcacatcctgtgttggaagtgatacttttccattaccagtaaacctccttttgtcctaggagctcactgaacagctaaaatcaggtgatatttttatgtggaacatgcaacgtattaagtccttttgctcagtgacccaaaaaggaactaaacggtacccagactagaaatcaatgtcaaattattcaaataaattccacttaaagaaaaaaaaaaaaaa

SEQ ID NO: 144 - DNA, 403 bp, Homo sapiens
  SIMILAR (275)..(225): 471254mologous to Homo sapiens Human gene 43-encoded protein fragment, SEQ ID NO:361,accession number Y86446,Smith-Waterman Score=39.
  misc_feature (1)...(403): n = a,t,c or g
cnnnnnnnnnnntataaagcttggtttttttcacaaaaaaataaaaccttttgggaaaaaaaaactcccccttttgttttaaaaaaaacaatgcnnnnnnnnnnnnnnnnaaaggaaaaactcttgcatgctgagacaaacctatgtgtaatgggagagaacagaccaaaatgtgggcagagtcttaggtcctagctaatggcagagccagggttctagggggtcagctgtcccgggccaggtgatctgagggctgacctgtttcttcctaaccatcagaaccaaaaccagtttgacctaaccacaaccactttgacagtcttgacaaggtatggcatgggcttggcctggtgtggcaaagccatcgacataacaagatgaaaaactgagtccactgaacagc

SEQ ID NO: 145 - DNA, 730 bp, Homo sapiens
  SIMILAR (687)..(421): 341254mologous to Saccharomyces cerevisiae ORF YNL195c,accession number Z71470,Smith-Waterman Score=75.
  misc_feature (1)...(730): n = a,t,c or g
ccctgggaaacggaggtggtccccccctccaaaattaaaaaagaaaattttaaggcttggtttttttaccaaaaaaaataaaccccctgggaaaaaaagaaccccccttttattttaaaaaaaaccctggcnnnnnnnnnnnnnnnnnnnnnnnnnnnaaaggaaaaacttcttgcatggctgagacaaaaccctatgtgtaatgggagagaacagaccaaaatgtgggcagagtcttaggtcctagctaatggcagagccaggcgttctagggggtcagctgtcccgggccaggtgatctgagggctgacctgtttcttccctaaccatcagaaccaaaaccagtttgacctaaccacaaccactttgacagtcttgacaaggtatgggcatgggcttggcctgggtgtgggcaaagccatccgacattacaagatgaagaactgagtccactgaacagcctgggtgaccagaagagcctgcccctcactgctggggccctcccggtcttcagacacccaggctctcacattctactgtgtgcttctaagatctctcttcatgttcctctattctggagggcctgtgcatttgaaccagagatctgtgcaggccctagaatcaaaaggggccagggctgtgtgttctgggatcctccatttccatccccaggagctgagaaaatgcaacataaccccacattgagcaaatgacaagacccattattctt

SEQ ID NO: 146 - DNA, 415 bp, Homo sapiens
gtttttttcattcaagagaattaaatcgtttattgattacacatgataatggatacacaagcttcattcccatctataattttatctggtaccattattcaatttagatatattgcataggatgtgccaacaaagaacctggcatcaccctgaaggaattctaacttcacactgttggggaaatttaccaagatggcttaagagtagactaactttacacagcacattaaaaagacatttattcagcgtcacgatcagactgttacatttagcaatcaacagcatggggtgcaaaaaaaaaaatctacattaaaaccctttgttggaatgctttacactttccacagaacagaaactaaaataacctgttatacaattagtcacaaatacagtcctcgagttttttgcccataca

SEQ ID NO: 147 - DNA, 2052 bp, Homo sapiens
  SIMILAR (36)..(173): 391254mologous to Homo sapiens Amino acid sequence of a human secreted peptide,accession number Y10927,Smith-Waterman Score=60.
ctattccctggcagagctttgaacttgaattgtgagagaagcattcaacattattatcagggggagtgggtaaggaaagtccaaatctctgccagtcccaaatccatacaggtgtcatttcattcaagagaattaaatcggttattggattacacattgataatggatgatacacaaggcttcattccccatctataattttaatctggtaccattattcaaatttaggatataattgccatgggatgtgcccaaacaatccacttttaataaccaataattccatgattttcgcttggggtaatccccttttaatgggtgaaacttcaggtcacaacagtaactatcagttcgaactacacccaggggtttcccgaaagaacaatgggcttcctcccaccccaagcagggttggtataataaaatccccaaataggaaccggggcatcacccctgaaaggaatttcctaacttccacactgttggggggaaattttacccaagatgggcttaaggagtaggactaacttttacacaggcaccatttaaaaaaaaggacatttatttcaggcgtcacgatcaggacttgttacatttaggcaatcaaacaggcatgggggtgcaaaaaaaaaaaaaaaaatctacattaaaaaccctttggttggaaatgctttacaactttcccaccagaaacagaaaacttaaaataacctggttatacaattaggtcacaaaatacaggtcctcggagtttttttgcccatacaccatgagtatttggtctaaatacatgttcttctttggtagcagctaaggccctggcacccactgtgtctggggcgagtttcacaaaatctggttgtaaacctgtaggcttccctggtcacttctctggctcttcatcttctggctaaggctttggtttcctaattaaaatctttctggccactggccataagctaactgggtggctggctgggaaccggccatagcccaccttgtggtttcgtggtttttgcaaaagtattgggcctggcaccggccatagggggccagaggcttctgccctccaaaaatttcctccccttcatggggtccaaaattttgaagaactgatttgttggtattttcccaaaaatcattggtagcttccaccacctcctccaaaattgcttccatcattacccaaatccattatagccatcccccactgccaccatatccacccaccaccacggggtgccacccaaagccaccacgaaccactgaagtttcctccacgaccgaagttgtcattcccaccgaaaccacctccacgaccaccaccaaagtttccagaaccacttcgacctctttggctggatgaagcactagccatctcttgctttgacagggcttttctaacttcacagttgtgggccattcacaggatggcatttctgaatgacagtcttatccacggagtcatggtcgtcaaaagttacaaaggcaaagccccttttcttgccactgcctcggtcagtcatgatttcagtcacttcagtttttccaaactgttcaaaataatctcttcaaaataatctcttaggtgatgttcttcagtgtcttctttaatgccaccaacaaatatctttttcacagttaagtgggcacctggtctttgagaatcttctctggagacagctctctttggttccacaactcttccatccaccttgtgtggccttgcattcatagctgcatccacctcctccacagtggcatatgtgacaaacccaaagcccctagagcgcttggtgtttggatctctcattaccacacagtccgtgagcgttccccattgctcaaaatggctcctcaggctctcatcagttgtttcaaagctcaaccctccaatgaagagcttcctcagctgttcgggctctttaggagactctgacttagacatgacggcagggtgaagagagactttaacgatgcttcttcggcggcgtccacgggcagaaaggagcaagctgacgaacgtatctgccagcctaccttcgccctctc

SEQ ID NO: 148 - DNA, 255 bp, Homo sapiens
  SIMILAR (225)..(1): 271254mologous to Caenorhabditis elegans T03F7.3,accession number Z74041,Smith-Waterman Score=75.
agtggtcactaaccaaaatggaaattcagaaataacagataaagaatttaaaacatggattacaaggaagctcaatgagatccaagacaaggttaaaaacctgcacaaagaaacttctaaagcaatccagaaaaggaagacataggagagatacaactgctttgtcgaggacccaagggaaaaccgagccgtggctgtctgagtcttatcaaaggaaaaacggtaacagtacttttattttcttttaatgagtaa

SEQ ID NO: 149 - DNA, 624 bp, Homo sapiens
atggacggcttcatcagaagttgtcagcgaggagcatggacggcttcatcagaagttgacgtgacgcttaatttgcccatcacattcggttggatgaggctaggaagaatgtccaggttggagaacatcactttggaaaagaatggagatgagaaggagcacggctcaaagttccaggaactgtcaatatttaccagccttggggtgggagtagcagcgtgggagggggcaggaaacagagcagggccagcctctgaagagcctcgagtgttaagtaccatttgggaatttgttctggggaaacagaaggccactgaagagtttaatgaaagaagtggcattagctggcaagcttgtggagaaatggttagcagggctactgggttagcagggagagttgctgggggtattcggatagtcccggttgggagctctgaggcctttaaacagatcactgggatgaaagtggctacagtcagcccaatgatgatcattactcagaagatcactagtttggcttgcgaaattcatgatgaagatgatttaataccttctctcatcccatctgccgcacatcctctccactcaatcatcaataagataaacagaagctgctgctgctaa

SEQ ID NO: 150 - DNA, 688 bp, Homo sapiens
  SIMILAR (624)..(463): 371254mologous to Heliocidaris erythrogramma HEHBOX7,accession number U31564,Smith-Waterman Score=99.
acctttttctaggggctctctgtctaatctcataattctgagtaatgagacctggttttatgttgggttgttttgttttaacagtaagctaacagaaaatcatttagcctcactcggctcagagctgccagactgcatctaatgctgagattttgcaaagtcctgggggtcaggaagtagtgtccgatccccttaaacaaagcattagcccctctctgttatgcccttcagggttacagaccccacctcattagcacaaggagatgttagtgtcttttaaaggccaaagtagtttctttattctgggagagtgttttacttttactccagcaggaaaatgccctgccttgacctaagccctgtgtaccttgaacccagcactttttacatcctgagccacggcaatgtggaatgatagccacagtttattacagttcactattaagggaagttatttcttatatttcatgttgagtttttaagaaaacacagagaactagccagcaacttgcattttctttttcctcctagaccctgactaaagcttgaaatgctacatttccaaggtgaagatgtgtgggcacatgtttatggcagattgaaaaggatctcattccatgggaaaaaaaaaaatcctgtcttgttcataaattgacaatgtcaataaattgaaatatggttcactgtt

SEQ ID NO: 151 - DNA, 517 bp, Homo sapiens
  SIMILAR (127)..(261): 641254mologous to Homo sapiens dJ543J19.6 (ATP synthase, H+ transporting, mitochondrial F1 complex, epsilon subunit),accession number AL109840,Smith-Waterman Score=126.
  misc_feature (1)...(517): n = a,t,c or g
gtggtctgatctttcctgcggctgaacccgccccgctgaagccgaccatttgcccggcgtcttggccgattccggcccccgaccgacttccgctttcgctaccagcatgggtggcctactggagacagrgctggactcagctacatccgatactcccagatttgtgccaaaagcagtgagagatgcactgaaagacagaattcaaagcaaatgctgcagaagacttctggcagcaacgtaaaaattgtggaagtaaagaagggataatctaccctgactaaaagcttgaaatgctaccatttccaaggtgaaagatgttttgggcacactgttatgggcagatttggaaaaggatctcattccatgggaaaaaaaaaaaaatcctgttcttgttcataaaattgacaatgtcaataaatttgaaatatggttcnnnnnnnnnnnnnnggggcgccctttttaaagagtaccttgggggcccaacttttcagcgttgattgggaggtgatattctttt

SEQ ID NO: 152 - DNA, 554 bp, Homo sapiens
  SIMILAR (548)..(264): 361254mologous to Zea mays extensin-like protein,accession number AF159297,Smith-Waterman Score=105.
gagcggccgcccttttttttttttttttcatgatttgaaatttttattttctgaaatgaaacaattgtacattgtacaaaccatatctactgatggaataaataagtgaaaaattatactgctgtacaacacaccaaaaaaaaaaaaaaaattcttgaaagggggaaaaatttaggccaacggtgaaaaaaggtctttctggcctctaaccagggttcttgggcgataatgaacattccaaacccatgacaccgtttgctaatggggagggtcaccaccctagagggaatcgggtccacagcccttccgggttgtgggtgtaaggtgccagcactttgtggggaatgtgtaggcccgcagctttcccccgactttcacgttttgggggggggaattagggtttgccctgggagccctttgaggccacggggcctggatgttccacggaaggcttttgctcgggatcccccgccccctggctcgaagctgaaaggtcttagattctgtggtgggggggagggcgaggggtgcagggtgggtggggggcaccgctc

SEQ ID NO: 153 - DNA, 282 bp, Homo sapiens
  SIMILAR (198)..(76): 901254mologous to Homo sapiens Human secreted protein, SEQ ID NO: 7420,accession number G03339,Smith-Waterman Score=186.
atgtgggagcaactttggaactgggtaacaggcagaggttggaacagtttggagggctcagaagaagacagaaaaatgtgggaaagtttggaacttcctagagacttgttcaatggctttgaccaaaatgctgataattatatggacgatgaaatccaggctgatgtggtctcagatggagatgaggaacttattgggaactggagcaaagatgactcttgttatgttttagcccctgccctagagatctgtggagcattgaacttgagagtgatgatttag

SEQ ID NO: 154 - DNA, 774 bp, Homo sapiens
  SIMILAR (211)..(315): 611254mologous to Homo sapiens Human secreted protein, SEQ ID NO: 6395,accession number G02314,Smith-Waterman Score=104.
atgcagaacaacgtgtattttcatggattactgacggaaatacacaatgttacaagagcccctttgacaacagtttggttgcttcttataaagcagtgtgaaaacaaactatacaataaattggtatcagtagagtggggcacggctgaaaagatacctgaaaatgtggaagcgactttggaactgggtaacaggcagaggtcgaacagtttggagggcttagaagaagacaggaaaatggacttgctgaatggctttgacaaaaatgctgatagtgataagaacaataaggtccaggttgaggtagtctcagatggagatgaggaacttgctggggactggagcaaagcgcagagaacggaggtggagatgggctccggtgctcccgctgaacagggacggacttacctgcaaccctcaattgcacgattcaaccccacacttctggctgggatgctggtcacatctaaccctgacagagtcattcctagaccccaggactttggaggtgggagtgaggaagaaccagtctctgtaggtgactgtaaatctgaacgaagaacctgggcactgtgggccaccatttcccaccagccaggcagaataagtgtgctgggtgggatgcgtgaagagaggatggagaaatcagaatgtaaagatgtgaagaggttgctcccagggctcccagtaacaatatttgtatgggggattgtggtggcagctgagtctcttaaagctctgcttaaatcagataagccactgaaaagtttctga

SEQ ID NO: 155 - DNA, 545 bp, Homo sapiens
  SIMILAR (1180)..(2541): 961254mologous to Homo sapiens putative p150,accession number U93564,Smith-Waterman Score=2308.
ccacttttgcttcttcctcattttctcttgctgccaccatgtaagaagtgtctttttgcctcccaccatgattctgaggcctccccagcccatgtggaactttaagtccaattacagttctttttctttacacctctttttcttctcagacttgagtatgtctttatcagcagggtgaaagcagactaatacagtaaattgataccagtggagtgaggtgctccttaaaaaagtacccaaaaatgtggaagcgactttggaactgggtaacaggcagaggttggaacagtttggaaggctcagaagaagacaggaaaatgtgggaaagtttggaacctcctagagacttgttgaatggctttgcccaaaatgctgataatgatatagacaatgaaatccaggctgaggtggtctcagatggagatgaggaacttgttggcaattggagtagaggtgactcttgttgtgttttagcaaagagactggcagcatttgcccctgccctagagatttctggaactttgaacttgagagagatgatttag

SEQ ID NO: 156 - DNA, 691 bp, Homo sapiens
  SIMILAR (114)..(332): 381254mologous to Homo sapiens Human normal ovarian tissue derived protein 40,accession number Y59763,Smith-Waterman Score=82.
  misc_feature (1)...(691): n = a,t,c or g
tttttttttttttttttttcaaatccattttaatcctttaaataaccttgtagttaatttcaaaatatgagaaaaaaaaaagtccaaatgtgttcccctttatggggtgattgcccacccatggattgccctccacaccaagccataaatccaatccgccaccgaggagactcggatgcccaaaagagtatggctcggcaaaaaaggcatngcatcagggcctcaccagtcccgaagagtttggtttacggagtctccgagggggtaacaggtgggcagaaaagacatcaggtttaagggaccctcagagcgacagggcgtcggttgctggggtcatgaggcaccttgaaggcgtttcttgatgggtgatttccggtgtcggagagttatttggtcatctgggggagaaccggagcagggatggggcttgagccagggtctgttggtcccatccggggtcaaattttctttcaggcgtatagacttcgatctccccgctcctttgaggtaatactgggagaaacatgattactcttaagccagaggttccaatttggtccgcagctccgtctgtcgctgtctgccgaatatgatcttttagaaggtcatttgcatttaaaattttctggccaataaagccctttatatgatatgtgttgttgctcttgtccacaaccacagtcatgttcat

SEQ ID NO: 157 - DNA, 371 bp, Homo sapiens
gaatcgttgtacatttcattggctttggcagaatggcatgcaccgtcgcgcgtctctgtcttcatcatcccatggcattctcccatgaagctttaaggaattctaatgcttcaagggcatgcatgacgtggcaaagaagattgagatggagatttctccaatctgtgggtctccaagccccgggagagcggtagaatcctttatacacttcacagtctcacagttttatttctctcacagctgacgtgataaggatgctgctgagggaccagcatgctgcctcatcccaaatatctgccatggcttctcccaggggccagggagctgggtggcagagtcccaggcttttctctcagatcttttctctgaag

SEQ ID NO: 158 - DNA, 378 bp, Homo sapiens
  SIMILAR (1645)..(2496): 721254mologous to multiple sclerosis associated retrovirus polyprotein,accession number AF009668,Smith-Waterman Score=1053.
ccgccctagctgccgtcgccgccgccggggctctatggtctctccctagagctttgccgttggaggcggctgctgcggtcttgtgagtttgaccagcgtcgagcggcagcaacatggaggaattcgactccgaagacttctctacgtcggaggaggacgaggactacgtgccgtcgggaagagaagacaaggtggcctctcattagaagaagaggaagaggaggatgccaattcagaatctgagggaagcagtagtgaggaggaagatgacgctgcagagcaggaaaaaggcattggatcagaggatgccaggaaaaagaaggaggacgaactctgggccagcttcctcaatgatgtgggaccaaaatcaaaagtgcc

SEQ ID NO: 159 - DNA, 1263 bp, Homo sapiens
  SIMILAR (284)..(1765): 881254mologous to Homo sapiens putative p150,accession number U93564,Smith-Waterman Score=2244.
agcgctgtcgggggccgccctagctgccgtcgccgccgccggggctctatggtctctccctagagctttgccgttggaggcggctgctgcggtcttgtgagtttgaccagcgtcgagcggcagcaacatggaggaattcgactccgaagacttctctacgtcggaggaggacgaggactacgtgccgtcgggtggagagtatagtgaagatgatgtaaatgaattagtgaaggaagatgaagtggatggtgaagagcagacacagaaaacccaagggaaaaaaagaaaggcccagagcattccagccaggaagagaagacaaggtggcctctcattagaagaagaggaagaggaggatgccaattcagaatctgagggaagcagtagtgaggaggaagatgacgctgcagagcaggaaaaaggcattggatcagaggatgccaggaaaaagaaggaggacaaactctgggccagcttgctcaatgatgtgggaaccaaaatcaaaagtgcccccaagtacacaagttaagaaaggagaagatactgaagaaacaagtgcaagtgaattgttggtaaaagcagaagagctagagaaacctaaagaaacagaaaaagttaaaatcaccaaggtgtttgattttgctggtgaagaagtaagggtaactaaggaagtggatgctacatctaaagaggccaaatccttcttcaagcagaatgagaaagaaaaaccacaggctaatgttccttcagctctgccatcactccctgccgggtcagggttaaaaagatcaagtggcatgagcagccttttggggaaaattggtgccaagaagcagaaaatgagcacccttgagaagtccaaactggactgggagagcttcaaggaggaagaggggattggtgaagaactggccatccataatcgagggaaagaggggtacattgaacggaaagccttcctcgaccgagtggatcacaggcagtttgaaattgagcgagatctcaggctgagcaaaatgaaaccttgatgttacgggctaaatcaagagcagcttaatcctgtttacaatgtgagctttttgtgcgtctgtgaaatgttttacagtgtttctcatcatctgtttcccagcaaggtcttttttttttctacattgaagttctgtctatgtatcttaatcacaaatggtttcattcactttacttttaaaaatttgtccttaaatgaataaataaaataaaagttggtcctgtgagaggataatg

SEQ ID NO: 160 - DNA, 710 bp, Homo sapiens
ggctcagcgaccttaacaccccagcccaccaagcagctgtgaccacagacaattctttgaggaggatactttctttacttatggaacttaaagtagcagcccagaaaaacttcattctgaaaaggcttttctggaaggaccctccctcgacagtggggattacaattcaagatgagatttgggtgggaacacagaaccagaacatatcaggctaccatctggataaggtgggcactgggaaaatgaatccagatgtagatgctcatggaaaaggcacagtgcccaaaggtgagagtgatctctacataagaattacttttgtggccagtattgtgaaacaagtggtgaggggtctttcagcttcatttcagctgctaagtccctgccaagcagttctgttgtaccagcaattttacatcctcaagagctgtctgcggcacagcaggactctagctgagtatattaggaataactacagagaagaattcagtaccctagaaacagaccttgttatcaaaagcagattgaaaaaatatgcagacaaggcattaatgaaaccttacggatttacaccatatcaagagaagtctccaaaggcagaaatgcacatcaagcctatttcttctgactcatttcctctggagaagcagcttagaataattcaggcaaaaggccacgaaataattgcattggtaacaggaacctggtag

SEQ ID NO: 161 - DNA, 1090 bp, Homo sapiens
  SIMILAR (976)..(1800): 821254mologous to Homo sapiens putative p150,accession number U93564,Smith-Waterman Score=1150.
atggtaggtgcaaagggtatacgcatcctgtggcctgggaagggggtgagaggaaggaaagaaaaaggagggtccctcatgaactttgcctgtgaagacgatgcactcagggaaggaaacatgattcctgcccatgggatcaggatcccgccacgtctgaacaccgttgtacagcttaacagtccctcatctgtttttcattttggccctttcagcaaccctgtgagggactcagggtacaataaacaaggagacagatttggtgatggcaaaccttacccaggcccatccgcctcttccctgggcagcattgcagaaactccttcacccttctctcaggccccatcccccctgcagcctccccagaactacagagggaagctgacacaagaaaggcttcatgaaaaggagcccttaaaagaccaaagaactgtgctggagaatgcagaagtttacagggctagagggcacctctggttggagagagtagaaggtcctggaagaagtcatcccttggtccccctcccctgcagtcgcccagtgcccaggcttcccaaccatggggcaggcaatcagccatcaccagctaattatggagcagctgagttgatgagcgactcccaggcccagccaatgtttaacctggagcccacttcaccctattgcccaacacactcttggatcaagtccttgtcacacagttacctggatcccagggagcacacagaatcctctgaagcaggtatcagcaccctcacttacaatggagggaacaaatgcagaagagttatatggctggtagatcccaccacctttgcgggttggccgatgacatcctctctggtggcagacatacccaaaaataccttttgccacaggcttgggactactatcctgtgaatgtcagcaagcctgtcctctacagggatccgtggagaagataaactctacaagaaacagaaaaatgtctacctgtctccagaaccatgcagactccctccccttcaggatctcctagcccctgatgaatgaacagcacttccaagatgcttgagacaccgggcacagctactatcagtcatggcgctcc

SEQ ID NO: 162 - DNA, 498 bp, Homo sapiens
  SIMILAR (1619)..(2155): 621254mologous to Homo sapiens p40,accession number U93573,Smith-Waterman Score=508.
actccacgcgcacgcatatatattaataaatctatatcccctcacacacacctccacgtgcacacgcacacacatcccccacgggcttctcggtgagtcttcacgctcgaaagcatctccatgtcaccactcgcacactgccacgtccgcacctgtgtaaatcattcgtggggggtcagaggactgcggggaggcgtttctcatcctcgctggggaaaggactcacctggttcccaaagccagtttgctcttcctctacttcctgccagagggtaagggattccaagagaaagacaaggtctttagggcggagaaggggaaatgactcagagaggaggcggccaatctgattaagatatgcccaattctagccctgagggacctcctggcttcctcccagtctcctcctgcaggccagctgttttaacagtaagtcagctcacttgcttctggtgctaccctaatcttaatcaatgggttccagcactgggattttat

SEQ ID NO: 163 - DNA, 503 bp, Homo sapiens
  SIMILAR (4)..(159): 281254mologous to Lycopersicon esculentum Metallothionein- like protein,accession number Z68309,Smith-Waterman Score=65.
atgggtgttaaatgtgattctggtgagggctcagacagagacaaacacagtgggattgctgtgtgctctcctccaagacactatggccaactgaagcccaaagccagctgagaggggagtctgggaactgcagggtgcatcatcaacccagtgaaatgcagaccagagcagaggaaggccaggatctgcacagctcattcgctttttatggacttactttccaaggaagaagatgttgtagttacaatgggcactgggttatgatgctggcaaagtcagaggttgcccttgacctcatcaaatttacattgcactgggaaagacagccattggctgcaagtgattttgtaacagctgtcgctgggattgcagaggtgcacaaggtaactgcaaacatggagtcaagtggcctgccttttgtgattacgtgctttgttccaagctctgccctggataccatggcttttgataaacgagagattatcctggcaattactatatga

SEQ ID NO: 164 - DNA, 2497 bp, Homo sapiens
  SIMILAR (202)..(639): 481254mologous to Homo sapiens copine III,accession number AF077226,Smith-Waterman Score=369.
ttccatcattctatatatgtgatggtgaaagatatgcctggaaaagttttgttttgaaaagtttattttctgcttcgtcttcagttggcaaaagctctcaattctttagcttccagtttcttttctctctttttctttgttaggtaattaaaggtatgtaaacaaattatctcatgtagcaggggattttcatgttgagaggaatcttccgtgtgagttgtttggtcacacaaataaccctttctcaattttaggagtttggattgtcaaatgtaggtttttctcaaagggggcatataactacatattgactgccaagaactatgactgtagcactaatcagcacacatagagccacacaattatttaatttctaactctctgtggtccctagaaaaattcccgttgatgtgcttaggttaaagttctgaagatacccgttgtacccttacttggaaagtttccaatcctaaagtttttatggaaatgccaataatatggtaatcagctagcaatatttctgtgatcaccaacaactctcagtttgatcttaaagtctgaataataaaacaaatcccagcagtaatacatttcttaaacctcacagtgcatgatatatcttttcattctgatcctgtgtttgcaaaaatatacacatgtatatcatagttcctcactttttattcatttgttttcctattacctgtagtaaatatattagttagtacatggaatttatagcatcagctacccccaggaacagcacctgacaggcgggggattttttttcaagttgttctacatttgcataaattatttctattattattcatgtatgttatttatttctgaatcacactagtcctgtgaaagtacaactgaaggcagaaagtgttaggattttgcatctaatgttcattatcatggtattgatggacctaagaaaataaaaattagactaagcccccaaataagctgcatgcatttgtaacatgattagtagatttgaatatatagatgtagtattttgggtatctaggtgttttatcattatgtaaaggaattaaagtaaaggactttgtagttgtttttattaaatatgcatatagtagagtgcaaaaatataggcaaaaataaaaactaaaggtagaaaagcattttagatatgccttaatttagaaactgtgccagggtggccctcgggaatagatgccagggcagagacccagtgcctggggtggtgcctcctcttgtctgccctcatggaaggaagcttccctcacgtggatgtagtgccctcgtagggtgtcatgtggaagtaagtgggaacacggcagtacctgttgaagaaggaagagcagtgtgaagaagtttttcctgtaagaagcagaactgtccagcttgttgccctttgaagcttcccaagaaccgtgtccagaatggaagaaagtcccaagttttccaatgccttcaggcaaccttagcctgtgtaccagaagcaatcccagtgtgggtaataaaaaagccaaggattgcccctgtaataaatttaattaataaaaataaaaaggggattttaaaccaaccccaacaatccccccaacaccctcaaaagccttgttgccattttttgggtatttgaaggtttttatcctgaaggttaaaagggcaagtgtttggtatagaagagcagtatgtgtttaagaaaaggaaaaatattgggttcgcgtagagtgcaaaattagaactagaaagttttatacggattatcattttggagatgtgttaaagtaggttttcactggtaaaatgtattagtgtttctgcattgccatagggcctggttaaaactttctcttaggtttcaggaagactgtcacatacaggagagctttttggcttctgacttataatagaaaatgttttgaaagtaaaaaaaaaaaaaaatctaatttggaaatttgacttgttagtttctgtgtttgaaatcatggttctagaaatgtagaaattgtgtatatcagatactcatctaggctgtgtgaaccagcccaagatgaccaacaatccccacacctctacatctctgtcccctgtatctcttcctttctaccactaaagtgttccctgctacccatcctgggcttgtccacatggtgctctccatcttcctccacatcatgggaccacaggtgtggcctgtctaggcctgggccaccacttcccaacttggacctaggccacattcatctaggaggatggggtcctggatgctggggcacagactgtgcttcatgggcacccattaggaaaatggcctctaggcattctttgtatggcatcttggattttttaaaccaagttcattgttacagaggcatttcagttttgggtgtgggtaccaaggaggaaaaattaatcaaggattattaaaccacattccagggctggctgttttctctccatcttacagggccacaatttttactgtattttt

SEQ ID NO: 165 - DNA, 444 bp, Homo sapiens
  SIMILAR (58)..(180): 1001254mologous to Homo sapiens Human protein clone HP10531,accession number Y94896,Smith-Waterman Score=221.
atgacccaaggccgcatcttccgaactcaaacagtgatagaacccaagtggtcctggggaggaatgatcaattggaatcgtctttttcctcctttacgtcagcgacaaaacgtaaactatcagggcggtcggcagtctgagccagcagcgccccctctagaagtttctgaggaacaggttctgctttccactttcctgcctaggaaactcagcttgtgcaacactgctcagctcttcccacaagacttctctgactcctcctggcagctggtggctctcctcgtggcccccaagctatgtcagtttcaccactgcaatgaatcagtgaatcaaatgcgtgccaaggatgtcacgcccttctacctgaaccccaagtctattcatggcattgtccagcccttctacctgaaccccaagtctatccgtggcattgttacaatgtag

SEQ ID NO: 166 - DNA, 721 bp, Homo sapiens
  SIMILAR (438)..(358): 421254mologous to Ovis aries metallothionein-Ia,accession number X04626,Smith-Waterman Score=57.
gagtagacgaatgttccgggagcatcaggagctctgcatccccagctggatgggcaacttctcatcttggacacttgaacccatcttctgttcttcataacccaccaatgaagccagaattgggatgggagccactctggacattcatagacagcacagaatggagctgcaggaccggcgcctgacgttctctcagaccgcacaaggtaggcgacagatactgcaacagcgaagactgatccattggaatcgtctttttcctccttttacgtcagcgacaaaacagtaaacttatcagggcggtcggcagtctgagccagcaggcgccccctctagaagtttctgaggaaacaggttcgccccggcttcatgggagatggggattttccagaggtgatgctttgggaaggccctgaggagctttcaaacaatgacctcaatgtcgccaccaacttcctgctgcagcactgatagtcccagggcaacattgggacccggaccggcagccgagttgacagtgcgttggtccccaccattcagatcagcccggggaccgagcatctctggtgctgatgttcttgtgggaagagggaggttccaccggactccctggcctcgggcggaagactgttgccgttttagtgtggagataagtttgccattacattagcatgtattttctatctatattttttattgggcattttccctaggttggagt

SEQ ID NO: 167 - DNA, 1318 bp, Homo sapiens
  SIMILAR (1074)..(850): 721254mologous to Homo sapiens eukaryotic initiation factor 5A,accession number S72024,Smith-Waterman Score=240.
  misc_feature (1)...(1318): n = a,t,c or g
gtcgaccaagacactccttgcttcaggccactccagacagcgtgtgctgaagggtgccctgggtggtcagaaacaagtgcatgaactttctctttgaagtgtttttgtccctgtttcctagagttcttggcattttacacgtctttctttctttttttttttttttcatattaaacttgtagttttattcaggtttgattttaacaaatgtgtcggggagagcagcccgcagggaagcggtaacagcccactggaagcaggggcctcccaagatgcctgaggagnggggcaggtcccctcccactctcctcctcttccctccccatctaaaggggttttggggagagacacatggcatggcgaggggggctggtcccccantcttttggggtgggtgctccagggtaaagggctataggcaacaaggggaccagaccaagggatgagtggggggagggcacaaggaccatttgccagaatccacccgctttctgattccatgattgaatttaaaaaaaaaaaaaaaaaaaaaaaaaaagactaaacccacaagcaagcacccacccccttctcccccaccagggctgtagtgtgaggggagaagaggagggcagcttcatcaaggccacagtttcgctcgctcctggccaagggagctaggtgaagggcaggggctccccgacagattgaggggggtgggaaaaccaaaataaaacgtcaaataaattgtgtaggaggagtccagcttaggaccgggccagagcccaggcccaggctcggggagggggccttttgaggtttcagaggatcactgttgccaaccaccgccacccctggggagccagttcttttgccatgggccttgattgcaacaagctgcctcctctgtcattggcagacagcacccgggatcaggatctcttctccacagtcgtacttctgctcaatctccttgccaaggtctccctcagggagacgaagaaggtcctctcgcacctccctgctgtcctggagcagtgataggtacccatcctggatgccaatcagctggaagtcattcccttttgatgttggggacatccatattatgagttgacgggcagatatcttcatatttcttcccagtaaagatgtcaataccaaccaggtggaccttgacgcggctgtgcttgccagtcttccaagcagacatctcaaagaccttacagggccagcctttgagcaccacgaagccagtgttacataatgctgagcactgcattgggaaggaggccgaggcccctgcatctcttgtctcgaagtccaaatcatctgccat

SEQ ID NO: 168 - DNA, 685 bp, Homo sapiens
  SIMILAR (325)..(134): 361254mologous to Ralstonia sp. CH34 hypothetical protein,accession number AJ001159,Smith-Waterman Score=86.
atgaggaggcgcttccttctgcctgtccatggcccacagcaaaggaatgtctgcttctgggggttggatgggggactgctggcagaactggaaaccttcttcagaaccaatcggaactcgaggcgcagcggctgggtattccaggagagcgcatgcgcagacgcatggccacagactgccggtcagtgtcagcaggcgggtccgcaggcccagaccaggccgccgacaccaataagctacaaggaggagctttaccgctgcctgtactactactgcctgcgctacttcccagcctgcggcgtagggcgcagcaagggcctgacgcttagcgagcaggcgctgcgcaccaagcgggctgtcgcctggagggcacgttcaggcagaagctcctcagtggccacaagtccgctagctccggctacagcccttgccgcacactcgcgtcacctgagcctgtgtaggatgccgaaggacctgttcaaagtattttctgtaactccaactgtaacttggttctaggaggagagaatccatgtttggtcaacagaacttttcgccgccacttaagtttactgcttcaatatcttttccttactaattgattgttaattaagtagtgtccaagtgagttagcctttttagggttgattaattaaaagagcagcaagaatggcattttaaaaaa

SEQ ID NO: 169 - DNA, 590 bp, Homo sapiens
  SIMILAR (339)..(764): 871254mologous to Homo sapiens similar to rat integral membrane glycoprotein; accession number Z21513,accession number D87002,Smith-Waterman Score=649.
atggtggtcaagattgggttcaactctgaatacagcaaaagcaacaaggtgtctatagcctatgagaagagtgagggggtcatgaatggagaattgctaagaggagacatcaaagggagaatttcaagccagtggatcctggcttgctgggctccgtgctggtgggatctgccgagcaagaccacttggctccctggcttcagccgcctttccaggggcatgaacagttctgtctcagtggtgtcccaggcgtcactggggtatgaaaaaaaactcctgcagctagctcagtgtctgcccaaacgaatgcccggttttgtgcgtgaaacccagggcccttgtggtgtaggcacctgagggaatcctctgggtctgtgggatgaagattgagaaaagcatagtatgtgagccaagtgcatgattcctcatggtacagtccctcacggcttccatgggctcagcaagggagttccctggccccttcccgtataagacgacgccccaatgtgctaaggatccgcctctgtagggtgcaccacctttataaccagtcccagtgagatgaggagcgtggacgcggcctcggtcat

SEQ ID NO: 170 - DNA, 757 bp, Homo sapiens
  SIMILAR (757)..(614): 581254mologous to Homo sapiens Human heterogeneous nuclear ribonucleoprotein H (hnRNP),accession number Y06233,Smith-Waterman Score=143.
  misc_feature (1)...(757): n = a,t,c or g
ttttttttttgcagnttttaaaaggaggatttatttgacaagtttcacttagcgcaatatacctaaaaggaaatcacaatacaatgaaagatttaaatcagggcctcagaatttcatacaaacaccaagaccaaaatcctaagtattggtattgcgtctcaaatttttcccattaacttaaaaaaaaaaaaagcttaaacttacgtgccttacaggttattaaatgaaactagaattaacaaacatgccaaaatgtttcacttttaatagtagacacagctcctatattgttttacaaaaaaataaaagcatgtctttcaacatgcatccaaaacagtgttcaatttaacgtggcaaagggcaacatttaacataattcaactgcttttacctaaatacgcttactgcttaagtacatcctataactaacttgagaaaagctggaacttaagtttaacagttatagtttactcagcttcactggtaccatcctagatgagtatttgatccaaaatacttgcgctttaggcttcataacaattctgatttccacttagagtaagcataaatcacaagcttgtatggcagaaactngtaacctgaagtttctatgcaatgtttgattgaaaatcactggagttttcctgtaaaacttgtcgtatccactcatgctgctctggccaccgtagccgccttcgtaacccccaactcacntgtgtttggntgggcccccgtagctggactggtttgacaagcc

SEQ ID NO: 171 - DNA, 3353 bp, Homo sapiens
  SIMILAR (774)..(1619): 661254mologous to Homo sapiens hnRNP H,accession number L22009,Smith-Waterman Score=866.
gcttgcggccgccgccatttcctttcctctacgctggctctcggcccgggcccccacggttcggggcgccgacagctgttgctcaggacagctttgggggtccggtcgccggacgcaggaggtgttggagtcgccggggtgggtgcatccgcccggtttttgctccgtgggggggcggtgcgggcccgggcgcgcctcggaggcgaaggacagcttaattggcgctctcagttctggtcctccccgctttgcagtttgtttcgacgccggaccgcgtaagagacgatgatgttgggcacggaaggtggagagggattcgtggtgaaggtccggggcttgccctggtcttgctcggccgatgaagtgcagaggtttttttctgactgcaaaattcaaaatggggctcaaggtattcgtttcatctacaccagagaaggcagaccaagtggcgaggcttttgtttgaacttgaatcagaagatgaagtcaaattggccctgaaaaaagacagagaaactatgggacacagatatgttgaagtattcaagtcaaacaacgttgaaatggattgggtgttgaagcatactggtccaaatagtcctgacacggccaatgatggctttgtacggcttagaggacttccctttggatgtagcaaggaagaaattgttcagttcttctcagggttggaaatcgtgccaaatgggataacattgccggtggacttccaggggaggagtacgggggaggccttcgtgcagtttgcttcacaggaaacccctgaaaaggctctaaagaaactctaggattttttttgggcacaggtatattgaaatctttaagagcagtagagctgaagttagaactcattatgatccaccacgaaagcttatggccatgcagcggccaggtccttatgacagacctggggctggtagagggtataacagcattggcagaggagctggctttgagaggatgaggcgtggtgcttatggtggaggctatggaggctatgatgattacaatggctataatgatggctatggatttgggtcagatagatttggaagagacctcaaatactggtttttcaggaagtgtctgatcacagatacggggatggtggctctactttccagagcacaacaggacactgtgtacacatgcggggattaccttacagagctacttgagaatgacatttataattttttttcaccgctcaaccctgtttagagtacacattgaaattggtcctgcatggcagagtaactggtgaagcagatgtcgagttcgcaactcatgaagatgctgtggcagcttatgtcaaaagacaaagcaaatatgcaacacagatatgtagaactcttcttgaattctacagcaggagcaaaccgtgggtgctttacgaacacccgatatgtagaactcttccttggattctacagcaggagcaagcggtggtgcttacaggtagccaaatgattgggaggcatgggcttgtcaaaccagtccagctacgggggcccagccagccagcagctgagtgggggttacggaggcggctacggtggccagagcagcatgagtggatacgaccaagttttacaggaaaacttccagtgatttttcaatcaaacattgcataggtaaccaaggagcagtgaacagcagctactacagtagttggaagcccgtgcatctatggggcgtgaacggaatggggagggttgtctagcatgtccagtatgagtggtggatggggaatgtaattgatcgatcctgatcactgactcttggtcaacccttttttttttttttttttttttctttaagaaaacttcagtttaacacgtttctgcaatacaagcttgtgatttatgcttactctaagtcggaaatcaggattgttatgaagacttaaggccccagtaatttttggaatacaatactcatcctaggatgtaacagtgaaagctgagtaaactataactgttaaaccttaagttcccagcttttcctccaagttaggttatagggatgtaccttaagccagtaagcgttatttagggtaaaaggcaggttggaatttatggttaaatggttggccccttggccacgttaaattgaaccactggttttgggatgccatgtttgaaaagaccatgccttttaatttttttggtaaaaccaatattaggagctgtgtcctacttattaaaaggtggaaccattttgggccatgtttggttaattctagtttcatttaataacctgtaagggcaccgtaagtttaagctttttttttttttttaagttaatgggaaaaattttgagacggcaatacccaatacttaggattttggtcttggtgtttgtatgaaattctgaggccttgatttaaatctttcattgtattgtgatttccttttaggtatattggcgctaagtggaaacttggtccaataaatcctccttttaaaaactgcactctgtcttggctgtgcttcagtgtcatgtggactgagtcttggtgctctgtgcccacctggggcctagggccacatctctggcttggcagttgaggctgttgcgtaaatgtcttcagtcttccctccagtgcaactgaagccaggcgtggccctgaagaggaaaggacattctataatccactttctgtctaagcccctgatgagtgggtagctgcgttctggccacatccatatgccctcatagcacctggttcctagggaggcactgtttcttccataaaaggggcctcacaggactgtcatcaaggggctctttccccgtctggccgcagccgggatttctgcatcctagctccgtgctccacctcttggcctctgcaggctgccctggggcctccaggcggtctccagcatctgctcactcaggcacactcccactttcaatcagttccctttggctgaagtaagcagagtgagcttctggtgcctgcaaccctagaccctgcctgagacactggccgaagtgctagctgaactggcaggcgcggaagaagggccaaatctgagtgagactaagacacttgttgacgctgatccttgtggagagacagaaggtgatggacagcgggcactgcgtcccacaggcctgaggaagcccttctccgtgcgggccaaagccctgattcttgaccagccctggggagcacatggactccattccacaggggaggcggctgaggctttgaaaggtggcccctcagagggctttctcagggcgaagcagcacctgtgatttatttgggcttagggactggggtgttccagagaagtcaaaggcatgaggtacttttctggcctg

SEQ ID NO: 172 - DNA, 646 bp, Homo sapiens
  SIMILAR (221)..(490): 311254mologous to Arabidopsis thaliana UVB-resistance protein UVR8,accession number AB007646,Smith-Waterman Score=102.
gccgccgaggcagccgcagacgcaaaccccgcgccgccccaccgaggcaggggcgcgaggcggcacccgacagcccgcgcccaaagaccaggcccgcaggggcgaagcgggcgccaacccaagggagacccagccacgagagagaggcaccacacaacgagaagatagaatacgactgcaaactggtgcccctgcaagtggccatcttcatcgagaagaccaaaaattgacagatgctgcctgtaccaaacgtggttgtgcaagatgtggccagtggcaccaaccacactctggttgtggactcccagaagcaagtcttctctggggctccagtggctatggctggctgggccatgcagagcagaaggatgagatggtcccccgcctggtgaagctgtttgacttttctgcacgtggggtgtcccagatctatgctggttatacctgcttctttgccatcagtgaagtgggtggtctgtttttctgggggtcaccaacacctcccatgaatctaccgtgtacccgaaagcagtgcaggacctctgtggctggagaatacgcagcctggcttgtggaaagagcagcatcactgtggccaccaatgagagcggggatctatagagtcgcgcagaaggctgcaagctga

SEQ ID NO: 173 - DNA, 1455 bp, Homo sapiens
  SIMILAR (982)..(1074): 401254mologous to Brassica napus Bp4A product,accession number X52874,Smith-Waterman Score=46.
atgggcagcctcatgttggccctgcaagtgaaggtcctcttgaacacccttgtaacaggcaggatcacccttggaggtggccatggaagagaaaatcacttggggtgctcctgtaccctccggaaagctctcttccttcgtcttcaccaggctaaatcctacccattgtttaaggttcgagtcaaaagcaacttctcctatgaagtcttcaccgccacctctccccctctcaggtatttcttaatagcaatgcaagaacggactaatacacaaactcaaagcctttgtatgtgccctgagagaatccatccagaagacaagtttgattctatgactctcctgcttgagattggcaagttaacagtttcctattgctatatgatcagaaatgtaatactctcctacggccaaggaggaaagaacatctgcgatgggaaagaaaagttggccagcactgcaagggagctcagcatccagaatggacctcctctgcatgacaaagcccaaaattttcaacaaaagtttcagacccattcaacactgtgcacccctcatagacaggctagagaaaccatgaaaacacataagatgatttcacataaaaattataaaagcttaataggaaatccacatcctctcaagcagctgctcagtggaagaccacctgtgaggcacctcaaaggctcccctgatgccccctcgggaggctttgcagcaggctactgcaggaagcagagtctctttttcaaaagtgtagctcaaaccatttcagtgtttggcagcaaggaggacacaggggagagaaagctgcttggacgtaaaagtaatgtggtcctgattcttcagttagcatcttcacctcatcccctagccttggaaccaatcttccttcaagaaggctttaaggcaaataaggaaggatccaatggagaaagtaggcagaagaaactggaaaacttatctaaggagggcccctcttcaccccataagagcttcgctgacggagggtcacataaggccaaaacagttatggagagagccaggaagcagcatgctaccctcttcataggttcaagacaagacacagagggaacagctaaagtctttaagaacaccaaagccggatctttcctctatttgctgaaagccagtcacagcgataacaagaggaagatgacaagttttatccttatagagaacagcatattcttggggcatcccaacctgaggatctgggttagagggaaatgggctctcaagaaccctccagagctgcagagtgcagggcagccctgtcaaaccagtgagggctgctgtggggtcatagtgggcagagtgggggagagagatcaagagatgaccgctttagggaatgctcatcttaaacaaaaagttggcaaaatggaaaaagaaaacaaagaggagccagaggcggccctgaaaaatgatggctaa

SEQ ID NO: 174 - DNA, 339 bp, Homo sapiens
  SIMILAR (49)..(189): 381254mologous to Cricetulus griseus intermediate filament associated protein,accession number X77631,Smith-Waterman Score=69.
atggcctttcaagccaatggatgtgaccacctggagaaaacgaagtccagggctgaggccaggctagtggtaaggcagaagcaggggcagaggatgcagcagaagagacagagagaaagagccagtgaaggaggagaaaaattgaaagaagggagtgtcctggaaggaagtgaagaaggtatttcagaagagtggccaactggcagatgctgcgaggttcagcatcatgtaaaaaggctgacagtgaaatcggccaagattaagggcaatcttgaaagaatgagttcagaccaagagtgggcacaaaaacctgaatgcagggggctgaggggagaatga

SEQ ID NO: 175 - DNA, 1458 bp, Homo sapiens
  SIMILAR (647)..(603): 431254mologous to Caenorhabditis elegans C03B1.10 gene product,accession number U40952,Smith-Waterman Score=48.
atggaaagctcggatttcagcacaggagagcagaggaaggctctggagcagagaaatgggtataatgaaatgcaaagccagctgcttcaggatgatagggaacagttggcatatgaaagatatgcctgcaggatctttgtcattggatttggggtctacctgaataatccaggattatctccacattgtaggatcattgatcatattttaaaagaccgctttatcaacaagtcggtgacagaatcagcaatgaattggccgtctccttcaaagtctgtgctctttaaagtggtcaggactgcaggaggtgacctcaagtcagagctgggtggggaccttggtgtagttgtttctaccactaagttggtggttaggcacctgagtgtctacaagcaggagaagagcaaatctgatgggttacaagtaaaattctgggagcccccagatgagctgggtggagtcaggcaacttccaatagagcagtttccaccaaaacaagattttaccttctctgctaactgggataagaagctctccaaccgcacaggtctgggaaggggagaaaaagaagccaaatccctgctgtctcctccccatctggccccgcccatccaagatcacagccatggaagccactacgagacccatggaaagaaagttcttctgatacagtgggactggaagacagcagacagtgaaatgtgcagagaaacctgcaccggccgccctgcagtcatggagaagcagctgcgggaaaaaatggcagtgtggctcccacttgcgtgtctgctggagacaatttgcctagtgcccatgggctggagtggtgttgacggagtggaaaagttcccgtggccctccgagagggaacccaggttatttaagacaaggacctacaaagtgtctcccagccatcaatatcagaaagactaccagagattatggaccaggaatcttgcttcccacgaggttgcaattcaaggatccattatgactgaaaatgaggaaagagacttggatgctaatcgtttctttacctttcggatcaatattgtcatgggagaggttaggagcaggactctggggcccaccaatctggatttgaaacctagctcctcctggtctagctgtttgctgaagggacatgcggtgggtgtggctttgtttggccgctgtgcactcaaccccttatgggagggggagcacgcagacgggcaggtgcaagagccaaggggagcacttttgggctctggccccactgtagcatctaggggtggatgcctgcaactcccaaagccccagtggatgtattacagtgctcttttagctctgccatccacagacggcttaagtattaaccaactcagtgccctcttggtatccaggtccttgtctggcatccaagaagaattgggtcacacagacaaattgaaggagggcaaatgtgggggattttaa

SEQ ID NO: 176 - DNA, 828 bp, Homo sapiens
  SIMILAR (741)..(803): 421254mologous to Homo sapiens Human secreted protein encoded by gene 69,accession number Y36292,Smith-Waterman Score=50.
atgctggatgctttcccatacagtcctcactgtacacctgggagccaaacaaactatgagcgtgaaaaccaacctcaatctggcgtggagatgcacctatgttccagaagggtttggatcacacatttatggagagctggtgaggacgagctggattctttcctctcagtgacacttatagggcccttgcttcttttctggatttctccttatcttcatcccaatatcggtcagcacaaggcaaaggcatttggcatctcttctttcccatttgcagactttactgtacgtactttactttacgtacaggatgcgtacgtaccccatcctgctggtagacgtggggcaggttatcagaggagaagtgggggtgtgagggcatccttgggaagctttggatacagtctcagtgccaccatccagtccacacttgcatcattgctggccctgaacttcggcagtgacttcctaactcatctttcagtttctgctcctgctgggtccagggacacgagcccaactagtgcccagctgttcactcgcccaactcacttttgggtcacccacagtaatgacacagtagccaatgccatcggaaaattccagctccgctaccacagaggcaatttcttatttagaaatgcagatacatgtttattagaagaggagtcctcatcccctcagccgcagacctggtactgggcagcacagctggagacttcggtcatgtatgtcttcctctcagagttctttctagatcccttcagtgagctgagtgcctccatttggcgtgttatagttgggttgggtggctgtgcctctccctga

SEQ ID NO: 177 - DNA, 771 bp, Homo sapiens
  SIMILAR (61)..(231): 471254mologous to Schizosaccharomyces pombe WD repeat protein,accession number AL109736,Smith-Waterman Score=163.
  misc_feature (1)...(771): n = a,t,c or g
ctctgggatgtggagagttagtgtgtgtcggtgctttcaggctggattggcctgtagaacctcagtttcagccatgatgggaaaatgctggcgtcagcatcggaagatcattttattgacattgctgaagtggagacaggggacaaactatgggaggtacagtgtgagtctccgactttcacagtggcgtggcaccccaaaaggcctctgctggcatttgcctgtgatgacaaagacggcaaatatgaccagcagccgggaagccggaactgtgaagctgtttgggcttcctaatgattcctgagaggaagttgtagggaagaggaggccccggccagaggtcttccttccatgtggtttaagtttggtctgttctctcggaagttggtgggccaccccttaaatatttgtaagttggtataaattgtaaacgtctctgggtcaggctgcgcattttcgttctttttgcntttgtctgtgtattaagctctttcccattctttggcccccagcatggagttaacttcgcgtgggactcttgcagtgccaagttagtgaccccagcataccttggtcctctggaacctcctggtcttctcctggcttctggggtgcatggtagactttgtggcatttgatacaacttggacaatacctagtttggagggaggggaatggaagggcatggaagtttttttaaataattaaaaaaatatatatataattttgagaattgagcatttaataaactgacttttgttattatggaaa

SEQ ID NO: 178 - DNA, 972 bp, Homo sapiens
  SIMILAR (14)..(313): 411254mologous to Schizosaccharomyces pombe WD repeat protein,accession number AL109736,Smith-Waterman Score=222.
gaacactaaaggggagaacattaatatctgctggagtcctgatgggcagaccattgctgtaggcaacaaggatgatgtggtgacctttattgatgccaagacacaccgttccaaagcagaagagcagttcaagttcgaggtcaacgaaatctcctggaacaatgacaataatatgttcttcctgacaaatggcaatggttgtatcaacatcctcagctacccagaactgaagcctgtgcagtccatcaacgcccatccttccaactgcatctgtatcaagtttgaccccatggggaagtactttgccacaggcaagtgcagatgctttggtcagcctctgggatgtggatgagttagtgtgtgttcggtgcttttccaggctggattggcctgtaagaaccctcagtttcagccatgatgggaaaatgctggcgtcagcatcggaagatcattttattgacattgctgaagtggagacaggggacaaactatggggaggtacagtgtgagtctccgaccttcacaagtggcgtgggcaccccaaaaggcctctgctgggcatttgcctcgttgattgacaaagacgggcaaatatgacagcagccgggaagccggaacctgtgaagctgtttgggcttcctaatgattcttgagaggaggttgtagggagaggaggccccggcagaggtcttccttcatgtggttagtttggtctgttctctcggagttggtgggcaccctaaatatttgtaagttggtataaattgtaaacgtctctggtcaggctgcgcatttcgttcttttgctttgtctgggtgcatggtagactttgtggcatttgatacaacttggacaatacctagtttggagggaggggaatggaagggcatggaagtttttttaaataattaaaaatatatacatataattttgagaattgagcatttaataaactgacttttgttattatgg

SEQ ID NO: 179 - DNA, 522 bp, Homo sapiens
  SIMILAR (244)..(50): 351254mologous to Bubalus arnee bubalis Buffalo APZFY,accession number X99826,Smith-Waterman Score=76.
atgacgtatattcgttgggcaagtgccgctctggttcgtccttactgtcttctcgctgttgtgaaaacatctccctcagaagacaggcaggaagagcatgtgaacgagaatgaagtgtcagatggagctgcagaatggtgctgtgaagaagtgaagaaagagtgcagaggcaacaatagagaggttttctgtgaagggaagcagagatatgctttggaagtgggaggggatgctttacaccctgccatagaatattgggttcccagggagatactacttccaccagcagacataatcaagttccaactaaattttagattcctcatacttgtggaccaacaggtcacggcctgcagtttaaaatctatctcagcagccactatttccaaaaacagaccagccactgcacagcaaggacccaggaaggtccagatgatgtggactggttatgtggccactatttctcctgctaagagttcatggaggaaggccctttcccccacacaaccagatgtcacttga

SEQ ID NO: 180 - DNA, 505 bp, Homo sapiens
  SIMILAR (90)..(266): 1001254mologous to Homo sapiens ribosomal protein S21,accession number L04483,Smith-Waterman Score=307.
cggacgcgtgggatctctgccgggtgactagctgcttcctttctctctcgcgcgcggtgtggtggcagcaggcgcagcccagcctcgaaatgcagaacgacgccggcgagttcgtggacctgtacgtgccgcggaaatgctccgctagcaatcgcatcatcggtgccaaggaccacgcatccatccagatgaacgtggccgaggttgacaaggtcacaggcaggtttaatggccagtttaaaacttatgctatctgcggggccattccgtaggatgggtgagtcacatgattcctttctccgaatggcaaaggccgatggcatcgtctcaaagtaaggttgggggctcacatttgggcagagtgagtggacttaggactgcttccagaggcgtggtctttaacgttgtccttttcccctggtttctaggaacttttggacttggagagaatcacagattgtggaatatttgtcataaataaataatgaaaaacctaaaaaaaaaa

SEQ ID NO: 181 - DNA, 592 bp, Homo sapiens
  SIMILAR (433)..(585): 431254mologous to Homo sapiens SEQ ID NO 335 from WO9922243,accession number Y19617,Smith-Waterman Score=75.
  misc_feature (1)...(592): n = a,t,c or g
ctcgccgaggcccctccttgcccgccgatatctctgccgggtgactagctgcttcctttctctctcgcgcgcggtgtggtggcagcaggcgcagcccacgccctccgaaattgcagaacgacggccggcgcagttcgtcggacctgttacgtgcccgcggaaaaatgctccgctagcaaatcgcatctatcggtggccaaggaccacggcatccatccagatgaacgtgcgccgaggttgacaaggtcacaaggcaggtttaatggccgagtttaagaacttatggctatcctgcgggggccattccgtaggatggggtgagtcagattgattccacctctcccgactgggcaagggccgattggcatccgtctcaaagttctaggaacttttggactggagagaaatcacaggatgtgggaatattttgtcattaaataaataattgaaaacctaaaaaaaaaaaaaaaaaagtcgagggggggcccgggtaccccaatttcgccctatagtgagtcgtatttaccaatttcactgggccgttcgtttttacaaccgtcgttgantggggaaaacccggggggtttacccc

SEQ ID NO: 182 - DNA, 308 bp, Homo sapiens
  SIMILAR (141)..(308): 1001254mologous to Homo sapiens Krueppel-related DNA-binding protein,accession number M61873,Smith-Waterman Score=292.
cggagctccaggtctcctcttcactactctgtgtcctgtgctcctacaggcccagcctctgtggccctgtgacctgcaggtattgggagatccacagctaagacaccaggacccctggaagcctagaaatgggaccattgcaatttagagatgtggccatagaattctctctggaggagtggcattgcctggacactgcacagcggaatctatataggaatgtgatgttagagaactacagtaacctggtcttccttggtattgttgtctctaagccagacctgatcgcccatctggagcaaggaaaa

SEQ ID NO: 183 - DNA, 414 bp, Homo sapiens
  SIMILAR (238)..(348): 371254mologous to Cercopithecine herpesvirus 1 glycoprotin G,accession number AB032191,Smith-Waterman Score=62.
atgtcaatgtttttggcccgagaaggatattttgtcaaacatccagcagaggccagaccttatctgcagattccaggtaggatccacctggctctgcatcctttggtgttacagcaagtggaatacaatcaaaggagagatcccctcatagagactactctagcacattctaaatggtcacagggccacagaggctgggcctgtaggagcacaggacacagagtagtgaagaggagacctggagctccggctgcaccgagagacaaaggacccgccaaaccagaagccgccctgttcggtccggctgcttgcctgattggacgtttccagcccagcgtccctgattggataattcttaaggtcccgccccctcaggacctgagtgacagaagatgtgatcacatgctgggctga

SEQ ID NO: 184 - DNA, 378 bp, Homo sapiens
atgcctgagaacaaactggaactgatggagacaaactggaacccaagtctgttttcaatcttatctaaacctgatgctgtagatgacctgcagaagaatctgtttccctttcctatggagctatacattcatttggcccatgactcacagaagctaacagaacagaggcaagtcaatagatttaagcagtatctaggaagcaaaactgacagtacctcattggatcgtcagcgccactgggttggggtctccatgaccgagctggtcttggcagaaacctgtaaaggagccaaaaggcaattagaaggagaaaagaactgcaccccaagaattctatatccaggcacactggaagtaaaacataatcaagaatgttaa

SEQ ID NO: 185 - DNA, 315 bp, Homo sapiens
tcgtacaggagaattgaagtagatagaaccgacctgattactcggtctgactcagatcacgtagacttaacgtgaacaaacgaaccttaatagcggctgcaccattggatgtcctgatccaacatcgagtcgtaaccctaatgtgatatgactctagaataggatgcgctgttatcctaggtaacttgtccgttggtcaagttatggatcaattgagtatagtagttcgctttgactggtgaagtcttagcatgtactgctcggaggttgggtttctgctccgaggtcgccccaaccgaaatttttaatgcaggc

SEQ ID NO: 186 - DNA, 576 bp, Homo sapiens
  SIMILAR (298)..(426): 341254mologous to Escherichia coli ORF_o72; alternate ORF with good statistics, no frameshift found,accession number U18997,Smith-Waterman Score=65.
atgacagcacaatcctattctagagtccaaatcgacaatagggtttacgacctcgatgttggatcaggtcatcctaatggtgtaactgctattaaaggttcgtttgttcgacaattgaagtcctacatgatcggccagtctgcatgtccactagaagaaaagggacctgggttcttcatcagcccatccttagatcttagtgcacatatgcacctaagagagcactgcagtaactgcaaacgcttctgttttgattgtggtaattggaacaatcagggcacaaactgcaaggtcactggcaagggtagcagcaggcatgattcctcccttagtaattttaaagcagcagatttcaaaagggaaaaccaagcagatgaaagtgagcagatttgttcttcagcacataactctgccaccatcatgcctctcttcttcatgtggtttctcatccaccatcagtctaaaccagccagcagcagaccctacatacatgatcagctcagaaaaaacatccagctgagctcagtccagactgccagtttgcagatatgtaggctaaaagaggagctgctttaa

SEQ ID NO: 187 - DNA, 1364 bp, Homo sapiens
  misc_feature (1)...(1364): n = a,t,c or g
aggtttaaaaaaangtaaaaaggaactcggcaaatccttaccccgccttgtttaccaaaaacatcaccttctagcatcaccagtatttagaggcaccgcctgcccaagtgacacatgtttaaacggccggcggtaccctaaccgtgcaaagggtagcataatcacttgttccttaattagggacctgtatgaatggctccacgagggttcagctgtctcttactttttaaccagtgaaatttgacctgcccgtgaagaggcgggcataacacagcaagacgagaagaccctatggagctttaatttattaatgcaaacagtacctaacaaaccctgttcttgggtgggttttgggtataatactaagttgagatggataccattttccgggggaaagccgctttgtgaaagtaggcccttaatttctcttggtccttttccgtaccaggggagggaattttgaaagtagattagaaaccgaacctgggattactcccggtctgaactcaagatcaacgtaggacttttaacccgttgaaacaaacgaaccctttaaatagcgggatctgcacccatcggggatgtccctgatccaacatcggaggtcggtaaacccctaaattgttgatatggacatctttagaataggatttgcgcttgttaatcccctaggggtaaccttgttccgttggtcaagttattgggatccaattggagtaaaagtagttacgactttgactgggtgaagtccttagcaatgtactgctcggaaggttggggtttctgcttccgaggttcgccccaacccgaaattttttaaatgcaaggtttggtaagttttaggaccctgtggggttttgttaggtacttgtttgcattaataaattaaaagcctccaatagggtcttctcggtcttgcttgtgtcaatggcccggcctctttcacggggcagggtcaattttcactggttaaaaagtaagagacagcttgaacccctcgtgggagccatttcatacagggtccctaattaagggaacaagtgattaatggctacccttggcacggntaggggtacccgcggccgttaaaacatgttgtcactgggcagggggggccctttaatactggtgatgctagaggtgatgttttttggtaaacaaggcggggtaagatttgccgagttccttttactttttttaacctttccttatgagcatgcctgtgttgggttgacatgtgagggtaataatgacttgttggttgattgtagatattgggctgttaattgtcagttcagtgttttaatctgacgcaggcttatgcggaggagaatgtttgcatgttacttatactaacattagtt

SEQ ID NO: 188 - DNA, 532 bp, Homo sapiens
  SIMILAR (45)..(365): 981254mologous to Homo sapiens protein-tyrosine phosphatase,accession number U14603,Smith-Waterman Score=580.
ccccattacactcacacgcacgctcacactttttatttgccataatgaaccgtccagcccctgtggagatctcctatgagaacatgcgttttctgataactcacaaccctaccaatgctactctcaacaagttcacagaggaacttaagaagtatggagcggcgactttggttcgagtttgtgatgctacatatgataaagctccagttgaaaaagaaggaatccacgttctagattggccatttgatgatggagctccaccccctaatcagatagtagatgattggttaaacctgttaaaaaccaaatttcgtgaagagccaggttgctgtgttgcagtgcattgtgttgcaggattgggaagaaaaagaaggggagcgttcaattccaaacagctgctttatttggagaaataccgacctaagatgcgattacgcttcagagataccaatgggcattgctgtgttcagtagaaggaaatgtaaacgaaggctgacttgattgtgccatttagagggaactcttggtacct

SEQ ID NO: 189 - DNA, 249 bp, Homo sapiens
  SIMILAR (1)..(246): 1001254mologous to Homo sapiens protein tyrosine phosphatase,accession number L48722,Smith-Waterman Score=426.
atgaaccgtccagcccctgtggagatctcctatgagaacatgcgttttctgataactcacaaccctaccaatgctactctcaacaagttcacagaggaacttaagaagtatggagtgacgactttggttcgagtttgtgatgctacatatgataaagctccagttgaaaaagaaggaatccacgttctaaaaaagaaggggagcgttcaattccaaacagctgctttatttggagaaataccgacctaa

SEQ ID NO: 190 - DNA, 546 bp, Homo sapiens
ctactcttctaagaattcccgcagcactgagagcgtgatatgagtgccaccaaatagccacaggtatatcacagacacgcttagtctttccttcacccaagtttctggacccttgtatactattattacaacgaagtagtctgggggtgcctttacatcaaaggtggttagaatatctgaagtacatacagaatggggtttagtgtcagacacctaggcaagtacattatttccaccacatactatgtgccattaggcaaattactaaatggctctgaacctgtttcctcattggtaagagggaaataatggcagctacacctcatagggtttttgtatttgtgaccttaagcacaaacactgctcgttgcataatgtgtaacattggttgttataatgctaagcgcatatcgaggtcaataaatgttaattatcattactgaatggttgaccaaaaaaacctgtcaataaatgtagaaagaacacagagaaaacagtactagatatctctacaggccccaaatttcacaaaatgttcttgaaaaa

SEQ ID NO: 191 - DNA, 1570 bp, Homo sapiens
  SIMILAR (1109)..(603): 511254mologous to Homo sapiens protein-tyrosine phosphatase,accession number U14603,Smith-Waterman Score=314.
atctaaaagtgcccaggtgggcttaaggctgccagactgcacgcacatctacagcaacaagggcttctattccatctacaacttggatcgggggaaaagggagatgtaggagaggaaggaaaaaagaggggaaaaatataccaccaaccctcccccacaaaaaaagggaaaaaaaaaatcccaccacagggagatctatgtgccaagcataatggaagagtgtgctccccaaacagtaggttttgcacaggctaatgttctgctggttttccttagagacctattttgaaaaagtttaaaaagacaggagatttcaaaataattcaatcctggcagaaattcaaactccaaaactaggagcaaaatcatccttcactgaattaattccttttctctttctcttttcttaaacattttattcattttatagagggatttcttttttgtttgcttttgttccaatcattaggagagtggttgaggagtactgaatccatcactactttgatgacacaggtaatattccagattcacatttccaggtaccaagagttccctctaaatggcacaatcaagtcagccttcgtttacatttccttctactgaacacagcaatgcccattggtatctctgaagcgtatcgcaatcttaggtcggtatttctccaaataaagcagctgtttggaattgaacgctccccttcttttttgtcttataaactgaaactgcatcttcgttacttcattcccacattccaatccaaagcaagtgccaacccagcaccggtgccccttccccaaccctgccaacacaatgcactgccaacacagcaaccgtggctcttacacgaaaatttggttttttaaacaggtttaaacccaatccatcctactatctgaattaagggggtggagctcccatcatccaaatggcccaatcctagaacgtggaatccctcctttttccaaactggagcctttatccatatgtagccatccacaaactccgaacccaaagtccgtcactcccatacttccttaagttccctctgtgaacttgttgagagtagcattggtagggttgtgagttatcagaaaacgcatgttcttcataggagatctccacaggggctgaacggcccatttaggaaaataaaaaagtgtgagcgtgcgtgtgagtgtgatggggaaagtgaaaaaaaaaaaatcaataaatcttgaaactgtttcacagcagaaaacattaaaaagaccactaaaatgcatattaatcaatcagtgttttctctattcaacttgtttattccttatgaagcttctctcttcaagataagcaaagtatttagaatccacttgaatccaaattcaatttgggcctcaatttctgcagatggataccttcggactccaaaaaatccaactacatacaaaacttaagcagcctttactacatttaggcactagtgagacaagttaaaagtgtaggtcactttccacttgtttacttgatgcttaattttactggagtcattaaaagaaatatgcttgcaattaaaaaaaaaaaaaaaaac

SEQ ID NO: 192 - DNA, 1804 bp, Homo sapiens
  SIMILAR (1517)..(1011): 501254mologous to Homo sapiens Human secreted protein clone bl194_2 protein,accession number W99660,Smith-Waterman Score=281.
ctactactactaaatttgcggccgcgtcgaattttttttttccctttctctctttttttttttttgaatcaaaagcagggtttatttttctatcaaatcccccaatccatgttccacccaatggatgaagggtcgaatcaagccccacatagactcttggtaaaaacaattctaactttctaaaaaaaaaaaaaaagccaacccactttttttttttttttcaaaaagctcccaggcctttgggaacagctgaaacaaattcatatcctgactaggtcctgttttctcttaggtatttgggatggtccctctctggctgccacttctgcacagatgagggcactgataatgcgcctcgcaggtcactcacaatcctaggctccacatcactccagggtttgataacctagaaccacgttatggatttccattttataatggccctaagaacaggctgaaaagatctggtattaaattctggcaaatcctttattgaggtgccaacctatttgctggggcacaggctagggcactggattctgctggttctgagaaacataaatggtacccatagggaaggtgtttccctccctaagtggccaggaggaatgtttgcctgggaagttaaagtgaaccaattccctccctctgccttacacccacgtgggggtaggtcccagaactcaggccttgggaacatatgctgtgctctcttcctacaggcgctgtgtggaagaacccaatagccagttgttaaatagctgtggaatttcctccacaatccacatagtgatgtgtctccaaggagctctggggtcatgaggcccaatgtatgaaatcttcactgaaggttcgcatgaagatcactatggtggggcaccaggatctcaggtaccgtgcagaagaagtacacataggaaaacggtcctcccatctcggccttcccggtaaaattcaccagttgcttcactccgaggtggaataagggagacgttagtagtcacatatgtactgaccactgtgttcatgtacttgaatctggctggacaaggctgggtcactgcccaccgtgtaaaaagttggagttccctgaattttccagggtggcccatgatggtgaagaattaacaagggaagtcttgccttattaaatgtgactttcacccactttgatgccgtcatcatcccacaaggactgaatgcggaaacaggaagaaaaccaccaaaccagatgcccaggagacaaagcaggatggacaggaggacatattgcttagttcgctgagggcgcaatctctgatcactgtgtgggatcaaagccaccaactcatttacttgctcttgttgggattgtaggctgtcccctggaacgtgagacaggtgatgctatctctcccggtgaattccacatatgggaactgagcaatggcttcttcctgctctcgttcagccagcaaaccgtccctgtcatcttcttgctttcgccagcctcttcggtcggcggagcggcacgcactcagcgcgcaggcgccaaataccaagcccgccaggagaacgcgggcgcgcgctcgcgcgtgcgctcttcgcggctccggaggccttcccaatatcgcagctgtctggctccctcggttccggtagagggcggcagagagcgccggggagccgcgacccttgcgttttggcactgtgagcagcacatcaatgccgctctgctcctctggaagctggctcacaggtgcacctggaacagccaataagtgtcctggctgcagttggagggatgaatcttcctccataaatc

SEQ ID NO: 193 - DNA, 375 bp, Homo sapiens
  SIMILAR (49)..(375): 1001254mologous to Homo sapiens serine/threonine protein kinase,accession number X66364,Smith-Waterman Score=569.
ggcacgagttaaaaccgagggcccgcaggggtccccgcggccgccgcgatgcagaaatacgagaaactggaaaagattggggaaggcacctacggaactgtgttcaaggccaaaaaccgggagactcatgagatcgtggctctgaaacgggtgaggctggatgacgatgatgagggtgtgccgagttccgccctccgggagatctgcctactcaaggagctgaagcacaagaacatcgtcaggcttcatgacgtcctgcacagcgacaagaagctgactttggtttttgaattctgtgaccaggacctgaagaagtattttgacagttgcaatggtgacctcgatcctgagattgtaaagtcattcctcttccag

SEQ ID NO: 194 - DNA, 638 bp, Homo sapiens
  SIMILAR (111)..(521): 261254mologous to Schizosaccharomyces pombe putative vesicular transport protein,accession number AL031349,Smith- Waterman Score=153.
  misc_feature (1)...(638): n = a,t,c or g
ccctcttcggccgcgggtcgttcggccccctggcctttgcctctcccctggtccgcgcggnaggacaaatcctcttccgcggtcccttctcgctcttccgcgggggctgggagctgccgcacgcctacaagcgcagcgaccagcggggcgccctagcagcgcgctgggggcgcacagtgctgctgctggccgccctgaacctggcgctgagcccgctggtgctggcctggcaggttctgcacgtcttctatagccacgtggagctgctgcggcgcgagcctggcgcgctgggggcgcgcggctggtcccgcctggcgcgcttgcagctgcgccacttcaacgagctgccgcacgagctgcgcgcgcgcctggcccgcgcctaccgccccgccgccgccttcctgcgcaccgctgcgccccccgcgcccctgcgcacgctgctggcccgccagctcgttttcttcgcgggcgcactcttcgccgcgctgcttgtgctcaccgtctacgacgaggacgtgctagccgtggagcacgtgctcaccgccatgaccgcgctcggggtcaccgccaccgtcgccagtttctcgtatttctgcatcgcggcggccgcggggacccctgcgggccctcggttttaa

SEQ ID NO: 195 - DNA, 475 bp, Homo sapiens
  SIMILAR (201)..(392): 341254mologous to Homo sapiens Ig kappa chain VKIII- JK1,accession number U07450,Smith-Waterman Score=74.
caaaagagtttaataaattttgtagggccttccttaagaaggatgttgtaagaggttggcccacttaaggaattatttgaatgcctagtgtgatcttctgggcagagttatctattggtgtagattgaatgccttggcccactgttaagaactaagggggctccatattttggattagtagatataaggagaacatggctgccagctccaagaccttgtggtggaacaataaaccgggttccgttaatcataatctgagtaccaggtgccaaaggtgtactggtattgatgactattttttgctgaatacaaggttcactgaactgactcccgactagactagttacattggatggtgccgaatccgtgtgaatggtagtgccacctggagcagaactgtaactgggggtttttactaaagcttgctgatttggcagagaagcaaaattggacgtattagttattttctcgtgcc

SEQ ID NO: 196 - DNA, 357 bp, Homo sapiens
  SIMILAR (207)..(76): 401254mologous to Arabidopsis thaliana putative protein,accession number AL138647,Smith-Waterman Score=72.
atggctgccagctccaagaccttgtgggggaacaataaaccggcttccgttaatcataatctgagtaccaagcgccaaatgtgtactggcattgatgactatttttcctcgcaggtgctgggattacaggtatccaatgtccccagcatcagtagattgccaactccctctccttgccacactccagccagtgttatgctggtgctgtcatacccatcccagattactgtagcagaatgcagttgttctttagttgtgagcaatccctatggggttataaaacctccagtgtttggtagttgggccatcttatggaaagggagctggcaatctgcagctgccgtggacattggatga

SEQ ID NO: 197 - DNA, 693 bp, Homo sapiens
  SIMILAR (469)..(633): 981254mologous to Homo sapiens unnamed protein product,accession number AX061623,Smith-Waterman Score=303.
atggatgaagtcaaccggaaaagatatggaaaacggtttattaaacagcctgctttcgactctaaagatcccctgcccggtgcctctggctgccctcccgaagacccctgtgaggacaggcagaaatggtttgttagggaacccagcgagctgacagggctttccctgctgcttcctctacccctgtgttttgctcagctctctcaagtgactcagttccaggaaaagtatatccagttagtgaggcagagggccctggagggagccctaggaaacaccattatctacaagtcccagacagcaaaaggtactccacaagaaacagaaggaacttccagtggtagcaaaagcaatgtgaggagtgggaagagagttccaagtggcaggatggtcaacattcgcattttccagcagaagtcacgtaagaatagacaagagtccattggatttggcaatcctgatgtcagggtgaatcttggaagcaaccagtaccttttctctgtcatagtggatcctaaagaaatgccctgcttctgtttgcgccatgatgttgatgccctactctggcaaccacactccagcaaacaagatgatatgtgggagcacatcgcaactttcaatgctttaggccatcaaactccagtcatacaaccagagcctgggacgatggtcccttctgctgggaacacttaa

SEQ ID NO: 198 - DNA, 385 bp, Homo sapiens
  SIMILAR (121)..(276): 981254mologous to Mus musculus e(y)2 homolog,accession number AF173297,Smith-Waterman Score=263.
gggcttaggtgcccgagctactgagggtctaagtccgggcagccgaagagtgtggtaggtaacggtcctcagcgcaagggtcatttcgtcgctgggaagggacggccctcgcccgcggtgatggtggttagcaagatgaacaaagatgcgcagatgagagcagcgattaaccaaaagttgatagaaactggagaaagagaacgcctcaaagagttgctgagagctaaattaattgaatgtggctggaaggatcagttgaaggcacactgtaaagataatgattttaaatgatatgatttgttttttgcttttgcataagaggtaattaaagaaaaaggactaggaacacgttactgttgatgacttggtggctgaaatcactcca

SEQ ID NO: 199 - DNA, 488 bp, Homo sapiens
  SIMILAR (143)..(211): 1001254mologous to Homo sapiens Human secreted protein, SEQ ID NO: 5619,accession number G01538,Smith-Waterman Score=124.
gctcgacgttctagctttctgtgtgcttaggtgtccgagctactgagggtctaagtccgggcagccgaagagtgtggtaggtaacggtcctcagcgcaagggtcatttcgtcgctgggaagggacggccctcgcccgcggtgatggtggtgagctatgcccgtggtcctcagggccgggacccgggcccagcccaggctcctttcgatgtactgtctttcgttagcgtccccgacccgcgctcgcgggcctgtagggctctccgacagggcgtgctaccggagttggcctgaaaccaggcctcgctttgttttctggctcctcctctcccgcctctcccgctgttttccgccctgttctattttccctaagaatgtctgaactgggagggataccctaccgcccttgttttaccagagagaaaactgagggcttttaagaattaagtgacttggccaaggtcactatccgtattttaggagccaagag

SEQ ID NO: 200 - DNA, 1944 bp, Homo sapiens
  SIMILAR (79)..(414): 391254mologous to Homo sapiens Human secreted protein, SEQ ID NO: 5619,accession number G01538,Smith-Waterman Score=94.
ctagctttctgtgtgcttaggtgcccgagctactgagggtctaagttcgggcagccgaagagtgtggtaggttaacggtcctcagcgcaagggtcatttcgtcgctgggaagggacggccctcgccccgcggtgatggtggttagcaagaatgaacaaagatgcgcagatgagagcagcggattaacccaaaagttgatagaaactggagaaaagagaaccgcctcaaagagttgctgagagcctaaattaattggaatgtgggctggaaggatccagttgaaggcaccacctgtaaaggagggtaattaaagacaaaggacttagaacaccgttacttgtttgattgactttggtggcctgaaaatcacttccaaaaaggcaggagccctgggtacctgacagtgtaaaagaaggagctccttacaaaggattaaggaacattcctttgcctccagcatgccaagccctttaagattgaattagattgtgttgttgtggttttattttctgaaaagtaaaacttgccagtaaattagaaaacaatttcccaaaataaaaatccttttttgtatgatggtatacgagttttgagtaatgatgtatacattgtattgattttaaaaacccccctgtgttattttaataaatatctcatgaatgagtttgaagtttgcttggattttgaaatgaatgggactttgtctttattactaattcaccaaatttgttgagcgcaaaagcaattaatgtagtttaagtatttagtatgtacagttctctgtgttaacagctgagaagtaagcaaccttttctgactgcatatgggtgtattcctcttttgagtccccataatattttataaattgtaatgccccatcttgtactacagttgtcttattcgtattgtttataaactttgagggttaggactgggtcttactcatctttaatgtgccttccttatgcttcaaagaatttaccatcttaatgggaagagaacatttgcaagttggctccattaccaagctcccttccacatactctaactcatctgaactttgaatgcagaatctcttaaattgcaaccccacatactaaggtccaagaaagaacttaatgggaattaatctccaacccattagctttaccctgacatcaggattgccaaatccaatggactcttgtcatattcttacgtgacttcatgcatggaaaatgcgaatgttgaccatcctgccacttggaactctcttcccactcctcacattgcttttgctaccactggaagttccttctgtttcttgtggagtaccttttgctgtctgggacttgtagataatggtgtttccctagggctccctcccagggccctctgcctcactaactggatatacttttccctgagcaaatcccagggaaacttgcgtcagaccgtgacttcaaatacaggttgataaatgctaaactgtctccaaaccagactttcatcctaggcctccacacccagacacccaactgctatggatcaactttttagaatatcctcacttcaaactgaccttacctaaaataatgactttttcccccaataattgcccctgctatattccttatttctgaatggtacctcctaggctatataggattatctgagggagcttactggaaatgctggattctggaaggataagggggcatggctttaagattctgtatttctggcgagtacccaactggtgctcatgctgctgattgagaaccacttctgaatatagcaaggctgtaaattatccactacgtgccctcgtaattgtcttagttcaagcccagattattgtagtagacttagtatttctttgccttagttgatctgtgacccctccaatatctattccacactgttgcctaagtggccttagtaaaattcaagtctggttatttt

SEQ ID NO: 201 - DNA, 387 bp, Homo sapiens
  SIMILAR (155)..(99): 571254mologous to Homo sapiens dJ622L5.8.2 (novel protein (isoform 2)),accession number AL049795,Smith-Waterman Score=64.
atgaaggatgtttttaagtttcaggaattccgtttgctcatcatattctgttttgccatagctaggacacaggctgaagaaatgtcaacaattgggagttttgaaggattccaggctgtgtctctgaagcaagagggagatgaccaaccctctgagactgaccacctatcgatggaggaagaggacccgatgccaagacagatttcaaggcagtcaagtgtgaccgaatcaactctttaccccaatccttatcatcagccttatatctcacggaagtactttgctacacggccgggggccattgagactgccatggaagacttgaaaggtcacgtagctgagacttctggagagaccattcaaggcttctggctcttgacaaagtga

SEQ ID NO: 202 - DNA, 381 bp, Homo sapiens
  SIMILAR (206)..(280): 1001254mologous to Mus musculus erbb2-interacting protein ERBIN,accession number AF263743,Smith-Waterman Score=127.
  misc_feature (1)...(381): n = a,t,c or g
cggacgcgtgggcggacgcgtgggctaaagtcagaattactagaggtaaaaataactagtttgttacagtattactcagagaagtcagggagaaaacttgtaccatgattcaaatatttgcatggtgtggaggaaaaattgctccttggtactctgttatttatacatactgtttttagttaaataattttttttgttgttaaagggtatatttgtaacaagggtacaacctgaaggaccagcatcaaaattactgcagccaggtgataaaattattcaggtaattaaaataaatcnnnnnnnnnnncattttataacactctaatgttttcacagtttaaaatgttttcactttaactttgaaaattgtgggtgggaggc

SEQ ID NO: 203 - DNA, 1854 bp, Homo sapiens
  SIMILAR (548)..(787): 761254mologous to Homo sapiens erbb2-interacting protein ERBIN,accession number AF263744,Smith-Waterman Score=293.
  misc_feature (1)...(1854): n = a,t,c or g
ggcacgagcacagaataactggaagtgtacatggtaattttatagatctttttctttatggaatcctgtatttcttggcattagacgtcaacttcagattttgagaaggaatgtatttgctaagagtaatacagaaatgcttgttatgatatttctgtattaataacaagccatgctcaaaatgtggtttcatccagtttgaccattaagccctcagcactcagggacatgactaaaggcactcacatggaagaacggcagttcataacactgggaataaacaagtggaacagcgggaatcaggcaatgcctttgagtaatggacagatgggccagcctctcaggcctcaggcaaattatagtcaaatacatcacccccctcaggcatctgtggcaaggcatccctctagagaacaactaattgattacttgatgctgaaagtggcccaccagcctccatatacacagccccattgttctcctagacaaggccatgaactggcaaaacaagagattcgagtgagggttgaaaaggatccagaacttggatttagcatatcaggtggtgtcgggggtagaggaaacccattcagacctgatgatgatggatatatttgtaacaagggtacaacctgaaggaccagcatcaaaattactgcagccaggtgataaaattattcaggctaatggctacagttttataaatattgaacatggacaagcagtgtccttgctaaaaactttccagaatacagttgaactcatcattgtacgagaagtttcctcataagcactgtggacaaaaaaagcggggaagacagcaagatttattggaagatacttacaggggaaattaatattttgactatttttatatataaagaagaactcaaaaaattatgttcaaatttgtacattaatgaaataatggaacttgtggttagagggaaagaaccactgtacagaatattaaagggagactgttgaattcataccatataaaacttgttaggtttttaaacatagcaatcaaggctacaaaaacaaacctgtgttgtttttgtatagattgtaggtttatttttggatttcatatacatgactgaactgtgtgcaaggcaatagttagccttgattttagcccagagacagatggcagagctatctctctcatagcttttatgcccttatttttattcaactggtattaatgtttttctcctgaaactactttttttgatgtgggcaagagatttgaagtgttggcttttgctatgtgcatattgaattgaagagtgagtaggtgaaggtggtgctggtgggttcactttccaaggccagactaaaacagttattttctattaaaaatctgggaaggcaaagaatgggggatggggagagctacgtgggtagtatgttttttattagggagaataatggcaattaaaatatgttaatgtccttttttattaaaggcaaaaaagacaatatattgcatttatgagctcggcaggatctgttcttgtcatagccattgactatacatttgctactggtgattcagtttttaattttttaagtcacaggaaatttttaactctactgtagatgcatgtccatgcattttctgtgttatggaaatccactgatttttttttttttttcaaatggtggtacttgcaatctgttttataattagtgctccattttaatcttatttataatttttattttaagcagctattgttacattaatggcctagtttaatantttgttgtctgattccataatgtacttaggttatgtaatcctctttgattttgttggcctgcatttccttgttaagaaaatgt

SEQ ID NO: 204 - DNA, 855 bp, Homo sapiens
  SIMILAR (634)..(260): 281254mologous to Homo sapiens Human normal uterus tissue derived protein 25,accession number Y59862,Smith-Waterman Score=84.
atgaccaccgggccacgatcgtcaagccgacccacgcgacaccataacaataacgcgactatcaccttcaccttccacaatacgaacgaagtcgacaaggaccgtttgatgagaaaggagagagaagttctgatggctcataacctcacaccagggcagcttcagctgtttcattccctcatgttagctcccagatccctggcgatgctggaatctgagagcctggaaggctcacacagtcgacaaaagaaaacgtttttcttgggagatgggcagaagctgaaggactggcatgacaaggaggccatccggagggacgctcagcgcgtagcaggagctgaggtttatgtttgccttttgttccttcaaactgaattttggcaacagcatgtcaagaacaagattgaggggctgtttgtttgtgccagctgcctttgcttccaccagaagctgcactggggactgcgtagccagagaacggaagcgaggcagtttggcccagactcactggacctgcaaatgggagtcagccagctggctctgagtgggcctgccctctgcacctcctgccaagtgagcgtgaacagtggctggctggtgggctggcccactttccctactccctgggagccctgctgggctgcttggcaactgagcgtggaggcccctccagagcacagggctgatggcacaacagagacccaactgctaaagtgcctgggatctgcagtttccggtgcaaaccccaggttaggtggtcagtttctcctatgcaaagattatccatggatatccaggatatccagagatatcctgacctgctttctccattccatagttttagcttcacaatga

SEQ ID NO: 205 - DNA, 718 bp, Homo sapiens
  SIMILAR (608)..(718): 561254mologous to Homo sapiens Human secreted protein fragment encoded from gene 42,accession number Y07785,Smith- Waterman Score=93.
atgcaaaaagaagatgaggagcctacacaggcatctgataagcagcagccaaaattacccagccgcaagtatgtctttatagctacacaaaacaaaccaagacagtctaatccttttggtggtggcagtggcccatctggaacagctgctgaaggaacgccagttgcagtggaggaggcgaagccgggctgtgcgctccatggagactgcaggagccgggaacagggactacctgcctgtggaaaggagctacccactttgggttccctgagagctgttctgttgctcaatgaaggtcctctctgccttggtcaccctccagttgtctgcatacctcattcttcctggacatgggacaagaactccagatccaccaaatggcgggactgaaagagccataacacaaacagggccgaaacacacagccccccatttgccatgttgtgggagatgaagagagaagagctgtaccctttggggagcccagacctaggggctccctaagccagggctgtgacaccctctttggggctctatagttcctggtgtctccaagcttctgggtgccactgtgttccccttgtccagacgtgagtgcctgcagcagaagctgtgtgtggtacatctggtccagctgtagccttgcacagagctggcacctgtgccggcacccggagctgtccaccccaccacagcagctggcatgcctggctgtgtc

SEQ ID NO: 206 - DNA, 367 bp, Homo sapiens
  SIMILAR (193)..(2): 901254mologous to Homo sapiens Human sialoadhesin family 4 (SAF-1) related polypeptide,accession number W81024,Smith-Waterman Score=298.
cgtctgagggctgggaggggcccacggtctgtccccaccgggtccagctcagcctggctggggggctgctgtgggtgacacagaccaggcgcaggctttggccctccaggaccggcagggatgtgccgttcccgaggttttccaggactgtcctgtttgcttgggaaaccatcactctcaggttctctggaggatcccacgcagctccagccccagggttctggggccccaggggtgggacgaggagaggactctgtcctgcaggacccagctcagcgtggcagggggctggctgtcagcagcacagaggagccgcaggaactggcctttctgaacttccagatatatgacgtttccctctcgtgcc

SEQ ID NO: 207 - DNA, 570 bp, Homo sapiens
  SIMILAR (111)..(404): 941254mologous to Homo sapiens Human sialoadhesin family 4 (SAF-1) polypeptide,accession number W81023,Smith-Waterman Score= 501.
tgttcgcgagctcgcatgcactaataacggacgccgggcgctagaatttgccatttcccggttcgacgatttagggctactgacactgctgctgacctcgctggtgggcggactggacagggtctaccccatcttatggctactggttcaaagcagtgactgagacaaccaagggtgctcctgtggccacaaaccaccagagtcgagaggtggaaatgagcacccggggccgattccagctcactggggatcccgccaaggggaactgctccttggtgatcagagacgcgcagatgcaggatgagtcacagtacttctttcgggtggagagaggaagctatgtgagatataatttcatgaacgatgggttctttctaaaagtaacagccctgactcagaagcctgatgtctacatccccgagaccctggagcccgggcagccggtgacgggcatctgtgcgtttaactgcgcctttgaggaatgtccacccccttctttctcctggacgggggctgccctctcctcccaaggaaccaaaccaacgacctcccacttttcagggctcagct

SEQ ID NO: 208 - DNA, 2631 bp, Homo sapiens
  SIMILAR (1569)..(1844): 981254mologous to Homo sapiens Protein sequence encoded by clone p199-7 (PL mutet.rsT4),accession number P93369,Smith-Waterman Score=525.
atggacaccccacaggctctgccactcttcctactcctggcctccttggtagggatcctcaccctcagagcctcttctggacttcagcaaaccaacttctcctctgccttctcttcagactcaaagagctcttcccaggggctgggtgtggaagttccctccatcaaacctcccagctggaaagttccagatcagttcctggattcaaaagcctctgctggaatctctgattccagctggtttcctgaggccctgagttccaacatgtctgggtccttctggtcaaatgtttctgctgagggccaagatttgagcccggtttcacccttctctgaaacccctggttctgaagaccatggacagcgcgggctctggggcccgaggctccgcggtgccgcctgctctgaaggtggagcgccccctgggggcggcgtcctgaactgcagcacagcccgaggtgggaggaacccaggaccaggtccggagctcaaaggacacaaagacgctgccctgactcagaagcctgatgtctacatccccgagaccctggagcccgggcagccggtgacggtcatctgtgtgtttaactgggcctttgaggaatgtccacccccttctttctcctggacgggggctgccctctcctcccaaggaaccaaaccaacgacctcccacttctcagtgctcagcttcacgcccagaccccaggaccacaacaccgacctcacctgccatgtggacttctccagaaagggtgtgagcgtacagaggaccgtccgactccgtgtggcctgtgagtgtggcctgggagggtggggtgtgcagacagccccggctatcagagatgccgagaaagcagggcgactaccgcacccggatatggaaattcgaggacgggttgagcaacgtgttggttatacaattgaacaaattaatcatatgcgtgatgtgtttggtacgcgattgcgacgtgctgaagacgtatttccaccggtgatcggggttgctgcccataaaggtggcgtttacaaaacctcagtttctgttcatcttgctcaggatctggctctgaaggggctacgtgttttgctcgtggaagaggccccccgagaggtgctgctgcatccgctggtggcagagacacggttgggggaggcagaggtggcactggaggcctctggttgtcccccaccctcacgggcatcctgggcccgggaagggaggcccctggctccaggaggcgggagtcgcctgcggctcagtcaagatgggcggaaactccacatcggcaacttcagcctggattgggacctgggaaattactccgtgctgtgcagtggggcgctgggtgctggcggtgaccagatcaccctcattgaacggagtaacctcggtgtgcggttgtatgcctgctgtggattgctgctgtgtcctgcttatccacaacattttgcgcacggttatgtggacaaaatacctggttacccaggccgtgccggcacgttaaccgggctgcatccgatgcaagtgtgtcgctgtcgacgtcaggcaccgtgtatgaaatctaacaatgcgctcatcgtcatcctcggcaccgtcaccctggatgctgtaggcataggcttggttatgccggtactgccgggcctcttgcgggatatcgtccattccgacagcatcgccagtcactatggcgtgctgctagcgctatatgcgttgatgcaatttctatgcgcacccgttctcggagcactgtccgaccgctttggccgccgcccagtcctgctcgcttcgctacttggagccactatcgactacgcgatcatggcgaccacacccctccagccccaggggtctagggccccagggatgggacgaggagaggactctgttctgcaggacccagctcagtgtggcagggggctggctgtcagcagcacagaggagccgcaggaactggcctttttgggcttccagccccgcccccggccccgcccaccttcccggccccgccccgcccgaagacgcacgcaggagccgcatggaggcgctggacgctcccagtcggttggcggcgcgacacgtatagttgccgtaatgccgggcgctcacgttggcaaagagaagcatcgagcggcccctcggtgcgactctaaaagaccccccatccgagtgaagcctgacaggaccggtgtggtcacggatggtgtgaagcactccatgaaccccttctgtgagatcgcggtggaggaggctgtgcggctcaaggagaagaagctggtgaaggaggtcatcgccgtcagctgtgggcctgcacagtgccaggggacgccccccacgatcacctggatgggggcctccgtgtcctccctggaccccactatcactcgctcctcgatgctcagcctcatcccacagccccaggaccatggcaccagcctcacctgtcaggtgaccttgcctggggccggtgtgaccatgaccagggctgtccgactcaacatatcctatcctcctaagaaattgaccatgaactggcttccaggggatgggcccaggaaaaatggagtcctttccctgggggctggagaagcagagccttcactcaaggggaaagcacggacgggctag

SEQ ID NO: 209 - DNA, 732 bp, Homo sapiens
  SIMILAR (592)..(720): 811254mologous to Homo sapiens Human sialoadhesin family 4 (SAF-1) polypeptide,accession number W81023,Smith-Waterman Score= 162.
agacctcgtcatcagcatttcacgtgacaacacgccagccctggagccccagccccagggaaatgtcccatacctggcaagcccaaaaaggccagttcctgcggctcctctgtgctgctgacagccagccccctgccacactgagctgggtcctgcagaacagagtcctctcctcgtcccatccctggggccctagacccctggggctggagctgcccggggtgaaggctggggattcagggcgctacacctgccgagcggagaacaggcttggctcccaacagcgagccctggacctctctgtgcagaatcctccagagaacctgagagtgatggtttcccaagcaaacaggacagtcctggaaaaccttgggaacggaacgtctctcccagtactggagggccaaagcctgtgcctggtctgtgtcacacacagcagccccccagccaggctgagctggacccagaggggacaggttctgagcccctcccagccctcagaccccgggggtcctggagctggctcgtgggttcaagtggagcacgaaggagagttcacctgccacgctcggcacccactggggctccccgcaggactctcctaccctctccgtgcactataagaagggactcatctcaacggcattctccaacggagcgtttctgggaatcggcatcacggctcttcttttcctctgcctggccctgatcatcatgaaagattctaccgag

SEQ ID NO: 210 - DNA, 656 bp, Homo sapiens
  SIMILAR (587)..(655): 911254mologous to Homo sapiens Human sialoadhesin family 4 (SAF-1) related polypeptide,accession number W81024,Smith-Waterman Score=114.
  misc_feature (1)...(656): n = a,t,c or g
ttgttacgcagctcctatgcactagtaacggccgacgggcgctggaattcgcccttttcccgggtcgacgatttcgtcctgtggccacaaaccaccagagtcgagaggtggaaatgagcacccggggccgattccagctcactggggatcccgccaaggggaactgctccttggtgatcagagacgcgcagatgcaggatgagtcacagtacttctttcgggtggagagaggaagctatgtgagatataatttcatgaacgatgggttctttctaaaagtaacaggtatggaatggggtgggaacccctgcctctcacactggggagggaccctggggacagcctatgggctgagcagagagggctctcagggacccctgcagcacaagaatctcccaccacggtctctgtcccagccctgactcagaagcctgatgtctacatccccgagaccctggagcccgggcagccggtgacggtcatctgtgtgtttaactgggcctttgaggaatgtccacccccttctttctcctggacgggggctgccctctcctcccaaggaaccaaaccaacgacctcccacttctcagtgctcagcttcacgcccagaccccaggaccacaacaccgacctcacctgncatgtggacttctcag

SEQ ID NO: 211 - DNA, 1859 bp, Homo sapiens
  SIMILAR (1417)..(1620): 351254mologous to Homo sapiens Human PRO940 protein sequence,accession number Y41724,Smith-Waterman Score=85.
ctctgcttttccgatgacccagggcccagagggagagcccccaccccactaccccacccccagccaggcccccaggatagacacaagcctgccctctcctcctacacagggagctctggaaggaccagctcaacaagcccaaggccaggctgggcccccaggagacccagaggacaactgggcaaggtgggccggagagtgtgggggaaggcaaaggagttctgtgagctcagcgtctgaagctcatttcatgcatcaggccccagggctcagcttccgccttcggcttccccttctgccaagagccctgagccactcacagcacgaccagagaacaggcctgtctcaggcaggccctgcgcctcctattctgtagatgttactgccactgctgctgtcctcgctgctgggggggtcccaggctatggatgggagattctggatacgagtgcaggagtcagtgatggtgccggagggcctgtgcatctctgtgccctgctctttctcctacccccgacaagactggacagggtctaccccagcttatggctactggttcaaagcagtgactgagacaaccaagggtgcttcttgtggccccaaaccccccagagtcgagaggtggaaatgagcacccggggccgattccagctcactggggatcccgccaaggggaactgctccttggtgatcagagacgtgcagatgcaggatgagtcacagtacttctttcgggtggagagaggaagctatgtgagatataatttcatgaacgatcgggttctttctaaaagtaacagccctgactcagaagcctgatgtctacatccccgagaccctggagcccgggcagccggtgacggtcatctgtgtgtttaactgggcctttgaggaatgtccacccccttctttctcctggacgggggctgccctctcctcccaaggaaccaaaccaacgacctcccacttctcagtgctcagcttcacgcccagaccccaggaccacaacaccgacctcacctgccatgtggacttctccagaaagggtgtgagcgcacagaggaccgtccgactccgtgtggcctccctggagccccagccccagggaaatgtcccatacctggaagcccaaaaaggccagttcctgcggctcctctgtgctgctgacagccagccccctgccacactgagctgggtcctgcagaacagagtcctctcctcgtcccatccctggggccctagacccctggggctggagctgcccggggtgaaggctggggattcagggcgctacacctgccgagcggagaacaggcttggctcccagcagcgagccctggacctctctgtgcagttgtccaggatggttccctttacccagagggaagcccctggtccgtctagagccggtcccctgtctccatttcagatcctccagagaacctgagagtgatggtttcccaagcaaacaggacagctgcctggattcgacctggaccctctacttgctggcctgtgtggtgctgagcagcttacccgggctcctctgtgacctgggtagagccagccctcttgaaagtcactctgaggcctgcagagacaggatgggtccagttcccagtgcacagcaggtgccagcagcccctccctctgtccctcctgagctgctgaatgtcatctctacaggacatcctggatactctcgaaaggccagcatgggaatccaacctcattgttcctatctcagccctgccccaaatcctagagagaaatggaaacatctcaatacactatcatacaaatatgttcacagcagctgtcttgataattgccacaaccaaaacagtatcaatgaatag

SEQ ID NO: 212 - DNA, 400 bp, Homo sapiens
  SIMILAR (5)..(55): 881254mologous to Homo sapiens peptidylprolyl isomerase,accession number X52851,Smith-Waterman Score=73.
  misc_feature (1)...(400): n = a,t,c or g
tttcgtgggccgcgtctcctttgagctgtttgcagactttgtcccaaagacagcaggttggtccattttctaagtttaacaaagatgttccaattgtgacagtttgtgtgtgtgtgtgtatatatatatttttatgtatgtatatatgtgtttaannnnnnnnnnaaacagaaaattttcgtgctctgagcactggagagaaaggatttggttataagggttcctgctttcacagaattattccagggtttatgtgtcaggtacgaaatttactgaattttattttatttgggttgctcccttcatttgggattgagccagaatatttcaggatacacatatctgaactgttactctaccatttcgggtctatttaacccttctattcagtttgaacttg

SEQ ID NO: 213 - DNA, 1032 bp, Homo sapiens
  SIMILAR (309)..(416): 691254mologous to Homo sapiens peptidylprolyl isomerase,accession number X52851,Smith-Waterman Score=141.
atggtcaaccccaccaggttcttagacatcatcgtggatggtgagctcttgggacgtgtctcctttgagctgtttgcagacaagattccaaagacagcagaaaatttttgtgctctaatcattggagagaaaggatttggttataaaggttcctactttcacagaattgttcctgggtttatgtgtcagggtggtgacttcacacagcataatggcactggtggcaagtccatctacgggaagaaatttgatgatgagaacttcgtcctaaattatacaggtcctggcatcttgtccgtggagaatgtgctggacccaacacaaatggttcccagtttttcatctgcactgccatgtctgagtggttggatggcatgcaggtggtctttggcaagggaaggaaggcctactccctctgctggcctcaccgatgacttacctcatgatgagaccgagaccatcatccctgagggtgtgacttcctgttcatcacagcttctctggccagattgccgtatctgtctttttgcaattgtcacaattggtgctcctacatccaggcaagagttgaaagaagagcatggggtgttgaaagccacagatttctggcacaacatgaagaataactcaatgatttgccgaaaagaagagaaatatattatcccttcagttcctaaacttacttgttttctcatcttcaagaacgaaaatgcacatgtacaaggctggtattcatcccggtgtactggtatggctgcgaaggtgtcaactgcactaacaagccatttaaagctgctgtcacaccctttaagtaccttccgtctggactggcagttctccagctctggtgtgatggaccttccaaccttacagcagttaagtttctttctccctccctgctgcttgcactcttgcaatttggatgttgagttacatgatctcctcaagtctcttaacctcttcctccaagctttccagtcccctttccctttgagagtaaaggggacaagaaccccatttaagctgaactaa

SEQ ID NO: 214 - DNA, 454 bp, Homo sapiens
  SIMILAR (220)..(387): 581254mologous to Homo sapiens Partial seqeunce of the clone 9 protein,accession number W42400,Smith-Waterman Score=142.
tttcgtgcagccgcagaagcggcagcggcggcggcgcggtgcaggcaccgttccggggagaggcaccatgagcggatcacagaacaatgacaaaagacaatttctgctggagcgactgctggatgcagtgaaacagtgccagatccgctttggagggagaaaggagattgcctcggattccgacagcagggtcacctgtctgtgtgcccagtttgaagccgtcctgcagcatggcttgaagaggagtcgaggattggcactcacagcggcagcgatcaagcaggcagcgggctttgccagcaaaaccgaaacagcactttttatgaagactggtcttttgtgatggatgaagaaaggtccagtatgcttcctaccatggcagcaggtaagcctggcccagaccagggtgcagggccttgtgacacttggcagaggggctgccttggggcagttc

SEQ ID NO: 215 - DNA, 911 bp, Homo sapiens
  SIMILAR (173)..(57): 1001254mologous to Homo sapiens Partial seqeunce of the clone 9 protein,accession number W42400,Smith-Waterman Score=193.
aaaaagagcagaaggaagacaagctcctccaagctacagccaggcagagcagtacctgtttcggttttgctggcaaagcccgctgcctgcttgatcgctgccgctgtgagtgccaatcctcgactcctcttcaagccatgctgcaggacggcttcaaactgggcacacagacagcaccatgcctggttgctacagagaatgtgaccgacatggtctctccagtcagggaactcaagatcatgaacctgatgtacattttggtgggagatgcatctcaggagatttcgtataaacggtcatttgaatccagcacaagacttaagaaggtgcgcaccccagccttgaagctgccacttaaaggaaacccttatctcccacttgtacagaagcaagccttgtgggaaaacattgctaacagaaaaacaaaagcacacagccatctgtgcattatccaggaagctgctcctgcctgtcggcagctgactgtctaccacacacagctcttcacgggcgataattacaacttctataagcctgtgctgaatggatccctttggacgagccccagagttgtcatgactggctatgacgttacaacagcacaaatcaagcctcatatgagtcatctggttgtgcggaatgacaatttactgagggcaagtgttccttccacacaccacactgtcatcctggtggggaccagggcaagctcactgaacaattgggaacctgagccgtgcttgcaaaactgggaaggacagaacaggccccacatacagagtcttgcagggaacaaggacatcatcaacctgttgtcactgcagaattcattctcagttacactggcgggcatctgggatgcccggcgctaccagcccaatgatgactttagtgttgctgctattgtttaa

SEQ ID NO: 216 - DNA, 1131 bp, Homo sapiens
  SIMILAR (7)..(666): 671254mologous to Homo sapiens cytoplasmic protein,accession number AF177377,Smith-Waterman Score=708.
ggcacgagggacattgattggacgacatatacctgtgtgctaggatttcaagtatttggtgtctggccagaaggatctgatgggacagatatcaatgcactggtgcgatcccacaatagaaaggtgatagctgttgccgatgacttttgtaaagtccatctgtttcagtatccctgctccaaagcaaaggctcccagtcacaagtacagtgcccacagcagccatgtcaccaatgtcagttttactcacaatgacagtcacctgatatcaactggtggaaaagacatgagcatcattcagtggaaacttgtggaaaaagttatctttgcctcagaatgagactgtaagcggatactactctaaccaaagcccccgtctcttccactgaaagtgtcatccaatctaatactcccacaccgcctccttctcagcccttaaatgagacagctgaagaggaaagtagaataagcagttctcccacacttctggagaacaggcctggaacaaactgtgggagccaagttgaagaccacagcgaggaggagagtgaagagggcagcggagaccttggtggagcctctttatgaagagccatgcaacgagataagcaaggagcaggccaaagccacccttctggaggaccagcaagacccttcgccctcgtcctaacaccctggcttcagtgcaactcttttccttcagctgcatgtgattttgtggtaaagttcaggtaacagggtgggcagtgatggagaatcactgttgattgagattttggtttccatcgtcgatttagttttgcttcmaataagtcttattttcaagcccctcaaaatacagccaaactttaaagtttttagtttggtctttatttgaaattaaccaaacttaatactagggagaagactgaatcatttaatggatgtcttcacaaattactgtgtacctaagtggtgtgatgtaaatactggaaacaaaaacagcagttgcattgattttgaaaacaaacccccttgttatctgaacatgttttcttcaggaacaaccagaggtatcacaaacactgttactcatctactgggctcagactgtactacttttttttttttttttttcctgaaaaagaaacca

SEQ ID NO: 217 - DNA, 523 bp, Homo sapiens
  SIMILAR (112)..(44): 541254mologous to Homo sapiens Human secreted protein, SEQ ID NO: 4947,accession number G00866,Smith-Waterman Score=63.
atgaagaaccttgcttctgcttcagttttggagcagtggagatccaagaccaaggctctagcagattcgatgtctggtgaggtcctgcttcctcatacacggtgccttcttgctatgtaccacaagttcctgcaagtgaaatggcagatgtatgagtcacttcataagatgggaacaggaagacatcctgttgatgccaagccattttcagttcagtgatgagaatctaccccccgcaagaaagtgtgtttgtatcttcctcctttccccagtgcacagggggtcagcacctggctctttcccttgtgagaactcctccacttggtttagcgcccaggaaatcagccctgtctttcatttgcatctgctatgttatcagaagatcctctttgccaaagatactttctgtctgaactatttttaaaaaaatattttcccttggtctgttcttctttagaataatattgtactctgtgatgttttaggattttttttcatggagaatttttgtatggctcccgac

SEQ ID NO: 218 - DNA, 434 bp, Homo sapiens
  SIMILAR (64)..(321): 881254mologous to Homo sapiens apolipoprotein,accession number X04898,Smith-Waterman Score=353.
  misc_feature (1)...(434): n = a,t,c or g
gacagagacgctggctaggcgccctccccactgttaccaacatgaagctgctcgcagaaacntgtgctactcctcaccatctgcagccttgaaggagctttggttcggagacaggcaaaggagccatgtgtggagagcctggtttctcagtacttccagaccgtgactgactatggcaaggacctgatggagaaggtcaagagcccagagcttcaggccgaggcaaagtcttactttgaaaagtcaaaggagcagctgacacccctggatccaaggaaggctgggaacgggaactggtttaactttctttgagcttattttcgtgggaactttgggaacacagcctgcccacccagttgaaagttttcccaggaccatttgtctttcccaaccccagctgggccttttaggaacaacccattggccagtccttg

SEQ ID NO: 219 - DNA, 632 bp, Homo sapiens
  SIMILAR (122)..(265): 331254mologous to Hepatitis G virus nonstructural protein NS5a,accession number AJ230140,Smith-Waterman Score=63.
cgcactagtgcttgtagcatagatgtcgactgactgaaccaacatgatgtttcatgctgctatttattgtagcaaagaagtgggtaagggaacaggaaacctcctaggaactggcccaatgggttgttccctaaaaggcccagcctggggtttggaaagaccaaatggtcctgggaacaacttcaactgggttgggcaggcttgttgttcccaaaagttcccacggaaaaatagctcaaagaaagttaaaccaagttcccgttcccaagccttccttgaatcaaggggtgtcaagctgctccctttgaacttttcaaaagtaaagactttgcctcaggcctgaaagctctggggttcttggaccttctcccatcaggtccttgccataagtcagtcacgggtctgggaagtacttgaggaaaccaggggctcttccacacatgggctcccttttgccttgtcttcccgaacccaaagcttcctttcaaggctttcaagatggggttagggagtaggcacagtttcttgccgagcagttttcatgtttgggtaaccagtgggggaggggcggcctaagcaagcgtcctctggtccttggtgtctgtcagtcgacatctatgctacaatcccgg

SEQ ID NO: 220 - DNA, 374 bp, Homo sapiens
  SIMILAR (71)..(250): 341254mologous to Human immunodeficiency virus type 1 truncated vpr protein,accession number AF197341,Smith-Waterman Score=70.
ggggcagctgtgtcaatgatgcagctatgcgggggctgagatggactctaggagctgttccctgagattgagagctcatcacaatttctccacatctgtagaggctgcagaagaactgaaggagcagctgaggtcagtgcctctttacagctcttatgttcacaacacaatcagagttgtttattctggcattcaacatggtctgactctgctgaaacatctcctttctaaggctttccagaagggctgtttaggaaaaggaggaaatggagttggtgctgtgtgacttctaatgggataatccaacagcaagtgattagtcacctatagaatctaaagctaagcaattaggatttggcgttatttctcgtgcc

SEQ ID NO: 221 - DNA, 1628 bp, Homo sapiens
  SIMILAR (1403)..(1236): 481254mologous to Homo sapiens Human secreted protein, SEQ ID NO: 5731,accession number G01650,Smith-Waterman Score=107.
gggagtgaagatgcttaaatattttaaaatttttatttgaatgaaatcattgtaataatcattaaagtgatttgaaatagaatgatctctgtgaaaggaagtttatagcatcactatttataggagagaaagcagcagaggtatgcatctggaagtgaatataacattgtaaaatcagcccacattaaataccaaaaaagtaagaaccatcaaaatgcagcattatttacaggattaaaaagtgtgaacaggaccaaagttaaactttcttatgtgtgaattttgacctgctatgttgttagcaaaaagctttagtgtttgtataaaatgagtgtgtacccttgatcccaaccaccaccagattcaagacacaaactggacaatggattccttcccctattttacagctttattactggatttcccccctaaaaagagactcaagtgtggagctgactcatctatagattaaggaatcacaaagtaccatagtcacttaacaaatgcaaaaaaaaaaaaaaaaagcaattgttttacctttcaactggctcgatcgttatgtacaattctatcacaaaaagcaatagctgtgcattccatgagctgattatatcaaccctctagaattttagaaacgagcacatctaagcatatggatactctcttaccttacaaagtaaaagcattttctattttaaaatttttatttctgtgtaaaacaaagaattcctagaggtcaaataatataccaaacttaaagcactattaagtcatgaaacaaagaagattctgaggtagaagtcaagcaataataatcccacagtttcaggtattcccagcaaccatccgcatttccgcaaggtaaggacctattttttttaaagtctcaacttcccaaaaaatcaataatccattctgtaaaattcagatgtaaaacctatgacccaacagaagacaccccaaacttttcctcatggtaacagagtaaatgctttttcttaaaagctggcaaacattttctatcagtagtaacccgtaaggagggcccgctgggttgtaacccataaatgtccaaaattgctggggggtaggtaagggttcttgtctgtggttgcggggtagttgttacccccagggatcgtccatgccactggattgggatcgattgtcaacttggccaccccccatcttgttgtccctggcttctggaactggtctggttgtcttggaaaccggattgcctctggtttcttttggttcccaacccaggtctgctatttccatttcctcaacaatttggagggagacttcaggaggggcgtttcagggtattcctgatacttcctttgtcattttctgtgaaatctactagcaaacatctcttcaaactttggaacagcttcgggcagtgtcagtcattctgaaaatcccaaaggtttgaggcagctgtactgcttaatgtttaggttgtttaaatccgccaagggctatgtcaatccagctcaggccgaaccccgccggcgagacactgagaagcccaggagaggtggcctctggtccactaaaacgtgaaactccagaccactccagttctccaatgtaaccgagcgcctgtcctctaaaatccg

SEQ ID NO: 222 - DNA, 720 bp, Homo sapiens
  SIMILAR (8)..(73): 501254mologous to Homo sapiens ORF; putative,accession number L33997,Smith-Waterman Score=65.
atgctctcccctctcggcatcttcacagcccagctggggtgctcagccaggctcctgctggatgtggaagggctgagaaaggcacaaaccagcttgtctcctttttcctcatatccacccaaccagctcaacgttctcattccttttatcctctgtggtcgtgagaacattccagagaaagcaagtgaatgcacacaagacaatcgtcagttatttctggaagcagcaaattccaacagatctcttgcttttaactttagggctataaattccaatttactgaccaatttgaagtgtaataaattatattccagtggcagagaccaagtgacagccagttggacctgccccaaacgcactcacactgagatgcagacgcacaccgtggcgactcgaggggctctgcgaaggcctgctgccagtgatctagcagaaagaaagaggagagataaagataaaaatgaggcccaaggggtagaaatgaggataatgatgtacggtcatcagttatgcaaaacattaagagttactttatcaaaaggtcagactgcaggtctaccaggtttctgcagcgcctctccaccttctcttcatggctctgatgccacgaatacctcacaagcttgctccaagtcacattcagtgggacttgctttcactttccaggacgaggttcctctgtacaacccacttcagtgtggaaccttcagcaaggaatga

SEQ ID NO: 223 - DNA, 430 bp, Homo sapiens
  SIMILAR (117)..(287): 351254mologous to Homo sapiens Human HUPF-I mutant protein fragment 53,accession number Y21405,Smith-Waterman Score=71.
atggcacgttcatttcctggagctgctataacaaattactacaaactcagtggcttaaaacagcagaaattaattctctcgcagttgtggacgctggaggttggaaatcaaggtgaaggcaaggccacactccctctgaagatgctagggatgagcccatcctggcctcttccagcttctggtgttccttgggttgcggccgcatcgctccagcttctgcttccttgttcaaacagctttctccatgggtctccgtcctctcttcttataggactgtcagtcattgcttttcgggcctacctcatcttaactgaattacacctgcaaagactccatttccaaataaggtcccattcacaggaagtgaatgatgaatgtgagagagttcatacgggtttccaaacaggattgtcctggctgcaagacccag

SEQ ID NO: 224 - DNA, 656 bp, Homo sapiens
  SIMILAR (33)..(203): 351254mologous to Homo sapiens Human HUPF-I mutant protein fragment 53,accession number Y21405,Smith-Waterman Score=72.
ctgtggacgctggaggttggaaatcaaggtgaaggcaaggccacactccctctgaagatgctagggatgagcccatcctggcctcttccagcttatggtgttccttgggttgcggccgcatcgctccagcttctgcttccttgttcaaacagctttctccatgggtctccgtcctctcttcttataggactgtcagtcattgcttttcgggcctacctcatcttaactgaattacacctgcaaagactccatttccaaataaggtcccattcacaggtaggaggggtcaggacttgagcctgtgttcttgggaggacagaattcaagccaccatgatggatatgatctctattataaattattcagtatagagactctggcctaggaatctgggaaccaccgaatgattaaaagctgctctgtaaagtttacaaaatctgtctctccaggaagtgaatgatgaatgtgagagagttcatacgggtttccaaacaggattgtcctggctgcaagacccaggttcaggctcctccgtgactatctcccgtccaaacaaggaacggtcccagtggttaaaagaactggagaagggggaagaaatcaatgaagctgtcccaagattatcccaccatatgagccaatgcaacacagagtga

SEQ ID NO: 225 - DNA, 925 bp, Homo sapiens
  SIMILAR (475)..(119): 331254mologous to Homo sapiens Human neurofilament-H mutant protein fragment 11,accession number Y20852,Smith-Waterman Score= 121.
gcggccgcggagaggcacttaaaagccccgtgttaccctagaccttaaaaaaaaaaaaaaaaaaactgcgtgtttccacccccgtcggcctgcagtggaagggcccgagcagaaccaacgggggaggggacgctgagcgcgccgtgtttctcctcccgtctgcctggagtagaacggcccgggcggaaccaacgggcagccgcgggggcgttgtgggccgcggcgcgtttccccgggctccgtggctctggggcactgaggagcggcgcccgcggggcagcgaggagcccgatgcagggttctgcgcgtcatttccggtcccgcgggcgccccgtgaagcccacctggatccgccagcgctgtgccactccccagtgccgagctccgagctgtctccgggggcttgcggcccggccctttcaccgggcacttcttaggccccgcccgccagcgtccctttgttgtgaaggcgccggggcctagcgctatgcctgcggcggagactgcatcaggctctcggtgggttctgcgtgcggggtgctctgctcggtgatcggtgcttggtgctgcgtgctcggtgctcggtgctgggtgctgggtgccggtactgatgctgagtgtgaggcagtattttagaaggggtcgctgaggcaggagtaggaaggctttccactccactcacgcattttcagtgtaggcgaatcgtaaaacggagggcagaacgaaaatgagcggatctgggagtgcaggctgcgcttcgtccacatcgataacagatgtttcctggtgaagatgtgtagggcgcagcgggtcacctggtcgggggagggcacagggcgtccctccacggggtgcctttggcgttgggcacttgtgtggtctccagcttccgggttttggaagcggagtgtcccctgcagcctga

SEQ ID NO: 226 - DNA, 930 bp, Homo sapiens
  SIMILAR (475)..(119): 331254mologous to Homo sapiens Human neurofilament-H mutant protein fragment 11,accession number Y20852,Smith-Waterman Score= 121.
gcggccgcggagaggcacttaaaagccccgtgttaccctagaccttaaaaaaaaaaaaaaaaaaactgcgtgtttccacccccgtcggcctgcagtggaagggcccgagcagaaccaacgggggaggggacgctgagcgcgccgtgtttctcctcccgtctgcctggagtagaacggcccgggcggaaccaacgggcagccgcgggggcgttgtgggccgcggcgcgtttccccgggctccgtggctctggggcactgaggagcggcgcccgcggggcagcgaggagcccgatgcagggttctgcgcgtcatttccggtcccgcgggcgccccgtgaagcccacctggatccgccagcgctgtgccactccccagtgccgagctccgagctgtctccgggggcttgcggcccggccctttcaccgggcacttcttaggccccgcccgccagcgtccctttgttgtgaaggcgccggggcctagcgctatgcctgcggcggagactgcatcaggctctcggtgggttctgcgtgcggggtgctctgctcggtgatcggtgcttggtgctgcgtgctcggtgctcggtgctgggtgctgggtgccggtactgatgctgagtgtgcgggagtattttagaaggggtcgctgaggcaggagtaggaaggctttccactccactcacgcattttcagtgtaggcgaatcgtaaaacggagggcagaacgaaaatgagcggatctgggagtgcaggctgcgcttcgtccacatcgataacagatgtttcctggtgaagatgtgtagggcgcagcgggtcacctggtcgggggagggcacagggcgtccctccacggggtgcctttggcgttgggcacttgtgtggtctccagcttccgggttttggaagcggagtgtcccctgcagcctgagcctc

SEQ ID NO: 227 - DNA, 455 bp, Homo sapiens
  SIMILAR (200)..(105): 311254mologous to TT virus ORF1,accession number AB017832,Smith-Waterman Score=59.
  misc_feature (1)...(455): n = a,t,c or g
gaagagccgnntcctnnacccaggggactgctatctgcgagnaacnnnnnnnctagngcaggcaggcttcatacgctattgtcctgcccgttagagcagcctgcgggttcagaatggattttggaagagggagtcaccactggacctccaaggaagccacgtgcagacatctacaaccttcgatctcctgacgagtttattgttggccaaaaccaggctttgattgaaccaggatgaatgcgggtgttggaagtagaatatatatatacatataaaattggttgggagccacgtgtaccagtgtgtgttgatcttggcttgattcagtctgccttgnnnnnnnnnnnnnnnnnnnnnnnnnnnnnnnnnnnnnnnnnnnnnnnnnnnnnnnnnnnnnnnnnnnnnnnnnnnnnnnnnnnnnnnnnnnnnnnnnnnnnnnnnnnnnnnnnnnngct

SEQ ID NO: 228 - DNA, 716 bp, Homo sapiens
  SIMILAR (446)..(646): 341254mologous to Homo sapiens cold agglutinin FS-2 H- chain,accession number M74469,Smith-Waterman Score=75.
ccggagtgtggtacttctcctagttgcagtcaggcttcatacgctattgtcctgcccgtaagttcccgttttgtgtgtggtgagtggaaactccatgttcttcgttggagacctctggtcctcccttcccttctttgtgccgtcgtctctgcggccagccctaatctccttctcgtggcttctccgtctctgaccccaaataggccttaagggcgtgggagaaatgagtttctggagctggaaaagccactgccttctgcacgggcctgagaagcccttggctggtgtaaatgatgacttcacttttttccccatcagatcgacaatgctgacgtcttatattttgccagttagttctgatacatcggcctcaaaaggcccggccttgttcgtttctgaccgtgggaagatggcggttaacgccctttatttgttggttcacaggttagagcagccagcgggtacagaatggattttggaagagggagtcaccactggacctccaaggaagccacgtgcagacatctacaaccttcgatctcctgacgaggtgtcggacttcaggggacttcaggaaacagcagcgagagagtttggcatagcttattgccccaggttgtggggtcttggaagagagctgccatacaacttaatgcctgatcggctggaggacgatccgagtggaaagggaacaatctggggctctggcttaccac

SEQ ID NO: 229 - DNA, 550 bp, Homo sapiens
  SIMILAR (212)..(42): 501254mologous to Homo sapiens Human secreted protein, SEQ ID NO: 5346,accession number G01265,Smith-Waterman Score=89.
tttttttttttgatttaaaaggattttattttctttatgccaggtaggcagttagaaatttccaaaggtcttaaccaatgacattcttggaaagtggggcaccagccttttaaaactcagggctatgtaatacagtaaccttgtggaactgggttcagcccagatcttcaactttcattgaaagcacaggggtctgtcctttttctttccaagagggctcctctcataatcccatcgcccagtttcaattttatatgtatatatatatatattctacttccaacacccgcattcaccctggttcaatcaaaagcctggttttggccaacaatataactcgtcaggagatccgaaaggttgtagatgtctgcacgtggcttccttgggaggtccagtgggtgacttcccctcttccaaaaatcccattctgtagcccgctggctgctctaaccacacacaaaacggggacttacgggcaggacaatagcgtatgaagcctgactgcaactaggagaagtaccacactccgagcagaattccaccacacgga

SEQ ID NO: 230 - DNA, 626 bp, Homo sapiens
agcgcagtgcggtggaatttcccggagtgtggcacttctcctagttgcagtcaggcttcatacgctattgtcctgcccgtaagttcccgttttgtgtgtggttagagcagcccagcggtgtacagaaatggattttggaagagggagtcacccactggacctccaaggaagcccacgtgcagacatcttacaaccttcggatctccctgacgagtttattgttggcccaaaacccaggctttgattcgaaccagggatgaatgcggggtgttggaagtagaatatatatatacatataaaaattgggtttgggagccacgtgtaccacgtgtgtgttgatcttggctttgattccagtctgcctttgtaaccagaaactggccgatgggaattattgaggagggagccctctggggaaaggaaaagggacagaccctgttgcttttcatggaaagttgaaggttcttggcttgaaccagtttccacaaggttactggtatacatagcctgagtttaaaaaggctgtgcccactttcaagaaatgtcattgttagactttgaaattttctaaactgcctaccctggcataaagaaaataaaaaccttttaaatcaaaaaaaaaaaaa

SEQ ID NO: 231 - DNA, 654 bp, Homo sapiens
  SIMILAR (445)..(585): 311254mologous to Wuchereria bancrofti myosin heavy chain- like protein,accession number AF285857,Smith-Waterman Score=65.
atgctcaacaaggacatactgggttttgagaacacagacttggagactaaggatttgggcagtgaggattccattccagaagaagatgattttggtgatgttctgtgggacatacatgatgaacaagagcaaatggaaacttttcagcaggcttctaattcagcccatgagttgggatttgagaaatattaccaacgccttaatgatctagtggcagcaccagccccgattccacctcttctcgtgtctggaggaccaggttctgggaagtctcttcttttatcaaagtggattcaattacaacagaagaattcccccaacacactgattctttcccattttgtgggaaggcccatgtcaaccagctcagagtcctccttgattattaaacgactaactctaaagtatagcacacaaaatgctgatttccaatctagccttttattggaagactgtgaagaagcttttctgaaaaaccctgaaggaaaacctcgattaatctttcatcgtttggaagatggaaaagtcagttctgactctgtccagcaattgattgatcaagtttctaatctaaacaagaccagcaaagccaaggtgagagatgctggtgactccaagcagggtggtggtagaggaaatgatgagaagtggtag

SEQ ID NO: 232 - DNA, 654 bp, Homo sapiens
  SIMILAR (134)..(24): 481254mologous to Homo sapiens Human secreted protein sequence encoded by gene 28 SEQ ID NO:133,accession number B08976,Smith-Waterman Score=88.
atgggagtaagtgagctctactacaaagggaaatgcaatgaaatcacaacaagataccacttcatatccaccagggtagtcaaaattaaaaaggcaatagcaagtgatagtaaggatatggagaaattggaacccttgttagtgggattacaaaatgttgtagccacttcggaaaacagtttggcagttcctcgaaagaagaaccaaaataacaagcagataatcacacctcaaatagatcatctaagagagaacactgaaattcaacaggaaagtgataggaaacccctaaacaaggaaggagaaatgctccttcctgattcatcatttggtctcttagatcctaggttagtgacaccagttgttatgagaaaaatctgtaatgtcccttcccaaactgggaaggagccaagagacaaaaagaatgatttgaggaagacagacgaagttgctaaatacccatggaaatccaaccctacgcggaaatccaatcctagtccatcatttcaagaccttacaggtgttgagattacaggcttgagccactgtgactggccaagggaccagatctatccaacagcagtaaatggaaaaaggagtttgattactgctttgcctgaacactctgattcagtcaaaacaagaggatactga

SEQ ID NO: 233 - DNA, 399 bp, Homo sapiens
  SIMILAR (306)..(398): 561254mologous to Homo sapiens Human cortexin-like protein,accession number B13343,Smith-Waterman Score=102.
ggcacgaggggacgggcctcgccagtcacactccagcgcccccacgagccagcacagtgcctgctctcagtgaaaggccactgttctccttgggtgacccccatgatgcctgaccgctcctcgtgcctcctggaacagccagggtccttatgaagtggtgaccactccagtcagcaggggtggaaaatggtaccagtcaaacccgaggcggaggaggagcagcccgcagtcgctgccgcgagatggaggagcccacgcccgagcccgtctatgtcgacgtagacaaagggctgaccttggcctgcttcgtcttcctctgcctcttccttgtcgagatgatcatccgctgtgccaaggtcatcatggacccttacagcgccatccccacatccacctggg

SEQ ID NO: 234 - DNA, 1182 bp, Homo sapiens
  SIMILAR (816)..(917): 541254mologous to Homo sapiens Human cortexin-like protein,accession number B13343,Smith-Waterman Score=115.
  misc_feature (1)...(1182): n = a,t,c or g
atggaggagtatgactctgtcttctacttcgcgaattcactagactcactcaatgcctcaccaactaaacaacaatgcggtgcgtacagactgtggatctgtactctaacaacaaagagttattcgcccaaaaatgttaccgacaccgatatatctccagacttaagagcatactttcccaacagtgaatatcctaattttagcatcttttgcaacccagatatgcagagaatcgttgaggaaccagctgatgattgcacatggtcaactcggattcttcttaccctgagtgaatttataatgtcgctgcagcgtactgtttatccccacagtgagaagtggcgtgctctctcagtcccttcatcttcctattttcaggagctggtgggcaccagaccaggaactggctctcaccttctggcatttactgtctatgtttggattcttcatcgtgtcctatggctttctcacagcatttggcaggactcttttccacttggatctgctacaacccaaccttacaccttcacgctttgacaagtacactggtctcttcatctatgaaatagagggagatgggttagatccatgttttcaaagcatggtccaaggaatcctagaggttttgtggatgtccaaagtggagagtgcataccacactaatgatggtgatactgctggagagggggtggaaaatggtaccagtcaaacccgaggcggaggaggagcagcccgcagtcgctgccgcgagatggaggatctccactcccgagcccgtctatgtcgatgtagacaaagggctgaccttggcctgcttcgtcttcctctgcctcttccttgtcgtgatgatcatccgctgtgccaaggtcatcatggacccttacagcgccatccccacatccacctgggaggagcagcacctggacgactgaggcacagcggctgtggggactggacctggcgctctgtgggtggctgtgccccaggatgcatccgtgtgttccctgccagcctgccatcccacagaggcaaggaatgaatctggccacccagggaaacagaaggtgcagcttagccctctcagccctccctcgagcaccagcttgggaatgcccgggtgccgtgggtgtcgcaaccatggaccagccaggggaaaagagcctnggaccagggacccaggga

SEQ ID NO: 235 - DNA, 366 bp, Homo sapiens
  SIMILAR (207)..(28): 371254mologous to Homo sapiens Human secreted protein encoded by gene No. 3,accession number Y38388,Smith-Waterman Score=68.
ggcacgaggtgggaaagagtgtaaatgcaggccccatgattgtcggggctggcacccgtgatcctactgaacacaaggcttctcctcaggactccggcgcaccacacaggttcccagtgttcccagtatttggctggggcagggcacgccatagcaggcagtttcccttccatcccccttgggccatactggatcggtccttctggaaacaatgactgataaagcagagaaggttgctgtagaacctgaaaatgtgtttaaacgtcccagggaatctgagactccttcatctcagaaaaggcagaagatggccctgttgttaaggaaacaaagagcaggagacagccttattggaagcctctgcct

SEQ ID NO: 236 - DNA, 534 bp, Homo sapiens
  SIMILAR (292)..(480): 341254mologous to Xenopus laevis Xtwi protein,accession number M27730,Smith-Waterman Score=89.
atgccccaggatcttccacaggaggagctggtgagtgccacgaaccaggagccaccggcagttataggacttatcaatgccccatgtaaccggtggcatgaccagcctgattctgcagatgaggaaaaaaggcagggagaggctgctcagcctctggccagtgcccgattcacccaggtgtttgtgtggctggagacgccctttgttcacggtttccataggtcctgggtccggcccatccagggagcttgttatgtttcaaagttggcgccctcggacctgccgtagtggcagagggcacagcccatgcaaaggccctgagagaggacctcgcctggggtgttggagaaacaggaggaggccagtgtgactggggcagagccacagcgagatgaggaactgaggctccgcagaattgaaaaactggttcaagatatcatgcgggtgcagagctcaaacctagattggtccaagctccgccaccactgggctggccccctggggcctcccaaggcgttcatcgcctccagctga

SEQ ID NO: 237 - DNA, 409 bp, Homo sapiens
ttctgccttctgctgtaggcagaaatgatctgtgcaagccaggatagaaaaatggccaagggctttggctctgagcaagactgcatgggttcgaattctgtttcctgtgtatgctggagactgtccgaacttgtaagtcactgtatgaagtctcagcttccttatcgggccaccagggatagataataaagtacccgcgcttcacagaatgttgtgagaatgagatgaaataatttatgtgaagcaggtacaatgtacaacggtatttggcatatggtaaggactcaggaaatagtaatagtcgttactcatgttattggttaagttgaattttcccaaagtctttgaataataaatcctttccctgtttttcaaagctaccttttaaaacgactcgtcttctcgtgcc

SEQ ID NO: 238 - DNA, 606 bp, Homo sapiens
  SIMILAR (329)..(228): 411254mologous to Homo sapiens Human 5' EST related polypeptide SEQ ID NO:1380,accession number Y65219,Smith-Waterman Score=63.
atggccaagggctttggctctgaggcagactgcatgggttcgaatcctgtttcctgtgtttgctggaggctgtccgaacttaaggctaatgattttaaaacgcccaaatccaataatagatatcacttactttcggggatgcacataccagaggaagtgctggggataaaggaaatctgtgaatcagagaaagatgttgaaactgagattggccctcaaatactcactggatcaggtctagacgtatcaaaggacccagtacaaggctgcatgcagaatggtaggaaagctggcttcccacaccagagccccccaggggaggatgcaccaagtaaagttcacgccacagatagcagacaaagcatgcctgccagcataacactggtgtggctgccagggtacctggctgtgaaaccaaaatatcaagtttctagccccgggtctctcactagccagccatgggtttctggtagcaaacggctgtcaaacaatctcatcagcaagcagagtgaattatctgccaacactgaaaactcaaaaagtgtcacactggcggctttcaccgaaaaatctagtcttgcaatcctgggcccacacctctgtaag

SEQ ID NO: 239 - DNA, 1257 bp, Homo sapiens
  SIMILAR (882)..(968): 431254mologous to Homo sapiens Human secreted protein, SEQ ID NO: 7577,accession number G03496,Smith-Waterman Score=70.
atggccaagggctttggctctgaggcagactgcatgggttcgaatcctgtttcctgtgtttgctggaggctgtccgaacttaaggctaatgattttaaaacgcccaaatccaataatagatatcacttactttcggggatgcacataccagaggaagtgctggggataaaggaaatctgtgaatcagagaaagatgttgggtatgcacaaaggtcactacaacagtcaaaaatagactccagttcctcattgctatgtttctccacttctctagaaggttgggcaggtgctaggaaggagttgcagtgtgagggcagatgtgatgtctatggagctacaaccatcctgcaaccagaaggaaagaggctaaagtttccaggagccatgaggaacataagaatagagccaactgagagggcttatgagcataaagttcacgccacagatagcagacaaagcatgcctgccagcataacactggtgtggctgccagggtacctggctgtgaaaccaaaatatcaagtttctagccccgggtctctcactagccagccatgggtttctggtagcaaacggctgtcaaacaatctcatcagcaagcagagtgaattatctgccaacactgaaaactcaaaaagtgtcacactggcggctttcaccgaaaaatctagtcttgcaatcctgggcccacacctctgtaaggggctgccaagcactatcagaaataaaacaagttggcagctccaacgataccattgcaccagtgccacgcacggcaggcattttctaagtgtacacttacaccatatctcccatctctctccttctacgagtagagaaatcactctgcctcctctgtttgacaaaaagccatggagccacagcagcctgcctgccactgcagaaactctcggggacagtcatgtgggcgaccgctggaatgttcaggctgctgtgggaaaagatggcctgccccatacgtttaagctcggatgctggggcaatgtacgaaagctagacctcagagctccagttggcaacgctggtgtttcagatgatggtgaaaaacagccccatgtacttgtcaaggaaagaaaaaaaaaaatagaaagaaagaaaaagtgggggagaaagactagggttcacagacagtctccactggtggaagaagtggtgactggacttctggtgactgagactccaatcagggactctccccgactacagtctcacttggacacacagacagacacctga

SEQ ID NO: 240 - DNA, 452 bp, Homo sapiens
  SIMILAR (170)..(262): 701254mologous to Homo sapiens Human secreted protein, SEQ ID NO: 5576,accession number G01495,Smith-Waterman Score=118.
  misc_feature (1)...(452): n = a,t,c or g
gggtannactagacctgatacttgnganncnnggannaagcagggacagccctttcaaactaacggggagggtgcctccgtattgactaaaaaggggatggacttactttccactgtgagagttacttatagtgtctgtgatggtcctgtatgcttccaaggcgatcggcagtgccagtcttcatctgctaagccaagaagatctgggaaggagtcagacggccttgggccagagttccaggggctctggaagtggctgccatgtgagttgaacagtccaattttcagtggggtcctgtacagatgggacatggctcatgaggaatcctgggctgtgggcacttgtagcaagctcctgtgggaggaggttctggaggaacccctggcagctgcggatcaggcgtttggagttcttgtgtgctggagatgtggctgtggtttgtctcacagag

SEQ ID NO: 241 - DNA, 511 bp, Homo sapiens
  SIMILAR (79)..(426): 431254mologous to Homo sapiens Protein encoded by the endogenetic fragment of HERV-W,accession number B07702,Smith- Waterman Score=223.
cgcacgacgaagctaggatcctgtagagcggccgcatacagtgtctctactcttttctctgggcttgcctccttcgctatgggcaagcttccaccttccattcctccttcttctcccttagcctgtattcttaagaacttaaaacctcttcaattctcacctgacctaaaatctaagcgcctcattttcttctgcaacaccgcttgaccccaatacaaactcgacagtagttccaaatagccggaaaacggcactttcaatttttccatcctacaagatctaaataattcttgtcgtaaaatgggcaaatggtctgaggtgcctgacgtccaggcattcttttacacatcagtcccttcctagtctctgtgcccagtgcaactcgtcccaaatctcccgcctgtcccctcagtcccaaccccaagcgtcgctgagtctttctaatcttccttttctacagacccatctgacctctcccttcctccccagactgctccttgccaggccaaag

SEQ ID NO: 242 - DNA, 374 bp, Homo sapiens
  SIMILAR (2)..(121): 751254mologous to Homo sapiens neutral protease large subunit,accession number M27826,Smith-Waterman Score=151.
cacggacgccgagcttcaggtaagtctcacagtggaaggtaagcccgtccccttcttaatcaatatggaggctacccactccacattaccttcttttcaagggcctgtttccctcaaaccccacaacaggacttaattaacctcaccttcaaggtgtacaataataaaaaaaaaagttgcaattccttcccagatcttctcggcttatcggctgaagactgacactgcccgatcgcctcggaagccccgtagaccatcacggacgccgagcttcaggtaagtctcacagtggaaggtaagcccgtccccttcttaatcaatatggaggctacccacaacaggacttaattaacctcaccttcaaggtgtgcaat

SEQ ID NO: 243 - DNA, 1671 bp, Homo sapiens
  SIMILAR (1159)..(1668): 791254mologous to Homo sapiens NAG13,accession number AF194537,Smith-Waterman Score=664.
atggagagcgaggaaaaacagggtagagtgacagcctacccggaagccacacaggaccattcccgccagcatcaggttggtgtccctttgggacagagcttccagaagaaggagcaggcagccatctttgatattctgctgcctccactggtgacatcgtcagcccgcctacacccaggtgaaataaacagccatgttgctcacacaaagcctgtttggtggtctcttcacacggacacgcatgaaatttggtgctgtgattcggatcgggggacctcctttgggagatcaatcccctgtcctcctgttctttgctccatgagaaagatccacctacgacctcaggtcctcagaccgaccagcccaagaaacatctcaccaatttcaaatccagctgctcctcgccaggctgagctaggtcccaattcttcctcagcctctgctcctccaccctataatccttttatcacctcccctcctcacacctggtccggcttacagtttcattccgtgactagccctcccccacctgcccagcaatttactcttaaaagggtggctgaagctaaaggcatagtcaagaccgtcacggacgccgagcttcgggtaactctcacagtggaagcacgctttaaaaagattaaagcctgttatcacttgcctgctacagcatggctttttaaagcctataaactctccttacaattccctcattttacctgtcctaaaaccagacaagccttacaagttagttcaggatctgcgccttatcaaccaaattgttttgcctatccaccccatggtgagccaggcgtgaagcagcaaagagtgtgtgagcaagtggacgtggggaccagccatagcacacagccaggagcaccagcacaggcgcgagcaatgtgggaggctgtggctggaccaggtgtgcctcaagtggcttccgccttgggcgccagcatctggatgaggggcagactgacacctcacacggccagatactcctctgagacaaaacttccagaggaacgatcaggcagcaacattggctgttcagcaatactcgctgttctgcagcctctgcagctgatacccaggcaaacagggtctggagtggacctccggcaaactccaacaaacctgcagctgagggtcatgactgttagaaggaaaactaacaaacagaaaggacatccacaccaaaaccccatctgtacgtcaccatcatcaaagaccaaagaaatacaaactaccatcagagaatactataaacacctctatgcaaataaactagaaaatctaggagaaatggataaattcctcgacacatacaccctcccaagactaaaccaggaagaagttgaatctctgaatagaccaataacaggctctgaaattgaggcaataattaatagcttaccaaccaaaaaaagtccaggaccagacagattcacagccgaattctaccagaggtacaaggaggagctggtaccattccttctgaaactattccaatcaatacaaaaagagggaatcctctctaactcattttatgaggccagcatcaacctgataccaaagcctggcagagacacagcaaaaaaagagaattgtagaccaatatccccgatgaacatcaatgcaaaaatcctcaataaaatactggcaaactga

SEQ ID NO: 244 - DNA, 311 bp, Homo sapiens
  SIMILAR (29)..(103): 351254mologous to Feline leukemia virus gag-pol precursor polyprotein gPr80,accession number M18247,Smith-Waterman Score=40.
gctgctcctcaccaggccaagctaggtcccaattcttcctcagcctctgctcctccaccctataatccttttatcacctcccctcctcacaccgggtccggcttacagtttcgttccatgactagccctcccccacctgcccagcaatttactcttaaaaaggtggctggagctaaaggcatagtcaagcatgctttgaaaggattaaagcctgttatcactcgcctgctacagcatggccttttaaagcctacaaactctccttacaattcccccattttacctgtcctaaaaccagacaagccttacag

SEQ ID NO: 245 - DNA, 1485 bp, Homo sapiens
  SIMILAR (784)..(933): 761254mologous to Homo sapiens calbindin D28K,accession number S46006,Smith-Waterman Score=195.
tgctctgagtatgaggactcctccccagctccagtaccagccacagatctcagctcaacactctcgagctctgtaccacaaccccaggatacagggaccagccagcagcttcatcccctggacccttggcatgagctgcttcgtgcccaggagctccaaggtgccaccaaccacaagggctacagccatgcagagcatgagcatgcaggcctaggtgtccagggtgggaatggggctctggctttttcgaacagtgggcacaggcatgctgttcccaccatcagctcaggcactggcaggaggaggactccaagttcttcggcttttggactcttgaacttacaccagtggtttgtcagtggctttcaagccttcagcgacagactgaaggctgcattgtcagcttccctacttttgaggtttggggactcagactggcttcctagctcttcagcttgcaaatgtcttatgctgggacttcactttgtgattgtaggtaacatctgtgctacactcaaggagaaatactcctcaatgctccatttagatgtgaccatgaagaaaaatggggagaaaagaacaaggctccaaaaaagaaagaagggaatgcctccacatccggcttatgaggacctaaacatagctgccatcactctccctgccaatgttgtccttcatcagccaagtggcttcagaacttcagggcagctggaccccgtttggtggtctcttgacacggacgcgcatgaaatttggtgccaagacccgggacttggatcaggggacttcccttgggagatcactcccctgtcctcctactctttgctccatgagaaagatccacctacgacctcaggtcctcagaccgaccagcccaagaaacatctcaccaatttcaaatccaagacaaaggagacaggttttatccatggacccaaaactccggcaccggtcacggactgggaaggcagccttcccttggtgtttaatcattgcagggacacctctctgattattcacccatgtttcaagggtgtcagaccacgcagggatgcctgccttggtccttcacccttagcggcaagtcccgcttttctggagaaggggcaagatttaattaacctcgccttcaaggtgtacaataatagaaaaaagttgcaattccttgcctccactgtgagacaaaccgcagccacatctccagcacacaagaacttccaaatgcctgaaccgcagcggccaggcgttcctccagaacctcctcccacaggagcttgctacatgtgccggaaatctggccactgggccaaggaatgcccgcagcccgggattcctcctaagccgcgtcccatctgtgtaggaccccaccgaaaatcggactgttcaacttacctggcagccactcccagagcccctggaaatctggcccaaggctctctgactgactccttcccagatcttctcggcttagcagctgaagactga

SEQ ID NO: 246 - DNA, 462 bp, Homo sapiens
  SIMILAR (79)..(135): 891254mologous to Human endogenous retrovirus tripartite fusion transcript PLA2L,accession number Z14310,Smith-Waterman Score=91.
cccgcctacacccaggtgaaataaacagccatgttgctcacacaaagcctgtttggtggtctcttcacacggacacgcatgaaatttggtgctgtgattcggatcgggggacctcctttgggagatcaatcccctgtcctcctgttctttgctccatgagaaagatccacctacgacctcaggtcctcagaccgaccagcccaagaaacatctcaccaatttcaaatccagctgctcctcgccaggctgagctaggtcccaattcttcctcagcctctgctcctccaccctataatccttttatcacctcccctcctcacacctggtccggcttacagtttcattccgtgactagccctcccccacctgcccagcaatttactcttaaaagggtggctgaagctaaaggcatagtcaagaccgtcacggacgccgagcttcgggtaactctcacagtggaag

SEQ ID NO: 247 - DNA, 1236 bp, Homo sapiens
  SIMILAR (907)..(1236): 1001254mologous to Homo sapiens heat-stable enterotoxin receptor,accession number M73489,Smith-Waterman Score=568.
atggacccgctgagcatgagcattcatcaggtggtgctcaggcctgatgaacagggcccaggccaggaacaacagcctcccctttatgtgatggagcctggtgaaataaacagctttattgctcacacaaagcctgtttggtggtctcttcacacggacgcgcatgaaatttggtgccatgactcggatcgggggacctcccttgggagatcaatcccctgtcctcctgctctttgctctgtgagaaacatccgcctacgacctcaggtcctcagaccgaccagcccaagaaacatctcaccaatttcaaatccgagacaaaagagacatgttttatccatgaacccaaaactctggcgccggtcacggactgggaaggcagccttcccttggtgtttaatcattgcagggacggcctctctgatcattcagccacatttcaagggtgtcagaccatgcagggatgcctgccttggtccttcacccttagcggcaagtcccgcttttctggggaaggagcaagctgctccttgccaggctgagctaggtcccaattcttcctcagcctctgctcctccaccctataatccttttatcacctcccctcctcacacccggtccggcttacagtttcgttccgtgactagccctccccctcctgcccagcaatttactctgaaaaaggtggctggagctaaagacatagtcaagaccatcacggacaccgagcttcgggtaactctcacagtggaagctgataacactttggccctgggagctgcatcccgcatcacagggcctacatggaggaagtccaagatcaaggcactggcagattcagtgtctggagcccaacagagcaaagcaagtgggcacaaggagtatggttctaacgtgattggggtcatgaagacgttgctgttggacttggctttgtggtcactgctcttccagcccgggtggctgtcctttagttcccaggtgagtcagaactgccacaatggcagctatgaaatcagcgtcctgatgatgggcaactcagcctttgcagagcccctgaaaaacttggaagatgcggtgaatgaggggctggaaatagtgagaggacgtctgcaaaatgctggcctaaatgtgactgtgaacgctactttcatgtattcggatggtctgattcataactcaggcgactgccggagtagcacctgtgaaggcctcgacctactcaggaaaatttca

SEQ ID NO: 248 - DNA, 1177 bp, Homo sapiens
  SIMILAR (934)..(1173): 761254mologous to Homo sapiens neutral protease large subunit,accession number M27826,Smith-Waterman Score=287.
atgcctttcagccccaaggctgccacctgctcccttgagaggctacactctatacttcaggtggtcctaagggagaaagtgacccaagagctaatatccattagacattttagcagacatagccatagtgggtatcttggtttatctccagaaagtactaaaacccaggcccagaataaaactgaaggatgtcggaccggcactctcactgtttctaggcttccaggaggtcctggtgtcttagctgtggatctcccaatacctgcagaatatttttggcgtcacgaacaggattcaaaaaccaaactgtgccactttttggccacaaggacagggctggaaactcgaggaaatcccaaatccagggatgggaactccccaatatcactgtcaattcctacaggattgaacgaaggggacgaatgcagaaatgaagacaaagacaaaagatttgttttaaaagaagggagacaaaggagacacgttttatccatggacccaactccggcaccggtcatggactgggaaggcagccttcccttggtgtttaatcattgcagggacacctctctgattatacactcacgtttcaagggtgtcagaccacacagggacacctgccttggtccttcacccttagcggcaagtcccgattttctgaggaagggacaaagggggatgtgtcagggtcacaagacaattgtggggagagggtcagccgacaaacacgtgaacaaaggtctttgcatcatagacaaggagcttgctacacgtgccggaaatctggccactgggccaagcgaatgcccgctgcccaggattcctcctaagctgcgtcccatctgtgtgggaccccacttgaaaattcggacttgttcaactcaccttgggcaagccactcccagagcccctggaactccggcccaaggctctctgactgactccttcccagatcttctcggcttagcggctgaagactgacactgcccgatcgcctcggaagccgcctagaccatcacggacaccgagcttcgggtaactctcacagtggaaggtaagcccgtccccttcttaatcaatacggaggctactcactccacattaccttcttttcaagggcctgtttcccttgcctccataactgttgtgggtattgacgggcaggcttctaaaactc

SEQ ID NO: 249 - DNA, 3131 bp, Homo sapiens
  SIMILAR (2115)..(2408): 941254mologous to Homo sapiens NAG13,accession number AF194537,Smith-Waterman Score=482.
atgaataatgatccttacattcctgcatctgcttttggggctcgccctgttaaaaccacagaagctcccccactgagcaccttgagacccctgcccctgcccaccaaagaacaaccccctttgactgtaattttccattaccttcccaaatcctataaaacggccccacccctatctccctttgctgactctcttttcggactcagcccgcctgcacccaatgaaataaacagccatgttgctcacacaaagcctgtttggtggtctcttcacacggacgcgtatgaaatttggtgccgtgactcggatcgggggacctcccttgggagatcaatcccctgtcctcctgttctttgctccgtgagaaagatccacctacgacctcaggtcctcagacccaccagcccaaggaacatctcaccaattttaaatcaggagagacaaaggagatgcattttattcgtggacccaaaactccggtgccagtcacggactgggaaggcagccttctcttggtgtttaatcattgcagggacacctctctgattatacacccacatttcaagggtgtcagaccacgcagggacacctgccttggtccttcacccttagcggcaagtcccgcttttctgaggaagggacaagctgctcctcgccaggccgagctaggtcccaattcttcctcagcctctgctcctccaccctataatctttttatcacctcccctcctcacacctggtccggcttacagtttcgttccgtgactagccctcccccacctgcccagcaatttactcttaaaaaggtggctggagccaaaggcatagtcaagcggctgaagactgacactgcccgatcgccttggaagacccctagaccatcacggacgccgagcttcagaaaagcagaacggactaaaggtcttttaaaaatacacctcaccaagctcagccaccaacttaaaaaggactggacaatacttttaccactttcccttctcagaattcaggcctgtcctcggaatgctacaagactggctactggccaattgggatatccttttatcagtcaaagctatgtcctggtcaatggatttcaaactgttgaggatctatgtgaagctgcagaccttcgagtgagtgttgcagaccttcgagtgagtgttacagctcttaaggtggcgcgtctggagttgttcgttcctcccggtgggctcgtggtctcgctggcttcagcagtgaagctgcagaccttcgcggtgttacagctcataaaagcaaaaagatgggactggggcaccttggagcagggggcggcgctcatcggggaggctcgggacgcacaggagcccacggagggggtgggaggctcaggcatggcgggctgcaggtccagagacctgccccgcgggaaggcagctaaggcccggcgagaaatcgagcgcagcgccgggctgacgatcaagaaggaaagatgcatacgaaatggatacagcaaagaaaaaatgaaactcatagttgtttctcatggcctccatgtaaatgacttgcagcataaactgacgcttttcaccaaggaaacatacacatacctagccagggattcagagaagcagaagcaggggtatctagcaggacttgaaggagcccatgccaacagggtgaaccagcagatcagtgacaacttagtagttaaaacaggggccttaccccctccttatagaaccaagggagaaaagctctatttttatatgtccagacagaactgccttttcagcgtatcagggcaactcctccaaggtttctttcctaatggaggacaagctgcacctaacccttatgctctgctttcccaaataccagaagaagcagaatggtttacagtcctggaccttaaggatgactttttctgcatcccttacatcctgactctcaattcttctttgcctttgaagatccttcgaacccaacgtctcaactcacctggactgttttaccccaaggtttcaggccatctatttggccaagcattagcccaagacttgagccagttctcatacttggacactctcgtcctttgtggggtgttaaagtctcccattattattgtgtgggagttgaatcaaatagacacaataaaaaatgataaaggggatatcaccaccgatcccacagaaatacaaactaccatcagagaatactataaacatctctacacaaataaactagaaaatctagaagaaatggataaattcctcaacacatacaccctcccaagactaaaccaggaagaagttgaatctctgaatagaccaataacaggagctgaaattgaggcaataattaatagcttaccaaccaaaaaaagtccaggaccagatggattcacagccgaattctaccagagggttgctgatgtaaaactgagagaagaaaaagatgaaaatatgctgttggtgcccctctcagatcttctttaccaggtccatgctcccatcccccagctgccagaggtgttggctgctaacagccccacctgccacttggatcctcccactatcacagaatccaagagcaatgaagccaccacaggacgacaagcttcactcaaatgtgaggcctcggcagtgcctgcacctgactttgagtggtaccgggatgacactaggataaatagtgccaatggccttgagattaagagcacggagggccagtcttccctgacggtgaccaacgtcactgaggagcactacggcaactacacctgtgtggctgccaacaagctgggggtcaccaatgccagcctagtccttttcacggggtgctctgctgaccaagccaatccagagaagaacaggcagctcgtgagcctctgccagccagcggcagcagcaggtagagacccagagccagagcccctgaagagttggcgattattcatcttcattgacaaaaccaaagaaaaggttttgatagtattgacattcacttctaaacactggttactagccatgcaagcaccaccaagcccttatcccacctatctggagaaagctttgacttctgaagaggcaagatacaaattaagcttagttaacaatttcccttatacagtcattgcagcctcatga

SEQ ID NO: 250 - DNA, 2347 bp, Homo sapiens
  SIMILAR (2206)..(1505): 851254mologous to Mus musculus protocadherin,accession number AF281899,Smith-Waterman Score=1033.
  misc_feature (1)...(2347): n = a,t,c or g
cgaattcggcacgagcaaccccttttcccacttttctggaaggtaagaaccccccaccccttctccgtgtctctactcttttctctgggcttgcctctttcactatgggcaagcttccaccttccattcctctttcttctcccttagcctgtatccttaagaacttaaaacctcttcaattctcacctgacctaaaatctaagcgtcttattttcttctgcaaagctgcttgaccccaatacaaacttaacagtatttccaaatagctagaaaatggcactttcaatttttccatcctacaagatctaaataattcttgtcgtaaaatgggcaaatggtgtgaggtgcctgacgtccaggcattcttttacacatcagtcccttcctagtctctgtgcccagtgcaactcgtcccaaatcttccttctttccctcccgcctgtcccctcagtaccaaccccaaagcngtcactgagtctttctaatcttccttttctacagaacccatctggacctcttcccctccttccccaggctggcttccttggccaggctgagctaggtcccaattcttccatcagcctctgctcctccaccctataatctttttatcacctcccctccctcacacctggtccggcttacagtttcgttccgtgactagccctcccccaacttgctcagcaatttactcttaaaaaggtggctggagccaaaggcatagtcaaggttaatgctcctttttctttatcccaaatcagatagcgtttaggctctttttttatcaaatataaaaacccagcccagttcatggctcgttcggcagcaatcctgagacgttttacagccctagaccctaaaaggtcaaaaggccatcttattctcaatatacattttattacccaatctgctcctgacattaaataaaactccaaaaattagaatctggccctcaaaccccacaacaggacttaattaacctcaccttcaaggtgtacaataataaaaaaaaagttgcaattcctccttgcctccactgtgagacaaaccccagccacatctccagcacacaagaacttccaaacgcctgaactgcagcggccaggcgttcctccagaacctcctcccacaggagcttgctacacttgccggaaatctggccactgggcaagggaatgcccgcagcctgggattcctcctaagccacgtcccatctgtgtgggaccccactgaaaatctgactgttcaacttcacctgggcagccactcccagagccccgtggaacctctggcccaaggctctcttgacttgactccttcccaagatctttgggcttagcaagctgaagactgacactgcttgatccgcctcggaagccccctgggtatattgcatgatgttgaggtttggggtatgattgattctgtcacccagatactgagtatagtacacaatagttaatttttcaattgtctcttctccctctctccctccatagtagtccccagtgtcttttgttgccatcagcagctgtatgacactgtccccaggtctcatgtctgtataaacatacacatcataggatatttcagggaaggttggcgtgttatcatttgcatccatcacttgaatattgacgatgactggctcactttcttgtacaccatcaaatgctgttatcgaaaaggtgtaagtttgctgttcttccctgtccactggttgaagtaaggtgaggtagcgagtaataccagtctgtgtgacggtgaagactgaggtgtagtcattcagaaaaaggtgaagctctgggtcttttgtatcttctatgtccttgtccagagctactattcttaaaggtgaagtcaaattgagactgtccgaaatggttgctcccactggggcagattccaggatatagccttgataactgggcattgtaaaatatggactttgattgttttcatccagtatttcaatgtgtagaccggcaaaggcaggaagaggatgaccattgtcttgttcagccttaataaccaaatcaaatttctggtgaaagtctctgtttactggctccaggagactaagttctgctgtcctaggatgcatatggaaaaatcgtgggtaatcctcaggagtccctttgctccagttaccaacaagttcctcatctctatctgagaccacctcagcctggttttcatcattaatatcattatcagcattttggtcaaagccattcggtaagtctctagagagttccaaactttctcgcatcttcctatcttctacagagccctgcaaactgttccaatctctgcctgttacccagttccaaagtcgtttctgcat

SEQ ID NO: 251 - DNA, 505 bp, Homo sapiens
  SIMILAR (191)..(268): 421254mologous to Homo sapiens Human secreted protein fragment encoded from gene 25,accession number Y30903,Smith- Waterman Score=61.
gcagatgatcaaagttttatttaacattatagaacacttaaaaataaacaatatgattgcatttctgttgtgtaactttgaaaaatgttttcaagcacacataaaagcaacaagttttacccccaacaagtatgctatgcaagccagtcccttaacttgctggggtcagcactgctctcaacagacagcttggggtagggaggtaggctgctgctacggaaggaaagcatgtttttaccccaattggcttagtttttccagaccaaaataaaacaaatagatcagcctagatacatagcccccagccttgtgtgtgtgcagcgtgacaaaacttgcagaagatctccacagagaaaaaaggatggagatggatatctttggagcgccctcagaactggtacctgccacacaacctgccccagtgctttgaaagtcagcaaaacaggctccctagaagctcatcaactttacgaagaaagctacttgccaaagatttccacacttt

SEQ ID NO: 252 - DNA, 723 bp, Homo sapiens
  SIMILAR (261)..(193): 471254mologous to Homo sapiens Human secreted protein fragment encoded from gene 87,accession number Y07938,Smith- Waterman Score=67.
  misc_feature (1)...(723): n = a,t,c or g
gattcctcccactgtcactgtgcctccagtcattttaagaagtccttgtatcctaatgatacagagaagaagaaagtgatagcctacaggaaatttgacacctatcccccaatttatggtggtcttcaagctgacagagaagctgacggaacagaaggagtggatgaagatataattgtgacccaaagtcagaccaacttcacctgccccattacaaaggaggaaatgaaggaagccagtgaaaaataaagtgtgtggccacacctttggaagaggacgccattgttcgcatgattgagtccaggcaaaagcgggaagaaaaaggcccctattgcccctcaaaattggctgtaggcccacacggatataagaaaagtccagatccttatccagggatgaagcaccttagaagggcaattgagaacccataacaagaaaagacatcgtcattcccgagttagggaaaagccaccctgcctgcagggacacccagccagcctacctcctaccccagctgtttttttgnaggagcagtgttgaccccaggcagttagggactggcttgcatagcatacttgttgggggtaaaacttgttgcttttatgtgtgcttgaaaacatttttcaaagttacacaacagaaatgcaatcatattgtttatttttaagtgttctataatgttaaataaaactttgatcatctgcagtgtcaaaaaaaaaaaaa

SEQ ID NO: 253 - DNA, 321 bp, Homo sapiens
  SIMILAR (195)..(163): 631254mologous to Homo sapiens Human bcl2 proto-oncogene wild type protein fragment 1,accession number Y21104,Smith-Waterman Score=35.
atggctgacttgaagaagatggcagagatggagcagatccagggcacgtttgctccagaggcacccactggaggcggccttcaggcatctcatcaaattgtttttaccaaaatggattataatgatagctttatatggctgccttcaaacaagactgtgcactctctgaggcaacctggaaggctccaggggagctgttgccagtcacagccctcagccctgaagactgccctgcgtcttgacttcctacagccatggcctgtccgccacctttctggtggtacacaagattgcagcagtacaaatgaagttcccggttag

SEQ ID NO: 254 - DNA, 174 bp, Homo sapiens
  SIMILAR (96)..(4): 411254mologous to Hydra sp. mini-collagen,accession number X61046,Smith-Waterman Score=66.
atgcgggctggggacgccttggggcggctgcaggctggggcgcgcccctgcacccggcgggcctccgctgcgtccactgcggacaggggtcggcgggttccagcaactgctgatgcggatgagaaggcctttggcgggtggaggaaaatcttggggtatcgcacatttttataa

SEQ ID NO: 255 - DNA, 531 bp, Homo sapiens
  SIMILAR (527)..(312): 971254mologous to Homo sapiens bA108L7.7 (novel protein similar to C. elegans C25A1.13 (Tr:O02220)),accession number AL133215,Smith-Waterman Score=369.
tttttttttttttgtgaccttggataagtttattaacctgttttataaatctgtattcacacagatataaagtgcctagcccatcacagcagagctctccgtagctcagtggttgttccaataagacatcagggattcttcagaagccagccttcagacctctcactgtgttttgagatcattattatcaatttggatttaaaaaacaagggccctgtaaaacccttgaagtcttcctcatctcaggttttagggatgccacttgcataaaaatgagtggttcacaaggtcactgcccccagaagcaggcactgggctggggcaggatcctgaacctctcgggggcgtagcccgcggaacgtggtcggcttgttggtgaaggggtgccactggccctggatgctagggttgtcggtgtggaagggcttgcggatgcggatcacgtccaagcccgactggtcggccagcttctgcaccagcggtcagatctcctcgaccgacttgcagtggatgctctcctcgcgcacaggc

SEQ ID NO: 256 - DNA, 1103 bp, Homo sapiens
  SIMILAR (951)..(787): 611254mologous to Homo sapiens bA108L7.7 (novel protein similar to C. elegans C25A1.13 (Tr:O02220)),accession number AL133215,Smith-Waterman Score=159.
tttttttttttttttttttgaaatgggaccttggaaaaattttattaacctgttttataaatctgtattcacacagatataaagtgcctagcccatcacagcagagctcatccgtagctcagtggttgttccaataagacatcagggattcattcagaagccagccttcagaccatcatcactgtgttttcgagatcattattatcaatttgggatttaaaaaaacaagggcacctgtaaaacaccattgaagtcatccatcatcatcaggttttaggggatgccacattgcataaaaaatgagggtggttcacaagggtcactggcccccagaagcaggcactgggaaagaaacaggcagctcttcattatcccaagcaggaacctcttgtcaacttggccccattggatgggttcccaatttgccttgggctttggaaatcccaaagggggaaagaacccacccttttaccggagttaaacagtccaaaaaccttggggcttgcaagttggtggggcaaactcttcaactgtgcttgcaccttgggcttggggcaggaacctgaaaccttctccggggccgtagcccgcggaacgtggtcgggcttgtttggtgaaggggtgccacttgtcccttggatgttaaggggttgtcggtgatgaaaggcgcttgccggatgcggaatcaccgtccaaagcccgacttggtcggcccagctttctgcaccaggcgtcgaaaatctcctcgaaccgactttgcaagtggatgctcttcctcgcgcacagccccgttaaggtattcggccactacttctgggcacgcagcacggacgcgagtttacatatattactgacccctggattccgtcgggggaagtcgatcacctcccgctccacgaactccctggcgccgcgagacgaggcgccgtcgcggctgacgctgaagctcagaacgctgcagctgctgcacatagcgacccagtccgttgtggagaacgctgcgccaagaagcggctcggagtcccgcgcgccgtcatagctacagcttcgaggccccggagcctaagcagcgaggagaggggggcgggactaaacctcgtgcc

SEQ ID NO: 257 - DNA, 522 bp, Homo sapiens
  SIMILAR (135)..(287): 601254mologous to porcine endogenous type C retrovirus reverse transcriptase,accession number AF033260,Smith-Waterman Score=163.
tgtcctaaaacgagacaagccttacaagttagttcaggatctgcgccttatcaaccaaattgttttgcctatccaccccgtggtgccaaacccatatactctcctatcctcaatacctccctctactacccatttattctgttctggatctcagacatgctttctttactattgctttgcacccttcatcccagcctctctttgccttcacttagactgaccctgacacccattaggctcaacaaattacctgggctgcactgccacaaggcttcacagacagcccccattacgttcagtgaagcccaaatttcatcctcatctgttagtcatactcccgttcaccgttctcaactactcatacatgccctggctccttctttacactggccgggtttacactggtttctccaaggacatcacagctggatatctcctgggtgctatccccaaactggccacttctaaactcttgaagtaaataaataatctttgctggcaggactctgctgaatctcctta

SEQ ID NO: 258 - DNA, 1533 bp, Homo sapiens
  SIMILAR (1257)..(1442): 371254mologous to porcine endogenous retrovirus pol,accession number Y17013,Smith-Waterman Score=107.
atggaaatgcaagaaaatggtgaaggagagagcagaaggcaggcagcatctgcgtgctcaaggacaggaggaaggaggaaggcgggagtgggcggaaacagcagtcagattctcagcagcactaaaattgtccctgccacttggcaggaggcagttcagacatcgcagatccaagagccttgtcctttcctcattcatgtaactgcacagggagccaattgtctggcagaattctgtgctaaatcagctaaaggagacaggaatggtggctgtggaatgcctccacagaggggccgtcagtcctgccagatcctcaccaaggattctgcagggccagtcttctcatcccctcccacccctacccttgatcagtaccagggcgtactgggtcacacagaaggaggtgagcggcagatgggacagtctagttccaggaaaacaagctcagggctcccactgattctacattatgcccgcctgcacccaggtgaaataaacagctttattgctcacacaaatcctgtttggtggtctcttcatatggacacgagtgaaatttggtgccctgacttggatcgggggacctcccttgggagatcaatcccctgtcctcctgctctttgctccatgagaaagatccacctacgacctcaggtcctcagaccgaccagcccaagaaacacctcaccaatttcaaatctgcatgctttgaaaggattaaagcctgctatcactcgcctgctacagcatggccttttaaagcctataaactctccttacaattcccccattttacctgtcctaaaaccagataagccttacaagttagttcaggatctatgccttatcaaccaaattgtttttcctatccaccccgtggtgccaaacccatatactctcctatcctcaatacctccctccacaatccattattctgttctggatctcaaacttgctttctttactattcctttgcatgcttcatcccagcctctctccgctttcacttgggctgaccctgacacccattaggctcagcaaattaccaaggctgtactgctgcaaagcttcacagacagcctccattacttcaatcaagcccaaatttcatcctcatctgttacctatctcggcataattctcataaaaacacacgtgctctccctgccaatcgtgtctgactgatctctcaaaccccagcaccttctacaaaacaacaactcctttccttcctaggcatggttagcgtggtcagaattcttacacaagagccaggaccacaccctgtagcctttctgtgcaaacaatttgaccttactgttttagcctagccctcatgtctgcgtgcagcggctgccactgctttaatacttttagaggccctaaaaatcacaaactatgctcaactcactctctacagttctcataacttccaaaatctattttcttcctcatacctaacgcatatactttctgctccccagctccttcagctgtactcactctttgttgagtctgccacaatcaccattg

SEQ ID NO: 259 - DNA, 481 bp, Homo sapiens
  SIMILAR (139)..(174): 691254mologous to Bacteriophage APSE-1 P22,accession number AF157835,Smith-Waterman Score=41.
cgtgtatgcctacatttttgtgtaattggaaatggactttttctttccaattatatacttctttatagtttttaaaagtggctttatataggtgatactgatagctatatatttatcttgtaaaagaccaatttaagttgttcattagagccaataatttgtcagctgattctcatgaggtgtatataaccaatctgatttgcgttcttctgaaactgcttatcaaatagatggccattagccctaaatggcaaaatccactggacagttttctgtattgtactcagtaaggtctgacatattttgcatgtttgaccactccttcatttttaaaatagtttttttattgccttcaagtgaaacatgctcttgggttttcctcctatctcatttgctgttctggtcatatttctggtttgctgttcttcctctcacttttcttcaaatattggtgtacttttttttcttttctagactccat

SEQ ID NO: 260 - DNA, 1110 bp, Homo sapiens
  SIMILAR (340)..(534): 801254mologous to Homo sapiens Homo sapiens B48 sequence,accession number W57569,Smith-Waterman Score=236.
  misc_feature (1)...(1110): n = a,t,c or g
cccagcgtggtggaattcgacaaatgggaaactaaggcctgtgggggatgcgagggtttggtgggaggccgtccaggtgggggtcgccaggtttagcgtgaggcgctccaggtcgagggttgcaaggtgccccttctgctcccgggctcaccctcctcccttgcgcgcaggctcctcacggcctccctgggaccccaggcgcgtcgggaggcgtcgtcctccagccccgaggccggcgaagggcagatccgcctcacagacagttgcgtccagaggcttttggaaatcaccgaaggggtcagaattcctcaggctgcaaagtggagggaggtggatgcctccggattccaatacaatttttcactggatacagttatcaaccccgacgacagggtatttgaacagggtggggcaagagtggtggttgactctgatagcttggccttcgtgaaaggtgtcccacgtggactttcagcccaggaactgatccgaagctcatttcaaagtgttgaaccaaaccctacaaagcaacagcaaggcttgccccctggnggggtcatctttctctatcaaactttggatngtggatggactggtgactcctgggattgtccacccaggttgtacccaatttgaaggaaacctggaattagtagaattctaagaaggtttacttctaatcatgtccctctcaattttatttcccgcagtccaggagtggttatggttttgccactattattttcagaatgtgaagattttactcttggcttaatttttccctccactcagtgcttaaggctgagcctccagatgctgttacctcagatttaatcactggttgaaactccgtataatctgtagagcctccatggctcataaaaatttggaattaaccttttcattgccttaagagctgcttgtacatatgtggatagctatgtataaaagcttcattctacagaagcaganacctcaaaaataatcactggatgaaaactcccaaaaatctgaaaagcctccatggcttaaaaattgggaanaacttttcttgccttaagagctgcttggacataatgggatagctatgtataaaaagctcattttaat

SEQ ID NO: 261 - DNA, 1551 bp, Homo sapiens
  SIMILAR (1550)..(1425): 761254mologous to Homo sapiens Human secreted protein, SEQ ID NO: 7214,accession number G03133,Smith-Waterman Score=179.
atgaggaggagggggaaacttgttaattcagttaattcaggggtgtccaacccgcgggtcatggacccatacccggagtgtctgttgactgttgggaagcagggagcacagcaggagttaacaagatatgaagagatgctcaaacacaatagtgaaaagagaggaaataaaaaccacaatgaaatcctccttagacctgcaaatattcagtttataataccagggcatgtccaccccagaggccacctgcagaaatttcctatccatgctgaagtttccctgagtctctctaccacaaggtgtcctctggctgttggggaatgcatggccaagtgtggagttgccaggaaattaactcctgggagcaacgcacaaccaagaaagcttggagttgaaataatatctgctattaatgtgctctgtggtcttaggaaaaaacactgtgcctacctgagtcttagttacacaatctacaaggtgaaaaggagcagtcttccaaatgccaggatcatggaccatgaatctccagttattctctgctggttccagggagctgcaggtgtgatagatgtgacatcacccatttgtgattacagagctgtcactctgggtaccaggatggccctgccaagaggcctggagaattggtgggttcttggtctcactgacttcaagaatgaagccgcggaccctcgcggagtgaagctgcagaccttcacggtgagtgttacagctcttaagacagcgcgtctggagttgttcgttcctcctggtgggctcgtggtctcgctgggctcaggagtgaagctgcagatcttcacgactcaggagcccagctggcttcacctagtggatcccgcaccggggctgcaggtggagctgcctgccagtcctgtgcgcccttgggtggtcgatgggactgggcgctgtggagcagggggtggtgctcgtcagggaggctcggccgcacaggagcccatggagtgggtgggaggctcaggcatggcgggctgcaggtcccaagccctgccccgtgggaaggcagctaaggcccggcgagaaatcgagcacagcgccggtgggccggcactgctgggggactcagtacaccctccgcagccactggcccaggtgctaagttccccattgcccggggccagcagggctggctgggtgctccgagtgcggggcccaccaagcccacgcccacccggaactccagctggcccgcaagcaccgcatgcagccccggttcccacttgtgcctctccctccacacctccctgcaagctgagggagtgggctccagccttggccagcccagaaaggggctcccacagtgcagcgggggggctgaagggctcctcaaatgccaccaaagtgggagcccaggcaggggaggtgccgagagcaagcgagggctctgaggactgccagcatgctgtcacctctcactttgggtatatacccagtaatgggatggctgggtcaaatggtatttctagttctagatccctgaggaatcgccacactgacttccacaatggttga

SEQ ID NO: 262 - DNA, 612 bp, Homo sapiens
  SIMILAR (236)..(108): 651254mologous to Homo sapiens Human secreted protein, SEQ ID NO: 7678,accession number G03597,Smith-Waterman Score=133.
atggtctttagcaacctgaagggccactggctccaaccaatcagattagactctggctcacgtaacacagccattggctgtgacaaccagtataagccaactggagtgaagctgcagaccttcgcggtgagtgttacagctcttaaggccgcgcgtctggggttgttcgttcctcccggtgggctcgtggtctccctgggctcaggagtgaagctgcagatcttcgcgagccaagtggtctgttttgacagggcgctgattggagcgtttacaatccctgagctagacacaaaggttctccacgtccccatcagattagttagatacagagtatggacacaaaggttctccaaggccccaccagactcaggagcccagctggcttcacccagtgaatcccacaccagggctgcaggtggagctgcctgccagtcccagtgccgtgcgcccgcactcctcagcccttgggtggtcgatgggactgggcgccgtggagcagggggcggcgctcatcggggaggctcgggctgcacaggaacccacggagtgggtgggagactcaggcatagcgggctgcaggtcccgagctctgccccacaggaaggcagctaa

SEQ ID NO: 263 - DNA, 1455 bp, Homo sapiens
  SIMILAR (403)..(816): 311254mologous to Drosophila melanogaster salivary gland glue protein,accession number X01918,Smith-Waterman Score=130.
atgaagggcaaaggagacagcggggaggaaatagaattcctggagtcggaggcgacatcctgttatgttcctttgacatctgccttctggttgggtttgaccatgggtaccaccggcgagagattggaggaaggagagcaaggagaaaatataatcttctcccacctctcccccactctgggctgcaggttgacagtgacgccccactacctaagccgctttctaccccataacgcatctgcagggaagacccaggagtatccaaactgcctatttcatcatctgttacgcatgcggcagagagtggagacccagcagctggaggaacggccctgcagatgccagaaacttgctttccagctgcccttgcagctaagatgtagacacgtgatctgggctctgccattagaagagagagaggtggagaagcaattgtcttctggaagccattttgcaaaggcagttacagacacccaacttcaggagacaacagctgagcagcccgacaggcgagaacaacgaaccaaggtccgcaacaccaccacgaatgatagaaaccaccccacaaccacgaacgaaacgagcagcaaaaagacgcaaccagagccgaaccaacaagaaaacaaacgcgacacaacaacacaacctacgaccacacacgacaccacccaacacaacacaaagacacacaacaacacaacactccaccgcatcagcaagaagcgcaaaacaacgaacaaacacgaaagcacgaaccaaagaaacaaacaacagacgcaaagacagaacaaaaagaaaacaacaacacaacacacgaacgacttgtgtttttttgtcgggccagaggaacagattgggcagtggctcctcctcactttggaaatcactattttctgcaaagagacacagaaaaagtctaaaagagaacatgaggacatgtcaacaaaaaacagacacccttccccaaaggcttctgaagtgaactgggtaggaaccatggaagtgctacactctgctctcaagatagaagcagcttcactcctgaagccagcgagaccacgagcccacgggaggaacgaacaactccagacgcgccgccttaagagctgtaacactcccgcgaaggtctgcagcttcactcctgagccagcgacaccacgaacccacagaaggaagaaactccgaatgcatccgaacgtcagaaggaacaaactcggacacgccaactttaagaactgtaacactcaccatgagggtccgcggctcattcttgaagtcagtgagaccaagaacccaccaattctggacacaagccagagcctaggctcctctgtggtgccactgctgtccatgccctacactctgctagactcgcccgtactttttactgctttgtgttggtattggcagtgcatcatggtcatcatcatcatcatcatgggtagcattcactga

SEQ ID NO: 264 - DNA, 602 bp, Homo sapiens
  SIMILAR (452)..(550): 411254mologous to Escherichia coli O157:H7 unknown protein encoded by cryptic prophage CP-933M,accession number AE005291,Smith -Waterman Score=67.
acagaagtcagagaaaactgtgtgacttaggcatcatcaccagggatgttaagcaggctggcccattgcaagagccatggagtgtacaaagtgcagagagcgtaaggaaagagctctggtcccgggctcacggtaatagaaattgggggcacctgggattcggttttgccatgttgcccaggcagaacactgtcctgatatttgggcagcaggagggtgccctgcttcgagaaggaaaattaccagggacccgtgtgctctgtgaaatatggacttctgctggaaaaatccactttgctagagcaggcacggggaccgctgataggagacattgctggaagatgccaagtgggcgtttccagatcacttttcattttaatcagttgtcagagtttatattcaggagccctcccctcaatatctggattttcagcttctctggaagaccgagaagacctgggcacgtggggccagcgtttctgaaggctgtggtagtagacatggacgtgggcacagatatttccaagaggacgcctctgctccaccacagcagggacggtccacccacccaagtgatcagttctcatcttcgtgcttcttaa

SEQ ID NO: 265 - DNA, 1056 bp, Homo sapiens
  SIMILAR (861)..(760): 791254mologous to Macaca fuscata ribosomal protein S4,accession number D50104,Smith-Waterman Score=139.
atggtggaaggcaaaggcaagctggcatgtacagacgacatgaacactgtcctgatatttgggcagcaggagggtgccctgcttcgagaaggaaaattaccagggacccgtgtgctctgtgaaatattgaaaccaatacacaacaccgaaagtgagtgtcaagtggtgcaggctttattcgatggccatggaattgagaagcgggagcttggctcacaaatcaacttctcaattagagtgaagctgcagaccttcgcggtgagtgttacagctcttaaggcagcacgtctggagttgttcgttcctcctggtgggctcgtggtctcgctgggctcagaagtgaagcggcagattttcgctggattttgtgtttcctccggcatgcgggaagagccacctgtggcctgtggcctgtggcctgatgcgacggtacaggactgccgagatcgggctgcgagcctcagcactctgggctctggcccagctggccagctggccaccctgccccggacacgtgggctgccgctcagccagcaggacagacattcagccggtgtgcgccccatgagagcagcggtggggaagaccctgtgctgctccgtccggcatgtgagactcaagctagctgacacgcggggcctgctgggcacgtacgcccctctggaaggtgacagccatcacacccactctgaatttcctgacaggcataatagaattgaagacacagtggataacgacagagcctcgtgtactgctaacaggtgcaatacgatgtacagcaaagggagccttggtgtcacagatcagatggaaattctctcccgtcttgtcagtgctcatgacgtccatgaatccagcaggaaggtcacctgtggttacattgggcccactggggtcatccagaataatctccaatctcaagatcctcagttcaatcacatctgcaaagtccttattccacataaaattctcagggaggcctcccgggagctctatgctgacagcaccaatgagctgatcgtgatggaaaagcagcccccgatggggttcgcataa

SEQ ID NO: 266 - DNA, 1101 bp, Homo sapiens
  SIMILAR (607)..(1098): 921254mologous to Cloning vector pZC320 SopA,accession number U26464,Smith-Waterman Score=790.
atgaaatctaacaatgcgctcatcgtcatcctcggcaccgtcaccctggatgctgtaggcataggcttggttatgccggtactgccgggcctcttgcgggatatcgtccattccgacagcatcgccagtcactatggcgtgctgctagcgctatatgcgttgatgcaatttctatgcgcacccgttctcggagcactgtccgaccgctttggccgccgcccagtcctgctcgcttcgctacttggagccactatcgactacgcgatcatggcgaccacacccgtcctgtggatctacccactagaatgccccccattcacaagtcaacagacacgagtgaccatcctggaaaggagacccgataagggcagtgtcccatccaatgccacaacatggcccccgcagtttcattggtccaagtgtgtccagaattggtgggttcttggtctcactgacttcaagaatgaagccatggaccctcgcggagtgaagctgcagaccttcacggtgagtgttacagctcttaaggcagtgcgtctggagttgttcgttcctcccggtgggctcgtggtctcgctgggctcaggagtgaagctgcagaccttccgggtgagtattacagcttataaaaacagcgtggacccaaagattattgacagcgcgcctaacctgggtatcggcacgattaatgtcgtatgtgctgctgatgtgctgattgttcccacgcctgctgagttgtttgactacacctccgcactgcagtttttcgatatgcttcgtgatctgctcaagaacgttgatcttaaagggttcgagcctgatgtacgtattttgcttaccaaatacagcaatagtaatggctctcagtccccgtggatggaggagcaaattcgggatgcctggggaagcatggttctaaaaaatgttgtacgtgaaacggatgaagttggtaaaggtcagatccggatgagaactgtttttgaacaggccattgatcaacgctcttcaactggtgcctggagaaatgctctttctatttgggaacctgtctgcaatgaaattttcgatcgtctgattaaaccacgctgggagattagataa

SEQ ID NO: 267 - DNA, 2335 bp, Homo sapiens
  SIMILAR (2036)..(2332): 981254mologous to unidentified cloning vector 29kD protein essential for the replication of mini F plasmid,accession number AB015619,Smith-Waterman Score=495.
atgactgaaggacataagaataggaagaaaaagcctcctacctccttcaccccaacattgcattttccagaagtttcccatacatacacacacgcctctatgtcctcgtctgaagaatgggtgaatgtcagtactgacttcagggccgatctgagccctcatgaactcacctcccagccaccagcatccccaggtgcacatagatcaagggaacaagctgtggtcatgggacatgagtttattggactctggaaggcctggcatcccagagatgaggtggtccgtttaactacagacagccaaacaggggcccagagaggcaaaacacctcagtgtagcagccaggcaggcctgtggctttctgtatcggctctgacgatcatgatgtaccctcgccctaaactctttgagcccccaaccaatggccaaggggtatcagctcatggtatcccttatggacacttgtcattggatttggggcccacccagataatccaggatgatctcatctcaagatccttaataatatctgcaaagatccttttttcaaataaggtcacattcacaggttccagggattttacatggatatcttgttggggaggagtgaagctgcagaccttcgcggttagtgttacagctcttaaagcagcgtgtctggagttgttcgttcctcctggtgggcttgtggtctcgctgggctcaggagtgaagctgcagatcttcgcgataaatgttacagctcataaaggcagcatggacccaaagaactcaggagcccagctggcttcacctagtggatcccgcactggggctgcaggtggagctgcctgccagtcccgtgccatgcgctcgcattcctcagcccttgggtggttgatgggactgggcaccgtggagcagggggtggtgctcgtcggggaggctcggaccgcacaggagcccatggagtgggccgtagctgccctcccgcggcgcagggctccagacctgcagcccgccatgcctgagcctcccacccactccatgggctcctgtgtggcccgagcctccccaacaagcaccaccccctactccatggcgcccagttccatcgaccacccaaggtgctgagaagtgcaggtgcacagcactgggactggcaggcagctccacctgcagccccggtgcgggatccactgggtgaagccagctgggctcctgagtctggtggggatgcggagagtctttatgtcgagctcaggtattgtaaacacaccaatcagcaccctgtgtttagctcaagctcatggattgtaaatgcaccaatcagcgccctgacaaaacaggccactcggctctaccaatcagcaggatgtgggtggggccagatctgcagcttcactcctgaagccagcaacagcaggaacgcactgggagggacgaataactccggctgggaggaacgaacaactccagacgtgctgcgtttaagagctgtaacactcactgcgaaggtctgcagcttcactcccgagccagcgagaccagagaccacgaaccccaccagaaggaagaaactctgaagacatccgaatatcatgaagaaacaaactccagtcacgtgtcctttaagaactgtaacactcacagcgagggggaggcagctaaggcccggcgagaaattgagcacagcgctggtgggccagcactgctgggggacctggcgcaccctctgcagctgctggcccgggtgctaagcacctcactgcccatggccactctgagtgtggggcctgccaagcccatgcccatctggagctccagctggcccacaagtgccacacgcagccccagttcccacctgcgcctctcccgccacacctcctggcaagctgagggagccggcttcagcctcaaccagcccagagaggggtccccacagtgcagtggtgggctgaacggctccccgagcatggccagagctgacgccgaggccgatgaggtgccaatatgtgacaatctaaaaacttgtcacacttcacatggatctgtcatggcggaaacagcggttatcaatcacaagaaacgtaaaaatagcccgcgaatcgtccagtcaaacgacctcactgaggcggcatatagtctctcccgggatcaaaaacgtatgctgtatctgttcgttgaccagatcagaaaatctgatggcaccctacaggaacatgacggtatctgcgagatccatgttgctaaatatgctgaaatattcggattgacctctgcggaagccagtaaggatatacggcaggcattgaagaagttcgcggggaaggaagtggttttttatcgcccttga

SEQ ID NO: 268 - DNA, 737 bp, Homo sapiens
  SIMILAR (445)..(735): 731254mologous to Homo sapiens ribosomal protein S4Y isoform,accession number M58459,Smith-Waterman Score=358.
  misc_feature (1)...(737): n = a,t,c or g
tttgtagacattagtccatgcggnggaattcaacgcgagccatggctcgtggtcccaagaagcatctgattctgtgtggcagctccaaagcatgtggatgctggataaattgaccggggtgtttgctcctcgtccatccaccggtccccacaagttgagagagtgtctccccctcatcattttcctgaggaacagacttaagtatgccctgacaggagatgaagtaaagaagatttgcatgcagcgggtccattaaatccgatggcaaggtccgaactgatataaactaccctgctggattcatggatgtcatcagcattgacaagacgggagagaatttccgtctgatctatgacaccaagggtcgctttgctgtacatcgtattacacctgaggaggccaagtacaagttgtgcaaagtgagaaagatctttgtgggcacaaaagggaatccctcatctggtgactcatgatgcccgcaccatccgctaccccgatcccctcatcaaggtgaatgataccattcagattgatttagagactggccaagaattactggattcatcaagttcgaacacttgtaaacctgtgtatggtgacttggaggtgctaacctaaggaagaattggtgtgatcaccaacagagagaggcaccctggatcttttgacgtggttcacgtgaaagatgccaatggcaacagctttgccactcgactttccaacatttttgttattgg

SEQ ID NO: 269 - DNA, 615 bp, Homo sapiens
  SIMILAR (374)..(481): 741254mologous to Homo sapiens Human secreted protein, SEQ ID NO: 6812,accession number G02731,Smith-Waterman Score=152.
atgtggaagcgactttggaactgggtaacaagcagaggctggaacagtttggagggctcagaagaagacagaaaaatgtgggaaagtttggaacttcctagagacttgttgaatggcttttcccaaaatgctgatagcaatatgaacaataaggtccaggctgaggtggactcagatggagatgaggaacttgttgggaactggagcaaaggcactctagcagtggctgaaaggggccaaaatacagcccgggctgtggcttcagagggtggaagccccaagccttggcagcttccccattgtgttgagcctgcgggtgcacagaagtcaagaattgaggtttgggaacttctgcctaaatttcagaagatgtatggaaatgcctggatgcccaggaaaaagtttgctgcaggggcccggccctcatggagaacctctgctagggcagtgcagaagggagatgtggggtcagagcccccacatagagttcctactggggtactgcctagtggagctgtgaaaagagggccaccatcctccagaccccagaatggtagatctactggcagtgtgcaccatgcacctggaaaagccacactcaatgccagtccatga

SEQ ID NO: 270 - DNA, 543 bp, Homo sapiens
  SIMILAR (9)..(92): 851254mologous to Homo sapiens Human secreted protein, SEQ ID NO: 6395,accession number G02314,Smith-Waterman Score=120.
atgtggaagcgactttggaactgggtaacaggcagaggttggaacagtttggagggctcagaaaaagacatgaagatgtgggaaagtttggaactccctagagacttgttgaatggctttgaccaaaatgctgatagtgatatggacaaagaagtccaggctgaggtggcctcagatggagatgaggaacttttgggaactggagcaaagaatggtaaatccaccaacagcttgcactgtgcacctaaaaaagctgccgacattcaccgccagcccatgaaagcagccaggagggaggctgtaccccgcaaaaccacagaggtggagctgcccaagaccatgggaacccacctcttgcatcagcatgacctggatgtgagacatggagtcaacagagataatttgggagctttaagatttgactgccccactggatttcagactcgcatggggcctgtagccccttcattttggccaatttctcccgtttggaatggctgttgtttactcaatgcctgtatccgcattgtgtctagaaagtaa

SEQ ID NO: 271 - DNA, 1602 bp, Homo sapiens
  SIMILAR (123)..(1): 851254mologous to Homo sapiens Human secreted protein, SEQ ID NO: 7420,accession number G03339,Smith-Waterman Score=167.
atgtgggaaagtttggaacttcctagagacttgttgaatggctttgaccaaaatgctgatagtgatatggacaataaggtccaggctgaggttgtctcagatggagatgaggaactttttgggaactggagtaaaggtcactcttgctgtgaaaagagactagcagcatttttcccctgccctagaaatctgtggaactttgaacttgagagagatgatttaaggtatctgggggaagaaatttctaagtggcaaagtgttcaagatgaagcagagcataaaagtttggacaatttgcaacatgacggtgcaatagaaaagaaaaccccattttctatggagaaattcaagccggctgcagaaatttgcataagtaatccggatgttaatccccgatacaatggggaaaatgtctccagggcatgtcagagaccttcacaccagcccagccccttccatcacagacctggaggcctagaaggaaaaaatgctacttcagctccagccctagctaaaaggggccaaggtacagctcaggctattgcttcagaggatgcaaaccccaaggctttgtggcttacatgtggtgttgggcctgcaggtgcactgaagtcaggaattgaggtttgggaacctctgcctatatttcagagggtgtatggaaatgcctggatgtccagacagagaacccagaatagtagatccactgacagcttgcaccatgcgctggcaaaagccatagacactcaatgccagcccatgaaagcagccaggagagtgaatgtaccctgcaaagccacaggggtggagctgcccaagaccatgggaatccacctcttgcatcagcatgacctggatcagtgtaaaagcattcctgttgtgtccagagttgattcctgccgggggggtttgtggccttctgacttcaagaatggagccacggaccttcgtggtgttacaactcttaaaaatggcacggacccaaagttgttccatttctgtcctatcagagtgccctttattcagtcatccccacgattggctacttttagaatcctgctgattggtgcgttttacagagcactgattggtgcattttacaaagctcttgaaggcccctctgctgcaggtctgctagagtttgctggagcatcaagggttataaggcaaagccttggttttacagtggaatccctttactgtgctcagaccaagaaaccaactagcccacttcctgtgatctggactattatatcccactttgcccatgtaaatgaagcaacttgtatttatcgcattgtgattggtattgtgaaccatctacagctgtctatttccttcaactcggaaaaaataaaagttaaaagaacaatcacaaaagaaaatcctcaggcacaaataaagcgccacctagagccaaagtacacgctttccagccacctgcctgtggctgctgccactgaaagcaacaccacactcccaaggagcagggccatagtgcagctgctgctgcctccacctgagcatttcactggggacctggtgatcaccccacccctgcctaccacagccaacatttgcacacatcaacagggggtctga

SEQ ID NO: 272 - DNA, 1054 bp, Homo sapiens
  SIMILAR (707)..(585): 821254mologous to Homo sapiens Human secreted protein, SEQ ID NO: 7420,accession number G03339,Smith-Waterman Score=172.
caagttgtcctgtgtgtacaagtatctcatggacattgatgtgaacacatgaacaactttctttaccttctggttctcatccccaccccatctgatagggtttggctgtgtccccattcaaatctcagcctgaattgtatctcccagaattcccacaaattgtgggagggaaccagggggaggtaattgaatgatagcagctggtctttcctgtgctattctcgtgatagtgaattagtctcatgagatctgatgggtttatcaggggtttcctgcttttgccttccttccctcattttctcttgctgccaccatgtaagaagtgtctttttgcctcccaccatgattctgaggcctccccagcccatgtggaactttaagtccaattaaatctctttcttttgtaaattgctcagtctcaggtatgtctttatcagcagcatgaagatggactaatacagtaaattggtgctgcagagagtggggtgctactgtaaaaatacctgaaaatgtggaagcgactttggaactgggtaacaggcagaggttggaacagtttgtaggactcagaagaagacaggaagatgtgggaaagtttggaacttcctagagacttgttgaatggctttgaccaaaagcctgatagcaatatggacaacaaggtccaggctgaggtggtctcagatggagatgaggaacttgttgggaactggagcaaaggtcactcttgttatgttttagcaaagagactggtggcattttgcccctgccctagtgattcctggaactttgaacttgagagagatgatttagggtatctggaggaagaaatttctaagcagcaaagcattcaaaagatgacttgggtgctgttaaaggcgttcagttttaaaagggaaacagggcataacagtttggaaaatgtgcagcctgacaatgtgatagaaagaaaattccattttctgaggcaaaattcaagctggctgcagaaatttacatgagtaacaaggagccaaatgttaatcaccaagacaatggggaaaaggtttccagg

SEQ ID NO: 273 - DNA, 391 bp, Homo sapiens; identical to SEQ ID NO: 87
  misc_feature (1)...(391): n = a,t,c or g

SEQ ID NO: 274 - DNA, 1437 bp, Homo sapiens; identical to SEQ ID NO: 90
  SIMILAR (418)..(795): 881254mologous to Homo sapiens Human CR1 protein LHR-C SCR fragment,accession number Y55754,Smith-Waterman Score=605.

SEQ ID NO: 275 - DNA, 434 bp, Homo sapiens; identical to SEQ ID NO: 91
  SIMILAR (144)..(431): 881254mologous to Homo sapiens (human) CR1 protein,accession number P92219,Smith-Waterman Score=418.

SEQ ID NO: 276 - DNA, 843 bp, Homo sapiens; identical to SEQ ID NO: 92
  SIMILAR (385)..(609): 1001254mologous to Homo sapiens CR1 C-term,accession number X05309,Smith-Waterman Score=427.

SEQ ID NO: 277 - DNA, 2796 bp, Homo sapiens
  SIMILAR (1)..(171): 631254mologous to Homo sapiens Gag-Pro-Pol-Env protein,accession number AF164611,Smith-Waterman Score=168.
ggttttcagggacaacaacccccactgtcccaagtgcctcagggaatgagccagttaccacagtacaacaattgtcccccgccacaagcggcagtgcagctgtggatttatgtactataaaggcagtctctctgcttccaggggagcccccacaaaaaatctccacaggggtatatggcccactgcctgaggggactgtaggactaatcttaggtagatcaagtctaagtctgaagggagttcaaattcgtactgatgtggttgattcagactataatggcgaaattcaattggttattagctcttcaattccttggagtgccagtccaggagacaggattgcgcaattattactcctgccttatattaaggttggaaatagtgagataaaaagaacaggagggtttggaagcactgatccaacaggaaaggctgcatattgggcaagtcgggtctcagagaacagacctgcgtgtaaggccattattcaaggaaaacagtttgaaggaaatcagactactacttctgcagaacaacattttactggtaaaaagaacagcccacatgaaggaaaactgatttggtggaaagataataaaaataagacatgggaaatagggaaggtggtgacgtgggggagaggttttgcttgtgtttcaccaggagaaaatcagcttcctgtttggatacccactagacatttgaagatctacgatgaacccatcggagatgcaaagaaaagcgccaccgcggagatggaaacaccagtcacatggatggataatcctattgaagtatatgttaatgatagtgtatgggtacctggccccacagatgatcattgccctgccaaacctgaggaagaagggatgatgataaatatttccattgggtatcattatcctcctatctgcctagggagagcaccaggatgtttaatgcctgcagtccaaaattggttggtagaagtacctactgtcagtcccatcagtagattcacttatcacatggtaagcgggatgtcactcaggccacgggtaaattatttacaagacttttcttatcaaagatcattaaaatttagacctaaagggaaaccttgccccaaggaaattcccaaaggatcaaaaaatacagaagttttagtttgggaagaatgtgtggccaatagtgcggtgatattacaaaacagtgaattcggaactattatagattgggcacctcgaggtcaattctaccacaattgcacaggacaaactcagtcgtgtcccagtgcacaatgtattctgctggtgagggcaagagaagccgtgtggatttctatgtccatggaccaaccgtgggaggccttgccatccgtccatattttgactgaagtattaaaagccattttaaatagatccaaaagattcatttttactttaattacagtgattatgggattaattgcagtcacagctacggctgctatggcaggagttgcattgcactcttctgttcagtcagtaaactttgttaatgattggcaaaaaaattctacaagattgtggaattcacaatctggtattgatcaaaaattggcaaaccaaattaatgatcttagacaaactgtcatttggatgggagacaggcttatgaacttagaccatcgtttccagttacagtgtgactggaatatctcagatttttgtattacaccccaagtttataatgagtctgagcatcactgggacatggtcagatgccatctacagggaacagaagataatctcactttagacatttccaaattaaaggaacaaatttttgaaacatcaaaagcccatttaaatttggtgccaggaactgaggcaatcgcaggagttgctgatggcctcacaaatcttaaccctgtcacttgggttaagaccatcggaaatcaatgcaatgtcccggaatgggcttccatttgccaggcctaccaacctaactgatgactttgagtttcccattgggacatatctgaactatgaatgccgccctggttattccggaagaccgttttctatcatctgcctaaaaaactcagtctggacaagtgctaaggacaagtgcaaacgtaaatcatgtcgtaatcctccagatcctgtgaatggcatggcacatgtgatcaaagacatccagttcagatcccaaattaaatattcttgtcctaaaggacgatcaatgagacagaaagttaacaaggatatccaggaattgaactcagctctgcaccaagcagacctaatagacatctacagaactctccaccccaaatcaacagaatatacattcttttcagcaccacaccacacttattccaaaattgaccacatagttggaagtaaagcgctccacagcaaatgtaaaagaaaagaaattataacaaactgtctctcagaccacagtgcaatcaaactagaactcaggattaagaaactcactcgaaacagctcaactacatggaaactgaacaacccgctcctgaatgactactgggtacataacgaaatgaaagcagaaataaagatgttctttgaaaccaacaagaacaaaaacacaacataccagaatctctgggacacatttaaagcagtgtgtaaagggaaatttatagcactaaatgcccacaaaagaaagcaggaaagatctaaaattgacaccctaacatcacaattaaaagaactagagaagcaagagcaaacacattcaaaagctagcagaaggcaagaaataactaagatcagagcagaactgaaggaaatagagacataa

SEQ ID NO: 278 - DNA, 7821 bp, Homo sapiens
  SIMILAR (458)..(6574): 991254mologous to Homo sapiens CR1 precursor protein,accession number Y00816,Smith-Waterman Score=11379.
  misc_feature (1)...(7821): n = a,t,c or g
atgagcggcgcgggagaccccgtgatttatccggaggtgagcagagaaaccgaaagccagccgagcagggaagtcccttctgagtccgaggaaaagtcaagcagggtgtttggaggtgagttgccatcatccaccgcctttgtctggaaggaagcgcagggcctcacacgcgggatccatcggaagcccaagcattgtcaagctctgctgctgcacctgggtcagcaaggtgggctctgccagcgaaactcgttagaaacaatgcaaatggggagtaaacatggccttgcccatgaaggggaagctggtcaaaagcattttgtcccggaaccccgcagccctccccatgctctgggcgcggagcacaaggattggtcactcctctttgcactgcgcttttcctcttatttcagttttcttcgagatcaaatctggtttgtagatgtgcttcgggaggatgggggtctcttctccgagaagccgggagcctgttgggcagccggcgcccggtctccccttctgctgcggaggatccctgctggcggtcgtggtgctgctcgcgctgccggtggcctggggtcaatgcaatgccccagaatggcttccatttgccaggcctaccaacctaactgatgagtttgagtttcccattgggacatatctgaactatgaatgccgccctggttattccggaagaccgttttctatcatctgcctaaaaaactcagtctggactggtgctaaggacaggtgcagacgtaaatcatgtcgtaatcctccagatcctgtgaatggcatggtgcatgtgatcaaaggcatccagttcggatcccaaattaaatattcttgtactaaaggataccgactcattggttcctcgtctgccacatgcatcatctcaggtgatactgtcatttgggataatgaaacacctatttgtgacagaattccttgtgggctaccccccaccatcaccaatggagatttcattagcaccaacagagagaattttcactatggatcagtggtgacctaccgctgcaatcctggaagcggagggagaaaggtgtttgagcttgtgggtgagccctccatatactgcaccagcaatgacgatcaagtgggcatctggagcggccccgcccctcagtgcattatacctaacaaatgcacgcctccaaatgtggaaaatggaatattggtatctgacaacagaagcttattttccttaaatgaagttgtggagtttaggtgtcagcctggctttgtcatgaaaggaccccgccgtgtgaagtgccaggccctgaacaaatgggagccggagctaccaagctgctccagggtatgtcagccacctccagatgtcctgcatgctgagcgtacccaaagggacaaggacaacttttcacctgggcaggaagtgttctacagctgtgagcccggctacgacctcagaggggctgcgtctatgcgctgcacaccccagggagactggagccctgcagcccccacatgtgaagtgaaatcctgtgatgacttcatgggccaacttcttaatggccgtgtgctatttccagtaaatctccagcttggagcaaaagtggattttgtttgtgatgaaggatttcaattaaaaggcagctctgctagttactgtgtcttggctggaatggaaagcctttggaatagcagtgttccagtgtgtgaacaaatcttttgtccaagtcctccagttattcctaatgggagacacacaggaaaacctctggaagtctttccctttggaaaagcagtaaattacacatgcgacccccacccagacagagggacgagcttcgacctcattggagagagcaccatccgctgcacaagtgaccctcaagggaatggggtttggagcagccctgcccctcgctgtggaattctgggtcactgtcaagccccagatcattttctgtttgccaagttgaaaacccaaaccaatgcatctgactttcccattgggacatctttaaagtacgaatgccgtcctgagtactacgggaggccattctctatcacatgtctagataacctggtctggtcaagtcccaaagatgtctgtaaacgtaaatcatgtaaaactcctccagatccagtgaatggcatggtgcatgtgatcacagacatccaggttggatccagaatcaactattcttgtactacagggcaccgactcattggtcactcatctgctgaatgtatcctctcgggcaatgctgcccattggagcacgaagccgccaatttgtcaacgaattccttgtgggctaccccccaccatcgccaatggagatttcattagcaccaacagagagaattttcactatggatcagtggtgacctaccgctgcaatcctggaagcggagggagaaaggtgtttgagcttgtgggtgagccctccatatactgcaccagcaatgacgatcaagtgggcatctggagcggcccggcccctcagtgcattatacctaacaaatgcacgcctccaaatgtggaaaatggaatattggtatctgacaacagaagcttattttccttaaatgaagttgtggagtttaggtgtcagcctggctttgtcatgaaaggaccccgccgtgtgaagtgccaggccctgaacaaatgggagccggagctaccaagctgctccagggtatgtcagccacctccagatgtcctgcatgctgagcgtacccaaagggacaaggacaacttttcacccgggcaggaagtgttctacagctgtgagcccggctatgacctcagaggggctgcgtctatgcgctgcacaccccagggagactggagccctgcagcccccacatgtgaagtgaaatcctgtgatgacttcatgggccaacttcttaatggccgtgtgctatttccagtaaatctccagcttggagcaaaagtggattttgtttgtgatgaaggatttcaattaaaaggcagctctgctagttattgtgtcttggctggaatggaaagcctttggaatagcagtgttccagtgtgtgaacaaatcttttgtccaagtcctccagttattcctaatgggagacacacaggaaaacctctggaagtctttccctttggaaaagcagtaaattacacatgcgacccccacccagacagagggacgagcttcgacctcattggagagagcaccatccgctgcacaagtgaccctcaagggaatggggtttggagcagccctgcccctcgctgtggaattctgggtcactgtcaagccccagatcattttctgtttgccaagttgaaaacccaaaccaatgcatctgactttcccattgggacatctttaaagtacgaatgccgtcctgagtactacgggaggccattctctatcacatgtctagataacctggtctggtcaagtcccaaagatgtctgtaaacgtaaatcatgtaaaactcctccagatccagtgaatggcatggtgcatgtgatcacagacatccaggttggatccagaatcaactattcttgtactacagggcaccgactcattggtcactcatctgctgaatgtatcctctcaggcaatactgcccattggagcacgaagccgccaatttgtcaacgaattccttgtgggctacccccaaccatcgccaatggagatttcattagcaccaacagagagaattttcactatggatcagtggtgacctaccgctgcaatcttggaagcagagggagaaaggtgtttgagcttgtgggtgagccctccatatactgcaccagcaatgacgatcaagtgggcatctggagcggccccgcccctcagtgcattatacctaacaaatgcacgcctccaaatgtggaaaatggaatattggtatctgacaacagaagcttattttccttaaatgaagttgtggagtttaggtgtcagcctggctttgtcatgaaaggaccccgccgtgtgaagtgccaggccctgaacaaatgggagccagagttaccaagctgctccagggtgtgtcagccgcctccagaaatcctgcatggtgagcataccccaagccatcaggacaacttttcacctgggcaggaagtgttctacagctgtgagcctggctatgacctcagaggggctgcgtctctgcactgcacaccccagggagactggagccctgaagccccgagatgtgcagtgaaatcctgtgatgacttcttgggtcaactccctcatggccgtgtgctatttccacttaatctccagcttggggcaaaggtgtcctttgtctgtgatgaagggtttcgcttaaagggcagttccgttagtcattgtgtcttggttggaatgagaagcctttggaataacagtgttcctgtgtgtgaacatatcttttgtccaaatcctccagctatccttaatgggagacacacaggaactccctctggagatattccctatggaaaagaaatatcttacacatgtgacccccacccagacagagggatgaccttcaacctcattggggagagcaccatccgctgcacaagtgaccctcatgggaatggggtttggagcagccctgcccctcgctgtgaactttctgttcgtgctggtcactgtaaaaccccagagcagtttccatttgccagtcctacgatcccaattaatgactttgagtttccagtcgggacatctttgaattatgaatgccgtcctgggtattttgggaaaatgttctctatctcctgcctagaaaacttggtctggtcaagtgttgaagacaactgtagacgaaaatcatgtggacctccaccagaacccttcaatggaatggtgcatataaacacagatacacagtttggatcaacagttaattattcttgtaatgaagggtttcgactcattggttccccatctactacttgtctcgtctcaggcaataatgtcacatgggataagaaggcacctatttgtgagatcatatcttgtgagccacctccaaccatatccaatggagacttctacagcaacaatagaacatcttttcacaatggaacggtggtaacttaccagtgccacactggaccagatggagaacagctgtttgagcttgtgggagaacggtcaatatattgcaccagcaaagatgatcaagttggtgtttggagcagccctccccctcggtgtatttctactaataaatgcacagctccagaagttgaaaatgcaattagagtaccaggaaacaggagtttcttttccctcactgagatcatcagatttagatgtcagcccgggtttgtcatggtagggtcccacactgtgcagtgccagaccaatggcagatgggggcccaagctgccacactgctccagggtgtgtcagccgcctccagaaatcctgcatggtgagcataccctaagccatcaggacaacttttcacctgggcaggaagtgttctacagctgtgagcccagctatgacctcagaggggctgcgtctctgcactgcacgccccagggagactggagccctgaagcccctagatgtacagtgaaatcctgtgatgacttcctgggccaactccctcatggccgtgtgctacttccacttaatctccagcttggggcaaaggtgtcctttgtttgcgatgaagggttccgattaaaaggcaggtctgctagtcattgtgtcttggctggaatgaaagccctttggaatagcagtgttccagtgtgtgaacaaatcttttgtccaaatcctccagctatccttaatgggagacacacaggaactccctttggagatattccctatggaaaagaaatatcttacgcatgcgacacccacccagacagagggatgaccttcaacctcattggggagagctccatccgctgcacaagtgaccctcaagggaatggggtttggagcagccctgcccctcgctgtgaactttctgttcctgctgcctgcccacatccacccaagatccaaaacgggcattacattggaggacacgtatctctatatcttcctgggatgacaatcagctacacttgtgaccccggctacctgttagtgggaaagggcttcattttctgtacagaccagggaatctggagccaattggatcattattgcaaagaagtaaattgtagcttcccactgtttatgaatggaatctcgaaggagttagaaatgaaaaaagtatatcactatggagattatgtgactttgaagtgtgaagatgggtatactctggaaggcagtccctggagccagtgccaggcggatgacagatgggaccctcctctggccaaatgtacctctcgtgcacatgatgctctcatagttggcactttatctggtacgatcttctttattttactcatcattttcctctcttggataattctaaagcacagaaaaggcaataatgcacatgaaaaccctaaagaagtggctatccatttacattctcaaggaggcagcagcgttcatccccgaactctgcaaacaaatgaagaaaatagcagggtccttccttgacaaagtactatacagctgaagaacatctcgaatacaattttggtgggaaaggagccaattgatttcaacagaatcagatctgagcttcataaagtctttgaagtgacttcacagagacgcagacatgtgcacttgaagatgctgccccttccctggtacctagcaaagctcctgcctctttgtgtgcgtcactgtgaaacccccacccttctgcctcgtgctaaacgcacacagtatctagtcaggggaaaagactgcatttaggagatagaaaatagtttggattacttaaaggaataaggtgttgcctgggaatttctggtttgtaaggtggtcactgttcttttttaaaatatttgtaatatggaatgggctcagtaagaagagcttgggaaaatgcagaaagttatggaaaaataagtcacttataattatggctacctactggataaccactccctaatattttgattcatttctggcctattcttctttcacatatgtgtttttttacataccgtacttttcccccttacgtttgtttccttttattttatagagcagaaccctagtcttttaaacagtttagagtgaaatatatgctatatcagtttttactttctctagggagaaaaattaatttactagaaaggcatgaaatgatcatgggaagagtggttaagactactgaagagaaatatttggaaaataagatttcgatatcttctttttttttgagatggagtctggctctgtctcccaggctggagtgcagtggcgtaatctcggctcactgcaacgtccgcctcccgggttcaagcaattctcctgcctcagcatccagggttagctgggattacaggcgtgtgccaccacgcccggctatttattttgttttattttattttcatttttagtagagacaggggtttcaccgtgttagccaggatggtctcgatctcctgacctcaagtgacccacccgcctctgcctcccaaagtgctgggattacaggcatgagccaccacaccctgcctagagtagtctttactctaggaggtggttctttcccctaaggtgtggtttttcaattgaatgcctatgatgttaaaaagttctctccactctggctaggtcagaacctcatatttctcagcactgtgcaacctctagtatctccattctttnntttttttttttttttttttttgagacagagtcttgctctgtcacccaggctggag

SEQ ID NO: 279 - DNA, 437 bp, Homo sapiens
  SIMILAR (79)..(228): 361254mologous to Dictyostelium discoideum 4E-binding protein homolog,accession number AB038152,Smith-Waterman Score=71.
ctcggcccggcatcggcccagcatccgaggcctccgagtcctgcacaccgtccatctctcttgctccatgcccgcacctataggtcctctcaactgacaaagcccagacatccaggtctctgcatgtgctggaacacacccattcgggcccggatggaatccagctaatctacgacacccatcctggtgtgccctcctataggaagccttccttacatgccacataattttacggcctgcctttagtcacatcatagatcacccgatactgcagctgtcaagcttctctccgcaccctgtgcagccctccaagagagacaccaaggcgtctgaccgtaggtcacacaaggcctaggaaccatctgctgagtactcagtgcactggtggcctggcagggccatgcagcggggctctccgcttcctgcctgagttctcg

SEQ ID NO: 280 - DNA, 229 bp, Homo sapiens
  SIMILAR (122)..(36): 411254mologous to Human immunodeficiency virus type 2 DNA polymerase,accession number AJ008593,Smith-Waterman Score=71.
cttagggcctggtctgcagtcaaggttcattaaacaacacctgttcgtagcggccgttacctctgtatgcttctgcagcaggtgtttgttgagtatctgctttgttccagtatgtgcgtgcaagtgcaggatgggtgtcgtagtttagctggattccatccgggccggaatgggtgtgttccagcacatgcagagacctggatgtctgggctttgtcagttgagaggac

SEQ ID NO: 281 - DNA, 351 bp, Homo sapiens
  SIMILAR (223)..(264): 571254mologous to Oncorhynchus mykiss metallothionein A,accession number M81800,Smith-Waterman Score=44.
ggcacgaggttagcatgccctcacacaactggggggttgttttgcagcaaagtgctgtgaagcaggttgagcctcatgcagtgccagttcctgtatctaaatgtgaaagtggcttgttaaagattaaagggactgcctggtccttctggccccaagatggaatgatctctgccatggcgacagcctctatctcccaggagaggccattttatacagcacatttgtgcttccaaatgttactgtaagcctgcactggctgatactctggcgataagttgacatttgggcactctcaagacatatgagctatatagcatcccatggtttgaatttctgggcaaaattggctca

SEQ ID NO: 282 - DNA, 489 bp, Homo sapiens
gctttacaaaaaattactctttaattagtgaaaaaattcaaattcaagccttacctaatgcttattgcccttccttgcaggtctaaatgctagacctagtgactgtggcaactatctctcattgatgttccaaaaggcgaagagctccttcctgctagactttcttcgatatttcagttgtggaaagttgctcactatcatcatagtatcttatgccttcacttctctgtagttgaagctcttgctgctgccttgtcattctttatttatgctgacttgtccaaacacaaaaggctgctgaagtcctgtcttagtgagtttctgtgatccacactgtgcttaaaaagcacatcttaggtcctttaaaggtggttaaatcgctctcctcatggcttacttttccacactgttcacaagagctaagctaatacaacttataaacaggtcacatacacagatttcacctgcttataggttgtaacatcaact

SEQ ID NO: 283 - DNA, 594 bp, Homo sapiens
  SIMILAR (145)..(240): 961254mologous to Mus musculus FXR1,accession number X90875,Smith-Waterman Score=172.
atgggcttacatggagattccactcgtgtgagtggagaggctttttcttcactgagccctgtgcggttcttggcgggccggtgggaagcaactgagtggctgctgggcggcgggagctccttcggagcaggcccgagctctgggagttggcaaccagaacgccaggttccatttaatgaagttagattaccaccaccacctgatataaaaaaagaaattagtgaaggagatgaagtagaggaactgagggagctgaagaaaggcatccattctcccatctattcccgaatgcagacactaggtgtccatgaattattaactctatgttgtcctcacccatccttagccagcttcttatccaaggctacacaaggacccgggaacaggagtgggaaatgggtctgcccaagagtagctccctaccttggaatccagctgacatgggaaaaagccaaatctactggtttaggaactctgctaccaaaaggaatttccatcagtgaaatttcaaaatcctcattaaggaaaccagaaggagattttacaaacagaagagaaggacaatgtgaagatggaaaagttggagcagagtga

SEQ ID NO: 284 - DNA, 821 bp, Homo sapiens
  SIMILAR (263)..(189): 961254mologous to Homo sapiens Human secreted protein, SEQ ID NO: 6543,accession number G02462,Smith-Waterman Score=141.
  misc_feature (1)...(821): n = a,t,c or g
tttttttttttgcaggggaatttttaaaactaaggtttaaaacgtgtaggacatggtaccaaggtagttttcagttgaagaattttttcaatgtgcctactagagagggacaaagttgtgaaatatgtaatgtagacttgcagggaaacaaatggtgtcatcaggttttactgtcaactacaaaccttacccagccagaaaccttcgtattttagatggtaggaaagacattcctcatttaggcaagtagggttctcattcaacctgcaaatcaaaaagattactcttaccttgctttacaaaaaattactctttaattagtgaaaaaattcaaattcaagccttaccctaatgcttattgccccntccttgcaggtctaaatgctagacctagtgactgtggcaactatctctcattgatgttccaaaaggcgaagagctccttcctgctagactttcttcgatatttcagttgtaataagcagatttaactagcttttggaaagttgctcactatcatcatagtatcttatgccttcacttctctgtagttgaagctcttgctgctgccttgtcattctttatttatgctgacttgtccaaacacaaaaggctgctgaagtcctgtcttagtgagtttctggtggatccacactggggctttaaaaaagcacatcttaggtcctttaaaggtggttaaatcgctctcctcatgggcttacttttccacactggttcacaagagctaagctaatacaacttataaacaggtcacatacacagatttcacctgcttataggttgtaaacatcaacttactg

SEQ ID NO: 285 - DNA, 405 bp, Homo sapiens
  SIMILAR (252)..(338): 441254mologous to Mus musculus envelope protein,accession number M21800,Smith-Waterman Score=59.
ggctctgaagtagtagtcgttcaggccagtaagggcaaaggtgtgatcctggaagaggcaaaagactgtgtgattctttggatgtggaaactacttgatgtttttgaggaactgaaagaaagccggtgtagactgaacttagtaagcaaaaatgaatttcaggtcatgggaagcttttggattcttggacctacaccagtggtttgccagtggctctcaggccttcagccacagactgaagcctgcactgttggcttccctgcttttgaggttttgggactcggactggcttccttgctcctcagcttgaagatggcctattgtgggacttcaccttgtgatcctgtcccttttagtggaaagaaagcctcagttgaaaaggaagaagccaatgtaaaaatgtga

SEQ ID NO: 286 - DNA, 757 bp, Homo sapiens
  SIMILAR (233)..(36): 301254mologous to Homo sapiens keratin associated protein,accession number AJ296168,Smith-Waterman Score=76.
gtgtgatgtggcagcctctccagcagagagcctcatgtccacctacagcagtgagatttccagcagcaaaggctttagcacaatccttccagaagttccaaagctgacagggaccgacagacttgacaacggtgacagcactgggggacaaaattgccaggtcgagagcactgctttaaagaagcagctgacacgtactctggcttactctgtgccttgcaccattggcaactctcagataaggaaactaagtcagaaaggtgaaatgacttcccccgttgggacaactattgtaaaaagaatcagccctcaaggacaggatgttcgcattagggggacaccaacagcaaaaagtggaaccctaaaatgttcatttttcgagaccgctggaggagctatccatgaatgtcactgctccaggccttgccttcctaatcagatgctggatgctgctgccccgcccctcagcttgaagggccagctgattagcaccgggagtgccacatacagtgacatgacaagggctggtgaaaataacatcgcacaaggatatgcctcgctgtcctggcaccctcctctcactccaaataacacatacctgtttacagaagtttctacactacaacacaaccatgaaaaatggagccacaggttagcagagcaagtggcatcgtggacaactgatgggaggaccaaaaagggatctgaaaagctggccaatggcacccagtctaaagagtcccactctggattcctg

SEQ ID NO: 287 - DNA, 487 bp, Homo sapiens
  SIMILAR (8)..(106): 871254mologous to Homo sapiens Human secreted protein sequence encoded by gene 6 SEQ ID NO:129,accession number Y91456,Smith-Waterman Score=140.
ggcacgagtcttactgctgtctgccctcgggctcatcatttgctgtgtgaaaaagaagaaaaagaagacaaacaagggccccgctgtgggtatctacaatggcaacatcaatactgagatgccgaggcagccaaaaaagtttcagaaagggcgaaaggacaatgactcccatgtgtatgcagtcatcgaggacaccatggtatatgggcatctgctacaggattccagcggctccttcctgcagccagaggtggacacctaccggccgttccagggcaccatgggggtctgtcctccctccccacccaccatatgctccagggccccaactgcaaagttggccactgaggagccacctcctcgctcccctcctgagtctgagagtgaaccgtacaccttctcccatcccaacaatggggatgtaagcagcaaggacacagacattcccttactgaacactcaggagcccatggagccagcagaataa

SEQ ID NO: 288 - DNA, 522 bp, Homo sapiens
  SIMILAR (413)..(372): 571254mologous to Homo sapiens Granulin D,accession number R41882,Smith-Waterman Score=49.
aaaaacctctggaaccactgaatcaaactggatatcattattgatccctcattcaatccttcaatacccatttagtgtcgtctgtccagatgctgcagatacgcctagcacacagtgactgctcagcgaacagtgtcacaatgaacatgtgcaaatgccttgaaaggccacattgggacttgccctgatcagcaggttggaggtgctccaggcccgaagcttagctgtgagtggggacatgggagggaggttggaactaccactgcagaaggggctctgaacctaggttcaggagagaggctttgaacttgcatgtgtggggagccatggaagtttccaggaaggactgcaggtcccacctggagatgtgcagttcctccttcaggtacctgggaatgtcagtcacaccccagacctgctcagctcctccaaactgctgttcctgtatctgagagcttcaagtccccaaatggcctatctaatacatggggaaactgaggcctggggaggcctggggactga

SEQ ID NO: 289 - DNA, 357 bp, Homo sapiens
  SIMILAR (3)..(296): 1001254mologous to Homo sapiens CGI-21 protein,accession number AF132955,Smith-Waterman Score=515.
  misc_feature (1)...(357): n = a,t,c or g
agcccactttcacaaagcagcaaattgcaaacttggacaagcaagccaaattgtcccgggcatatgatggtaccacttacctgccgggtattgtgggactgaataacataaaggccaatgattatgccaacgctgtccttcaggctctatctaatgttcctcctctccggaactactttctggaagaagacaattataagaacatcaaacgtcctccaggggatatcatgttcttgttggtccagcgttttggagagctgatgagaaagctctggaaccctcgaaatttcaaggcacaaagaagaanaagaagactattgtgactgatgttttccaggggtccatgaggatcttcac

SEQ ID NO: 290 - DNA, 1883 bp, Homo sapiens
  SIMILAR (601)..(1149): 451254mologous to Caenorhabditis elegans Contains similarity to Pfam domain: PF00442 (UCH-1), Score=13.8, E-value=0.14, N= 1,accession number AF040640,Smith-Waterman Score=399.
gccactgcccgtacctggacaccattaacaggagtgtgctggactttgactttgagaaactgtgttctatctccctctcacacatcaatgcttatgcctgtctggtgtgtggcaagtactttcaagcttttcacccttccctacaggccggggtttgaagtctcacgcctacattcacagtgtccagtttagccaccatgttttcctcaacctccacaccctcaagttttactgccttccagacaactatgagatcatcgattcctcattggaggatatcacgtatgtgtttgaagcccactttcacaaagcagcaaattgcaaacttggacaagcaagccaaattgtcccgggcatatgatggtaccacttacctgccgggtattgtgggactgaataacataaaggccaatgattatgccaacgctgtccttcaggctctatctaatgttcctcctctccggaactactttctggaagaagacaattataagaacatcaaacgtcctccaggggatatcatgttcttgttggtccagcgttttggagagctgatgagaaagctctggaaccctcgaaatttcaaggcacatgtgtctccccatgagatgcttcaggcagttgtactttgcagtaagaagacttttcagatcaccaaacaaggagatgggcgttgactttctgtcttggtttctgaatgctctgcactcagctctggggggcacaaagaagaaaaagaagactattgtgactgatgttttccaggggtccatgaggatcttcactaaaaagcttccccatcctgatctgccagcagaagaaaaagagcagttgctccataatgacgagtaccaggagacaatggtggagtccacttttatgtacctgacgctggaccttcctactgcccccctctacaaggacgagaaggagcagctcatcattccccaagtgccactcttcaacatcctggctaagttcaatggcatcactgagaaggaatataagacttacaaggagaactttctgaagcgcttccagcttaccaagttgcctccatatctaatcttttgtatcaagatattcactaagaacaacttctttgttgagaagaatccaactagttgtcaatttccctattacaaatgtggatctgagagaatacttgtctgaagaagtacaagcagtacacaagaataccacctatgacctcattgccaacatcgtgcatgacggcaagccctccgagggctcctaccggatccacgtgcttcatcatgggacaggcaaatggtatgaattacaagacctccaggtgactgacatccttccccagatgatcacactgtcagaggcttacattcagatttggaagaggcgagataatgatgaaaccaaccagcagggggcttgaaggaggcgtctagggctttgctcccaagggctgtggctgatgatggtaaataagaacacagaagctgtagctgaacacaggctggctggtgggcttcctaggccagcccagcttgtatgggttctggctacaccagagcaccaagagcccacttgcctgggatggccccacactgtcactcagttgttctttgatcatttttttctagattgatgctcctttctcccatgcattgagctcccatctagcttcagcagggcagaacccttctccagatgtgtgtaacttatgtcttgagtatctgggagtagttgaagaacagataattccttccaaacatcaagccttgggattcttggagcaagcagaaagccagtaacttcgctctgttagaggtggaggattttcctatggttccccccatttcctgatttgtatttttagatggattaaatagtctcctgttttt

SEQ ID NO: 291 - DNA, 1665 bp, Homo sapiens
  SIMILAR (1417)..(1644): 1001254mologous to Homo sapiens CGI-21 protein,accession number AF132955,Smith-Waterman Score=404.
atggagccaaaccacgacgtggagggcctgctaaccacaggccctgtccaggacaatgagggcctgctcatgtccaccctcttacccccaccagccccacacccaccgcaaggtgggaacaacagctcacccccagcgtggggcattgtgagggtcgagctggcccaggcgaagctgcaggcagctgctgcggcttcccatctgcttccatcctgcgatgctgtccggtcatcgcacttggcttcactgctcttccagatgccagcagctcaaaaggcccatggccgcactgcagagccagaagaggcatccaggctcaagggggcacccaggctggagggggcacccaggctggaggaggcacccaggctggaggaggcacccgggctggagtacccagactggaggagtccttaccgcaaagtgacagcagggattgatgggcaccaaccaaccagacaagccaagtcacaccaaagtgctggccagcaagcctttgcagagatcacagtgcttctccaggagactcccaggacggagcccggctgtggatacttcaggaccactggggcacccgtggcttggagaggcccccgacattactggatgtactttagcttcctcttgacaactcaaggtcaagtccacgaacatcagtgcacacacaattccaagatgcaggggacccaggggaggactctgagccctccaagcaagcagaagggggactccgagcacctgaatgacggtacggacctgagtctcaccacccggagccaacctgtgctgcactgtaaccgactattgagtaccctctatgtacctgacacagtgcagcaggatatcaattttgttcgaagtgtcaatgaaggccaggtgccgtgctactcatatgggcagaagctgtccaaactggccatcctgaggatcgcctgtaactacatcctgtccctggcgcggctggctgaccttgactacagtgccgaccacagcaacctcagcttctccgagtgtgtgcagcgctgcacccgcaccctgcaggccgagggacgtgccaagaagcgcaagacccctttccagcaggcccctctgtgggttctccgggtttcccggaggtcccccacggactccagactcatgccagggagggtcacgacaccttctcagggctccccgctgcgctgccacggtaactgcacgttgcattcctgggagtgctttaacgtggaccaattagacaaaatcctcatcaagtggtgctgcatttcagaggccctgcgttttggttggtttggggaaagaagaggaccacagtgggtagtgggagccagggccgctggaagctcggggacacatggggctgacaccacaattaagggtcaagctgccgcaccgggtccgaccctggtgcccagacaggctctatctaatgttcctcctctccggaactactttctggaagaagacaattataagaacatcaaacgtcctccaggggatatcatgttcttgttggtccagcgttttggagagctgatgagaaagctctggaaccctcgaaatttcaaggcacatgtgtctccccatgagatgcttcaggcagttgtactttgcagtaagaagacttttcagatcaccaaacaagagacagtcttgctcttttga

SEQ ID NO: 292 - DNA, 196 bp, Homo sapiens
  SIMILAR (8)..(70): 611254mologous to Homo sapiens Secreted protein of clone FG340_1,accession number W69348,Smith-Waterman Score=72.
aaaagcattctaagcagaaggcacagcaagtgcaaaagctctaaagcaggagcgttcctggtgtattgagagatgattctggacctcagcacagctggcgtacgctgagcaaacagcgagaggtgcggtcgatcggcgaagaaaccaggccagaccgtagtgccttatgagagctctggaaggattctggctttta

SEQ ID NO: 293 - DNA, 408 bp, Homo sapiens
  SIMILAR (1)..(273): 431254mologous to Homo sapiens Human secreted protein, SEQ ID NO: 4244,accession number G00163,Smith-Waterman Score=152.
atggctcctctgggcatgctgcttgggctgctgatggccgcctgcttcaccttctgcctcagtcatcagaacctgaaatttattgctaacaattctaaaggcttggaagtccaagaacaagatgccaacagattcaacgtcagacatgtaagacgtgccagcttccccttcgccttccgccatgatggttccgatgtccagtctggggacacctgggccaacacagcagccccagctgtgaagatggaaggtccaagaggcaccagagaagcagatgataaatggaccacctcaaaatccaaagactggaagaaaattaaaacaataaagaataaacttggctggacagggtctcgctatgttgcccaggctggtgtcaacgcagttgtaattctgctgtaccagtga

SEQ ID NO: 294 - DNA, 444 bp, Homo sapiens
  SIMILAR (4)..(165): 771254mologous to Rattus norvegicus SMHS2,accession number AF327513,Smith-Waterman Score=221.
atgctgcagaagatcataagtaaacaagatgacttgatgacagtgaaaactaatgaaactggatatcaggaagcaatagtgaaagaacctgaaattaacacaactcttcagatgcgtttctttggaaaaagaggacaaagaaaacttcattataaagaatttcgaagtagtggctcaaatcaaccttttcctatcaaaccacttagtgaatcaaaaaaccgcttgttggacagtgaatctcagtggctggagaatggagctgaagaaggcatcgtcaaatcaggaagctgccccaggaatgtgggctgcttccctgacagtttcctgatgctgggtggcaggctttttgctgttgctgctacatcacaaaaggctgaagttcaccaaaatttactagcaacttcatcaaactctccctcaaatgtcagaaatgttccaaaataa

SEQ ID NO: 295 - DNA, 759 bp, Homo sapiens
  SIMILAR (373)..(314): 351254mologous to Rattus norvegicus small rec,accession number AF228917,Smith-Waterman Score=41.
ttttttttttatcaaaaaatacatatgcatgttaaaatgtgatgacagctcatattatagcaactcataacaggtaagtattatttccagaataacattaagtcacttttgtagctctaagtcaatgctgcacaaatggacacttaagattaaggcatcattctgctctggagtagtgcttctgtgaatcccaggaactgtacaaaggctttccgttttaaaaaatatatcttctgttatacttcagttatttcattccactgatcattttcttgcaaatgaaaattgaaaataccagtctataatgttttcatacacctgatttgacgatgccttcttcagctccattctccagccactgagattcactggtccaacaagcggttttttgattcactaagtggtttgataggaaaaggttgatttgagccactactgtcatttgccaagttttctgctttctacctctgcagtttagatcttctggcatactcattctggtttgtaacagaagcttgttctggatccatccccacaaggcgagttggaaaactgcaaccatcacccaagcttgaaaatattggaagtagccaatatttcttttcatcaccaaagacttgtctccaatttttactgcatccaagagagaaaccatttccatcaggtccgtatgaaaacgtgggtgcgcggaatgattctggcagatatatggctgcagattgcaggtggattttaacttttttttacaaaacactaccg

SEQ ID NO: 296 - DNA, 859 bp, Homo sapiens
  SIMILAR (129)..(818): 441254mologous to Rattus norvegicus SMHS2,accession number AF327513,Smith-Waterman Score=355.
atcgacgccctgcagatttgtacggacctccagggtcgacccacgcgtccggtctcttcgtaagcagcgcttcatgcagttttcttcactcgaacatgaaggagaatattatatgacaccacgagacgttcctcttctcagtgatgtttgagcaaatggaacgtaaaacttcagtcaagaagctgacaaaaaaggacatcgaggatacactgtcagggatccaaacagctggctgtggatcaacttttttcagagaccttggcgataaagggctaatttcatataccgagtatcttttcttgcttacaatcctcactaaaccccattcctggatttcatgttgcttttaaaatgctggatacagatggtaatgagatgattgaaaaaaagggaattttttaagctgcagaagatcataagtaaacaagatgacttgattgacagtgaaaactaatgaaacctggatatcaggaagcaataagtgaaagaacctgaaattaacacaactcttcagatgcgtttctttggaaaaagaggaccaagaaaacttcattataaagaatttcgaagatttatgggaaaatttacaaacagagattcaaggaaatgggaattccttcagttttctaaaggtttgagtttcatgaggaaaaggaggactttgcagagtggctactttttttccactaacactggaaaataaaggtatttattgggaaaaatgtgaggggggaagttgtcagcaggggagggccttagtttggatgaagtcaaggcattttgtcattgtacaaggcagattggaacactttgctatttgccatgcagatgttcacgttagctcatcgtcctgtcagac

SEQ ID NO: 297 - DNA, 669 bp, Homo sapiens
  SIMILAR (343)..(468): 681254mologous to Homo sapiens Human secreted protein, SEQ ID NO: 7513,accession number G03432,Smith-Waterman Score=132.
atggttgtagatgaaaactggaaagcagaatatggcagggccagccattgcaaaagactgtgtgatgatttgcctttgaatcccttctattctcttgggacaggaggtccccctgacccactcaagacctccagaccaacatggagagcagctcagggcaaagccactgctcaggcccacatggagccccatgaaccttgggtccatgagcaacctggagccagctgctgtagacctgccaacaagagaggctacactcttgcatacccccagcataggggccacatccacggtgctgaggagaagatagccttcaggcttcatctctgctgcacctcgccaggtgtattagtctattttcacactgctgataaagacatatccaagactgggcaatttacaaaagaaagaggtttaattggacttacagttccacatggctgtggaagcctcacaatcaaggcagaagacaaggaggaggaagtcatgtcttatacggatggcagcaggcaaagagagagaacttgtgcagggcaactcctcttttcaaaaccatcagatcttgtgagacttgttcactatcatgagaacaccatgggaaagacttgcccctatgattcaattacctctcaccaggtccctcccacaacacatgggaattcaagatga

SEQ ID NO: 298 - DNA, 820 bp, Homo sapiens
  SIMILAR (650)..(757): 811254mologous to Mus musculus formin, isoform IV,accession number X62379,Smith-Waterman Score=131.
tggattttttaaattttatttttattttttttttagaaaagagagagaacatcatcacaatgaagaaagcctggtgcagtaaatcaaggtggtgccagggatgacttgcgtatatacaacgtttgccatggagtcctgtgctctttgccagaggtgagattcaggtttcgactctgaacttctcagcagcatgaactgggaaactgttgaaaccaagctgatatgtggttgctagctgattccaataagaggctcagaattagaatacttgatccagagtttttacattaattcatccctcccgtcttgtttcttctgaggcagcagccagagatcacagggtttgctatagtcgccacttcacttcggcacccaaaatgggaactgggcaagggctccaaacttggctccctggatgggacccctgtcagctttcatccaacctctgaccaagagtttcaacatgatgtttctggggcaagatgatcgccccaaagttggcccattggtgctgcagtctatttccttagggtcaggggtctcttcagtattgtcccttcatggtcaccaggaagatgttaccagaaaagggtcccaatccagaccctacaagaaggttcttggatctcacacaagaaaggatacaggattgaaaatggctcaggaatcagtcagcaagttgacttcagagaagaaagtggagacaaagaaaatcaatcccactgctagcctgaaggcagtccctgaggaggaagctcggagaatgaagagcataacatccatggcaaatcgggaacttctgccattctgcagagactaa

SEQ ID NO: 299 - DNA, 5718 bp, Homo sapiens
  SIMILAR (241)..(768): 1001254mologous to Homo sapiens dJ612B15.2.2 (endophilin B1 (isoform 2)),accession number AL049597,Smith-Waterman Score=894.
attaagctttagcgtaacagattcttttcaatcaagtactggaatcagttgtccaggtggagtaatacagaaaagctaaggtctagaaaccaggggaccattttagatacaaagcagaattgcggaattgccagattataacttgaggtttgttcgggggattttttttaaccatctaaaataaatgtatataagatggactgagtcttctaaagagattctaaaactatattcttacttaagtctgaacaggaattaagaataactcaaagtgaatttgatcgtcaagcagagattaccagacttctgctagagggaatcagcagtacacatgcccatcaccttcgctgtctgaatgactttgtagaagcccagatgacttactatgcacagtgttaccagtatatgttggacctccagaaacaactgggaagttttccatccaattatcttagtaacaacaatcagacttctgtgacacctgtaccatcagttttaccaaatgcgattggttcttctgccatggcttcaacaagtggcctagtaatcacctctccttccaacctcagtgaccttaaggagtgtagtggcagcagaaaggccagggttctctatgattatgatgcagcaaacagtactgaattatcacttctggcagatgaggtgatcactgtgttcagtgttgttggaatggattcagactggctaatgggggaaaggggaaaccagaagggcaaggtgccaattacctacttagaactgctcaattaagtaggtggactatggaaaggttgcccatcatgactttgtatttatatacaattaactctaaataaagcaggttaagtatcttccatgttaatgtgttaagagactgaaaataccagccatcagaaactggcctttctgccaataaagttgcatggtaaatatttcattacagaatttatgttagagctttcatgccaagaatgttttcttacaaaattctctttttattgaggtttcactaataagcagcttctacttttgagcctcaacttaaagcagaactgttttctactggatttttcattaacagcaagctttttcttttatgtaaaataaatctattgtgaattgatatcagcgactcatttattaggtataaataatagccaaagaataaaattaaaatttattttaaactttcggtcttaaaaagagctgtaggatataaacctcttttgtgaaaagtagaattttctgaatgctttcatagacaaaaacgcatttaaactatgtttacctggttttccaacagaaatcaaatgattttaatattatgttttgatgggttattttcagagttgtttggttttttaaacactactgaatggtttcttttaaatttaagaacaactagttcttgaaaagcaataccgtatttctctgataaatttgtagttaaggttctagaaaatctaggacaaatttacttcattaaacataaagtttttaagattattcagttggcacaatttaatgcataattgggattggatccatttactgtactgtggtacagtaaagagaatgtgttcttattgaacagcagatttgtatacaaatacggaataatgcaactacattataaattgtatacgaacaaaataaattgggtcactctgagcttactattaaaacattgaaaatttattaatgaacacaggctatcttgatgaggatctctgcttatgaaacacatactaatgaaattattagtgacacattggaagctagaaaattgctgttggggccattgctataaatcattgtttccatgttaagacttctgttctaattcattcattcaacaaacatttgttgagggccagatactgtgctggtcaactggggatactgtcctgaacaatatgcacacagttcttgcccctgcagagcttaaagaccattaaaggatacagaaaattaagcaattatcctatagtaggattcgtggtgtgatggggaaaatacaaggtactgtatttgggagtcatgtaactccagttttgggagtgagagagggtctggggaagaactgttccagataaaaagatgtgtaaccaagatagcatagcacattctgacaactaaagcaatttactctaacttaagcatgaagtacaaaagtatagttcatttattgagggaatgttaagctattaaaatgatactttttggtacttttaaaaaaatgaatacttaaacaccgttttaaaattttgtgttaagagctcctaataagaacttggtaaacatgttgacaatttaactcacagtctaaactttaaaagtagtagttacccttttatttctgtgccatgagacaaattcttctgcagttttatagttgtacaagatgttttgactcactctcaattgccatattcttaaagaaaccctgaaaagctgctcaagctggtcagttttctgtaaaaccaagtaaatgaaattttctctcccctcagaaaggaagttctacagcctagagtaccatctattgtgttttataagtccagatttaggctttgaaagatcataccaaaacttcagatcgacttaaacagcaactatgaattaggtttatgggaaatgtagtaatacaggggaaagaatatcggtaatggagtgaaatggtcctgggttcaaatccagtcttcctcacatattgtgctctttaagcttcaaatgagatgtataactgccttttccttaccagtaaaatgaggacaataattatgacaccatagggtggttgtgaggattagcaaatgttatcttgtatttcaggtgcctttcagggaaaggcttggcacatagtaaacacatcctgtaaatatcagtttccccttgttagcccctgtagcatcctgacctaccaagtctataggccttgcatatcactgtgcaccagagatacctcttttacatctgggctctgttttctctctatcaatcctatcctccaccctctttaaatcagaccccaggtttaaccttcccacagtcagtataaatcatttttcagaactttcagctttccatcaagtgaaagttgattttagttacccagtaatgtacagaaaccttcaataatgttaagcttcaaaggcttctggtacgtttgtctaccacagaaccaccacaatatatatgcttgttcttaggtttattgctttttattttaatggggtttggttgtttgggttttattttggttttggcttattttaaagtcaagtttagtttttactcaggtaaaggcctgaagtttcttgggcgtggaagaaaaagcttgggaagcctattaattcatggtgcagttcagaattgtttaaataagctctgtgccactgagcttaatctgaaagtatagtgacatgtgaaggatgcacatatgaatgaaaaactaaaataattgtaggctcttctataaatgaaaaaaaaagtgattggattgtgtctacctttttcctcaaagtaatctaacctaaacggtcatggtgttaaaactttttatggtgctaatcagaaaaattgatgttgcaagaaatgaggtctcaaaaatgggaatgtgcctcctcactctgcgtcacatgggaaataaatcctgaggccaggatcaccagtggggtagagtcatcttcatagtctcctgttatcctccccctgaacaaagaacaaagtgaggactgggaagctagtgttggggaaacatttctgggataaactgtggagtggagaagacaatggagggcaaggcaaaaacccacagacttgtttacccatagaggccccactcacctccatgctgacagaattccagaaaaattccttccctatctcccaaacacctgaaattctgaaatattgccctactatttagcactttaagcttcagtgaggtgctgtaatggagagatagcttcatagtttagcctatagccaactttgcctcaagacctccagataagatgaagtggcttttacctcatgtgagtctcaaacgctggagagagagttccacaaccacccctgccctttctcccatattacgctcattagaaagtctactcagggctgggtgccgtggctcatgcctgtaatcccagcactttggaggctgaggcgggtggatcatctgaggtcaggagttcgagaccagcctggccaacatggggaaaccctgtctctactgaaaatataaaaattagccgggcatggtggcgtgcacctgtaattccagctactcgggaggctgaggcaggagaatcacttgaaccccagaggcagaggctacagtgagccaagattgcaccactgcactccaacctgggtgatagaataagactcttgtctcaaggaaagaaaaaatgtctactcagtagagcagtgattggcaaagtgtgagaccccagaccggcaatattggcatctcctggagacttgtttaaaatgctgattactattttcaagaactttctaccttcatttttacttatttttttgttttcaagggctcatggaatcagtcttccatgtgacagctttttaaatattttaagacaaaaactgagtcttctaatcttaattgtgttctagcagtagtcattgtaattatagttatttttataatttatttgtttagtgtatatctgtcactctagaatgtaggctccctgagataaaaactataattcttttgatggcagttacattcccaactcttagcacaagatctaggacatagtatgaactcaataaatttttgttgaatgaaagaaaaatgcaaatttataagccttttcagagacctactgaatcaaactctgagagtggagcccagcaatctgttgtaaaagctgtttgagtaatactgttgcactctaagcttgagaaccactgcaatagaactaagagaacattcatttcaccttcaggcctattctctgacatcacttgaaaaatcctctctgccttctgtaacccttaaccaacaacagtgccctgtccatgtaggggaaacttctgggctgtattacaagtgggtaggaaggtataaggatatcatagtgggaagtattgcttagaatgccagtacttgtttgctgtggaaggtttctaggaatggattgcttagtctaaagtaagcactaccaccatccacgttttcactcaacacagtgccttttaattggtgactaacatcaaaacaccttgacaaaccgttaaaacagtatcagaaaccatgtgtacatccctgtgcctcttagattgctaagttctgctctcattcttacttcaaaggacactttttaaagaattgttaatgcttttttataatacaagtcatagccctgttggcaaaaagaaaaaagattcagtgagaaagaaaaatcactgataattccatcatccagggagaaccactgttatttaagtatatggccttccagacctttctgtgcatttatagatatttttaatgggatcaaagtgtacatactgttttgtaactttttttcactcaacaataccatgactgtcttgctgtgtcaagtatatttctacatctcttaatggctgcatgatattccatcatatgtgccacattttattaaactactgttcaatttttaggtttccaactttcattaataaagtgctttaaag

SEQ ID NO: 300 - DNA, 747 bp, Homo sapiens
atgcactcagcctctgcagaccttactcctcctcatccttcaggcctcagattagactgcattgatttcaggaaaactttcttaaacctcagcaatccctaccccatccgcattcccgtaggctggatccttgcatggaaggttgtattttccaaagatggctgtaacaatatctcctactccacatgctcctcttataatgtggctttgatgtgcctctcatcaagaggtgggatctatgctccctcacttaaaatgtggccctccacgttggcccatgccaatgccttgtttgattctccatccttgtcagtccgctccatttcacaacacttaactgtctgtgccagccgtatccagctacgacaagaaaatctgatgaaaatcttcttagccctagctgctgagagtagagaagcggaaatgaagaggtgggactcaagccagtttattacgcctcttgttggtggtgctggtaagggcttggcagggaaaggaaactggaactacggccctcatcagcagaggcaagggagggtttctgattcagcagcggcccgagactgcatgtctaataaatttctaggtgatgctgatgctgctggtctgagaagtactgtttgctacaaacctaggagggggaggataacaggagactatgaagatgactctaccccactggtgatcctggcctcaggatttatttcccatgtgacgcagagtgaggaggcacattcccatttttga

SEQ ID NO: 301 - DNA, 887 bp, Homo sapiens
  SIMILAR (221)..(667): 501254mologous to Saccharomyces cerevisiae Ylr143wp,accession number U53881,Smith-Waterman Score=376.
ggcacgagggcgcccagcatgagggtcgcggctctgatcagtggtgggaaggacagctgctataatatgatgcagtgcattgctgctgggcatcagatcgttgctttagcaaatctaagaccagctgaaaaccaagtggggtctgatgaactggatagctacatgtatcagacagtggggcaccatgccattgacttgtatgcagaagcaatggctctctcccctctatcgccgaaccataagaggaaggagcttggatacaagacaagtgtacaccaaatgtgaaggtgatgaggttgaagatctctatgagcttttgaaacttgttaaggaaaaagaagaagtagaggggatatcagtaggtgctatactttctgactatcagcgtattcgagtggaaaatgtgtgtaaaaggcttaatctccagcctttagcttatctttggcagagaaaccaggaagatttgctcagagagatgatatcatctaacattcaagcaatgatcatcaaagtagcagctttgggtttagatcctgataagcatcttgggaaaaccctggatcaaatggagccttatctcatagagctttctaagaagtatggagtacatgtttgtggagaaggtggagagtatgaaactttcactttggattgccctctatttaagaagaaaataattgtggattcatcagaagtagtcatacattcagctgatgcatttgcacctgtggcttatctacgctttttagaattgcacttggaggacaaggtgtcctcagtgcctgacaactacagaacatctaattatatatataatttttgaaaagtgttttggaacattgttcattaaacccccatttctatccaaaaaaaaaaaaaaaaaaaaa

SEQ ID NO: 302 - DNA, 886 bp, Homo sapiens
  SIMILAR (314)..(237): 461254mologous to Homo sapiens Human secreted protein encoded by gene 47 clone HLYCQ48,accession number Y14457,Smith-Waterman Score=66.
ggctgtccttttgcgtttagagagaaaatatttaatctatttcacgaaaaaaatgtacaaagctttagaaaagaggcattaggtttccatatacagtataaacacatcctcaccctcctaggatcacttgtattacaccttcctctttgcctagtaaagaagcccactgcactcctcgttcccaaacaatccttcctgttaacacatgcacttgaaaaagtcactgaaaaggtacagtcttgaaataaatgtaggaaatacaatgttgtacaaaaatatattaatctggtctacatggaaacacttaaaaatggcacaccaaggtacattcttttagaactagactatgtctagaaataccaatatatgaacttgtagattggattttcgctgcatttttaatcactggagaaaaaaatataatcaagcctttggaataagaaacatgaagttagcacagcagaccaactctattctcagaaatgaaaccataaactttatcccatacaaaagatggggaaagagtttgagtttcctaaaattggacatatttatggaaatgttataatttaaaactgcaatccacacagcaaactttcatttgttccataatcccacatgtaaagatatgacaattacaacatttcctaattgcctctcaatgcaacttaacagtgagaatttaaacttaaaaaaaacagccctatgtacaaatataattaggaaggtatccctcaaagtagagaaaattaattagaactcatggggtattgttcccctcctttaaaaactgagctattattaagaaatgctacggaaaaaaatactacaacaaaattgttctgccatatctgttatttatataaccataatttctcactgaaac

SEQ ID NO: 303 - DNA, 393 bp, Homo sapiens
  SIMILAR (1)..(390): 671254mologous to Homo sapiens Secreted protein encoded by gene 134 clone HAIBP89,accession number W88667,Smith-Waterman Score =426.
atgcccctacatatcactccgctgggcctgctgctcctcatcctggactgcctcatctcaagcctgtcgtcactgcatacagagctgatcatgaagagacggcagctgcccctggcacttcagaatgtcttcctctacacctttggtgtgctcctgaatctagatctgcatgccgatagtggccccggcccaggcatcatggaaggcttgtcagcatgggcagaacttgtgcacagcagcagcatcccatgcctcttcgttgtgtcctgctcactggtggtcaatgccgtgctctcagcagtcctgctgtggctgcagctcacatccaccttcttcctggccatgctgctcatcattagcctggccgtgtgcccgtgctatggcagacgctag

SEQ ID NO: 304 - DNA, 1491 bp, Homo sapiens
  SIMILAR (841)..(1407): 231254mologous to Homo sapiens hypothetical protein,accession number AL133640,Smith-Waterman Score=106.
atgggcctctttgaaggtacatttagagaagaacagaaatgtacataccaatttctgatgcaaggattcatctgcaaacagactgaccaagtggtcctaattcttgatagcgctgatgccatttgggcaattcagaagttatatccagttgtatctgtgactagtggttttgttgatgtctttagcagtgtaaatgccaatattccctgctctacttctgggtcagtgtctactttctattctatcttacccatcaggcaaatcaccaaagtctgcttcatggatcaaactcctcaagttttgcgcttttttctattggggaacaaaagtacctccaagcttctcttggctgtattctaccatgagctccagagcccccacgtcttcttaggggaaagttttattccacccactctggttcagtcagcttccttattgctgaatgaatctattggtgccaactatttcaacatcatggataacctcttgtatgttgtcctacaaggagaggagcccattgaaatacgctcaggtgtttccattcacttggccctcactgtgatggtttcagtcttagaaaaaggctgggaaatagtaatactcgaaagactaactaacttcttacagattggccaaaaccaaatcaggtttattcacgagatgcctggccatgaagagaccttaaaggccattgctgacagtagagcaaaaagaaagcgcaattgccctactgtgacttgcactagtcattatagaagagttggtcaacgtaggcctctcatgatggaaatgaactcacatagggcttcacccccaatgactgtggaaactatctcaaaagtgattgtcattgaaattggtgattcgccaacagtaaggagcactggaatgatttcatccttatcaagtaacaaattacagaatttggctcatcgagtcatcactgctcaacagactggggtactagagaatgttctgaatatgactatcggggccttactagttactcagtcaaagggagtcattggctatggaaatacaagcagttttaaaactgggaacttgatatatattcggccctatgcactttccatcctagtccagccttcagatggagaagtgggaaatgagcttccagtgcagccacaattggtatttttggatgagcagaatcgaagagtagagtccctgggacctccttcagagccatggacaatttcagcttccctggaaggagcatcagactcagtgctaaaagggtgcacccaggcagaaactcaagatggttatgttagcttctacaacttggcagtcttgatctctgggtcaaactggcactttatttttactgtcacttctcctccaggagtcaattttacagctcgatccaagccatttgctgtcttgcctgtgactaggaaggagaagtcgaccatcatcctggctgcttccctgtcctctgtggcctcatggctggctctgagctgtctg

SEQ ID NO: 305 - DNA, 434 bp, Homo sapiens
  SIMILAR (53)..(112): 801254mologous to Homo sapiens serine protease inhibitor Kazal type 3,accession number AJ391230,Smith-Waterman Score=94.
gatcgtgtcgtgaatttcgaagcatgcagagaaatggaaagcttatctgcaccgagaaaataaccctgttcgaggcccatatggcaagatgcacatcaataatgtgctatgtgtcaaagcatcttaaaatgggcctgatgctcatgcagttggatttccatagattctggcattgttatgagaaatacttaggaaatggattgtttgatggtgaaacttgcaagccaactaaagagaaaggggctgatgtcataagtcaaatttcacattattttgatgcttttgctggcttctttttaatttgtaaagagaaggaacaggagcccaaaggtgattaccagtcagagcagctcatcattaaaaggtctgagcttgtgctctttccagccaattcaaccgaagaaccaggaactgaggaggaaggaagtaattga

SEQ ID NO: 306 - DNA, 3278 bp, Homo sapiens
  SIMILAR (44)..(2560): 981254mologous to Homo sapiens Human serine protease inhibitor VAKTI-2 protein,accession number Y33002,Smith-Waterman Score=4438.
tatgcatggagtggacctgtaggcgacttgcatcgtcttcaacatgaagatagccacagtgtcagtgcttctgcccttggctctttgcctcatacaagatgctgccagtaagaatgaagatcaggaaatgtgccatgaatttcaggcatttatgaaaaatggaaaactgttctgtccccaggataagaaattttttcaaagtcttgatggaataatgttcatcaataaatgtgccacgtgcaaaatgatactggaaaaagaagcaaaatcacagaagagggccaggcatttagcaagagctcccaaggctactgccccaacagagctgaattgtgatgattttaaaaaaggagaaagagatggggattttatctgtcctgattattatgaagctgtttgtggcacagatgggaaaacatatgacaacagatgtgcactgtgtgctgagaatgcgaaaaccgggtcccaaattggtgtaaaaagtgaaggggaatgtaagagcagtaatccagagcaggatgtatgcagtgcttttcggccctttgttagagatggaagacttggatgcacaagggaaaatgatcctgttcttggtcctgatgggaagacgcatggcaataagtgtgcaatgtgtgctgagctgtttttaaaagaagctgaaaatgccaagcgagagggtgaaactagaattcgacgaaatgctgaaaaggatttttgcaaggaatatgaaaaacaagtgagaaatggaaggcttttttgtacacgggagagtgatccagtccgtggccctgacggcaggatgcatggcaacaaatgtgccctgtgtgctgaaattttcaagcggcgtttttcagaggaaaacagtaaaacagatcaaaatttgggaaaagctgaagaaaaaactaaagttaaaagagaaattgtgaaactctgcagtcaatatcaaaatcaggcaaagaatggaatacttttctgtaccagagaaaatgaccctattcgtggtccagatgggaaaatgcatggcaacttgtgttccatgtgtcaagtctacttccaagcagaaaatgaagaaaagaaaaaggctgaagcacgagctagaaacaaaagagaatctggaaaagcaacctcatatgcagagctttgcaatgaatatcgaaagcttgtgaggaacggaaaacttgcttgcaccagagagaacgatcctatccagggcccagatgggaaagtgcacggcaacacctgctccatgtgtgaggtcttcttccaagcagaagaagaagaaaagaaaaagaaggaaggcgaatcaagaaacaaaagacaatctaagagtacagcttcctttgaggagttgtgtagtgaataccgcaaatccaggaaaaacggacggcttttttgcaccagagagaatgaccccatccagggcccagatgggaaaatgcatggcaacacctgctccatgtgtgaggccttctttcaacaagaagaaagagcaagagcaaaggctaaaagagaagctgcaaaggaaatctgcagtgaatttcgggaccaagtgaggaatggaacacttatatgcaccagggagcataatcctgtccgtggaccagatggcaaaatgcatggaaacaagtgtgccatgtgtgccagtgtgttcaaacttgaagaagaagagaagaaaaatgataaagaagaaaaagggaaagttgaggctgaaaaagttaagagagaagcagttcaggagctgtgcagtgaatatcgtcattatgtgaggaatggacgactcccctgtaccagagagaatgatcctattgagggtctagatgggaaaatccacggcaacacctgctccatgtgtgaagccttcttccagcaagaagcaaaagaaaaagaaagagctgaacccagagcaaaagtcaaaagagaagctgaaaaggagacatgcgatgaatttcggagacttttgcaaaatggaaaacttttctgcacaagagaaaatgatcctgtgcgtggcccagatggcaagacccatggcaacaagtgtgccatgtgtaaggcagtcttccagaaagaaaatgaggaaagaaagaggaaagaagaggaagatcagagaaatgctgcaggacatggttccagtggtggtggaggaggaaacactcaggacgaatgtgctgagtatcaggaacaaatgaaaaatggaagactcagctgtactcgggagagtgatcctgtacgtgatgctgatggcaaatcgtacaacaatcagtgtaccatgtgtaaagcaaaattggaaagagaagcagagagaaaaaatgagtattctcgctccagatcaaatgggactggatcagaatcagggaaggatacatgtgatgagtttagaagccaaatgaaaaatggaaaacttatctgcactcgagaaagtgaccctgtccggggtccagatggcaagacacatggtaataagtgtactatgtgtaaggaaaaactggaaagggaagcagctgaaaaaaaaaagaaagaggatgaagacaggagcaatacaggagaaaggagcaatacaggagaaaggagcaatgacaaagaggatctgtgtcgtgaatttcgaagcatgcagagaaatggaaagcttatctgcaccagagaaaataaccctggttgaaggcccatatggcaagatgcacatcaataaatgtgctatgtgtcagagcatcttgtacgaccagtgcagacaggttcagaatgaagcggaggatgcaaaatttagacaacctgggcgttccttggcctctgttgccaggatgagtacagatgagtgcagtgaatttcgaaactatataaggaacaatgaactcatctgccctagagagaatgacccagtgcacggtgctgatggaaagttctatacaaacaagtgctacatgtgcagagctgtctttctaacagaagctttggaaagggcaaagcttcaagaaaagccatcccatgttagagcttctcaagaggaagacagcccagactctttcagttctctgctgatggtcaccagtaatgattctgagatgtgcaaagactaccgagtattgcccaggataggttatctttgtccaaaggatttaaagcctgtctgtggtgacgatggccaaacctacaacaatccttgcatgctctgtcatgaaaacctgatacgccaaacaaatacacacatccgcagtacagggaagtgtgaggagagcagcaccccaggaaccaccgcagccagcatgcccccgtctgacgaatga

SEQ ID NO: 307 - DNA, 330 bp, Homo sapiens
  SIMILAR (1)..(249): 831254mologous to Homo sapiens HSPC230,accession number AF151064,Smith-Waterman Score=352.
atgagtgagcaggaagaggagcttgaggatgatcctactgtagtcaaaaactataaagacctggaaaaagcagttcagtcttttcggtatgatgttgtcctgaagacggggctagatattgggagaaacaaagtggaagatgctttctacaaaggtgaactcaggctgaatgaggaaaaattatggaagaaaagcagaacgccatccttgtcattgtccagtgggctcatggtggcagaagcccagcagcatagacttccattcaccgtggccaacctggctacaaccactggggagtgcccaacctgctgctgcagggaccaacactga

SEQ ID NO: 308 - DNA, 1096 bp, Homo sapiens
  SIMILAR (48)..(329): 721254mologous to Homo sapiens HSPC230,accession number AF151064,Smith-Waterman Score=322.
gggacgagagggcctgacgtacagattataatgcgccatggctatgcgctagtgttaaattgcttgccggtgttttaagaaagccagatgcctggattggactctcgggtgttctccgagggacaccttcatcatacaaactctgtacttcctggaatcgatacttgtatttttctagtaccaagttacgtgcaccaaattataaaacacttttttataaatattttctcactgagactcccagggcttttactatctccagaatgtatttttcctttttccgtaagacttcaaaagtaatataaaggtctacaaaatctacttaaaaagtctctggcaaaaagtagatgaagaggactctgatgaagaaagccatcatgatgagatgagtgagcaggaagaggagcttgaggatgatcctactgtagtcaaaaactataaagacctggaaaaagcagttcagtcttttcggtatgatgttgcccctgaagacggggcctagatattgggagaaacaaagtggaagatgctttctacaaaggtgaacctcaggctgaatgagggaaaattatggaaaaaaaacagaacggttaaagtgggagataccttgggtcttttccttggagaggataaaaaagcaggaacaaagacagttattcggattttcttgaaaaaagtgtttgaaaagaagactgaaagtgaaaaatacagagtggtggttcggcggtggaaaagtttaaagttgcctaaaaaaagaatgtttaaataaatggattgctttttagccataaagctgctttttagtggtaaaggaaggggtcccctgaaaaataggacctttttattaaaataaagttctcttagcggttgtggaatctgccgagccattttgtggaaattgggatccatatctggagacacttcccaaggcctgcctcacctccaccccctgcccaccttgatccatgctcctttgacctcgtgtgagaacccctttgccagagtgagacgtgtgcagaatgaactaagccccagagggttttaatggcttgcctgctgtttcccacataaactacctcaggagtcacagtaaaat

SEQ ID NO: 309 - DNA, 713 bp, Homo sapiens
  SIMILAR (336)..(503): 451254mologous to Homo sapiens metallothionein I-F,accession number K03473,Smith-Waterman Score=120.
ggcacgagcggcacgagtgggcacagttgctggtggaggtcctggggctggtgtgagtgcctccaattcccttgctttacgcagcttctcacgctttcgctggatggcagcaacccgttcacgtactgcacgggccactggctggttaatcggcttcacagaccaagcccagagccacctggaattggggtgggggatgaggaacacagcttgggaccccctatcaaagattcatcaagacgccttgcacgtgcacccactgcctcttcccttcttctcgccttgggaactcctagtctcgcgcctcgggttgcaatggaccccaactgctcctgtgccgctgcaggtgtctcctgcgacctgcgccaaactcctgcaagtgcaaagagtgcaaatgcaccttcctgcaaagaaagagctgctgctcctgctgtcgcctgtgggctggtgccaaagtgtgccccagggctggcatctggcaaagggggcatcgggagaagtgcaggctgctgcgcctgatgactgggacagccctgactccaagtacaaataggagtgacccgtacaatccagggatttttgtgtttttttgctaacaatctttgaacccctttgcttacattcctttttttcttgtggaaatatgtggaataattaatttaaacatttaggatttgaaaaaaaaaaaaaaaggccggccgctttaaagaacc

SEQ ID NO: 310 - DNA, 873 bp, Homo sapiens
  SIMILAR (172)..(483): 701254mologous to Homo sapiens NAG13,accession number AF194537,Smith-Waterman Score=367.
atggccgggtacccctctgagaggaaaccaccagaggaacgatcacacagcaacgtttgctgttcagcattattcgctgttctgcagcctccactactgatacccaggcaaacggggtctggaatggacctccagcaaactccaacagacctgcagctgacggtcctgactgttagaaggaaaactaacaaacagaaaggacagccacaccaaaaccccatctgtacatcaccatcatcaaggaccaaagaaatacaaactatcatcagagaatactataaacacctctacacaaataaactagaaaatctagaagaaatggataaattcctcgacacatacaccctcccaagactaaaccaggaagaaattgaatctctgaatagaccaataacaggatctgaaattgaggcaacagttaatagcttaccaaccaaaaaaagtccaggagcagatggattcacagctgaattctaccagagagcctggaatcctcctggaatccgttccataccacatctcataagtgaagaacctgaaaggaaagaactgaggtcaacagcaaagatgagaagcagtgaccagagctgctccaagccttgtttgatcagaagcctgaagggcaaaattgtctcctttggtgcactgacttggatctccttgtttttcacaggacaaagagatgaagaaaatggattttgtttgcctgtgaaaggcaagctcaatgttcagatgtgtccagagtttcttccttctggtgggttcgtggtctcgctgacttcaggagtgaagccgcagacctacacagtgagagttacagctcttaaaggtggtgcagacccaaagagtgagcagcagcaagctctattgtga

SEQ ID NO: 311 - DNA, 1737 bp, Homo sapiens
  SIMILAR (461)..(396): 631254mologous to Homo sapiens Human secreted protein, SEQ ID NO: 7083,accession number G03002,Smith-Waterman Score=72.
atgaacacctcttgcccaagaacctgcagcattccctggaccctgttgatcggaatagttgcactcactgatgcagcagcagaaactctagttttcctcctagaccacaaggaggaccaaggaagaagtacaggaaaagcggaagctggttctaggcaaaccaatggtcccaactccaaagagtcgggggttgttagagagccctttcccagtaagcctgacacccgtgtctttagtccagtggccgtactagtcgcttttaactggctgacaggtgatagtcccttagtggtcaccaagatgtgcccagttcttggtctcaatgacttcaaaaggaagccatggaccttcacggtgagtgttacagctcttaaagatggtgtgtcaggagtttgttccttcagatgttcagatgtgtccagagtttcttccttctggtgggttcgtggtctcgctgacttcaggagtgaagccgcagaccttcatgcccagcatctccaaggcccacgaatatttctgaagcaagcaagggtgaatgtgtggcaaacatcagagtggagctacctgccagtcccgcgccatgtgctggcactcctcagcccctttggatggtggatgggactgggcgccctggagcagggggcggcgctcgtcggggaggctcgggccgcacaagagcccacggagggggtgggaggctcaggcatggcgggctgcggatcctcagccgtgccccgcgggaaggcagctaaggcccggcgagaaatcgagcgcagtgccgttttgggtggagcccgtcaccggagtaagaacttctttacttcctggatgccttttagccaatcaaatggtgctttttccagacctgcccaaggaccaatcagcatgcactcctccattctgagcacatataaaccctggactcagcctcacagtttctgccatctccaagttttcaggcattgcaggctccctatagtccagacactgacgccggaggtggaagcctatcgcggcatatcccgtaccagccatgggatgagcacagagccttggcggttgcaggatcctgaatactggttattgactaagaggtctgagttattaagcatcaagagagttgagcatgctcttggcctaaatagatgggctcagcaaaactcagagtattttgcaactgaagtccacaaatgtgagcatttgccatccaacaaaaaggtggagtcacagagctatctgctgctcctaatattggagagcccaacaggtgaacgcagagaactgcagcttgctggagcggaaacccacaagcaaaagcaacacggggaaccaacattgaggtatttacccaagatgtgtaattgttcaaccaggctcctcttgcctgctaccctgaaaaagtcctatacactgagaatagcaggtgttgcagcagggaaagagtttacagggtcagactcttcaactgttgctgaaaaattattgatgtctgatgaagatcttgattcttttacagttctatatgacataatcagtatagaatttataattgttgaagcaaaagtggatgggaaatgtagtcacatcatggaagccattgccaaccaacaactttactccatggaaaaggaacataaatcatggatagagcactacatacttattacccacctaaaactattgaaaattgttgcagaaaacctgagtgtaccctattatgtaggagtgactgaatag

SEQ ID NO: 312 - DNA, 690 bp, Homo sapiens
  SIMILAR (462)..(388): 641254mologous to Homo sapiens Human secreted protein, SEQ ID NO: 7678,accession number G03597,Smith-Waterman Score=81.
atgggcagtgggcctcgggtgagacctagtgctgtgctggcttcaggtctgaatcagagcagtcctagtggtggtagccacagggtgcttatatcaccattccccccaagctccaggcagttcagcacagagagactctatttgggagaaaataaaggaagacaacaagagtctctgcctgttgatccagagaattcttctggatcttacacaagaccatcaagggggtacctctatgagtctgcaaaagccacagtgttactggctttggggttcttggtctcactgacttcaagaatgaagccacggaccctcacagtgagtgttacagctcttaaagatggtgtgtccggagtttgttccttcagatgttcagatgtgtccagagtttcttccttccggtgggtttgtggtctcgctgacttcagaagtgaagctgcagacctttctcaaaaaggtcaagttaacagaaacacatgtccagggcttatacccaaacaagaattccagagaacaaagatcgagatggtagatggggaaagaagaatcagttcagtaatatttcccgtatctgaagagcaagtttatacaatgacaagattcagacagtcttcagataaccagaagggaaagaacattgttcaaaggtgtggtagaaatctcagttacagggagaagatgaagccttaa

SEQ ID NO: 313 - DNA, 1685 bp, Homo sapiens
  SIMILAR (1)..(870): 1001254mologous to Homo sapiens containing RNP motifs,accession number D89092,Smith-Waterman Score=1574.
gaattcgcagagggatccaagatcaacgcgagcaagaatcagcaggatgacggtaaaatgtttattggaggcttgagctgggatacaagcaaaaaagatctgacagagtacttgtctcgatttggggaagttgtagactgcacaattaaaacagatccagtcactgggagatcaagaggatttggatttgtgcttttcaaagatgctgctagtgttgataaggttttggaactgaaagaacacaaactggatggcaaattgatagatcccaaaagggccaaagctttaaaagggaaagaacctcccaaaaaggtttttgtgggtggattgagcccggatacttctgaagaacaaattaaagaatattttggagcctttggagagattgaaaatattgaacttcccatggatacaaaaacaaatgaaagaagaggattttgttttatcacatatactgatgaagagccagtaaaaaaattgttagaaagcagataccatcaaattggttctgggaagtgtgaaatcaaagttgcacaacccaaagaggtatataggcagcaacagcaacaacaaaaaggtggaagaggtgctgcagctggtggacgaggtggtacgaggggtcgtggccgaggtcagggccaaaactggaaccaaggatttaataactattatgatcaaggatatggaaattacaatagtgcctatggtggtgatcaaaactatagtggctatggcggatatgattatactgggtataactatgggaactatggatatggacagggatatgcagactacagtggccaacagagcacttatggcaaggcatctcgagggggtggcaatcaccaaaacaattaccagccatactaaaggagaacattggagaaaacaggaggagatgttaaagtaacccatcttgcaggacgacattgaagattggtcttctgttgatctaagatgattattttgtaaaagactttctagtgtacaagacaccattgtgtccaactgtatatagctgccaattagttttctttgtttttactttgtcctttgctatctgtgttatgacatcaatgtggatttgtttatacacattttatttgtatcatttcatgttaaacctcaaataaatgcttccttatgtgattgcttttctgcgtcaggtactacatagctctgtaaaaaatgtaatttaaaataagcaataattaaggcacagttgattttgtagagtattggtccatacagagaaactatggtcctttataaatagccagccagcgtcaccctcttctccaatttgtaggtgtattttatgctcttaaggcttcatcttctccctgtaactgagatttctaccacacctctgaacaatgttctttcccttctggttatctgaagactgtcctgaaaggaagacataagtgttgtgattagtagaagctttctagtagaccatatttcttctggattgtaataaaattgttattagctccttttactttgttcctgtctctggaaagccatttttgaattgctgattactttggctttaatcagtggtcacctagaaaaagctttgtaatcataacacaatgagtaattcttgataaaagttcagatacaaaaggagcactgtaaaactggtaggagctatggtttaagagcattggaagtag

SEQ ID NO: 314 - DNA, 1166 bp, Homo sapiens
  SIMILAR (323)..(544): 1001254mologous to synthetic construct lac repressor,accession number A14595,Smith-Waterman Score=354.
atggtatgtctggagtttgttccttcagatgttcagaatgtgtccggagtttcttccgtctggtgggtttgtggtcttgctgacttcaggagtgaagctgcagaccttcgcggaatgaagctgcagaccttcgtggtgagtgtgacagctcttaaaggcggcgcgtctggagttgtttgttccttccagtgggttagtggtcttgctggcttcaggagtgaagctgcagacctttgcatggactcttgttccaaactggaacaacactcaaccctatctcgggctattcttttgattaataagggattttgccgatttcggaaccaccatcaaacaggattttcgcctgctggggcaaaccagcgtggaccgcttgctgcaactctctcagggccaggcggtgaagggcaatcagctgttgcccgtctcactggtgaaaagaaaaaccaccctggcgcccaatacgcaaaccgcctctccccgcgcgttggccgattcattaatgcagctggcacgacaggtttcccgactggaaagcgggcagtgagcgcaacgcaattaatatgtttagctgtgtccagagtttcttccttccggtgggttcgtggtctcgctgacttcaggagtgaagctgcagacctttgcagtgagtgctacagctcttaaaggcgatgcgtctggaattgttcgttcctcccgtccggagttgttccttccttccagtggcctcatgagtgaagctgcagaccttcgtggagtgaagctgcagacctttgccatgagtgttacagctcagaaagctggcacggacacagagtgagcagcaggaagatttattgcaaagagcgaaagaacaaaacctccaaagtccagaagaggacccgagtgcattgtggctgcttgcgcagctggcctgcttttattcccctatctggccccacccacatcctgctgattggtccattttacagagagctgattgaaacccagccggcttcacctgtcactggcatgcgtcgcgggactttgcggcacctagccagccactctggcagcccagagggagctcgccccccagtcaagcccagcaggtgcctgccggctgtgccgctgagtgcggggcttgcggagcccgcgcctacccggaaccgcgccggtggccaccc

SEQ ID NO: 315 - DNA, 857 bp, Homo sapiens
  SIMILAR (44)..(82): 691254mologous to Homo sapiens Human secreted protein clone pl87_1 protein sequence SEQ ID NO:28,accession number Y53011,Smith- Waterman Score=49.
gcgggaggcagcaccgggctcttgatggacttggcagccaatgaaaaggccgttcatgcagacttttttaacgcagctcaggactgcccaggacaagccagcagtcctccatggttcccgcactgcagcgagggcagtcggagcacggggtccgtgggaaggcagcagacggcctgtggtgtcggaagagagacctctataccgatccctgccacatttagaaagctgctgggggatcgcaggctcagctgccggccagataatgaacctcagcaaggcagcacagctctgcggggaatgcctgcctgcgtcttggagcagaatgggccgagggcgagggagccttctggggtcctggagaagacgcttctaaatacttgtcttctcactggacagaatgacttgtcccaggtcactcggaattccagaggcaaacctaccagacctcgttctagtgtcacgagcttccttgtctctccccagagatgtgaactgaacgggagagaagtggcagctttggacagagcgtttgggagcacaggccatgggcagggggcggaggcgctaatgtttaccagatgcagagaacatccgctgtgtggcaccaacaaagcaacaagtgaggggaaaatgggcacaggacgcttaagaaacagtttacggaagaaccaatccaagtggctgggaagttatctagaggtgctcagaaccacaagaagcaggcgagaggtcagcgaagacagcacaatatcagtttctactcactggaggggtaaatgttttaagagtgatgaaacaccatccgttgctggtggagaagaagggaagaagaccacacagccatgcatagatgtgag

SEQ ID NO: 316 - DNA, 523 bp, Homo sapiens
  SIMILAR (366)..(187): 551254mologous to Homo sapiens Human secreted protein clone pl87_1 protein sequence SEQ ID NO:28,accession number Y53011,Smith- Waterman Score=137.
ccctcaaagctctttttgaatgggcaccccgtgttttttattttagacagtgctttctcttaattggagtgagtacaaaacatgatcccgttcagagatgaacagaatcatctaggtgcgttaagaacagtcttatctttctggttaaccaggtcctaaattcaagggatttccacgtgttctttaaaaccacctgaaactgtcctgcgcaggctcacactgcggctctgtaccaagggcttggcccccgcccgcatgccagagggcatctcactggatgtcatcatcatcaaaaagatcttcaacatcgttaaaaaagtctgcatgaacggccttttcattggctgccaagtccatcaagagccccggtgctgcctcccgcctggggaatggaaaggcaaggttatgtcaggtgcgttttccgaaagaacaggtgataagtgcattgcagggccactacccccacaaaaaaagaagatgggtgaggggaaacaggctcaagttggagtcaacattttagttc

SEQ ID NO: 317 - DNA, 210 bp, Homo sapiens
  SIMILAR (205)..(113): 321254mologous to Arabidopsis thaliana T19E23.5,accession number AC007654,Smith-Waterman Score=49.
gtggctgctgagagcatgtatatgagagaagcattagagaagatacagggagatgaggaggtcgtcatagtccatgtgagagatgatgatggcttgctgttaggcagaggcaatggcaacgacaatggcaaaatacagttgaaggagaaaagtaactaagataggagatggctaaggctatctttgacttatccaaatggctaatgggga

SEQ ID NO: 318 - DNA, 773 bp, Homo sapiens
  SIMILAR (61)..(252): 331254mologous to Pseudomonas aeruginosa similar to E. coli protein PolB/DinA, Swiss-Prot Accession Number P21189,accession number U15370,Smith-Waterman Score=74.
cagcgttccgccgcgcgaggggccgggagctggggcggaaagcggaaccgagagcgctttccgccgtgcggcgatgaacctccgggaaagacgctgggaggcccgagggatgcccggcgcaggtggacgctcatcgggagtcacggggtcggccctcaggggaacggggactatccgtatcaactcggtgttagttcgttttcttcaccttgcggtttgtgccctctccacatttcctctctgtgtctaccattctcctgggggacgtggcaaaccgtgagccgatgcgtttgagttttgggaaaccctgcggaaacgccctggcgccggtggttttgcgcgtcctaccctgtgtcacctcagggttatgatctggcccctggcaaggctccccaagtgtgatgcctccccccgtccagatgactgcattttgaggatggagtcagtctggtggcattttttgcttaagtaaacaattgtaaccgtttgtgtagcatcagcgttcaacagctgcctgtgcaaatcgaaaaaagcgaaactttggaaactaggaagcatcagatgaataattctgaagacttgatgtcaacgggagtatcttgtttttaaacttttggttttctgttctggagacaaacagttcatatgcactaaagaaaaaagtgtcattatttcagatgctcattgccagcaaagagaactgtattgcaagtcaggcttcactcccagtattttctgaatgtttcaataaaatgaaatatatacgtcaaaaa

SEQ ID NO: 319 - DNA, 545 bp, Homo sapiens
  SIMILAR (154)..(56): 411254mologous to Homo sapiens Human neurofilament-L mutant protein fragment 6,accession number Y20499,Smith-Waterman Score=56.
cgcctctcggaagcttggcctcgcaggagcggctctctatcctgtggggatcttcggccagtgggcctcgtgagctggggtcccgcctggggaatccgcatggcaccggtggtctgggggagaggctgggcctggcgcgggacgaggcgaagcgccggtggccgacggcttctgaggaattatcttttacttggcgccacacggggcggggcctcctgctatgctgtggagcgcagtgtcttccatcgttgcctcacagacccgctgctccgggaagtcgccacacattctcagggaacacccacatctgtcgcctgcgccctccgccgctcagctgtttgcttttgtttacgcattccggagacctgacccaccggagcactgggctgagcacaggagaaggggctttggagcgctctttgtactcaactccaagagcgagtgggaaactcaggactgggttgggtggatccctgcgtctctccctagccttcgtcctcttcccccgtttttccactttatgaaagtattgcctagagatgaaa

SEQ ID NO: 320 - DNA, 664 bp, Homo sapiens
  SIMILAR (289)..(474): 951254mologous to Homo sapiens Sqv-8-like protein,accession number AJ005865,Smith-Waterman Score=315.
  misc_feature (1)...(664): n = a,t,c or g
ctgaaacccttgagaacctgtcgacgccaagtcttggcacgaggggaagcgtgccctggcggcgctgccagccccagctgggagctggtaggggagtgcgaggaaggcgggacgcagggcggagccgctgcaggggcggggcctgcggacaggagccggggtttggggcgggaacccctcgtcccctgcagaccccgcctgctcgggcgcgggcggcggcgcggccatgaagctgaagctgaagaacgtgtttctcgcctacttcctggtgtcgatcgccggcctcctctacgcgctggccagccatgtgactgccttcctcccctgcgggcagcagccgagcagctacggcagaaggatctgaggatttcccagctgcaagcggaactccgacggccaccccctgcccctgcccagccccctgaacccgaggccctgcctactatctatgttgttacccccacctatgccaggtatgggctctggtgcactcaagaggtctgcgttgtccaagaagttggagttgatgatgaggagtttggggaggcactgggctaggagttgttcctcaaactagagcatgccaaagacaggataaatgaaccacatttatactcanatatttgtgggaaaatagttctttttcaggctgggtgtggtggct

SEQ ID NO: 321 - DNA, 740 bp, Homo sapiens
  SIMILAR (377)..(589): 941254mologous to Homo sapiens Human secreted protein, SEQ ID NO: 5264,accession number G01183,Smith-Waterman Score=374.
agatcgtcagtgcctgagaaagaacattgacttactctatatcaattgaggggaaagtgcagtaccgtcatcttcaagccttgtaagcataaaagagaataggctgcccatataagtcaaaggaaaatgagcccaggccttgctatgaagcagtgtgtgaatggacaatgttgaatgaatgtctggctcagtgatggagagccaggttcatctttgaaatctagggctctctcactcatgaagcagactcctagtcctggagtgactgtgtactagagcgtggttgtggtgctgtatgtgaaccgcatgcaagcttgatttcaccttcagggggctgataacctagtaaatcatcaaaatgagatcataagtgttaatgtacactggacatgaaaacaaagactggtttagcagcagacattggtttactctgcagcctgtgttttctgtttccccctttcccacctccttccccccacccaatccttttttttttcttttttgcttttcttttctttttttttagtttttatttactttacctagtatgcctttttttagttgcttctcaagtcagaaaacttttcaggaaggtttcccctgtgcatttgcaccaagatgaatgtttgatgctatgaaaaagctttccatatcatcaaaactaatttggtggtagatttttgcatgaaaaaaatcataaatgtccctcaaaatagactgtgttgcagtacacaagttgc

SEQ ID NO: 322 - DNA, 4239 bp, Homo sapiens
  SIMILAR (781)..(2484): 991254mologous to Homo sapiens chromosome-associated polypeptide-C,accession number AB019987,Smith-Waterman Score=2838.
ggcggaggcaggtgagaggaggaaggaagcggcggcgcggcgggcacagcagctcaggcggcggcccggttcctgggagtgtcggtgcggcgcgttggttggggcggatcccgcggggcccgggcgggggaaggagtcaccggcccggccatggcggacaacgagaaactggacaaccaacggctcaagaatttcaagaacaaaggccgcgacttggagactatgagaagacaacgaaatgaagttgtagttgaattaaggaagaataaaagagatgaacatctcttaaagagaaggaatgtaccacatgaagatatctgtgaagactctgatatagatggtgattatagagtgcaaaatacctctctagaagctattgttcaaaatgcttcaagtgataaccaaggaattcaattaagtgcagttcaagctgctaggaagcttttgtccagtgatcgaaatccaccaattgatgacttaataaaatctggaatattgcccattttagtccattgtcttgaaagagatgacaatccttctttacagtttgaagctgcatgggctttgacaaacattgcatctggaacttctgaacaaactcaagcagtagttcagtccagtgatgggccccagtgtagagattatgtcataagtcttggagttgtgaaacctttactttccttcataagtccatctattcctataacattcttaagaaatgttacttgggttatggtcaacttatgtcgccacaaagacccaccaccaccaatggaaaccattcaggagatggctgtatgggcgaaaaagatgaccgaaattcaaactcctgaaaatactcctcgtttatttgatttagtaaaagtaaaagatgagaaaattcgccaagctttttattttgctttacgagataccttagtagctgacaacttggatcaagccacaagagtagcatatcaaaaagatagaagatggagagtggtaactttacagggacaaatcatagaacagtcaggtacaatgactggtggtggaagcaaagtaatgaaaggaagaatgggttcctcacttgttattgaaatctctgaagaagaggtaaacaaaatggaatcacagttgcaaaacgactctaaaaaagcaatgcaaatccaagaacagaaagtacaacttgaagaaagagtagttaagttacggcatagtgaacgagaaatgaggaacacactagaaaaatttactgcaagcatccagcgtttaatagagcaagaagaatatttgaatgtccaagttaaggaacttgaagctaatgtacttgctacagcccctgacaaaaaaaagcagaaattgctagaagaaaacgttagtgctttcaaaacagaatatgatgctgtggctgagaaagctggtaaagtagaagctgaggttaaacgcttacacaataccatcgtagaaatcaataatcataaactcaaggcccaacaagacaaacttgataaaataaataagcaattagatgaatgtgcttctgctattactaaagcccaagtagcaatcaagactgctgacagaaaccttcaaaaggcacaagactctgtcttgcgtacagagaaagaaataaaagatactgagaaagaggtggatgacctaacagcagagctgaaaagtcttgaggacaaagcagcagaggtcgtaaagaatacaaatgctgcagaggaatccttaccagagatccagaaagaacatcgcaatctgcttcaagaattaaaagttattcaagaaaatgaacatgctcttcaaaaagatgcacttagtattaagttgaaacttgaacaaatagatggtcacattgctgaacataattctaaaataaaatattggcacaaagagatttcaaaaatatcactgcatcctatagaagataatcctattgaagagatttcggttctaagcccagaggatcttgaagcgatcaagaatccagattctataacaaatcaaattgcacttttggaagcccggtgtcatgaaatgaaaccaaacctcggtgccatcgcagagtataaaaagaaggaagaattgtatttgcaacgggtagcagaattggacaaaattacttatgaaagagacagttttagacaggcatatgaagatcttcggaaacaaaggcttaatgaatttatggcaggtttttatataataacaaataaattaaaggaaaattaccaaatgcttactttgggaggggacgccgaactcgagcttgtagacagcttggatcctttctctgaaggaatcatgttcagtgttcgaccacctaagaaaagttggaaaaagatcttcaacctttcgggaggagagaaaacacttagttcattggctttagtatttgctcttcaccactacaagcccactcccctttacttcatggatgagattgatgcagcccttgattttaaaaatgtgtccattgttgcattttatatatatggggattttggcactcaaaaagaagctgcttgggccataagtaacttaacaattagtggaaggaaagatcaagtggcttaccttatccaacaaaatgttatcccacctttttgcaacttgctgactgtaaaagatgcacaagttgtgcaagtagtactcgatggactaagtaatatattaaaaatggctgaagatgaggcagaaaccataggcaatcttatagaagaatgtggagggctggagaaaattgaacaacttcaaaatcatgaaaatgaagacatctacaaattggcctatgagatcattgatcagttcttctcttcagatgatgtatttaataattttgtagttttcttaattttatatataaacatagatctggataaagtaatatatataggtgaagttgaacaaattgctatgatgaaaccaaaaggccagactgaacacgatgagggtatgcttgaatatttagaagatataattggttgtggacggctaaatgaacctattaaagtcttgtgtcggagagttgaaatattaaatgaacacagaggagagaagttaaacagggtaaagatggtggaaaaggaaaaggatgccttagaaggagagaaaaacatagctatcgaatttcttaccttggaaaatgaaatatttagaaaaaagaatcatgtttgtcaatattatatttatgagttgcagaaacgaattgctgaaatggaaactcaaaaggaaaaaattcatgaagataccaaagaaattaatgagaagagcaatatactatcaaatgaaatgaaagctaagaataaagatgtaaaagatacagaaaagaaactgaataaaattacaaaatttattgaggagaataaagaaaaatttacacagctagatttggaagatgttcaagttagagaaaagttaaaacatgccacgagtaaagccaaaaaactggagaaacaacttcaaaaagataaagaaaaggttgaagaatttaaaagtatacctgccaagagtaacaatatcattaatgaaacaacaaccagaaacaatgccctcgagaaggaaaaagagaaagaagaaaaaaaattaaaggaagttatggatagccttaaacaggaaacacaagggcttcagaaagaaaaagaaagtcgagagaaagaacttatgggtttcagcaaatcggtaaatgaagcacgttcaaagatggatgtagcccagtcagaacttgatatctatctcagtcgtcataatactgcagtgtctcaattaactaaggctaaggaagctctaattgcagcttctgagactctcaaagaaaggaaagctgcaatcagagatatagaaggaaaactccctcaaactgaacaagaattaaaggagaaagaaaaagaacttcaaaaacttacacaagaagaaacaaactttaaaagtttggttcatgatctctttcaaaaagttgaagaagcaaagagctcattagcaatgaatcgaagtagggggaaagtccttgatgcaataattcaagaaaaaaaatctggcaggattccaggaatatatggaagattgggggacttaggagccattgatgaaaaatacgacgtggctatatcatcctgttgtcatgcactggactacattgttgttgattctattgatatagcccaagaatgtgtaaacttccttaaaagacaaaatattggagttgcaacctttataggtttagataaggtgcccgccaccacacccagctaa

SEQ ID NO: 323 - DNA, 2076 bp, Homo sapiens
  SIMILAR (880)..(1323): 891254mologous to Homo sapiens glucuronyltransferase I,accession number AB009598,Smith-Waterman Score=704.
atgcttcatcgtgttttcagaaaagccacaaacaccaacacagttgctggagctgcagtagaggactccccgcccaacacactaggcacaccagactgtgctacaggaaaagaaaaaggactcagaaccaccttctccgcatccgtaaaggtccttagactcaccgcggggaggaagcggaccaggcaactccacagcacggaaacacagcgccacgagctccaggcggatgctgagagccgccccgagtccccgccctcctctgccccgaagggcttcaggtgcccagaccgggcggggcctcgcggagcctcgcagcgcaggcgcagtctgcaggcaacattcaactgcaaggcatcggccaatgggaactattgctgggctcgttcgaaaacccgctgctccgggaagtcgccacacattctcagggaacacccacatctgtcgcctgcgccctccgccgctcagctgtttgcttttgtttacgcattccggagacctgacccaccggagcactgggctgagcacaggagaaggggctttggagcgctctttgtactcaactccaagagcgagtgggaaactcaggactgggttgggcggcagcggcgtggccatgaagctgaaggtgaagaacgtgtttctcgcctacttcctggtgtcgatcgccggcctcctctacgcgctggccagccatgtgactgccttcctcccctgcgggcagcagctgagcagctacggcagaaggatctgaggatttcccagctgcaagcggaactccgacggccaccccctgcccctgcccagccccctgaacccgaggccctgcctactatctatgttgttacccccacctatgccaggctggtacagaaggcagagttgcggaacaaggccctggactggctccggggcagagggagtgctgtgggtgggaagaaggacccatcaccaccagggacccaaggagtcgtgtactttgctgacagtggcaacacctacagctgggagctgtttgaggagatgcgctggacccgtggtgtctcagtgtggcctgtggggctggtgggtggcctgcgagtcaagggccctcaggtacaggacagccgggtagtgggcttccacacagcatgggagcccaacgggcccttccctgtggatatggccggatttgctgtggccctgcccttgctgttagctaagcccaatgcccagtttgattccactgctccccggagccacctggagagcagtcttctaagccaccttgtggatcccaaggacctggagccacgggctgccaactgcactcgggtactggtggtcagttctcagcagagagaggccctggagagggtggcacatccctgccagcaggtcatctctgcagctctcagcagagagggttggtcctctctgcaactggttgtcccatcatctccagctatcaacagagaggggcttgaccccaaccccactccaagattagagccggcactgggaaggacagagtccaggcagtgggagcagacaccccccagccagcaggaatggagaggtgggggcccttcccaggcccctgaggatgcagactacagagatacccaggtccttcgcctgggaggacagctacagctgcacccagggagctcctgccccaccaactcagaaggaggggggttcctgcttatccctgactcctgcctgctccatggagggggaggcccaggtctgcagctgcagatgggaccatctagttgcaggaaaacaagctcagggctcccaatgattctacattatgggctggagaaaattgaacaacttcaaaatcatgaaaatgaagacatctacaaattggcctatgagatcattgatcagttcttctcttcagatgatgtatttaataattttgtagttttcttaattttatatataaacatagatctggataaagtaatatatataggctcttcactcatgaagcagactcctagtcctggagtgactgtgtacgagagcgtggttgtggtgctgtatgtgaacgcatgcaagcttgattcaccttcagggggctga

SEQ ID NO: 324 - DNA, 465 bp, Homo sapiens
  SIMILAR (58)..(243): 921254mologous to Homo sapiens Aop1_Human, MER5(Aop1_Mouse)- like protein,accession number D49396,Smith-Waterman Score=304.
atggcaaagtacagccaagtaagcagctcagtgaccagcctgagtgcccagcagtgtggcagtgccacattcagaggtctcttcataattgaccccaatggagtcatcaagcatttgagcgtcaacgatctcccagtgggccgaagcgtggaagaaaccctccgcttggtgaaggcgttccagtatgtagaaacacatggagaagtctgcccagcgaactggacaccggattctcctacggttgctcatgtttgtgatgcaggttacgtcgctggatttgtagacttggaggtgagcaacagaccagacctctatgatgtgtttgtgaatctggcagagagtgagattaccattgctccccttgcaaaagctgtaggacactcgtggcagatcccgggtgaccgaagacagcccatttccaggagtggggccttcggagcggagggagcaaggaaacggggctga

SEQ ID NO: 325 - DNA, 1371 bp, Homo sapiens
  SIMILAR (40)..(882): 951254mologous to Homo sapiens uncharacterized hypothalamus protein HT011,accession number AF220185,Smith-Waterman Score=1385.
  misc_feature (1)...(1371): n = a,t,c or g
aattcccgggtcgacgatttcgtgccgcggcggcggaagatggctgcggccgaggtggtggacactcagctgatgcttggagtcgggctgatcgaaaaggacacaaatggagaagttctgtgggtgtggtgttatccttccacgacagccacattaaggaacctgctgctgagaaaatactgccttacagatgaaaacaaacttctccatccctttgtctttggtcagtacagaagaacatggttttatatcacaacaattgaagttccagattcttccattttgaaaaaggtgactcatttttctattgtcctgaccgccaaagattttaacccagagaagtatgctgccttcactaggatattgtgtagaatgtacctgaaacatgggagcccagttaaaatgatggagagttatattgcagttctcacaaaggggatatgccagagtgaagaaaacggctctttccttagtaaggattttgatgcccgaaaggcctacctggctggctccatcaaagacattgtatctcagtttggaatggaaactgttatcttacacacagcactgatgctaaagaaaagaattgtggtgtatcaccccaagatagaagcggtccaggagttcaccaggactctgcctgccctggtgtggcaccgacaggactggaccatccttcactcttacgtgcacctcgacgccgatgagctggaagccctgcagatgtgcacaggttacgtcgctggatttgtagacttggaggtgagcaacagaccagacctctatgatgtgtttgtgaatctggcagagagtgagattaccattgctccccttgcaaaagaggccatggcaaatgggcaaacctgcacaaaagaaattggggtcagctaattggttcaagtctgcagaagatccaggagaaattcagaggagccacgttatacaggaagaactttaattcctcctgaggaactctactttctgagccaaactgctaattttctgcggaactgtctagaagatcattcaagagaccctgcagttgcactttctcgtaaaagttnnnnnnnnnnnnnnnnnnnnggggtttttcccggcctttgaaaattttgcctataaaagttttgcaaatattttatacttgaggaaacaactttaaaaatccatatttaaactatcgcaaaaaaaaacatttggcaaacgttcagccattagcactcatttaaccctggtagaaatatttttttaaaaaaagggccagcccttatgtgaaaaactaaaaaccccattgaatataaaagggtataggactgaaacagggcccttattttattggtaagggaaaataaaattaacttcctacgggggcca

SEQ ID NO: 326 - DNA, 653 bp, Homo sapiens
  SIMILAR (214)..(315): 341254mologous to Ovis aries type II small proline-rich protein,accession number L77968,Smith-Waterman Score=51.
atggacattcaactcatgaggcacaaagggcccatctgcgctgactgtgggctgtggtacaagacatgtcaggatgagtgtggagctttcatggcactgacgggggtagctgagtgtagttctgagaagcggatggcatctgaggttacaaaaccacgggaactcttcactcaaaagcaaaaacacatccggaaagaggaaaaaatccacggccaatgtaaaccccctacaacaccaaccgcccacgtcgtaccccaggctgcaatgaggccggcactcacccaccgctcgcccgggaagcccagacccaggtgtttcaaaatcagaagtacggcaggctcgttcgctctcacgggcaagaatcttaaaccccaacttcagagatacccgcgcacgctgggcgctgccattttgacagaaagcgggcctgccccagaggcccctacgcaggtcgccctgagcagagccggagtgccacagaacccctagctcatcacctccacacccagacgtcgcatcccccggcctgaggaatgccaagaaaccccaccctgccgaccaggatcaggcgaaatcaagtcacccttgaaatacgaaatcgtcgacccggaattccggtccggtgctcacgagtacggcttcaatttccttcc

SEQ ID NO: 327 - DNA, 766 bp, Homo sapiens
  SIMILAR (254)..(766): 581254mologous to Homo sapiens dJ520B18.2 (FARS1 (phenylalanine-tRNA synthetase)),accession number AL121978,Smith- Waterman Score=421.
acgtctgggtgtggaggtggcgagctatgggttctgtggcactcccgctctgctcaaggcgacctgcgtaggggcctctggggcacgcccgctttctgtcaaaatggcagcgcccagcgtgcgcgggtatctctgaagttggggtttaagaatcttgcccgctagaacgaacaagcctgccgcgcttctgattttgaaacacctgggtctgggcttcccgggcgagcggcggaacctgtgacaatttcctacaatggtgggctcagctctcaagagaggggcccatgcatatgtttacctggagagtaaggccaggcacatctccagaggccatcagcaccaggcctggggatcgaggcctcctgcagcagagtgtgccacccaaagagctccaggcagtgtggtggagctgctgggcaaatcctaccctcaggacgaccacagcaacctcacccgggaaggttccttcaccagagttggcagggaacctgcacaaccagcagcattcaccctttgtgggttgttcaagggagagggttgaagggagcattttttacaagcagtatgtgggccgctttgggacccccgtgttctcggtctacgacaacctttctccagtggtcacgacctggcagaactttgacagcctgctcatcccagctgatcaccccagcaggaagaaggggggacactattaccttgaattcgactcacatgctgagaagcgcacacgtctgcacaccagtgggacttgctgcacgccggg

SEQ ID NO: 328 - DNA, 613 bp, Homo sapiens
  SIMILAR (158)..(253): 401254mologous to Homo sapiens lysyl oxidase,accession number AF039290,Smith-Waterman Score=67.
ctggaagaattaattctggaatatttcttaaacttgcttgatttgtgtaaggtctggctgctgggctccctgaaaccttgcacatatcttactgtatgactgtatttcgttttggagtctctggattctggggtttggacagatggccccatagtgaggccctgcagaaatatgccatgtccctcagtgtttgggacctgcccagctgcaaggcagagcccaaaccccaatatggcccccatcatcccctggctcagctgtgcctaccctggcccatgcctggaaggggtttgatcttcccaggaatttgcttcacagctctttcctgtcccaagatctatgcctgatgtgtaaaattcaggaccccaaaggggccacaaaaaagcaataactactaaatataaggaaaacaactctgtatacagcatgtataaagaaaagcaagatatatttggggagataaaagttgtaaaggcattaagatgtgtgtttgttgagaaaaaataaatttgtgcatttaagaagttaaaaaaaaaaaaaaaaagaaatgggtctcactttattgcccagtctggtcttgaactcctacactcgagcagtcctctcaacttgg

SEQ ID NO: 329 - DNA, 347 bp, Homo sapiens
  SIMILAR (272)..(144): 1001254mologous to Homo sapiens Human secreted protein encoded by gene 113 clone HEAAR60,accession number W74841,Smith- Waterman Score=206.
acaacatgatgccatttatttacatgattctgaaagaatatgagtccccaggatcaaatatatacatttttaatatttgaaatatttacataatggaaccacatcagggttcgagggtaagaacagtgttttcaaatgtcctatactttggaaagcagacccgactctggagcactcgccttaattagattctgaatttccttgaattttggatggtccttatcagctaccagctgaagcagaacagcctcactcgtggtcactatgatcccgccttcgagcgagacgctcgagggcaaacatccataagccgaattctggcctgagggccaattcccatagtagtg

SEQ ID NO: 330 - DNA, 5171 bp, Homo sapiens
  SIMILAR (401)..(2536): 431254mologous to Homo sapiens U1 small ribonucleoprotein 1SNRP homolog; match to PID:g4050087,accession number AC004858,Smith-Waterman Score=1070.
  misc_feature (1)...(5171): n = a,t,c or g
cggcacgaggctgtatttgcggcctgtgcgagtaggcgcttgggcactcagtctccctggcgagcgacgggcagaaatctcgaaccagtggagcgcactcgtaacctggatcccagaaggtcgcgaaggcagtaccgtttcctcagcggcggactgctgcagtaagaatgtcttttccacctcatttgaatcgccctcccatgggaatcccagcactcccaccagggatcccaaccccgcagtttccagggatttcctccacctgtacctccaggggaccccaatgatttcctgtaccaatgagcattatggctcctgctccaacttgtcttaggtacccactgtgtctatgggttnggaaagcattttggggcgcaagaaagggatcatccaggcttaaaggctaaagtaaaatgatagaaaatttgtgggtcctactacccactgtttttgttggcaacattttccgaggaaagctttcagagcatgcttattaagacaactcttagcttaaatgtgggtttggttttgagctggaagaggagtacaaggtgcttcccggaaagcttcaaggcctttcggaattctgtgagtcacaaggagcccagaatcttaccctccgtgcacttagattattacatgacctgcaaattggagagaaaaagctactcgttaaagttgatgcaaagacaaaggcacagctggatgaatggaaagcaaagaagaaagcttctcaatgggaatgcaaggcccagaaactgtcacctaatgactgatgaagaagcccttggatgaagaaacaaagaggagagatcagatgattaaaggggctattgaagttttaactcgtgaatactccagtgagctaaatgccccctcacaggaatctgattctcacccccaggaagaagaagaaggaaaagaaggaggacattttccgcagattctccagtggccccactgatcccttatccactcatcactaaggaggatataaatgctatagaaatggaagaagacaaaagagacctgatatctcgagagatcagcaaattcagagacacacataagaaactggaagaagagaaaggcacaaaggaaaaagaaagacaggaaattgagaaaggaacggagagaaagagagagggagcgtgtaaagggaacgagcaaaggcgagtaacgggaacgagaaagggaaagagaacgtgaacgagaaaaggagaaagaacgggagcgggaacgagaacgggatagggaccgtgaccggacaaaagagagagcccgagatcgggatcgagagagagatcgtgaccgggatagagaaaggagctcagatcgtaataaggatcgcagtcgatcaagaaaaaaaagcagagatcgtgaaagggaacgagagcgggaaagagagagagagagaagatcgagagccgagaacgaataacgggagcgaaagagagagcgagagagggaacgggagcgagaaagagaaaaagacaaaaaaacgggaccgagaagaagatgaagaagatgcatacgaacgaaaagaaacttgaaagaaaactccgagagaaagaagctgcttatcaagagcgccttaagaattgggaaatcagagaacgaaagaaaacccgggaattttgagaaagaagcttgaaagagaaggaagaaagaaggaaggagaattggccaaagaagctaaacgacttaaaagaattcttaggaagactatgatgatgatagagatgaccccaaatattacagaggaagtgctctttcagaaaaggttgccgtgattagagaaaaggaaattggaagccagattgaaccgagattaggaaggagagagaaggaggagctttgaggaaattcaggcagcgccttttcttggccagaagggcatcccagatccagatgcagagctccagaggatggaacaagaggctgagaggcgcaggcagccacaaataaagcaagagccagcactcagaagaggaggaagaagaaaagcaagaaaaagaagaaaaacgagaagaacccatggaagaggaagaggagccagagcaaaagccttgtctgaaacctactctgaggcccatcagctctgctccatctgtttcctctgccagtggcaatgcaacacctaacactcctgggggatgagtctccctgtggtattattattcctcatgaaaactcaccagatcaacagcaaccttgaggagcataggccaaaaataggactaagtctttaaactggggtgcttccaatagtccctggtcagcctaattctgtgaagagaaagaaactacctgtagggtagtgtctttaacaaattttgagggatgaagacagttgatgacgtacccccgaaaaaagggaaacttggttccccttgggattatggtgaagattgataaaaatgcaaccaaaggcacttgtaaacactgaagaaaagcggtaaacacattaagagtctcattgagaaaatccctacagccaaacctaggctcttcgcttatcccctggaattggtcctatggtggattctatacctgatggaacgtcgaattagcccatggattaataagaaaatcataggaatatataggtgaagaagaaggctacattaagttgattttgtttgttctaaggttatggctcatagttcaccccagagccattttagatgatgttgccatggtacttggatgaagaagccagaagtttttatagtccaaaatgtggagattatggatatatgaaacagaaagcccaaagaaaattggtcttgtgaagtaaacactttttaaatttaaagttccatttcagattttttctttgcccacccttttaaggactttgaatttttctttgtctttgaagacattgtgagatctgtaattttttttttttttgtaggaaaatgtgaattttttggtcctctaatttgttgttgccctgtgtactcccttggttgtaaagtcatctgaatccttggttctctttatactcaccaggtacaaattactggtatgttttataagccgcagctactgtacacagcctatctgatataatcttgttctgctgatttgtttcttgtaaatattaaaacgactccccaattattttgcagaattgcacttaatattgaaatgtactgtatagggacccaccatggacaattttaattgaaaacaccagtcataaactattaccacccccactctcttttgatcagaaatggcaagcccttgtgaaggcatggagtttaaaattggaatgcaaaaattagcagacaatccattcctactggtatttctgtatggaatgtgtttgtgaatgtatgtgtaaaagtctttcttttccctaatttgctttggtggggtccttaaaacatttcccaactaaagaatagaattgtaaaggaaaagtggtactgttccaacctggaaatgtctgttataattaggttattagtttcccagagcatgggtgttctcgtgtcgtgaggcaatgtgggtttgctaactggatggggttttcttattaataagatggctgcttcagcttctcttttaaaggaatgtggatcatagtgatttttccttttaattttattgctcagaaatgaggcatatccctaaaaatcctggagagctgtatttaatgcatttttgcactaattggtccttagtttaattctattgtatctgtttatttaacaaaaaattcatcataccaaaaagtgtaagtgaaaaccccctttaaaacaaaacaaaaaaatgaaataaaattaggcaaattgacagacagtgagagttttacaaacatgatagggtattctgctcgggcaatttgtaagtttacatgttatttaagggataaagggtaaatcatttcaagggcaggttacccaacccactaactattttgttyttcattttttgstcttgtagaaggktttatatcttgttttaccctggggctcattagtgtttaaaaatgtactgatgatgtgcttagagaaattccctggggctttctytcgttgtagatcagaatttcaccagggagtaaaattacctgaaaacgtaagaagttttaaacagcttttcacacaaattatgatgcaacttgttcccatgtctgaggtacttatttaaaaggaaaggtaaagattggcctgttagaaaaagcataatgtgagctttggattactggatttttttttttttttaaacacacctggagaggacatttgaaaacactgttctttaccctcgaaccctgatgtggttccattatgtaaatatttcaaatattaaaaatgtatatatttgatcctggggactcatattctttcagaatcatgtaaataaatggcatcatgttgtaattgtgtggtgcatactagaaaagttaaaaatatgggctgaactttttatggacttgatttttatgactattggtatctaaaggtcaaggaagccatttacattattttggatgaatctactatacatctatggaaatgtctcttttattttaaattctggtttctcaacggaaaatttcagaaaagatgccccttgccattttcgttaattattcagtcttttcttagacacacccccagcctaagaccttgttcgaggagtttatagtgtctgtcttttcttaacatactgcactgttcttaagcatcatattgtgttgtttttatttagccactattaacatgaaggtttattcaggtagatttgatttcctttgcttcgtttcttctcctgctctgtcaactgtacttatcttaaagggccactctaaaaacaagggagatgtcgtaatctgaaacctttggggagatgtactctgtactgcataacatctccagtgaggtttgtgacaggacctcaactaaatatatgaatttgtgcaagttcatatattaaagtttctgcagcagagtgaaaattgttacagtaaatgtggtagaaactgttaatcgcttaatgccagtttaaatcatgttttgtaaccaagcttcagtaaaaggctttagattgtcagagttggttgatttttagaattgtatatataaagaattagacattaaacaggcatattctagtgtctgaaaatacacataagaaatttctattaaaaa

SEQ ID NO: 331 - DNA, 574 bp, Homo sapiens
  SIMILAR (78)..(368): 321254mologous to Arabidopsis thaliana putative transcription factor,accession number AF062868,Smith-Waterman Score=84.
ggcacgagattcatcagaacagcacggtgtcaaggccctcacccccagaaagcttaagagacactgttttatggaggagagtgagattggaggaagccctgactccaggtctcctgatccttcctacacaaagcgaagctgaaaaaaagtgcaggacactccatttcctcctgggaccagacagggaagccagagccaccatggatgtcaaattccggcaaggaaacaccagtatagcaaaatctccacatcacattttaaagctcacacaatggctcaaagagaacccacatcaaaaaaccgaattcctagctcaggtgagatcaccagaagttgcctgtgaggcttcgtggaacctgcaggtagaaaggacatctttatttcgagctgcagcccagttgcttctgcgtcttggagccccttgaaaggaccctctcccttcaacagtacatagggaggccatttctggggagaaatgtagactgtccttagactcctgaggtttttacacttgcttgctgactctgtggactttgacttcatcaataaccctcttataatgaaaaaaaaaaaa

SEQ ID NO: 332 - DNA, 4980 bp, Homo sapiens
  SIMILAR (1)..(129): 1001254mologous to Homo sapiens 10-AUG-1998 Human Protease and associated protein-8 (PPRG-8) encoding cDNA,accession number Z50925_cd1,Smith-Waterman Score=230.
atggcggaaggcggagcggcggatctggacacccagcggtctgacatcgcgacgctgctcaaaacctcgctccggaaaggggacacctggtacctagtcgatagtcgctggttcaaacagtggaaaaaaatatgttggctttgacagttgggacaaataccagatgggagatcaaaatgtgtatcctggacccattgataactctggacttctcaaagatggtgatgcccagtcacttaaggaacaccttattgatgaattggattacatactgttgccaactgaaggttggaataaacttgtcagctggtacacattgatggaaggtcaagagccaatagcacgaaaggtggttgaacagggtatgtttgtaaagcactgcaaagtagaagtatatctcacagaattgaagctatgtgaaaatggaaacatgaataatgttgtaactcgaagatttagcaaagctgacacaatagatacaattgaaaaggaaataagaaaaatcttcagtattccagatgaaaaggagaccagattgtggaacaaatacatgagtaacacatttgaaccactgaataaaccagacagcaccattcaggatgctggtttataccaaggacaggtattagtgatagaacagaaaaatgaagatggaacatggccaaggggtccttctactcctaagtccccaggtgcatccaatttttcaactttaccaaagatctctccttcatctctatcaaataattataacaacatgaacaacagaaatgtgaaaaactcaaattactgtcttccatcatataccgcttataagaactatgattattcggaacctggaagaaacaatgaacagccaggcctctgtggcctaagtaacttgggaaatacgtgtttcatgaactcagctattcagtgtttgagcaacacacctccacttactgagtatttcctcaatgataagtatcaagaagaactgaattttgacaatcccttaggaatgagaggtgaaatagctaaatcttatgccgaactgatcaagcaaatgtggtctggaaagtttagctacgtcaccccaagagcctttaagacacaggtaggacgttttgcacctcagttctctggatatcagcagcaagactgtcaagaactgttagctttcctattagatggattacatgaggatttgaatatgttctacgaaaataccatatatacaattataaagatgcggatggaaggccagataaggttggttgccgaggaagcctggggaaaaccattttaaaacggaaattgattctatcatagtagatatatttcatggccttttcaaatcaactttagtttgtcctgagtgtgctaagatttcagtaacatttgatcctttttgttacttgacacttccattgcccatgaaaaaagaacgcaccttggaagtttacttagttagaatggatccgcttaccaaacctatgcagtacaaagtggttgtccccaaaattggaaacatattagatctttgtacagcattgtctgctttgtcaggaatacctgcagataagatgatagttactgatatatacaatcatagatttcacagaatattcgctatggatgaaaaccttagtagtattatggaacgggatgatatttatgtgtttgaaattaacatcaataggacagaagatacagagcacgtgattattcctgtttgcctaagagaaaaattcagacactcgagttatacccaccatactggttcttcactttttggtcagccctttcttatggctgtaccacgaaacaatactgaagacaaactttataatctcctgctcttgagaatgtgccgatatgtcaaaatatctactgaaactgaagaaactgaaggatccctacactgctgtaaggaccaaaatattaatgggaatggcccaaatggcatacatgaagaaggctcaccaagtgaaatggaaacagatgagccagatgatgaatccagccaggatcaagaacttccctcagagaatgaaaacagtcagtctgaagattcagttggaggagataatgattctgaaaatggattatgtactgaggatacttgcaaaggtcaactcacgggacacaaaaaacgattgtttacatttcaggtccaacaacttaggcaatactgatatcaactacatcaaagatgataccaggcatattaggtttgttgatatagcagcttaggctagatgaaagatcttttcttgctttggattgggatcctgatttgaaaaaaagatattttgatgaaaatgctgctgaggactttgaaaaacatgaaagtgtggagtataaacctcctaaaaaaccctttgtgaaattaaaagattgcattgaactttttacaacaaaagaaaagctaggtgctgaagatccctggtattgtccgaattgtaaagaacatcagcaagccacaaagaaattggatttatggtccctgcctccagtacttgtagtacatctcaagcgattttcttacagtcgatacatgagagacaagttgggataccttagttgattctcctatcaatgacgtggatatgtcggaattcttaattaatccaaaatgcagggtccttgccgctataatctgattgttgttttccaaccactatgaaggggatggagggaggacactatactgcttttgcaaaaaaataaaagatgatggaaaatgggtactattttgatgaccagtagtgtctccactgcatctgaggaccaaatttgtgtccaaagcagcatatgtactcttctaccagagacaagacactttcagtgggaactgggcttttttccctcttgacccgagaaactaaaggtgcttcagctggccactggcatcccatttaggaaagtgatgaagatagcaatgataatgacaatgatatagaaaatgaaaactgtatgcacactaactaattgaaagtcctagaagccttaaaaggggacacttttcctgctggtggtatctatggaaatgatgaagttaccccccacattaaacaaaaagtttgagatggggagtttcagataaccgaatgtaaatcctttatcagattttaacttgtgcagtacttgaagtgaaacacaatgaaaactttaacagaaattgtctcttaatacatttacagtcttgtatttactagttaaaaatccatccggaaatcgcaaataaatcccttttaagtttgaagaagttttgattaattatgtttcctttaattttttggatgtgagttgatgacaaatggtaaatttgtggatgttggtcatttattttgctctaataatactgcaagaaaactatggctgaacttagtttttggataatctagttcatgtgcattaggctgccgtatatactactatgatatttagctgcagtatcaatgtggcataaatactgcggcagcattcttcgaaaaccgcattttcaaatttatccccgtaatcaatgtgggcctattaaaaaaccaaatcatgatacaagaaacaaccttggaaaagttatttccctttgtaatacctttaaaaatccagagtattatattcattttactgccactgtggaaacaggttctagatttcatactccatctaaagtcatttttcagttacatgtaagtattatttactgctattgggatctattcttcagatattcaaaaacattttttgctttaaaatgcatatctttaattgggtgttggtccaaaattaaaatttttgctgtctgtttttctctaccccattttgtggtaatttggcaacttgagctctcccaattattgtaatataaggacagacataatagtattctgtacccatagtaataattgcatcaagcttagatgagaaatttttttcatatactggcctttaaatcattaatggacaattggctataaaggtaggtctgttaactttctttgtgtgttcctgatggaattcaccatagccttacagcttttctcagaaggtaacttgttataagagaaatggcatttgcatgttccagagtcagaacctgtacagtatataaagcataaacaccttgaatttgattttagttcaccacattcaaggatccaggatgccaaaaatatgtgtgaacatttgaaacatttttatttgctgctttttccctttgatatagttgaaagaatgtattgtaaattggcatacaatactgcctttaatagaaaacctaaatgctggggcacatttcacatatcgactacctgagaaattgctttgtgtcccactgttattaaagcaaaaagtataatgttcttcacttgaactaatcaaatacaatagattataaattgtgtattgtaaataaaagttcactctgtgagtgcacattttggtaaattatttatttatgttagcatttaaaagtttaaaaaaaatgcatttgaccaggataaatgaggtatgttgatcatggctttgctttatatcttgatattaaagctggtttatcatcctggtattttaaaagctgctttggggttttttttttctttttttttttttttaatgtaaactaacctcctgcatgacagaggttaaaattttgtctgcacttgagttcacttgagtttacatttgaaatgtgcatgtttatttatatagatttcaataaagctattcaaggccttatttagtcttttatttcttactcttaatcttttaataaaaatcccctactttatggttagatgactatatgctagactttttagttataaatagttaatactagaaaggaaattatgtcagagcaaaatgaatcctactattaaggacgttttaaagttgatttttgtccactttaatatttattcattaaacatatgtttgtgtaccaatcactgttgtagagtctggagatacagcagtaaacaaatatccttacct

SEQ ID NO: 333 - DNA, 894 bp, Homo sapiens
  SIMILAR (137)..(607): 321254mologous to Homo sapiens Synthetic human type III collagen SYN-C3,accession number W54966,Smith-Waterman Score=126.
atggggaggagagaccggaataaagaagaacgttgggagcccggggaaaggggccgcactagaggtagtcgcgaatccgaagagctccgctctgccagagccccacaaacaatccccggtggccccactcaccccagatggcggcgagtctgcggaaagttcctggtcagggatggctcggtgcttctcagggtccccaggactgcacgggatctgcagctggaagcgacccccaggcctggaacctcagccctaggcagctccggaacgtgccccggctcctccgagccccgggaggcgggagagcgcaggacggccaggacgcgctgctggctctggaatgcgcggctgctggggaccgccccggaacgcccggtcccggggccccggcaactccagctcagctcctccccagcgtcccctgcgggctgcgttcggggagaaaggaacctgcgagagagggagagaccagggcgtctcgggctccccttccacgttgccacacactcccgcagtagacatgggaaagaaagcctagcaagtaggtttggacaaggagccgggactcagatcctgctttgcgatgtccgaagtgtagggtcctcggaggctttgccactctgtttcattctctgtaaagtgggaaaggtaaacctgtctcccagtcctgttgtgaggattggtttagaggaccagtgtaccccggtcagtttcctcccacatcccgaagatatcatgttaggcaaactgctgtgtctatgtagtcccagtgtgaacgattgtggtgtgggtgagtctgctctgcgatgtgatggcgtcctgtccagggctgttactgcctcgagccctgagctgccgggacaggctctggccactgaacttaaactggaataa

SEQ ID NO: 334 - DNA, 3927 bp, Homo sapiens
  SIMILAR (193)..(2223): 921254mologous to Homo sapiens putative p150,accession number U93572,Smith-Waterman Score=3267.
atggagttggagaccattattctaagtgaagtaactcaggaatggaaaaccaaatatcgtatgttctcacttataagtggcagtgaagctatgaggacacaaaggcataaagatgataaaatggacttggtgactcagggggaagatgactacacattgggtacagtgtacactgtgcggttgtcatcctgtacaatcaagtcagtagttgaaaatggatggatccatttttttgaaaagatcaacaaaattgatagaccgctagcaagactaataaagaagaaaagagagaagaatcaaatagatgcaataaaaaatgataaaggggatatcaccaccgatcccacagaaatacaaactaccatcagagaatactataaacacctctatgcaaataaactagaaaatctagaagaaatggataaattcctggacacatacatcctcccaagactaaaccaggaagaagttgaatctctgaatagaccaataacaggctctgaaattgaggcaataatcaatagcttaccaaccaaaaaaagtccaggaccagatggattcacagccaaattctaccagaggtacaaagaggagctggtaccattccttctgaaactattccaaccaatagaaaaagagggaatcctccctaactcattttatgaggccagcatcatcctgataccaaagcctggcagagacacagccaaaaaagagaattttagaccaatatccttgatgaacatcgatgcaaaaatcctcaataaaatactggcacaccgaatccagcagcacatcaaaaagcttatccaccatgatcaagtgggcttcatccctgggatgcaaggctggttcaacatacacaaatcaataaatgtaacccagcatataaacagaaccaaagacaaaaaccacatcattatctcaatagatgcagaaaaggcccttgacaaaattcaacaacgcttcatgctaaaaactctcaataaattaggtattgatgggacgtatctcaaaataataacagctacctatgacaaatccacaaccaatatcatactgaatgggcaaaaactggaagcattcccattgaaaatgggcacaagacagggatgccctctctcaccactcctattcaacatagtgttggaagttctggccagggcagtcaggcaggagaaggaaataaagggtatccaattaggaaaagaggaagtcaaattatccctgtttgcagatggcatgattgtatatctagaaaaccccatcatctcagcccaaaatctcctcaagctgataagcaacttcagcaaagtctcaggatacaaaatcaatgtacaaaaattacaagcattcttatacaccaataacagacaaacagagagccaaatcatgagtgaactcccattcacaattgcttcaaagagaataaaatacctaggaatccaacttacaagggatgtgaaggacctcttcaaggagaactacaaaccactgctcaaggaaataaaagaggatacaaacaaatggaagaacattccatgcttatgggtaggaagaatcaatatcgtgaaaatggccatactgcccaaggtaattgatagattcaatgccatccccatcaagctaccaatgactttcttcgcagaattggaaaaaactactttaaagttcatatggaaccaaaaaagagcccacatcaccaagtcaatcctaagccaaaagaacaaagctggaggcatcgcactacctgacttcaaactatactacaaggctacagtaaccaaaacagcatggtactggtaccaaaacagagatatagaccaatggaacagaacagagccctcagaaataatgccgcatatctacaactatctgatctttgacaaacctgacaaaaacaagcaatggggaaaggattccctatttaataaatggtgctgggaaaactggctagccatatgtagaaagctgaaactggatcccttccttacaccttatacaaaaattaattcaagatggactaaagacttaaacattagacctaaaaccataaaaaccctagaagaaaacctaggcaataccattcaggacataggcatgggcaaggacttcatgtttaaaacaccaaaagcaatggcaacaaaagccaaaattgacaaatgggatctaattaaactaaagagcttctgcacagcaaaagaaactaccatcagagtccacaatacagacttagacctaacgctaactatgtactcaaaaacctgcgtttcaaatgagataatgtatgtgaaagttcccaaaggccattggcaagactcagaagacagtgctggtgtgactcctgtcttgcagtccccacggagccctgtccctttgagaccttccatttgtctcctggatgctcgcctgttaagtggggcagaggaggccgtcgtaaataagacaaaagatcaggcttccattctggaagaaaagaataaaaggagctcactgagtccagacctaatggcaatggcgtccttgctgcagtcggaccgggttctctatctagtccagggagaaaagaaggttcgggccccgctctcgcaactctacttctgccgctattgtagcgaactgcggtcgctggaatgtgtgtctcacgaggtggactcccattattgtcccagttgtttagaaaatatgccatcggctgaagccaaactaaaaaagaatagggccttagcgtttgctaaatttgctggcctgatgaaactggcgtgtgataatgatgatttagaggtcatttctgctgacctcatccctgaatcagaggaaacagcatggaagaggggagaccctcagaagccaagcgacatgtccacggctacgcggcgagtgtgtggcaacgtggaaggggagcccgagacgccctggtctctcccttctctcgcaggttcctttctccccgaacgcagcccgcaggggacgctggaggaggagctgagctggagttgccggggccccgggaccgggcgttccgggggcggtccccagcagccgcgcattccagagccagcagcgcgtcctggccgctcctgcgctctcccgcctcccggggctcggaggagccggggcacgttccaggagctgcctagggctgaggttccaggcctgggggtcgcttccagctgccagatcccgtgcagtcctggggaccctgagaagcaccgagccatccctgacccaggaactttccgcagactcgccgccatctgggccgggacctcctgttcccagctgtcctgggactgtgaatcatgctgtgggggttacaagtcatgcttcatgaactctcccacaagtgacctctccgaacctcagaactgtggctccatgacactaaagatctggggagtcccagagaacagccagagaaccactgagtcgcgaaagattcacatcttgggcaacatcactgctcccctcacccctggtccctcctccccacctcagtccccagctcctgagcacatggagtcagaactcgaatttgagcttatcggcccaagcaaatcaacaagtgggaatcctagagggcttcgttctgaaaggccagttctcttctgcctgcagcatcttctgagggtggagactttttggaaggggtcctataaggtggacaatgctggcaaaccctctagtcctgtgccctgggaaccatcagccttgttcacattctgcaaaatacttgaagagtcatgtatctttggacgcctcagcatcagtgacttggagctggttatagctgtctgctctctggccaccgtggctggtggaaacaaaacagcagcagcatggtctgcccagagttctggcagtgctgggctaaggccacacctgcaggaagccacctgcctctatctgccttgtctcccactttga

SEQ ID NO: 335 - DNA, 1601 bp, Homo sapiens
  SIMILAR (228)..(359): 651254mologous to Homo sapiens putative small membrane protein NID67,accession number AF313413,Smith-Waterman Score=113.
  misc_feature (1)...(1601): n = a,t,c or g
cggacgcgtgggcagcagcgcgtcctggccgctcctgcgctctcccgcctcccggggctcggaggagccggggcacgttccaggagctgcctagggctgaggttccaggcctgggggtcgcttccagctgccagatcccgtgcagtcctggggaccctgagaagcaccgagccatccctgacccaggaactttccgcagactcgccgccatctgggagtgaagcaacatggatgcagtcagccaagtccccatggaagtcgtgcttcccaagcacatcctgggatatctgggttatttgtcctcatcatcctgggccaccattgttcattcatggacctcgttgttgctgtgcccaagccactgcaagtaatcatctattcgcatgcggaacttcatccgatccttagtgggggctgttttgagagcctcccaagagggcccgggtgagggaatgaggacaaggcatcctatccccaagcctctttccctgttctttcaagaaaaagcaagcaaggaagggactttggggcatggacctgagttctgggttttgaattctgccacgagccagctgtgtgaatttggtcaagggacctaactctctgagttccaggttccttatctttcaaatggggatggtgatccctgccctttctacctcataagggatgtgagaaccacctgacttagtggatgtgaaagctgtttgtgatcagtaaagctaccacagatataagggtgttatgctgaatcctgagaagctttcaagaacccagagaacctggatttgcctgatgatggccttaaaggtggtgagggagatactgggggcagagcagactttgccagtgcccctcaggtcaaaccaagccaagagcaccctgtccccatttccaaggggccaagcagcactttgggccaaagtattttctttaaaggtgccattccttcaatgttttctcagtttggaaggtgatggggtaaaagctttccagaaccttcttcaattcccagaaatctctggcccctgtgtaaatctgaaggaaagggctgtgcaatcctttggggcactgccaagggaagttggggtgatgggcttctttctgcactgggagtctcacatctgttaagctttgacactcaagcaatgttggaaaaatgccagggtgactgagtttccctgcccagctttcggggatctctgggcccccatcccccttgtgtgtggtccctctggcccagctcctggntgtaaattaaggttccacgtgtaaccccctttcattccctcccaccaagctctgcaagccaagcctatggcaattatattttaagagggtgttcccaggccttttgggacctactaaaacaatgatggttattttagatgtgatcatttatatttacgtagagatatttctggaccactcaagctcttcgataccgaaaatcaggagcatcttgggatttattaaattatgtaagaagatagcacagatatcgggatattattgtgtgaaaatgctgcttttactttgatgtgatctcattgatgtacacaaccaagttccaataaagtgctagaatgtgcaaaaaaaaa

SEQ ID NO: 336 - DNA, 411 bp, Homo sapiens
  SIMILAR (169)..(402): 321254mologous to Homo sapiens calcium/calmodulin dependent protein kinase,accession number L24959,Smith-Waterman Score=100.
aatttaagaaaagaaggcaaatttagcaccagtggtcccttccacccaaatgagaaggaaccagaaaaacaattcggtaatatgacaaaaaaaggttctttcacactctcaaaagatccccctacttaccggcaatggatccaaaccaaaaagaaatccctgaattggcagaaaaaaattcagcaggtaattagagttagaaaagacctgagacctacaatcattcaaactccttattttgcacatgagcaggccaagtgccagcagcagccatggcagcatccaggagagccacaaggctaccgagacccttctccaatccaagatggcaacgaggacatgaaagctattcagaaggagagaaaattcaaggcgatggggcccaagccgcagttaaggggcacaggctga

SEQ ID NO: 337 - DNA, 2123 bp, Homo sapiens
  SIMILAR (1326)..(2120): 1001254mologous to Homo sapiens calcium/calmodulin dependent protein kinase,accession number L24959,Smith-Waterman Score=1362.
atcatgctgatgcaagcagtgggctcccatgggcatgggaagctctgcctctgtggcttttcagggtacagcttccctcccaactgctttcatgggctggtgttgagtgtctgtggcttttccaggtgcacagttcaggttgttggtggatctaccattctgggtctggaggatggtggcccctgctcacagctccactaggcagtgccccgcagcagcagcagcagcagcaacagcagcaacaacaccatccacaatacattaccagcgggggtagaacaccaagtgggttcttggcagctctgattccagaacttgaatcttgggtggcaattttggacccgccctaccccagaggggagcccactgccatgaagggtgagcaccaggacagataccaaaaaacatctgctagcatcagcactctccaggaaaacatgatcttaccaaatgaactaaataaggcaccagggaccaatcctggagaaacagagatatgtaacctttcagacagagaattcaaaatagatgtgttgaggaaacttaaagaaattcaagataacacagagaaggaaagctacacaatcaaacacaacattgctgctgccctgcatgctggaaactttggaaagatgctgaaggttataagcaggggagtgccatatctagatctttctactcttgtggcagtgcgaagcagggactggaggaggttaatgctggaaattgggaagctgacagctaagctggttattagagtaattaagagggaaagcatgctagtggcctggctggaggcaagggcatatctacatgaaaatgggattgtccatcgtgatctcaaaccagagaatcttctttatgcaactccagccccagatgcaccactcaaaatcgggttcctgtgtggcttttggacaatgggaaaacgaccatcagggaaggggagaggaagtgaggcagagaatgctaaccagtccacccaaatgagaaggaaccagaaaaacaattctggtaatatgacaaaaaaaggttctttcacactctcaaaagatccccctagcttaccggcaatggatccaaaccaaaaagaaatccctgaattggcagaaaaaaaattcagcaggtcggtcattaagctaatcaaggagacaccagagaaagaatggtatggtgtcctcatccccaaggccttcctcaagcagccatcagcattaatcaagaagctccttcttcaagtacgctgctggcacctgccgcacttgtgttcaaaatcaagaaaggccactctggacaataggcctgagctctatttctccatagatgcacctgaaattcttagaggttgtgcctatggacctgaggtggacatgtggtctgtaggaataatcacctacatcttactttgtggatttgaaccattctatgatgaaagaggcgatcagttcatgttcaggagaattctgaattgtgaatattactttatctccccctggtgggatgaagtatctctaaatgccaaggacttggtcagaaaattaattgttttggatccaaagaaacggctgactacatttcaagctctccagcatccgtgggtcacaggtaaagcagccaattttgtacacatggataccgctcaaaagaagctccaagaattcaatgcccggcgtaagcttaaggcagcggtgaaggctgtggtggcctcttcgcgcctgggaagtgccagcagcagccatggcagcatccaggagagccacaaggctagccgagacccttctccaatccaagatggcaacgaggacatgaaagctattccagaaggagagaaaattcaaggcgatggggcccaagccgcagttaagggggcacaggctgagctgatgaaggtgcaagccttagagaaagttaaaggtgcagatataaatgctgaagaggcccccaaaatggtgcccaaggcagtggaggatgggataaaggtggctgacctggaactagaggagggcctagcagaggagaagctgaagactgtggaggaggcagcagctcccagagaagggcaaggaagctctgctgtgggttttgaagttccacagcaagatgtgatcctgccagagtactaa

SEQ ID NO: 338 - DNA, 1764 bp, Homo sapiens
  SIMILAR (1041)..(1520): 981254mologous to Homo sapiens calcium/calmodulin dependent protein kinase,accession number L24959,Smith-Waterman Score=776.
cccggacccaggtgctgccagggcggcggctggcggccggcttctcgctcgggcagcggcggcggcggcggcggcggcttccggagtcccgctgcgaagatgctcaaagtcacggtgccctcctgctccgcctcgtcctgctcttcggtcaccgccagtgcggccccggggaccgcgagcctcgtcccggattactggatcgacggctccaacagggatgcgctgagcgatttcttcgaggtggagtcggagctgggacggggtgctacatccattgtgtacagatgcaaacagaaggggacccagaagccttatgctctcaaagtgttaaagaaaacagtggacaaaaaaatcgtaagaactgagataggagttcttcttcgcctctcacatccaaacattataaaacttaaagagatatttgaaacccctacagaaatcagtctggtcctagaactcgtcacaggaggagaactgtttgataggattgtggaaaagggatattacagtgagcgagatgctgcagatgccgttaaacaaatcctggaggcagttgcttatctacatgaaaatgggattgtccatcgtgatctcaaaccagagaatcttctttatgcaactccagccccagatgcaccactcaaaatcgctgattttggactctctaaaattgtggaacatcaagtgctcatgaagacagtatgtggaaccccagggtactgcgcacctgaaattcttagaggttgtgcctatggacctgaggtggacatgtggtctgtaggaataatcacctacatcttactttgtggatttgaaccattctatgatgaaagaggcgatcagttcatgttcaggagaattctgaattgtgaatattactttatctccccctggtgggatgaagtatctctaaatgccaaggacttggtcagaaaattaattgttttggatccaaagaaacggctgactacatttcaagctctccaggcatccgtgggtcacaggtaaagcagccaatttggtacacatgaataccgctcaaaaagaagctccaagaattcaatgcccggcgtaagcttaaggcagcggtgaaggctgtggtggcctcttcccgcctgggaagtgccagcagcagccatggcagcatccaggagagccacaaggctagccgagacccttctccaatccaagatggcaacgaggacatgaaagctattccagaaggagagaaaattcaaggcgatggggcccaagccgcagttaagggggcacaggctgagctgatgaaggtgcaagccttagagaaagttaaaggtgcagatataaatgctgaagaggcccccaaaatggtgcccaaggcagtggaggatgggataaaggtggctgacctggaactagaggagggcctagcagaggagaagctgaagactgtggaggaggtagcagctcccagagaagggcaaggaagctctgctgtgggttttgaagttccacagcaagatgtgatcctgccagagtactaaacagcttccttcagatctggaagccaaacaccggcattttatgtactttgtccttcagcaagaaaggtgtggaagcatgatatgtactatagtgattctgtttttgaggtgcaaaaaacatacatatataccagttggtaattctaacttcaatgcatgtgactgctttatgaaaataatagtgtcttctatggcatgtaatggatacctaataccgatgagttaaatcttgcaagttaac

SEQ ID NO: 339 - DNA, 654 bp, Homo sapiens
  SIMILAR (84)..(25): 451254mologous to Homo sapiens Human secreted protein, SEQ ID NO: 5231,accession number G01150,Smith-Waterman Score=56.
agtcatgagcaatggataacggatacaggtcgaaacccataatgctgttaaacgtgtatacaagtgaagcacaaaggctgatgatgggcccagagggacacagaatgccagagctgatcgcactgtctctaacttatctacagtacatgtcgtctatgcaacgagttgagtcctccatggattccctgtgttccttttctgtctaaaggcatgaaaggcaaatggcctgtggctgtgaaggggacagcatgcctccacctgcacagtccccttggtatcacagaaggtgctgctaaccagccaagctgcagactgcctcttcctgccctggagcaactgcctccatctctggcaagcccctaccatcaagaaaggatctgctctccaggaccacgcgtttcggatttattgtccgccaacagtgtatttttaatacaagaaatgaagtcttctttcgtctgggtgacccgggtttgttccaatgggggaaaacaagcaggaggaggagagtttgaaaaggtggggggcctggggaggcgaggggagctctatccccctttcagatcctccgcagcgccttcgcgggtcctggaccctcacgggatcgtcccctttcgcaactccaagctcagccgccgggtttctatttcatga

SEQ ID NO: 340 - DNA, 606 bp, Homo sapiens
  SIMILAR (44)..(265): 1001254mologous to Homo sapiens PAXNEB protein,accession number AJ276005,Smith-Waterman Score=357.
ctaagtttgccccaaatattgggttaacactggaggctctaagatggcggcagtggcaacctgcggtagtgttgccgcgagtactgggtctgcagtggcgacagccagcaagagcaacgtcaccagtttccagaggaggggtcctagagccagcgtgaccaacgacagcggccctcgactggtgtccattgcgggcacgcgaccgtcggtgcggaatggacagctgctggtatcaaccgggctcccagccctagaccagctcttaggtcggttcagagcggagatataactatggcttttaaagaaatctgatggactagtggtgaggattttgtctccttccaaaccaattactcttttacaaatatttgattttggatcacttgggctttttgcaatcacaatgtcacctctttggataccataaaaatgtcgactaagattttctgcaaagacaatatctgaattttgaattgtaggctccattgatggtccagaacacatgacaacaccaccaacgtattcaaaagcacaatgagctatacagccatattgaatagtatagccaacaagtcgaaaggttttccccagaacaccacgaagcat

SEQ ID NO: 341 - DNA, 927 bp, Homo sapiens
  SIMILAR (343)..(564): 1001254mologous to Homo sapiens PAXNEB protein,accession number AJ276005,Smith-Waterman Score=357.
atgaatgcttccaaacaagtgccagatgatgagaaagaagtagaagaagcagtgccagaaaacaaactgacattaggcaatctggcagaagtcttccagttattcaagactgctgtgacttcttctgacatggacccctattataacacagatactaaaactaaagcaaacagtggaagaaatgggcgcacttttcagcaatacgccttccgattggttggctcgggactgacgtctcagtcctattggttacgagagccgcggttggggcgaggaggcgggagtttggcactggttctgataggacggagttcctattgggttaacactggaggctctaagatggcggcagtggcaacctgcggtagtgttgccgcgagtactgggtctgcagtggcgacagccagcaagagcaacgtcaccagtttccagaggaggggtcctagagccagcgtgaccaacgacagcggccctcgactggtgtccattgcgggcacgcgaccgtcggtgcggaatggacagctgctggtatcaaccgggctcccagccctagaccagctcttaggtcggttcagagcggagatctgggctcagccgaggggaaacttagggaggggacctgtcggggaagccactttgaccccacatctctttctgacccctaaaccttcggaggaggagagaatagcctgttctttgacccctggctacacaaagctgcttcagtttatccagaacatcatttatgaggaaggatttgatggatccaatcctcaggatgatgatgacacatcttctgagagtaagaaattttatagaatcccaaaagcaaagaatttattgaccatggaaaggaagaaaaatgaatacaacactgaaatgttagaagatgaaagcctaaaggaacataagctagtaaatgaatag

SEQ ID NO: 342 - DNA, 472 bp, Homo sapiens
  SIMILAR (20)..(463): 371254mologous to Mus musculus Paxneb protein,accession number AJ276004,Smith-Waterman Score=141.
cgacactggaggctataagatgttggcagtggcaacctgcggtacgtgttgccgcgagtactgggtctgcagtggcgacagccagcaagagcaacgtcaccagtttccagaggaggggtcctagagccagcgtgaccaacgacagcggcccgtcgacctggtgtccattgcgggcacgcgaccgtcggtgcggaatggacagctgctggtatcaaccgggctcccagccttaggaccagctcttaggtggaggtttagccgttggaacagttcttctaattgaggaggataaatattaatattttactcaccttttgctctttcaagtatttccctggcagaaggaatttgtcaatgggcatactttgttggatgcatctgctaaagaaggatccctgccaacattttacaggaacttccaagcaccattacttgaatgaataaatgtaaaaaggaatttgaatgaagatgt

SEQ ID NO: 343 - DNA, 455 bp, Homo sapiens
  SIMILAR (252)..(100): 311254mologous to Mycobacterium leprae hypothetical protein,accession number U15184,Smith-Waterman Score=60.
agagaagtatgactgcattacagcttaaagagctttcacattcaggtctctacaggagaagacgagatcgccccgatagtttgagagtaaatgggttaccagaggaagagctaagagcacttggtagtctgaaatttgatctccgccaggtaagagcaatttacctgcaggaaggattgatgggtcagggattaatgccacatagttcctttttcactggaatccagttgtctgatgattccccaccttggatgttccacagggcaggcttaagccgcctaaggagctgcctcgaccatctgccaatcacctcgcttcccggtcagggaaccgagaaatgtagcaggaccagccgcagacaaaactcctcagacaccgagttaaagaaggaaggggcttattcagccgggggcataggcaagactcctttcttaagggccaagctccccgagtga

SEQ ID NO: 344 - DNA, 404 bp, Homo sapiens
gcgactcttaccaattcttactagacttatgaagtagggactttctaccccatttcatggatgaggaagttgcagcgcagacaggttaaggatttgccgagattcacacagtaagtggcatgttctgatttgtcagtgtttcatttgaaatggtgttcctaggcctcaacactggttgctatgccagatgcactgtggtccactgtattgggctgttttaccttccttcttttggatcctgaatttctacaaatgtaaccatcaggagaattgtttttctggaaatcattacatattccattgaccacagttcagccaagttgtctttatattacgacactatgctcctgaatttgagaggatatgatgagttcaccataggtaggcttgatatggcacctgat

SEQ ID NO: 345 - DNA, 333 bp, Homo sapiens
  SIMILAR (318)..(169): 461254mologous to Homo sapiens Fragment of human secreted protein encoded by gene 8,accession number Y36421,Smith-Waterman Score=100.
atggaaatgcaattggagcccattatgacaaggacagagaaagccactttggtggaagcatccacagggctaatgcactatagtgggtgtgaacttagagggctcaggaatcaaggagaaggtcagcgtggctggagcctgtttagcaacagggatgggacccaaagcccaacaactggtgtccttgtaagagagaggaaaggaagattggacatacgcagacatagaagagacgacaaacaagaaggccatgtgaggatggaggcagaaatgggagtgtggcagccgcaagccaaggaataccaaggactgccggcagacacccaaagctag

SEQ ID NO: 346 - DNA, 386 bp, Homo sapiens
  SIMILAR (105)..(203): 511254mologous to Homo sapiens Human secreted protein encoded by gene 32 clone HTLDQ11,accession number W78157,Smith-Waterman Score=68.
tcgaccacgcgtccggtcaaaggcatgactgattttccacatatacacatattaacggaccaggccatgtgctgagttcctcatatagattgactcattctaaacctcagaacagccgtgcaacgtgggcatcattagcatgtctttctttcccgcctctgccttcagcttccttgacctctttctccatcactccctctcttccttcctccttatatcgaagggctttcctgaggccaggatggttatggtggggtgttacagaggatgggagaacaggcacactactgaattctagttattgtctgcagatttcatttttccacttcctcatttttgggacaggtagactgtggagcgtaatagaaggtgtgtccaaaagaagg

SEQ ID NO: 347 - DNA, 2171 bp, Homo sapiens
  SIMILAR (704)..(477): 971254mologous to Homo sapiens IgG Fc receptor I,accession number M63835,Smith-Waterman Score=389.
ctaggcagttacagtctgtagctgtaccattgaggggatcggggcaagatggaaatttccatggcttaccagaaacaggtgagaaactgcctgctggtagcctgctgcaagacaaggaggcccccaaaagagaggagatacatgatcccttaattcaggctcaggctgaagaactgacccacttacaacagaagatacaggaagggagaggtgtctgctaccttttcacccagcatgtgaagaacacagtcaagtcttttgagggccttctcaggaacactgacattgcctactaccagagacagagattctgtgagcaaatggtacaaggaagccagctgacagagatccttgtcagaaaacttgccacagaatactgtcttactagtgcaaatcgatggcagttggttcagttcagaaaactcacatgtggaaaggcaatttcctgtgtgtcacatttgtgggaacttcacttccccaaaccaacctctctggcacctgtattcaccactgtcattgacactggcagaggtgattctgtagctgggggtcgaggtctgagtggctgtgccattgagaaaccactgtgtggagctgctcccaggcagatggagcacctcacagtgcaaggttacggtttcctcttggaacacgctgacccatggaggctgcaaagtgatcactgcctttgtggtgtctacttggagattacaagaagaaaaagaaaaagatcaagtggagtaaaggggagggctctgagcaactgcccgccagatgcacaagtcaaaactgatctagagattctgaagtacgctgtgctccttgagaagtgcggagccactggaaccacaagcagcttcagacaggaaccaatgaggccatcaaaaccctcaacagaggcatctacccctgcagggctgcagagcctctgtactgggcggcatcccagcctgagtgccagagctcagtgggcaggcccccgagcaagtagagaggagggcaccttttggacagaacctgtgggacaagagcgacgtctcatccgttcaggttcctcacaaaatgagagtcaggaagatcagggtgcagacctgatttcccacgaagggctgaaagcagacaaccagagggagagcagcacctgggccaatgagtggctcagcggtaagcccaaggtccagcacacgaatcaggaaactgatggttcttgggttagcaggaatccgcccagagaacagatgaaagtaacaggtaccaatatcaaaactgcagtgactcaccagaaacactacgtgcttgccactttgcttagcggtttgttgagtccaacaactgcgtgggtcccggactcagcccgcctgcacccaggtgaaataaacagccttgttgctcaaacaaagcctgtttggtggtctcttcacatggacagaagcttcagggggcatttattcaattttctaggagcccacgaggcgcaggtgagcggtgacgctgtggttcccaccgcaccgccgcgctccttggtcctctcgctgtctccggcgggcagtaatgttccagcttttgctttcccttcccccgctcccgccctaccgccccacgacccgaccaccgcccagctgagccccagaggctccacagcgcagaaggtgcaccggaggtcgtgggacccacgagcgaccctcaccaccatccctgccctggtggagccccgggcggaacacaggatccgaagatggcagcggaagctccgcagcagcccaacagcgactgggcaggggagattagcatgtgtagaggaagtacacatcaactgcaaatggctttctctgagaccttcttatctgctttatctggatccagtaggggccgacctgctggaaaagaatcttgctgagatgcagaacctgcgccagcgcctggaggagtccatcagtctcaatgaccgcctgagggagaggctggagcatgtgcttagcaatggtgaccaaggaaaagataatcagagagtcactagctgtcaactagaaagcttggtgtctctcttcctgtctttcccactttcacctgggtacggaataggagagaagaaatgtactggacagtccactgtagcccctcattcatatactcagagtcactcttctggctgtggcgaggacatcctgtga

SEQ ID NO: 348 - DNA, 1374 bp, Homo sapiens
  SIMILAR (268)..(483): 291254mologous to Caenorhabditis elegans weak similarity to collagens; glycine- and proline-rich,accession number AF000298,Smith-Waterman Score=45.
atgatgtttgcctccagcaacccacaaatttatggggacttccagtcacagacctgtgaatccatgataccagctcttgacctaccaccccacggccgcaccaccgcccagctgagcccccgtggctccaccgcgcagaaggtgcgccagaggccctgccagttgccctccctgccggggctcttcaaaggactaaaagctaaaggcgacgatgaattcattccacaagtcctagtcgtgcgccctggtgagtaccagaccctgctccccgcgaggggacccacgagcgaccctcaccaccatccctgccctggtggagcccccgtgcggaacacaggatccgaagatggcagcggaagctcctcagcggcccggaaagcgactgggcaggaatctcctaacacgcaggcgtccaacgtgaccggcgcgactcaccgctctaatctctctgggtttccaaggccttgctcagtggtcctgcccgggcaccggcagcagttttccgtctgtgcctactccacctgctgtccttgttgggtcagcgaacatcgcctccgtctaccactcaatcagcaaacgggaccgccctcgaggacctcacccgccgcttacccccctaacaaattcgcgggcatcgcctccggtcgcctcttcccaaggcctaacgagcgccttcgctggcaacggagttattcgcagctcagcccgatgggcgtctccggggtggcgacgggaaagaagagcctgcaagcgacacaccgagggctccgcgagggacaccgaggccacgagtccgaaggcctggagcgagttgcagcgacccggccgcagctcaccactggactagagatgcgcctttgcgaggtggcagcaagtgaccagtcggtcgtgcgtcgccagagaagctttatgggccacttccttcggcatccccgggggcaggtgcgcggtgcccggggaagaagagggtttgactgcggttctcgacccccggcgaccaacctccaccccgacgacctgaacccaactccctccccaagcactggagatggggcttttccaagggctggggatcttgctgtcctgagaacagctgagcaagggggtcgaggaggagcttgggtggtggaggagaggaaaccggcatgccctgtggcctttatcctgctggtgtggaacagtcagagccctgcagggctgcagagcttctgtactgggcggcatcccagcctgagtgtcagagctcagagagcaggcaccggagcaagtagagaggagggcacctttggacagaatgtgtgggacaagagcgacggctcatccattcaggttcctcagaaaatgagagtcaggaagatgagggcgcagacctga

SEQ ID NO: 349 - DNA, 581 bp, Homo sapiens
  SIMILAR (64)..(264): 421254mologous to Arabidopsis thaliana Ribosomal protein L7Ae -like (fragment),accession number AL033545,Smith-Waterman Score=82.
cccgccagatgcacaagtcaaaactgatctagagattctgaagtacgctgtgctccttgagaagtgcggagccactggaaccacaagcagcttcagacaggaaccaatgaggccatcaaaaccctcaacagaggcatctacccctgcagggctgcagagcctctgtactgggcggcatcccagcctgagtgccagagctcagtgggcaggcccccgagcaagtagagaggagggcaccttttggacagaacctgtgggacaagagcgacgtctcatccgttcaggttcctcacaaaatgagagtcaggaagatcagggtgcagacctgatttcccacgaagggctgaaagcagacaaccagagggagagcagcacctgggccaatgagtggctcagcggtaagcccaaggtccagcacacgaatcaggaaactgatggttcttgggttagcaggaatccgcccagagaacagatgaaagtaacaggtaccaatatcaaaactgcagtgactcaccagaaacactacgtgcttgccactttgcttagcggtttgttgagtccaacaactgcgtgggtcccgg

SEQ ID NO: 350 - DNA, 585 bp, Homo sapiens
  SIMILAR (123)..(10): 321254mologous to Homo sapiens Human phosphodiesterase interacting protein, myomegalin,accession number Y71159,Smith- Waterman Score=42.
atgggatattccttcagttcccagatgaacagtgggaaagactccacattgaccaacctcgggggcctgaaaacccaggtcctcaaggaggcatgccctgtggcctttatcctgctggtgtggaacagtcagacccctgcagggctgcagagcctctgtactgggcggcatcccagcctgagtgccagagctcagagggcaggcccccgagcaagcagagaggagggcaccttttggacagaacgtgtgggacaagagcgatggctcatccgttcaggttcctcacaaaatgagagtcaggaagatcagggcgccggcctgatttcccaggcagggctgaaagcagacaaccggagggagagcagcacctgggccaatgagcttctctccttccaagagtgtcatttcttgatcctctccatagtggctcaacgttcattctccaagggcttcctctcagaggaactagccagcgttcagccccggcgcccctgctcagagcacagcccctccaccaggaccatttccttgcggctgctgtgctcctcatgctctgaaaaaagacaaagatgtcttcctaaataa

SEQ ID NO: 351 - DNA, 1716 bp, Homo sapiens
  SIMILAR (507)..(415): 801254mologous to Xenopus laevis unidentified open reading frame 1 (166 aa),accession number X02585,Smith-Waterman Score=142.
atgagggaccttggtgatgacggacatgttctgaatctggactctatcaatgtcagtgtcctgtttgtgaaatcatacaatagttttgaaggttcctcctcttctccccaaacacctcagacctcagtcttcagacctcctgcttctctgtccacacttgctgcccccatcaatgagctcatccagagtcatgattgtagctgcctcaccaacactgatgatgccaaagtccaatctccagcccacatcaccccctcaactccaggctcagagagccagccagccacttgtcttctctactggaacgtctacctgcaactccaatggattgtgtccaaaacagagtccctgattttccctcccaaatactgttcacccccaacccccagccatcctatctcagggaacatgatatggggtcagcacatccggagtgcaatggataagcctcgccctgggaaaaccaccttcgtgatcatggtatctcccctgccagggcaccggcagcagttttccatctgtgcctactccacctgctgtccttgttgggtcagcgaacatcgcctccctctaccgctcaatcagcaaacgggaccgccgtcgaggacctcacccgctacttacccccctaacaaattcgcgggcatcgcctccggtcgcctcttcccaaggcctaacgagcgccttcgctggcaacggagttattcgcagctcagcccgatgggcgtctccggggtggcgacgggaaagaaggtgggcttattgggtgcagctccacgggggctggcatctctgccgggctgtgtacaccggaccgagatgctcagtcgctctctaaagctgctcccgcggatgacggacacggagataaataggaacggcgatggcaacgccacccttccgtttgctccgggcaaaacttcgagagttccctctgactctggagatttttcctcacatccaagagccaactggtcatcaattcgtgatttcccatcggctaaagaagctttatgggtcacttccttcggcatccccgggggcaggtgcgcggtgcccctggaagaagagggtttgaccgcggttctcgaccccggcgcccaacttccatctcgggggcagaaagagggcgagagagctccccagggtcccttttataagggcattagtcccattcagactaatgggactaaatccagactctttgctgagtgttgtggattttttgcatgttcatcctccctgcaggcaactggagatgtattgtccccagaggcatgccctgtggcctttatcctgctggtgtggaacagtcagacccctgcagggctgcagagcctctgtactgggcggcatcccagcctgagtgccagagctcagagggcaggcccccgagcaagcagagaggagggcaccttttggacagaacgtgtgggacaagagcgatggctcatccgttcaggttcctcacagaatgagagtcaggaagatcagggcgccggcctgatttcccaggcagggctgaaagcagacaaccggagggagagcagcacctgggccaatgaggtagaagacagaagaccacagtgtactcctgccctcaacctcaccccctcccacccacatcctccacactccctgaccaccttcctcagaagtgtaataggaatccagattccccctggcctggttgctgcaggaggcacagtagcctga

SEQ ID NO: 352 - DNA, 1912 bp, Homo sapiens
  SIMILAR (1118)..(1576): 521254mologous to Homo sapiens dJ1182A14.5.2 (novel gene (isoform 2) KIAA1245 protein),accession number AL137798,Smith- Waterman Score=365.
  misc_feature (1)...(1912): n = a,t,c or g
cagtcccccactaccacaaattatgcagtcgagtttcccacatttggggaaatcgcaggggtcagcacatccggagtgcaatggataagcctcgccctgggaaaaccaccttcgtgatcatggtatctcccctgccaggtaagtatgagatcttcgggctctgccccgacacagcctcatacgcctcactctttacacacacggtcacttgccccgcgcagccccaccccccccagccctcctagccctgacacacagctgggactctcaggtccgaccagcggtcctgaatccgctcccacggcacgggaaatccttcgtggcgaagcagcaggtggggaagcagcagcccctgcgctgcctcatctacatagaagtcgccctatccgtgatgtcaccgacagtgcctttcccagtccccgtctgcctttctgccgctcagcctaccaacccgctgccggagccggcagggggaagtgacgtctgctncgggaganggggaaacacgaaccagccccaggggggagagaggacagcggacgagcgcgggaacacaaagcgggagaaaggaaagcgaccgacgagggccgggcggggagcagaaccaagagaacgaaagaagaaaacagacccggggaaaaggacaagggcgcgggagacgcggagaaagaaacgaagccccagccgcgacacaaaccagcgagacaggcccaggaggggggggccacccgagcccccggaaaaacgagaggcgcaagggaaccaacagaccccggaagtagaacggaagaagcgggaacaggccaccgcggacaaggcgcaacgaaagcagaacagaaccggggcgcccagggaaaggcgggagacgaggaagagagtaggggctcaaagaggcgagggcgatgtccccgcccccaggctcagcagggagctgctggaggtagtagcgcctgaagtcttgcaggactcactggatagatgttattcaactccttccagttgtcttgaacagcctgactcctgccagccctatggaagttccttctccgcattggaggaaaaacatgttggcttttctcttgacgtgggagagtatgaagagtgtaaagacctcataaaatttatgctgaggaatgagcgacagttcaaggaggagaagcttgcagagcagctgaagcaagctgaggagctcaggctcagcagggagctgctggaggtagtagagcctgaagtcttgcaggactcactggatagatgttattcaactccttccagttgtcttgaacagcctgactcctgccagccctatggaagttccttttatgcattggaggaaaaccatgttggcttttctcttgacgtgggagtccctggccccacctcttctgccacaaacgtcagcatggtggtatcagccggccctttgtccagcgagaaggcagagatgaacattctagaaatcaatgagaaattgcgcccccagctggcagagaagaaacagcagttcagaaacctcaaagagaaatgttttctaactcaactgtccggcttcctggccaaccaacagaagaaatacagtcctgcctgcggcaatgacgtctctcgggtcagtaaggggcacttggaacaggaatatcacccctatctggaagaccacgtggaggcttatcaccttcacaanaatgagaaagatgaggatgaagatgttcaagttgaggaggctgagaaagtactggaatcatctgcccccagggaggtgcagaaggctgaagagagcaaagtccctgaggactcactggaggaatgtgccatcacttgttcaaatagccacggcccttgtgactccaaccagcctcacaagaacatcaaaatcacatttgaggaagacgaagtcaactggggatccttctag

SEQ ID NO: 353 - DNA, 909 bp, Homo sapiens
  SIMILAR (147)..(308): 871254mologous to Xenopus laevis unidentified open reading frame 2,accession number X02585,Smith-Waterman Score=249.
aaagagcaggaatgggtggccctgaccttgccctgcagccgctgcacaagctgggcctgccgctgcttattccccaggcctccactgtaggattaacaactaagacacaaaccaatacgaaaaaagacatgacctgaaactccagaaagtcaggggaaagcgcgaacgcagtcccccactaccacaaattatgcagtcgagtttcccacatttggggaaatcgcaggggtcagcacatccggagtgcaatggataagcctcgccctgggaaaaccaccttcgtgatcatggtatccccgctcccagggcacgggaactccttcgtggcgaagcagcaagtggcgaagcagcagcctctgcgctgcctcatctacatagaagtcgccctgtccgtgatgtcaccgacagtgccttgcccagtccccgtctgcctttctgccactcaaccgaccaatctgctgccagagccttccaccacagcatgccctgtggcctttatcctgctggtgtggaacagtcagacccctgcagggctgcagagcctctgtactgggcggcatcccagcctgagtgccagagctcagagggcaggcccccgagcaagcagagaggagggcaccttttggacagaacgtgtgggacaagagcgatggctcatccgttcaggttcctcacaaaatgagagtcaggaagatcagggcgccggcctgatttcccaggcagggctgaaagcagacaaccggagggagagcagcacctgggccaatgaggtagaagacagaagaccacagtgtactcctgccctcaacctcaccccctcccacccacatcctccacactccctgaccaccttcctcagaagtgtaataggaatccagattccccctggcctggttgctgcaggaggca

SEQ ID NO: 354 - DNA, 3036 bp, Homo sapiens
  SIMILAR (667)..(1644): 791254mologous to Mus musculus DNA binding protein DESRT,accession number AF169968,Smith-Waterman Score=1332.
gaccaaagatctgcttttatcatgacagccgccagattcataccacatctccaggttctgttagacatcacagtaaagtaattctttactgcttgctttacttgagccatctttctaatgtgtattcttgaaagtatcctggctgtatgaatctcaaatttcagtcccttttttagaccaccatgcagcccagaggtttggagctttgtcttggaagctccttccatcaatcagaataccaaatttacattgttaggttccctggaggtgttggagctctggattcagcaattatttgtgaataagaaccttgcagctagggctatgggaggattatatgatgtcatggatgcgaaaatcctttataaaatagacagtgtacacaggagacacaaggatgatcagagtgatggtttcttaagtgattacagggccacacacaggctgttttctaaccctgttgtcacccccagggcccacaggtctcatctgagtgaggggaatctggagataacagcccgccgtcagtggaaacatatttatgatgaattaggcggtaatcctgggagcaccagcgctgccacttgtacccgcagacattatgaaaggtcagtggagaaggtccgctcctacatcttggccacaaactcagatatttatggaggcagattaatcctaccatatgaaagatttattaaaggagaagaagataagcccctgcctccaatcaaacctcggaaacaggagaacagttcacaggaaaatgagaacaaaacaaaagtatctggaaccaaacgcatcaaacatgaaatacctaaaagcaagaaagaaaaagaaaatgccccaaagccccaggatgcagcagaggtttcatcagagcaagaaaaagaacaagagactttaataagccagaaaagcatccctgagcctctcccagcagcagacatgaagaaaaaaatagaagggtatcaggaattttcagcgaagcccctggcatccagagtagacccagagaaggacaacgaaacagaccaaggttccaacagtgagaaggtggcagaggaggcgggagagaaggggcccacacctccactcccaagtgctcctctggccccagaaaaagattcagccttggtccctggggccagcaaacagccactcacctctcctagtgccctggtggactcaaaacaagaatccaaactgtgctgttttacagagagccctgaaagtgaaccccaagaagcatccttccccagcttccccaccacacagccaccgctggcaaaccagaatgagacggaggatgacaaactgcccgccatggcagattacattgccaactgcaccgtgaaggtggaccagctgggcagtgacgacatccacaatgcgctcaagcagaccccaaaggtccttgtggtccagtcgtttgacatgttcaaagacaaagacctgactgggcccatgaacgagaaccatggacttaattacacgcccctgctctactctaggggcaacccaggcatcatgtccccactggccaagaaaaagcttttgtcccaagtgagtggggccagcctctccagcagctacccttatggctccccaccccctttgatcagcaaaaagaaactgattgctagggatgacttgtgttccagtttgtcccagacccaccatggccaaagcactgaccatatggcggtcagccggccatcagtgattcagcacgtccagagtttcagaagcaagccctcggaagagagaaagaccatcaatgacatctttaagcatgagaaactgagtcgatcagatccccaccgctgcagcttctccaagcatcaccttaacccccttgctgactcctacgtcctgaagcaagaaattcaggagggcaaggataaactcttagagaaaagggccctcccccattcccacatgcctagcttcctggctgacttctactcgtcccctcatctccatagcctctacagacacaccgagcaccatcttcataatgaacagacatccaaatacccttccagggacatgtacagggaatcggaaaacagttcttttccttcccacagacaccaagaaaagctccatgtaaattatctcacgtccctgcacctgcaagacaaaaagtcggcggcagcagaagcccctacggatgatcagcctacagatctgagccttcccaagaacccgcacaaacctaccggcaaggtcctgggcctggctcattccaccacagggccccaggagagcaaaggcatctcccagttccaggtcttaggcagccagagtcgagactgtcaccccaaagcctgtcgggtatcacccatgaccatgtcaggccctaaaaaataccctgaatcgctttcaagatcaggaaaacctcaccatgtgagactggagaatttcaggaagatggaaggcatggtccacccaatcctgcaccggaaaatgagcccgcagaacattggggcggcgcggccgatcaagcgcagcctggaggatttggaccttgtgattgcagggaaaaaggcccgggcagtgtctcccttagacccatccaaggaggtctctgggaaggagaaggcctctgagcaggagagtgaaggcagcaaagcagcgcacgtacttgaaaaaccagactgtgctttctccactcatgcagcccctggctttccactcgcttgtgatgcaaagaggaatttttacatcaccgacaaattctcagcagctgtacagacacttggctgcggctacacctctgtcatccgtgcaccccagtacaaaactgtaggctcagctctgcccagcagtccaaagcggcatggcccaccaagcttcactccttacccaggaggtgctgggcttatagagttagaagtcagtttttcttctaatctgagggttggtacaaaagtaattgcggtttttgctattgaaagtaatggaaaaaaccgcgattacttttgcactaacctaacacttcgcgttcctgacacctggcatttaggccgctag

SEQ ID NO: 355 - DNA, 483 bp, Homo sapiens
  SIMILAR (235)..(354): 671254mologous to Mus musculus DNA binding protein DESRT,accession number AF169968,Smith-Waterman Score=144.
atgcagcccagaggtttggagctttgtcttggaagctccttccatcaatcagaataccaaatttacattgttaggttccctggaggtgttggagctctggattcagcaattattgtgaataagaaccttgcagctaggcttctgtgcatgatctccattgagagaggagcctggggcctggaaatggctcgtggacacctggcatctggagagatgaataggagaaaggagttgccagcgccaaatcttaaaggcagaccacgcaaaaagaaaccatgcccacaaagaagagattcattcagtggtgttaaggattccaacaacaattccgatggcaaagccgttgccaagttgggcagactgagatggcttatatccctcctaccttcttatgaaccctgcatgtcccaggggcctaaccatgcagcagccttcagctgcatgactccaggacctgcaggaccccaggaatgtgtcctatga

SEQ ID NO: 356 - DNA, 251 bp, Homo sapiens
  SIMILAR (52)..(174): 681254mologous to Mus musculus DNA binding protein DESRT,accession number AF169968,Smith-Waterman Score=145.
atggctcgtggacacctggcatctggagagatgaataggagaaaggagttgccagcgccaaatcttaaaggcagaccacgcaaaaagaaaccatgcccacaaagaagagattcattcagtggtgttaaggattccaacaacaattccgatggcaaagccgttgccaagggaaaatataccacatcagacgaggcacagccccaggatgcttaccaagacatagctagtgacagagccagcaacacttttca

SEQ ID NO: 357 - DNA, 407 bp, Homo sapiens
  SIMILAR (43)..(402): 251254mologous to Caenorhabditis elegans contains similarity to Pfam domain: PF00013 (KH domain), Score=42.8, E-value=3.7e-12, N =1; PF00023 (Ank repeat), Score=428.2, E-value=2.4e-125, N= 19,accession number Z70310,Smith-Waterman Score=97.
aaagaccaaagaagaaatgtgggcaatatgcaaccaactgctcagtattctggtggctcatccacaataagcttaaactctaaccaggctttggcaaacccagtttcaacacacaccattttaactcccaattccagcctcctgtctacttctcacgggacaagaatgccatcattatctacagcagttcagaatatggggatgtatggaaatctgccttgtaatcaacctaacacatacagtgtcacttcaggaatgaatcaattgacccaacagagaaacccaaagcaattgttagcaaatcaaaacaaccctatgatgccacggccacctaccttagggccaagtaataataacaatgtagccacttttggagctggatctgttggtaattcacaacaattgaa

SEQ ID NO: 358 - DNA, 236 bp, Homo sapiens
  SIMILAR (3)..(236): 901254mologous to Homo sapiens Human secreted protein sequence encoded by gene 28 SEQ ID NO:95,accession number B25706,Smith-Waterman Score=394.
gagctgacaacctgctgggcacccgaagacccagccccctgccccctgcatcccctcgaagagcctggccagagagggaagacacagatgatgaagctggagccagggctgccggtccgagtctcctacctcccccaaccctgcccgcccctgaaggctacctggcgccttgggggctgtccctcaagttatctcctctgctaagacaaaaagtaaagcactgtggtctttgcaaa

SEQ ID NO: 359 - DNA, 815 bp, Homo sapiens
  SIMILAR (616)..(119): 441254mologous to Homo sapiens Human secreted protein sequence encoded by gene 28 SEQ ID NO:95,accession number B25706,Smith-Waterman Score=250.
cccacgttaatattcagcctcctctataggaaaaaaaaactcctttcccccccccgctaaactctggccccccccacaatcccttaaaggggcccccccaacaggttgatagttgtttccttttttttgttaagcaaagaccacagtgctttactttttgtcttagcagaggagataacttgagggacagcccccaaggcgccaggtagccttcaggggcggtgcagggttgggggaggtaggagactcggaccggcagccctggctccagcttcatcatctgtgtcttccctctctgggccagggctcttcgaggggatgcaggaggctcgggcacgggtgagctggcagggggcttggtcttcgggtgcccagaaggttgtcagctcctgtttctgatgggactcacctggcaatgattccgggcataaccggggacagcttgcctgcactttgccactgggtgagggatgatgatgccttgtgatgaaacagcacagctgcggaccaacagcccccgtttccggaggttgttgttcatcatagaagaaggggtcatcctcatgaaaacctgcggttggagagtggcagtcccgggagaaggatgctcggacagtcgctatggcaaccgggtgctgtcccgcaccgtggtggtagcagacggggaagagatgagcttgcagggtgggagcgggtgggtctgcgaccagagacgttctggaagatttcagggtccctcccaagatgccccagttgccatagcaaccacctccttcctgatatctctttggcagctggccaggagtagtgcacat

SEQ ID NO: 360 - DNA, 394 bp, Homo sapiens
  SIMILAR (304)..(170): 841254mologous to Homo sapiens Human secreted protein, SEQ ID NO: 7217,accession number G03136,Smith-Waterman Score=193.
cctggtggctgatgtggttgtattcaactcagtttttaatatggaatcatttctcacttccatgggaaaatttatgaagctgattcctgatcacagacccaaggatctggaaagcatcatcagacccaagtgccaagttatttactttcccatcaggtttcctgatgtgagcagggacatggatgaagctggaaactatcgttctcagcaaactaacacaggaacagaaaaccaaacactgcatgttctcactcataagtggaagttgaacaatgaaaacacatggacacaggaaggggaacatcacatactggggcctgccgggggaacccagaaggtgagggagtttagagtaaagggtaatacagatattggggcagttggacttgagtga

SEQ ID NO: 361 - DNA, 1209 bp, Homo sapiens
  SIMILAR (141)..(37): 361254mologous to Homo sapiens platelet glycoprotein IIb,accession number M22569,Smith-Waterman Score=67.
gcggccgcgggggaggggcacggcgtcagcgcgtcgccggactgggccgcgcctggtgagccaggaggggagagacaaggagggacggaggaggaggaggtatctctgcattagccagattggacatatgtaaagggacatcagtatatctggatcatcagattgtgcttcaagaagaccatagggaaacacggctttttcatcttgctcctaaagttgcaatagaagatctgaaaggtttgaaatgggccaatgagtatcctcatcattgaagcattctatggaggctcccataaacagctggtggatcttcttcaagaagagttaggagactgtgtcgtttatacccttcctgcaaagaaatggcattggagagcccggacatctgctttatatttctctcagaccattcccatcagtgagcattacaggaccctctttgcaagttcagtgcttaacctgaccgaacaatggcatgcccttcggcctgaccttgggaaactgaaaaagattctgtattttcacgagaaccagttgatatatcctgtcaagaaatgtcaggagagggatttccaatatggatacaaccaaattctttcatgcctggtggctgatgtggttgtattcaactcagtttttaatatggaatcatttctcacttccatgggaaaatttatgaagctgattcctgatcacagacccaaggatctggaaagcatcatcagacccaagtgccaagttatttactttcccatcaggtttcctgatgtgagcagattcatgcccaagcacaaaacaacccatttaaagaagatgctcggccttaaaggaaatggcgtggcggttctgtccatggcccttccttttcagccagagcacagagattcataggatttattgaagaattgtaattcagagcgtgatacacactgtggccttgatactgcacgacaagaatatttgggtaactcatttagacaggaatcagacttggacagatccacctcgtcagataaatcaagctctcatcatggtgaaaataaacaaaatctgactgttgatccctgtgacattttgggtggagttgataatcagcaaagactgctacacattgtctggcctcacaggtggtaagtcaaggcatgccaatttagtaagagttgtagaactggtaaaagaaaatatattctgttgattgacataaaaaaa

SEQ ID NO: 362 - DNA, 1111 bp, Homo sapiens
  SIMILAR (426)..(115): 261254mologous to Drosophila melanogaster CG6406 gene product,accession number AE003802,Smith-Waterman Score=120.
tttttttgtatgaaaaaacaaacactagctttattaaaatgaaaagcagttgcacaggttatatatttgattttgtcaaaaaagattttgttaactccattaaatacaaaccaaattgtaaacccctagaagaagagcttcaatgcatccactgctatgcacatttctgctggctgagactgcaaggtagcaccaaattagttctgggagaaattgcagcgtaaattgaagcaactgctcctctccactgcgatagaattcaaagagctggtgacagacagggttctaggcaactcacttttgtggctcctggataactttatagagagatgaaactaaagaactcttgtctttcaaatttgtggcataatttggtaaagatgtttctggtaatgtcttaaggtgtggcaaccattcctccacaacccctttctgtgaagtaaacatttttccacatctgttctaagccttcaaccagggcggctgccggagctccacctgcggggcctcgactcgtgaggctctcagcgacagcgacggaggctgctgtgcttcctcccgagtagcagcaccacctgctccccttcttcctagcagaacgggtcccgaatttgaactggaaataggaagagaaaatcacgtggtggaagcagaagctaaaaaatcaagagcagaggcagcaatcaaggcacacacttccttggttcctttgctaagtggttcccacaaaggaattcaacaagcacaagcactggatgaagggaggttgagactattacgaagaatgccgtttggagtattcttgtacgtgcctcttggtgcacatctacatactcttctgtggtatatatccaggaggggtattgttgggaagaagagttttgtccaaagacgcaacagcggccaatgggaagctccttctgttttagaaaaagaggctctgaattgccttcctgtgcatcctaaccaagaggggatgctagaacagggagctgccactgatggtcctaaacccgtgattctcaaaacagggtcctcagagcggcagtttaagctgctgggaacctggaaacctgttagaaatgaacatctacagagtcagaaatgctga

SEQ ID NO: 363 - DNA, 558 bp, Homo sapiens
  SIMILAR (292)..(113): 371254mologous to Decapterus russelli cytochrome b,accession number AF307496,Smith-Waterman Score=80.
atgcctgtgagaaagccattgtgggttactttaggttttgtccaagagggccagctggaggggcacagagctgcaggtgttgctggattcccatggccatggggaaaccaccgtgagccacaggagaagcatccccccgagttagggaacttccagcgggaagtgcccaccttcgtgggtggctggaggaggggctctgaggaacccacacaaacctccacgggagaaggcattggccctgaacgtctgtcaggaacagagagcaaaaaggaaactggtgacagcgacagttccatcctgtcagccctctcttgtctcccagttactccctatgaaaccagcaacccacaggcatcggaaaccatgggcagacccccagagagcatttctgcaagggattcacactcacccgtttctcggacccctccattctgctgccagctcaaccgcaggtccaaagaaacggagtcactcgcactaccctacttccccagccaggccaggggccatgatcattctctgaacatcccacagttagaagcacgcactgagtactaa

SEQ ID NO: 364 - DNA, 397 bp, Homo sapiens
  SIMILAR (3)..(395): 991254mologous to Homo sapiens herpesvirus associated ubiquitin-specific protease (HAUSP),accession number Z72499,Smith- Waterman Score=680.
tacgaaaggctgtgtacatgatgccaaccgagggggatgattcgtctaaaagcgtccctttagcattacagagagtgttctatgaattacagcatagtgataaacctgtaggaacaaaaaagttaacaaagtcatttgggtgggaaactttagatagcttcatgcaacatgatgttcaggagctttgtcgagtgttgctcgataatgtggaaaataagatgaaaggcacctgtgtagagggcaccatacccaaattattccgcggcaaaatggtgtcctatatccagtgtaaagaagtagactatcggtctgatagaagagaagattattatgatatccagctaagtatcataggaaagaaaaatatatttgaatcatttgtggattatgtggcagt

SEQ ID NO: 365 - DNA, 744 bp, Homo sapiens
  SIMILAR (335)..(165): 351254mologous to Caenorhabditis elegans Hypothetical protein Y73E7A.a,accession number AC025727,Smith-Waterman Score=67.
atgctgcgcgaggccactggttctgcacctggggcagccaaggagcatggtgctggagcaacaggacgaggaggtcaagcaccactttctgtctacggcaagagcaggattgtccccgttctaccccgctccaagcacctgctcatctttgctctggatatgctgaaacttgtgattgatgtaatgtcagcatctgtgccagccagctctgtcacacaggcttccacggggaaggagataagtagagggagcagaactgacagcactgggcaagagtggtcagctttagtaaccatgatggcaacagagaaaaaagaatccattatcattgctgactgtgctgtgatatttggcgtcaatatagtacctcatgtgggtggaggatcaccaggttgcctaaggaggagtgaaccatccaggtcagaaatggagcaggtcaaagctccagtgctggttaatagtggatggtgcctaggacttaaactcattctgccagaggtatgcctcacccttgagcactacccattcccagtagggccctgctgtggtaccctatcctatggtgacattcagacatccctcaaggggcctgagcagaccgatagtctacttctttacgctggatatagacaccattttgcctcagaatcatctgggtatggtgccctctacacagggcctttcaccttcttttccacattatcaagcaacactccacaaagctgcgaacatcgtgttgcatga

SEQ ID NO: 366 - DNA, 1080 bp, Homo sapiens
  SIMILAR (597)..(424): 321254mologous to Homo sapiens Human secreted protein, SEQ ID NO: 4543,accession number G00462,Smith-Waterman Score=66.
atggcattaaaatatgtttattttaaagacattgttctctggccatgctgggaagaacacatcggaggcaagaagaacgaatgtggggctgaccgttacgaggctgttaccacaaccaaggaagaaatgatggtgccctggaacaggacatctggtgtaagtgtgtatctatgggggcgggatgttaacagagccatgaagctggaagtgaagacaggtggcatagacagtggtgcgcgagtcacggtgagccatctccgagtgagcacagccaccagcttggcggttatctctgaggcccccctcagacctgagctggcttccacaccagaaccaccaggggattttggagttgaggctcccgcgccttggccccctggctgggtgagggtgtacagcggctgtcgaaaatctctgggtgacgctcacgagtggcttggggcacctcatggtctccggtccctcccaggcatgaaggaaagcagccatgccgaaagccatgcacagacagggcctgaggacgcatgcgggtttccaccgaacggccacagtactgttaatacgaaaggaaaacgaaacaaacacaccaacaaaaatggacagaaggacaacccccttggagatggattttctgttaggtgtttcgctttcttggtttgggtgttcctttcgcggccagacggcacgatcgttaacagtttcagagaaaacgcccaggtcccgcagcaagtcgggtatagctttgactttggtaaaagcaaacaagaagatatacagcccccatttaaactcctggtgagctaaaatgggcagtaagttgaaggcaaggctttggaatggtctacgcattagaaacggaaaatggcaatgcatggatgtgtatttatatattgattgctacaggatgacataaacactgactcagagagggggcacgcgtagctttgtacccacacaaaatcaggcctggctctctgtggctatcttctgaggtccctccaaaggctgcgtgccaaatgcaatcaaatactttctacttaaaaaaagaaaataacttgcgctttatgagttgcaacaatg

SEQ ID NO: 367 - DNA, 1422 bp, Homo sapiens
  SIMILAR (784)..(864): 291254mologous to Homo sapiens Human complement type 1 receptor SCR1,accession number R28539,Smith-Waterman Score=41.
atgaacgccgacagcaagggaagcgggactgtacttgcagagccttatgaagtggatgctattaccagccctttttttaccgggaaagagggccagaggggtaatgtaaccggcctgagatggcacagcaagcatttagttaccttcacagtccatacagacacatcaacagcccactctaactgcgtggaggatgctcccatggagacagtgtacccagcactcacagccagggttggacaagagctgaccagcccagaagtcatcaaggccacactggccttgacccaggttcagcagagctcctcggagggtttcctgaagacagtcctgctgcaagtctcttggttctccctgtgtgctccccggagcagcagcagcctcccctggaacttggcccctcctcagaccagatgctctggtgggggagggggctttccaactcgggactcatctgaatcaggtgagaaaaactccacagcagcaacgggattcagaggtgggctagctgggaagactgaagaccaggaaggattgggattttcccagaatcagggaagtgagttcaagtacgggggacccttcctgtcccttagacacattcgagacaacggaggggtcagatctggctggctgggctatgtgcgggcatcagcatttctgacccatcccaagcagaaagcaggtgaaggactttgcccattctctatagacaggtggaccagagtcatgagctctcatggaaagtttcgtttatacggagacatgaaggttgagcattattacacaggtactcgcagagctatgctctgcacacagagccagggctggctgggcgagagggctctgattggagacaggtgccttggggagagttgaggaacgacttccttccaggcggggcctggggacttggtctgcatgtgtctttggtctagaatttggtctgagaatcttataagaagaggccttcctcaggccatgtccagaatgttgcaatttgcctaccaacccaaaatactgtggcctttcacccagggagcccccgctggggagatggaaactgaaatgaccacaaatgcccaggtagccactgcgtgccaagtcccctcttccccacgtgccacctgccctcaatcattgacagtggttagtttactaaagttatataagacaaaggaaaacaggtcacaatgctactccataaaatcagggaaaaaacagtaaaatcaaatcagacacaaacggcaaccataaatacatagaaaaacaggaacaagatagaatcgttgagagtttggaataggactgggtgttgtttggcagagtagatagctttggaaacagtgaaatatgtatgcctgccaaagatggggttcagaattgccccttgggagggggacaccaaaggcatactcctcc

SEQ ID NO: 368 - DNA, 496 bp, Homo sapiens
  SIMILAR (1)..(204): 891254mologous to Homo sapiens hypothetical protein,accession number AL442078,Smith-Waterman Score=319.
ggcgagaatcttttcctgaaagctgtcaataaaatttgccaacaaggaaatttccaatatgagaattttttcaattacgttacaaatattgatatgctggaggaatttgcctacttgagaactcaggaaggtgggaaaattcatctggaattactacccaatcaaggaatgctgatcaagccttctagccctcccatggggttactgcagcaggaattcttacctgtgcttcagcccagcatacagactgctgacaggcaccacactgtaactcgaggcatcaccaaaggcgtgaaggaggactttcgcctggccatggagcgccaggtctcccgctgtggagagaatctgatggtggttctgcacaggttctgcattaatgagaagatcttgctccttcagactctgacctgagtggagacctttccaccagacacagctcgggcctgtgtaattgtaggagaagacactcagcagtgattgccatggcacagag

SEQ ID NO: 369 - DNA, 509 bp, Homo sapiens
  SIMILAR (372)..(434): 481254mologous to Homo sapiens Human secreted protein encoded by gene 28 clone HNGJJ65,accession number Y02677,Smith-Waterman Score=61.
catctcatgccaagagttatctgtgcgagggagtttagtgggtataagaatcaggttttggcatcagacagatctgggttcaaatatggagtctgcagttagtggggtagcaatgggcaagttactcaactgccaagaccccatttccttatcagagagaactggcaccttttttagtgggatggcaatgggcaagttactcaactgccgagaccccatttcctcatcagagaaaactagcacctttttttacatgtggttaacctgaatctggcctgcagatattgatatgctggaggaatttgcctacttgagaactcaggaaggtgggaaaattcatctggaattactacccaatcaaggaatgctgatcaagtaagcatgttctcttttgctcttccatgctgagtgctcaccttttgtgtctttgtatgaagtatttgtaaatgtctatacctatcaaaaatttaatacaaaggactttaaacctggaaaaaaaaaaaaaaaaa

SEQ ID NO: 370 - DNA, 1681 bp, Homo sapiens
  SIMILAR (595)..(272): 381254mologous to Homo sapiens Np70 protein carboxy terminal region,accession number Y67470,Smith-Waterman Score=147.
atgaggaggttgcactcccacggacggcatccaccaaagcgctttccaagtacttcgttgctcaataaacgtttgttggagaaaccggtgcataaaggtgaaataataaaacgtggacggatttcggaaagagaaggaaccccggagctcacgctttgcacgatcacccccaccagccccaggagttttcgcgtaaatcgaagcccggggagtgacctggaagcggttcaactgctctggcttctcagaagaggaggggaccgggcgacatgcgcagtagcctcccccgcggtggcggcggcggcggcggcggcggtggctgccgtggcggctgagagtccagagccggacgttccggccgcttcgggctggcggctggagagcgctcgggtcatgtctgcccagggggactgcgagttcctggtgcagcgagcccgggagttggtgccgcaagacctgtgggcagccaaggcgtggctgatcacggcccgcagcctctacccggcagactttaacatccaggtgaggtcccggctgtgcatgcggccgctctgcgtggaggagggccaacgagcgatgctggatgagctgggagccttctgggcagggtatgagatgtacaccatcgagcggaatgcagagcggaccgccaccgccgggaggctgctgtacgacatgtttgtgaatttcccagaccagccggtggtgtggagagaaatcagcattattacatcagcattaaggaacgattcacaggacaaacaaacccaatttttaagaagtttatttgaaactcttcctggtcgggtccagtgtgaaatgttactaaaggtcacggaacaatgcttcaacacgttagaacgatcagaaatgttgcttctacttttgaggcgcttccctgaaacggtggtgcagcatggggttggccttggggaggcactattagaggctgaaactattgaagaacaagaatctccagtgaactgctttagaaaattatttggtaaggaaaattgtattctctattacttctatggtaaattaatatgctgggtttgtgatgtccttcctctaataattaacaaccatgatgttcgattacctgccaatttattgtataagtacttgaacaaagcagctgaattttatatcaattatgtcactaggtctactcaaatagagacatcagcatcacggcgcccaggatacatctgcatttaatgtcacctagcacacgtagctctcagaggtacataatagaggggctgacggaaacatcatcccagatcgtggacccttgggagaggttgtttaagattttgaatgttgttggaatgagatgtgaatggcagatggataaaggaagacgaagctatggagatattttgcatagaatgaaggatctctgcagatacatgaacaactttgatagtgaagcacatgcaaaatataaaaaccaagtggtgtattccaccatgctggtcttctttaagaatgcattccagtatgtcaacagcatacagccatctctcttccaaggttggtttacaaattttagagtgtccaaaaagccagttcatactgtggggatgctgggagttaaaaaaaattctgccgtagcctaccgcctcatgactttgagtctgtctgtattacaccaagacaacatagaagttatgag

SEQ ID NO: 371 - DNA, 1812 bp, Homo sapiens
  SIMILAR (942)..(998): 521254mologous to Homo sapiens 6H9A,accession number L17330,Smith-Waterman Score=48.
tttttttttttttttttcaaattttagggatgatttttattttacaaaaccagatgggtacttttggttttaccaaaaattacaaaaaaatgactcttaaaaaattggaaatagcttctcagacttcttgggaactacttttaagcaaccaaggagttagaactcagatcggttttcttctttgtaacagcaacaatgaccacggctctgtgccatggcagatcactggctgagtgtcttctcctacaattacacaggcccgagctgtgtctgggtgggaaaggtctccactcagggtcagaagtctgaagggggcaaggatcttcttcattaatgcaggaacctggtgcagaacccaccatcagattctctccacagcggggagacctggcgcttccatgggccaggccgaaaagtccctcccttcaagcctttgggtgatggcctcgagttacagtgtggtgcttgatcagcattcccttgattgggtagtaattccagatgatattttcccaccttcttgagttctcaagtaggcaaattcctccagcatatcaatatttgtatcgtaactgaaataattctcatattggaaatttccttgttggcaaattgttattgacagctttcaggaaaagattctcgccccgtggccactcttgctgaagcaacacaatcacatggccccaatgccatgtcgtctctgttgtctgtgaaagctctaagctttaaaaccggctaacattaaatggaggcagtatggcatggatagcctgctgggtacaaggcaggagcttcagatccgaaccttttctaaatttgggctttaactttcggaggggttcctcctgggatttgcctccatcttgaatggggagtaccatgtagcacatcaaatcaaggactttttcacatgtcattctgtactcccctaagcgcaaagtggcacgtcgccagcgtggatgagcgccctctgatgctccagggtcccctgccctgtgatctgtggctgagagatggatccctggagagctgctaagtgatgcaaggcctgtatcggcctttttatattgaccctgatagatgatcatatcagtgaggaagattcttaaccaaagccaagtatccgtcttcccaggccaagcaaatccttgtaaattctttgtcaaggaattctagggaatagagcaactcccagctctcccctggccaatttaaagctttctaacacttcagtggagttagcaagttcgcgctttattgactacaatgtgacgatttcttcctatcgccgaacagtcttcatcgtctgaactctgcatggttttttctcttccttcagctagtttcctctttttatggatgtgtttattacgatcaatttctacatcaccatacacattcgatacatcttcaagaagaaacccagtggaacttggctcggggcattaggaccttggaagagagatggctgtatgctgttgacatactggaatgcattcttaaagaagaccagcatggtggaatacaccacttggtttttatattttgcatgtgcttcactatcaaagttgttcatgtatctgcagagatccttcattctatgcaaaatatctccatagcttcgtcttcctttatccatctgccattcacatctcattccaacaacattcaaaatcttaaacaacctctcccaagggtccacgatctgggatgatttttccgtcagcccttctattatgtacttctgagagctacgtttgctaggtgacattaaatcagatgtatcctgggcgccttgatgctgatttt

SEQ ID NO: 372 - DNA, 510 bp, Homo sapiens
  SIMILAR (138)..(242): 601254mologous to Homo sapiens HDCMB45P,accession number AF068294,Smith-Waterman Score=93.
atgaatgaggagttgcctcttacagatgagcagagaaagtggttgtataagatagaaactacccctgctgaagatgctgtgaacactgttgaaatgacaacaaaggattacaaatattacgtaaacttaattgatacaaggacaggttttagaggattgactctagctttgaaagaagttctactgtgggtaaaatgcgatcaaacaatggttcatactacagagaaatctttcatggaaggtaaacttgcctcacaagaaatgttaaaacttatttcagagaaaatgaaaattacagaggtcaggaatttggatcaacacaaagaaacaggagagtcagacaagaaagaaatgaaggaaaacctaggatataccatcctggacataggacctggcaaagatttcaagacaaagacaccaaaagcaatcgcaacaaaagcaaaaattgacaagtgggacctaatcaaactaaagatctctgcacagcaaaagaaactatcaaaagagtaa

SEQ ID NO: 373 - DNA, 1011 bp, Homo sapiens
  SIMILAR (978)..(652): 461254mologous to Homo sapiens coding sequence (1 is 3rd base in codon),accession number V00478,Smith-Waterman Score=198.
  misc_feature (1)...(1011): n = a,t,c or g
tttttttttttttttttttggttacggcagcacttttatttttccttacacaaagacgagcccgctggggccctaatgtgtctcacataactaggagaaaaccaaagatttgttgtcatctctttaaagaatcgagaattgcgtacaaaaaaaaccttacataaattaagaatgaatacatttacaggcgtaaatgcaaaccgcttcccaacttaaaagcaattaacagcccaccggggttttggccaaaagacatcagcttaagaaaggaaactggggtcctatcggcttggacttttccaaccctgacaagaccccgcaagacaaaaacaactggtttcttgccagcctctagaggaaatcccaggaacactcagccctggacacgtttanttaccaagggggaacagtttaactttcaatacaaggtcaaaatcagcaacaagttctacaatccagtgctgatatcagatacaagcttcaaggacaatttcgtttcgaagggcttatttccagtttcgtgagggctagccatgaggtgtgtgcatttgcccaggggcaaatttccaatccccatttaacccatgcagcaaatggctacggcatcttgctgaagtcgtttagaagcaatttgcggttggacgaatggaggggccccgactcgtcgtacttcttgcttgctaatcccacatctgcctggaaggtggacagttgagcccagatgggagccaaccgatccacccaccgagtacttgcgcttcctgggggtgcgatgatcttgaatctcaatgttgcctgggccgcaggggcgtggatttctttctgcatccctgtcaacaatgcccccgatacctggtggttgccgcccggaagcaacgtttgggcgtaaaggtctttggcggattgccacgtcaaactttatgaatgggagtgaaaggtggtctcgtggatgccgcaagatttcataacccggaaagaaaggttggaagaggccttccggaaaccgggacc

SEQ ID NO: 374 - DNA, 2016 bp, Homo sapiens
  SIMILAR (246)..(791): 491254mologous to Mus musculus skeletal muscle alpha- actin,accession number M12233,Smith-Waterman Score=363.
  misc_feature (1)...(2016): n = a,t,c or g
atccttaattaaattaatccccccccgctcagtcgccgctgccaactctcgcactctgttcttccgccgctccgccgtcgcgtttctctgccggtcgcaatggaagaagagatcgccgcgctggtcattgacaatggctccggcatgtgcaaagctggttttgctggggacgacgctccccgagccgtgtttccttccatcgtcgggcgccccagacaccagggcgtcatggtggggcatgggccaaaaaggactcctacgtgggcgacgaggcccagagcaagcgtggcatcctgaccctgaagtaccccattgagcatggcatcgtcaccaactgggacgacatggagaaagatctggcaccacaccttctacaacgagctgcgcgtggccccggaggagcacccagtgctgctgaccgaggcccccctgaaccccaaggccaacagagagaagatgactcagaattatgtttgagaccttcaacacccccggccatgtacgtgggcccatccaggccgtgctgtccctctaaagcctctgggcgcaccactggcattgtcatggactctgggagacggggtcacccacacggtgcccatcttacgagggctacgccctcccccacgccatttctgcgtctgggacctggcttggcccgggacctgaccgactacctcatgaagatcctcactgagcgagggtacagcttcaccacccacgggccgagcgggaaaacgttccgcaacatcaagggagaagcttgtgctacgtcgcccctggacttcgagcagggagatgggcacccgncgcatcctcctcttctctggagaagagctacgagctgcccgatggccaggtcatcaccattggcaatgagcggttccggtgtccggaggcgctgttccagccttccttcctgggtatggaatcttgcggcatccacgagaccaccttcaactccatcatgaagtgtgacgtggacatccgcaaagacctgtacgccaacacggtgctgtcgggcggcaccaccatgtacccgggcattgccgacaggatgcagaaggagatcaccgccctggcgcccagcaccatgaagatcaagatcatcgcacccccaggagcgcaagtaactcggtgtggatcggtggctccatcctggcctcactgtccaccttccagcaagattttggattaagcaagcaggagtacgacgagtcgggcccctccattcgtccaccgcaaatgcttctaaaacggactcagcaagatgcgtagcatttgctgcatgggttaattgagaatagaaaatttgcccctggcaaatggcacacacctcatgctagccttcacgaaacttggaataagccttcgaaaagaaattgtcccttgaagcttgtatcttgatatccagcactggattgtagaacttgttgctgattttgaccctggtattgaagttaactgttccccttggtatttgtttaatacccctgtacatatcttggagttcaaccctttagtacgtgtggcttggtcactttcgtggctaaaggtaagaacgtgccttgtggaaagacaagtctgtggcttggtgagtcctgtgtggcccagcagcctcctgatctgtgcagggtattaacgtgtccagggctgagtgttctgggatttctctaagaggcttggcaagaaccagttgtttttgtcttgcgggtctgtcagggttggaaagtccaaagccgtaggacccagtttcctttcttagctgatgtcctttgggccagaacaccgtgggctgttaacttgccttgagttggaagcggtttgcatttacgcctgtaaatgtattcaatcctaatttaagtaagggttttttttgtacgcaattctcgattctttgaagaagatgacaacaaacttttggttttctacatgttatgtgagaacattagcgccccacgcaacactgtcattgtgtaaggaaaaataaaagtgctgccgtaaccaaaaaaaaaa

SEQ ID NO: 375 - DNA, 267 bp, Homo sapiens
  SIMILAR (196)..(86): 441254mologous to Homo sapiens Human secreted protein ya11_1,accession number Y26346,Smith-Waterman Score=62.
atggctgtcatactgagcacgtcctatgagccagctgatttgcttgtcagcgtctccaggtcactgtccagcaccactgtcctggacagcagagccccaagtctttgcatgaggaggcaagctactacccagattgtgagcctctattcgccgaacagaaatagtggggagagagggttgcaagctttagagcgcatgtcaatggccggtatcatcattacggctgtggtgtttgtggtcacctatctgcaagtcacgctttcatag

SEQ ID NO: 376 - DNA, 392 bp, Homo sapiens
  SIMILAR (34)..(5): 901254mologous to Homo sapiens FKSG60,accession number AF336887,Smith-Waterman Score=40.
gtttctgtgtagaaagaagtagacataggagactccattttgttttgtactaagaaaaattcttctgccttgagatgctgttaatctgtaaccttacccccaaccccgtgctctctgaaacatgtgctgtgtcaactcagggttaaatggattaagggctgtgcaagatgtgctttgttaaacagatgcttgaaggcagcatgctcgttaagagtcaccaccactccctaatctcaagtacccagggacaggccaggcacggtggctcacgcctgtaatcccagcactttgggaggccaaggcaggcagatcacgaggtcaggagatcaagaccatcctggcaaacacggtgaaacaccggtctctactaaaaatacaaaaaattagccggg

SEQ ID NO: 377 - DNA, 208 bp, Homo sapiens
  SIMILAR (173)..(3): 921254mologous to Homo sapiens Obesity receptor C protein,accession number W34499,Smith-Waterman Score=272.
tttattgatcattcttgggtgtttctcacagagggggatttggcagggtcataggacaatagtggagggaaggtcagcagataaacaagtgaacaaaggtctctggttttcctaggcagaggatcctgcggccttccacagtgtttgtgtccctgggtacttgagattagcgatgggcggccaggcagagacgcccctcacttcccac

SEQ ID NO: 378 - DNA, 4538 bp, Homo sapiens
  SIMILAR (3)..(2723): 961254mologous to Homo sapiens Gag-Pro-Pol protein,accession number AF164614,Smith-Waterman Score=4623.
aaaaaccagtgtgggtaaatcagtggccgctaccaaaacaaaaactggaggctttacatttattagcaaatgaacagttagaaaagggtcatattgagccttcattctcaccttggaattctcctgtgtttgtaattcagaagaaatcaggcaaatggcgtatgttaactgacttaagggccgtaaatgccgtaaacgccgtaattcaacccatggggcctctccaacccgggttgccctctctggccatgatcccaaaagattggcctttaattataattgatctaaaggattgcttttttaccatccctctggcagagcaggattgtgaaaaatttgcctttactataccagccataaataataaagagccagccaccaggtttcagtggaaagtgttacctcagggaatgcttaatagtccaactatttgtcagacttttgtaggtcgagctcttcaaccagttagagaaaagttttcagactgttatatcattcattatattgatgatattttatgtgctgcagaaacgaaagataaattaattgactgttatacatttctgcaagcagaggttgccaacgcaggactggcaatagcatctgataagatccaaacctctactccttttcattatttagggatgcagatagaaaatagaaaaattaagccaccaaaaatagaaataagaaaagacacattaaaaacactaaatgattttcaaaaattgctgggagatattaattggattcggccaactctaggcattcctacttatgccatgtcaaatttgttctctatcttaagaggagactcagacttaaatagtaaaagaatgttaaccccagaggcaacaaaagaaattaaattagtggaagaaaaaattcagtcagcgcaaataaatagaatagatcccttagccacactccaacttttgatttttgccactgcacattctccaacaggcatcattattcaaaatactgatcttgtggagtggtcattccttcctcacagtacagttaagacttttacattgtacttggatcaaatggctacattaattggtcagacaagattacgaataataaaattatgtggaaatgacccagacaaaatagttgtccctttaaccaaggaacaagttagacaagcctttatcaattctggtgcatggcagattggtcttgctaattttgtgggaattattgataatcattacccaaaaacaaagatcttccagttcttaaaaatgactacttggattctacctaaaattaccagacgtgaacctttagaaaatgctctaacagtatttactgatggttccagcaatggaaaagcagcttacacagggccgaaagaacgagtaatcaaaactcaatatcaatcggctcaaagagcagaattggttgcagtcattacagtgttgcaagattttgaccaacctatcaatattatatcagattctgcatatgtagtacaagctacaagggatgttgagacagctctaattaaatatagcatggatgatcagttaaaccagctattcaatttattacaacaaactgtaagaaaaagaaattttccggccgggcgcgggcctttgactaaagcaaatgaacaagctgacttactggtatcatctgcactcataaaagcacaagaacttcatgctttgactcatgtaaatgtagcaggattaaaaaacaaatttgatgtcacatggaaacaggcaaaagatattgtacaacattgcacccagtgtcaagtcttacacctgcccactcaagaggcaggagttaatcccagaggtctgtgtcctaatgcattatggcaaatggatgtcacgcatgtatcttcatttggaagattatcatatattcatgtaacagttgatacttattcacatttcatatgggcaacttgccaaacaggagaaagtacttcccatgttaaaaaacatttattgtcttgttttgctgtaatgggagttccagaaaaaatcaaaactgacaatggaccaggatattgtagtaaagctttccaaaaattcttaagtcagtggaaaatttcacatacaacaggaattccttataattcccaaggacaggccatagttgaaagaacaaatagaacactcaaaactcaattagttaaacaaaaagaagggggagacagtaaggagtgtaccactcctcagatgcaacttaatctagcactctatactttaaattttttaaacatttatagaaatcagactactacttctgcagaacaacatcttactggtaaaaagaacagcccacatgaaggaaaactaatttggtggaaagataataaaaataagacatgggaaatagggaaggtgataacgtgggggagaggttttgcttgtgtttcaccaggagaaaatcagcttcctgtttggatacccactagacatttgaagttctacaatgaacccatcggagatgcaaagaaaagcacctccgcggagacggagacaccgcaatcgagcaccgttgactcacaagatgaacaaaatggtgacgtcagaagaacagatgaagttgccatccaccaagaaagcagagccgccgacttgggcacaactaaagaagctgacgcagttagctacaaaatatctagagaacacaaaggtgacacaaaccccagagagtatgctgcttgcagccttgatgattgtatcaatggtggagcagctgcagctaactatacctactgggcctatgtgcctttcccgcccttaattcgggcagtcacatggatggataatcctatagaagtatatgttaatgatagtgtatgggtacctggccccacagatgatcactgccctgccaaacctgaggaagaagggatgatgataaatatttccattgggtatcgttatcctcctatttgcctagggagagcaccaggatgtttaatgcctgcagtccaaaattggttggtagaagtacctactgtcagtcccatcagtagattcacttatcacatggtaagcgggatgtcactcaggccacgggtaaattatttacaagacttttcttatcaaagatcatttaaatttagacctaaagggaaaccttgccccaaggaaattcccaaagaatcaaaaaatacagaagttttagtttgggaagaatgtgtggccaatagtgcggtgatattacaaaacaatgaatttggaactattatagattgggcacctcgaggtcaattctaccacaattgctcaggacaaactcagtcgtgtccaagtgcacaagtgagtccagctgttgatagcgacttaacagaaagtttagacaaacataagcataaaaaattgcagtctttctacccttgggaatggggagaaaaaggaatctctaccccaagaccaaaaataataagtcctgtttctggtcctgaacatccagaattatggaggcttactgtggcctcacaccacattagaatttggtctggaaatcaaactttagaaacaagagatcgtaagccattttatactgtcgacctaaattccagtctaacagttcctttacaaagttgcataaagcccccttatatgctagttgtaggaaatatagttattaaaccagactcccagactataacctgtgaaaattgtagattgcttacttgcattgattcaacttttaattggcaacaccgtattctgctggtgagagcaagagagggcgtgtggatccctgtgtccatggaccgaccgtgggaggcctcaccatccatccatactttgactgaagtattaaaaggtgttttaaatagatccaaaagattcatttttactttaatagcagtgattatgggattaattgcagtcacagctacggctgctgtagcaggagttgcattgcactcttctgttcagtcagtaaactttgttaatgattggcaaaaaaattctacaagattgtggaattcacaatctagtattgatcaaaaattggcaaatcaaattaatgatcttagacaaactgtcatttggatgggagacaggctcatgagcttagaacatcgtttccagttacaatgtgactggaatacgtcagatttttctattacaccccaaatttataatgagtctgagcatcactgggacatggttagacgccatctacagggaagagaagataatctcactttagacatttccaaattaaaagaacaaattttcgaagcatcaaaagcccatttaaatttggtgccaggaactgaggcaattgcaggagttgctgatggcctcgcaaatcttaaccctgtcacttgggttaagaccattggaagtactacgattataaatctcatattaatccttgtgtgcctgttttgtctgttgttagtctgcaggtgtacccaacagctccgaagagacagcgaccatcgagaacgggccatgatgacgatggcggttttgtcgaaaagaaaagggggaaatgtggggaaaagcaagagagatcagattgttactgtgtctgtgtag

SEQ ID NO: 379 - DNA, 4086 bp, Homo sapiens
  SIMILAR (1)..(3795): 981254mologous to Homo sapiens Gag-Pro-Pol-Env protein,accession number AF164611,Smith-Waterman Score=6628.
atggggcctctccaacccgggttgccctctccggccatgatcccaaaagattggcctttaattataattgatctaaaggattgcttttttaccatccctctggcagagcaggattgtgaaaaatttgcctttactataccagccataaataataaagaaccagccaccaggtttcagtggaaagtgttacctcagggaatgcttaatagtccaactatttgtcagacttttgtaggtcgagctcttcaaccagtgagagaaaagttttcagactgttatattattcattatattgatgatattttatgtgctgcagaaacgaaagataaattaattgactgttatacatttctgcaagcagaggttgccaatgctggactggcaatagcatccgataagatccaaacctctactccttttcattatttagggatgcagatagaaaatagaaaaattaagccacaaaaaatagaaataagaaaagacacattaaaaacactaaatgattttcaaaaattactaggagatattaattggattcggccaactctaggcattcctacttatgccatgtcaaatttgttctctatcttaagaggagactcagacttaaatagtcaaagaatattaaccccagaggcaacaaaagaaattaaattagtggaagaaaaaattcagtcagcgcaaataaatagaatagatcccttagccccactccaacttttgatttttgccactgcacattctccaacaggcatcattattcaaaatactgatcttgtggagtggtcattccttcctcacagtacagttaagacttttacattgtacttggatcaaatagctacattaatcggtcagacaagattacgaataacaaaattatgtggaaatgacccagacaaaatagttgtccctttaaccaaggaacaagttagacaagcctttatcaattctggtgcatggcagattggtcttgctaattttgtgggacttattgataatcattacccaaaaacaaagatcttccagttcttaaaattgactacttggattctacctaaaattaccagacgtgaacctttagaaaatgctctaacagtatttactgatggttccagcaatggaaaagcagcttacacagggccgaaagaacgagtaatcaaaactccatatcaatcggctcaaagagacgagttggttgcagtcattacagtgttacaagattttgaccaacctatcaatattatatcagattctgcatatgtagtacaggctacaagggatgttgagacagctctaattaaatatagcatggatgatcagttaaaccagctattcaatttattacaacaaactgtaagaaaaagaaatttcccattttatattacttatattcgagcacacactaatttaccagggcctttgactaaagcaaatgaacaagctgacttactggtatcatctgcactcataaaagcacaagaacttcatgctttgactcatgtaaatgcagcaggattaaaaaacaaatttgatgtcacatggaaacaggcaaaagatattgtacaacattgcacccagtgtcaagtcttacacctgcccactcaagaggcaggagttaatcccagaggtctgtgtcctaatgcattatggcaaatggatgtcacgcatgtaccttcatttggaagattatcatatgttcatgtaacagttgatacttattcacatttcatatgggcaacttgccaaacaggagaaagtacttcccatgttaaaaaacatttattgtcttgttttgctgtaatgggagttccagaaaaaatcaaaactgacaatggaccaggatattgtagtaaagctttccaaaaattcttaagtcagtggaaaatttcacatacaacaggaattccttataattcccaaggacaggccatagttgaaagaactaatagaacactcaaaactcaattagttaaacaaaaagaagggggagacagtaaggagtgtaccactcctcagatgcaacttaatctagcactctatactttaaattttttaaacatttatagaaatcagactactacttctgcagaacaacatcttactggtaaaaagaacagcccacatgaaggaaaactaatttggtggaaagataataaaaataagacatgggaaatagggaaggtgataacgtgggggagaggttttgcttgtgtttcaccaggagaaaatcagcttcctgtttggttacccactagacatttgaagttctacaatgaacccatcggagatgcaaagaaaagggcctccacggagatggtaacaccagtcacatggatggataatcctatagaagtatatgttaatgatagtatatgggtacctggccccatagatgatcgctgccctgccaaacctgaggaagaagggatgatgataaatatttccattgggtatcgttatcctcctatttgcctagggagagcaccaggatgtttaatgcctgcagtccaaaattggttggtagaagtacctactgtcagtcccatcagtagattcacttatcacatggtaagcgggatgtcactcaggccacgggtaaattatttacaagacttttcttatcaaagatcattaaaatttagacctaaagggaaaccttgccccaaggaaattcccaaagaatcaaaaaatacagaagttttagtttgggaagaatgtgtggccaatagtgcggtgatattataaaacaatgaatttggaactattatagattgggcacctcgaggtcaattctaccacaattgctcaggacaaactcagtcgtgtccaagtgcacaagtgagtccagctgttgatagcgacttaacagaaagtttagacaaacataagcataaaaaattgcagtctttctacccttgggaatggggagaaaaaggaatctctaccccaagaccaaaaatagtaagtcctgtttctggtcctgaacatccagaattatggaggcttactgtggcctcacaccacattagaatttggtctggaaatcaaactttagaaacaagagattgtaagccattttatactgtcgacctaaattccagtctaacagttcctttacaaagttgcgtaaagcccccttatatgctagttgtaggaaatatagttattaaaccagactcccagactataacctgtgaaaattgtagattgcttacttgcattgattcaacttttaattggcaacaccgtattctgctggtgagagcaagagagggcgtgtggatccctgtgtccatggaccgaccgtgggaggcctcaccatccgtccatattttgactgaagtattaaaaggtgttttaaatagatccaaaagattcatttttactttaattgcagtgattatgggattaattgcagtcacagctacggctgctgtagcaggagttgcattgcactcttctgttcagtcagtaaactttgttaatgattggcaaaagaattctacaagattgtggaattcacaatctagtattgatcaaaaattggcaaatcaaattaatgatcttagacaaactgtcatttggatgggagacagactcatgagcttagaacatcgtttccagttacaatgtgactggaatacgtcagatttttgtattacaccccaaatttataatgagtctgagcatcactgggacatggttagacgccatctacagggaagagaagataatctcactttagacatttccaaattaaaagaacaaattttcgaagcatcaaaagcccatttaaatttggtgccaggaactgaggcaattgcaggagttgctgatggcctcgcaaatcttaaccctgtcacttgggttaagaccattggaagtacatcgattataaatctcatattaatccttgtgtgcctgttttgtctgttgttagtctgcaggtgtacccaacagctccgaagagacagcgaccatcgagaacgggccatgatgacgatggcggttttgtcgaaaagaaaagggggaaatgtggggaaaagcaagagagatcaaattgttactgtgtctgtgtag

SEQ ID NO: 380 - DNA, 474 bp, Homo sapiens
  SIMILAR (2)..(112): 861254mologous to Homo sapiens FKSG60,accession number AF336887,Smith-Waterman Score=164.
cctgagtggacacagcacatgtttcagagagcacggggttgggggtaaggttatagattaacagcatcccaaggcagaagaatttttcttagtacagaacaaaatggagtctcccctgtctggtaagtgggattttttaaaaagctgatattaaacaaaggagtttaatcattcttacccacagactcaaagagaaaaaaaaccggtaagcagtgtatgccaacagtaagccttaaaagggcgaggcaattgtcatcatccaatatttgtcagtaagccaaacccccctcctcacctcgcaagcccgcgccagtccagttttagccgttcttttggaagagcaagtcagttgaacgccatcgaagaggctcctgatttagatattaattgtgcttaaatgcagatgactccccactctcatgcgttcccttatttcccgttgcttctcccattggcatttacagacttgaggtt

SEQ ID NO: 381 - DNA, 762 bp, Homo sapiens
  SIMILAR (297)..(428): 841254mologous to Shigella flexneri TnpH,accession number AF141323,Smith-Waterman Score=217.
atgactcttaacgagcatgctgccttcaagcatctgtttaacaaagcaaatcttgtaccgcccttaatccgtttaaccctgagtggacacagcacatgtttcagagagcacggggttgggcctactgacggggtggtgcgtaacggcaaaagcaccgccggacatcagcgctatctctgctctcactgccgtaaaacatggcaactgcagttcacttacaccgcttctcaacccggtacgcaccagaaaatcattgatatggccatgaatggcgttggatgccgggcaacagcccgcattatgggcgttggcctcaacacgattttacgtcacttaaaaaactcaggccgcagtcgccgggcagtgacgtcatcgtctgcgcggaaatggacgaacagtggggctatgtcggggctaaatcgcgccagctggctgttttacgcgtatgacagtctccggaagacggttgttgcgcacgtattcggtgaacgcactatggcgacgctggggcgtcttatgagcctgctgtcaccctttgacgtggtgatatggatgacggatggctggccgctgtatgaatcccgcctgaagggaaagctgcacgtaatcagcaagcgatatacgcagcgaattgagcggcataacctgaatctgaggcagcacctggcacggctgggacggaagtcgctgtcgttctcaaaatcggtggagctgcatgacaaagtcatcgggcattatctgaacataaaacactatcaataa

SEQ ID NO: 382 - DNA, 1584 bp, Homo sapiens
  SIMILAR (1)..(636): 931254mologous to Cloning vector pZC320 SopB,accession number U26464,Smith-Waterman Score=962.
atggtggattcgttaattgcgcgcgtaggagtaatggctcgcggtaatgccattactttgcctgtatgtggtcgggatgtgaagtttactcttgaagtgctccggggtgatagtgttgagaagacctctcgggtatggtcaggtaatgaacgtgaccaggagctgcttactgaggacgcactggatgatctcatcccttcttttctactgactggtcaacagacaccggcgttcggtcgaagagtatctggtgtcatagaaattgccgatgggagtcgccgtcgtaaagctgctgcacttaccgaaagtgattatcgtgttctggttggcgagctggatgatgagcagatggctgcattatccagattgggtaacgattatcgcccaacaagtgcttatgaacgtggtcagcgttatgcaagccgattgcagaatgaatttgcgggaaatatttctgcgctggctgatgcggaaaatatttcacgtaagattattacccgctgtatcaacaccgccaaattgcctaaatcagttgttgctcttttttctcaccccggtgaactatctgcccggtcagaggatccccggttttctgtgaagacggagccatcgcatttgaggggcaggaagcagcagcaacacccatgtccccagcagtgcccagcagtcggtgacggggctctttgtgcccccaagagtgaggtggtcccagcctggcctccaccggcaggaactggaatggaccagagccaccatgtgtgggagtctattctgaacccagaagcccgagagagcttccaaaatgttctctactctgaaatcccctcattcagaagtttccacgaagtgcgggacgaccatgttcttaatgtaacgtttactacaagggacgatgtcacttatgcaataaagcccacttgctggccggggcttgacattattccttcctgtctggctctgcaccgtattgaaactgagttaatgggcaaatttgatgaaggtaaactgcccaccgatccacacctgatgctccgactggccattgaaactgttgctcatgactatgatgtcatagttattgacagcgcgcctaacctgggtatcggcacgattaatgtcgtatgtgctgctgatgtgctgattgttcccacgcctgctgagttgtttgactacacctccgcactgcagtttttcgatatgcttcgtgatctgctcaagaacgttgatcttaaagggttcgagcctgatgtacgtattttgcttaccaaatacagcaatagtaatggctctcagtccccgtggatggaggagcaaattccggatgcctggggaagcatggttctaaaaaatgttgtacgtgaaacggatgaagttggtaaaggtcaaatccggatgagaactgtttttgacaggcccatgatcaacgctcttcaactggggcctggaaattgcttacgatctgaagtgaggagcgtctctgcctcgctgcccattatctgggatgtgaggagcccctctgcccggccgcccagtatgggaagtgaggagcgcctcttcccggccgtcatcccctctaggaagtga

SEQ ID NO: 383 - DNA, 2703 bp, Homo sapiens
  SIMILAR (1183)..(1953): 951254mologous to Escherichia coli UDP-N- acetylmuramoylalanine-D-glutamate ligase,accession number D10483,Smith-Waterman Score=1297.
atgactcttaacgagcatgctgccttcaagcatctgtttaacaaagcacatcttgcaccgcccttaatccatttaaccctgagtggacacagcacatgtttcagagagcacagggttggggacacaccacagacagagaggaggaagacaagaacaaagagaaagagccacagacaaacaaccaagacacaaacacgaaagaaacaaacaaacaagaaacaaacacaaaacaaaacaacaggacaaacacagagagagccccaagaagagaggacgaaaaccacaccccacaacagcaaagaacacaggaacaggaaagcaaagggacacgaggcactaactgacagcaccaaggacggggaggcagagaagaccgaaagaggaagaacgtcgcggcacacagggactgcctgcgttacaagcaggacgggaaacgccggacaggcagacacgggggaccgcgagcgggagcgggcggacgacgagagacccaacgaacaaaaaacagccgaaccgaaggagggagcgaaagcgccgcaagcctatccaaatcaggcagtaagggcagagacagaagctgtgtgcttgggggagagagagaaggaagtttgcagacagctttgccttggaagctactaccagcacccacctcccctccccgccacccacaataaatcacagtactgggtccaactccaaacagtaaagcacaaagagaaattccttccatatgagggaagagaaaaaaccggagatagtaaagaacggaactttcgcttcgcctgcaatcgctttcgccagcagcgttttaccggtacccggaggaccgaccatcaagacgcctttcgggatcttaccgccgagtttctggaagcggctcggctcgcgcagatactcaaccagttcagcaacttcttcttttgcttcgtcgcagcccgcaacgtcagcaaaggtcgttttgatctgatcttccgtcagcatgcgcgctttgctcttaccaaacgacatggcacctttgccaccgccgccctgcatttgacgcatgaagaagatccagacaccaatcagcaacagcatcgggaaccaggagatgaagatagaagccagcaggcttggttcttcaggcggttcaccgacaaccttgacgttcttggtcaacaggttaccaacgaaatctgcggtagcagcgacattctgaacgtgactgaagatcatatggatcgctatccgtttggtttacaacagtatcgtgcagcaaaactgcgcatttacgaaaacgcgaaagtttgcgtggttaatgctgatgatgccttaacaatgccgattcgcggtgcggatgaacgctgcgtcagctttggcgtcaacatgggtgactatcacctgaatcatcagcagggcgaaacctggctgcgggttaaaggcgagaaagtgctgaatgtgaaagagatgaaactttccgggcagcataactacaccaatgcgctggcggcgctggcgctggcagatgctgcagggttaccgcgtgccagcagcctgaaagcgttaaccacattcactggtctgccgcatcgctttgaagttgtgctggagcataacggcgtacgttggattaacgattcgaaagcgaccaacgtcggcagtacggaagcggcgctgaatggcctgcacctgggtggcgatggtaaatcggcggactttagcccactggcgcgttacctgaatggcgataacgtacgtctgtattgtttcggtcgtgacggcgcgcagctggcggcgctacgcccggaagtggcagaacaaaccgaaactatggaacaggcgatgcgcttgctggctccgcgtgttcagccgggcgatatggttctgctctccccagcctgtgccagccttgatcagttcaagaactttgaacaacgaggcaatgagtttgcccgtctggcgaaggagttaggattcagtatcctggtctggatctccacggcgctaaagggctgggtgatgggctcgcgggaaaaagataccgacagcctgatcatgtacgatcgcaccttactgtggctgaccttcggcctcgcggcgattggctttatcatggtgacctcggcgtcaatgcccatagggcaacgcttaaccaacgatccgttcttcttcgcgaagcgtgatggtgtctatctgattttggcgtttattctggcgatcattacgctgcgtctgccgatggagttctggcaacgctacagtgccacgatgctgctcggatctatcatcctgctgatgatcgtcctggtagtgggtagctcggttaaaggggcatcgcgttggatcgatctcggtttgctgcgtatccagcctgcgagactacaagcggtccgctaccagatctacgttggcactgatgaacctgtctccacaaaaaatacaaaaattagccagacatgcagacaacacaaatctaggcgtttgccatttcccacgttgggggtccctttgttgttcgccgttttcggccacgtatcgccctcgactaagttacgggactttttggggaatttaggtttcgcgtggaccggcgagtaccctggcacccacgtctcagattttactcaccgcgttctgtgctttagtgatggagctgtggagtttttgtttaatgatatagcttcagttttacaagataaaaagagttacagagatggatggtag

SEQ ID NO: 384 - DNA, 489 bp, Homo sapiens
  SIMILAR (127)..(309): 1001254mologous to Homo sapiens Human SULU3 protein,accession number Y55937,Smith-Waterman Score=294.
atgactcttaacgagcatgctgccttcaagcatctgtttaacaaagcacatcttgcaccgcccttaatccatttaaccctgagtggacacaacacatgtttcggagagtaccgggttgggggtaagctgcgtttggatgaagcacaggaagcagagtgccaggttttgaagatgcagctgcagcaggaactggagctgttgaatgcgtatcagagcaaaatcaagatgcaagctgaggcacaacatgatcgagagcttcgcgagcttgaacagagggtctccctccggagggcactcttagaacaaaagaagctgtccgcctcagagcctgggggctattgcggactcccatactgctacctcgaggtaccccttgcattggccctgaagggtgaccccatggctggggtccaccttgcattggatggccccaagcttgtggtgggccacccatgggatgaccccagtgaggtcctggacccccagtag

SEQ ID NO: 385 - DNA, 852 bp, Homo sapiens
  SIMILAR (852)..(733): 901254mologous to Homo sapiens FKSG60,accession number AF336887,Smith-Waterman Score=196.
tcacatacagtttttggagtatgtttctacatttgttacctggcaacattgctgcactgggacgcgaagttgtattggttcccagcagaccctcgctgttcgtactgtagaaggcagaagttgttttcctccgcggggatttagaagagaaggcacaaggctagtggggtttggctgacagatgggctgatgcgcttcggtgacatgacccagaaccaggcactgggcaggggatgtggactcttgtcctgtcccaacaacagctccctgtaacgtttcttgaagaatgcttgctagggaaaagttcccatggtaactgtttttaaaagagttttgtagcatcaacaggttagacaggaagtcaaaatcatggagctcagcagcatcccctataagcacgtgctcctttttaaccacccctaacaaagacactgaagcaccctgttcataagccctgatgggcactggagggtctggccaggttgggctggatttcaggggacctgatttgtgtttccctgtgcagtgctcgtttccatcacaatctttaaggaggaggccttttccatccactggactcttaccatcgtgcctgactctagggtcaaccaagtctggtcccaagcagaatgctatggaactcttcatgtctccccaccctgcatccacatcttgctgtgtgccggcacaccaggtaacttccacacggccacagagagcatccctggcagccccaaccccgtgctctctgaaacatgtgctgtgtccactcagggttaaatggattaagggcggtgcaagatgtgctttgttcaacagatgcttgaaggcagcatgcttgttaagaatcat

SEQ ID NO: 386 - DNA, 4050 bp, Homo sapiens
  SIMILAR (838)..(1152): 1001254mologous to Homo sapiens bone morphogenic protein type II receptor,accession number U25110,Smith-Waterman Score=552.
atgtcccagcgggtgaggcgcaatgggtcccccacgccggccggctcccttgggggtggtgcggtggccacggccgggggacccgggagccgcttgcagcccatgagggcgacggttccgttccagctgaagcagcagcagcagcagcaacatggcagccccacgcggacgcggacggcggcggcggcaacaacaacggtggctgctgtggtggcgcctcaggccccgcaggcggcggcggcggcggtggccgcgcacctgctcgcgcagaccagccccacgcgcggcggcgggaacgcgacgcgcgcaccagccccacggtgggccaacgcagaacgggcgcgtccgcgacgtccacgcgaggcaccagccccacgcgcagcgccgcgcctggagctcgcgggagcccccacggccgccgccgccgccgccgctgctgggcaccgtgtcgtcgcccagctcgtcgcccacccacctgtggaccggcgaggtgagcgcggccccacccccagcccgcgtccggcatcggaggaggtctccggagcagagccgaagctcgccggagaagaggagccccagcgccccggtttgcaaagcaggcagagaaagctctggcagagaggctcagatgctgagaaattgtctggagaactgttcatagaaactgcaggtgttctccacactggctgtgaatggaaatggtattggattgtcactgcagagaagcagtttattgactgtagcacattagatttaaatggattccctggaagtgaaccaagtattatgaattccttacttggcaacctactctatactggaagtaaaaagttttcagatcattataaacctgcaatttcccatcgagatttaaacagcagaaatgtcctagtgaaaaatgatggaacctgtgttattagtgactttggactgtccatgaggctgactggaaatagactggtgcgcccaggggaggaagataatgcagccataagcgaggttggcactatcagatatatggcaccagaagtgctagaaggagctgtgaacttgagggactgtgaatcagctttgaaacaagtagacatgtatgctcttggactaatctattgggagatatttatgagatgtacagacctcttcccaggggaagggagtgtacaccgtgccaaagcaccccttgggacaaaggagacgagagtacagggtctcctgtgcctgagagctccctgcttgcgcactgaaggtgactgtgccccttgcagcagaggcaggtgtggtgctggaggagtgtgtttcaaccccagtgggcaggcagcattggtgctcaagaagggacacagagagggggacttctcccctacaatcattgctgtgtacatagccaggctgttcctgtggggggttggcacaggtgtgcctatggatggtcaatgcagggctattaggggtgggtgcaccccaactggcagtgttcccaccaccccaggcccggcttgcatgaagagtagggcccctctccctctctacatggagcaacagttttcctgcagtagagatcaacgaagccacaaagttgtctgtgttcagctgagggaagaggttcccacgggaagccgtttcagtggagggctctgggacaggcatttctgtggccctcagctatattgcagcctagagacaaacgacattgcctatttcagggtcacaaagcctcgggacaggggtgtgattgggaggcagatggcattccttcttggtcaggacatagagctggtgcagccctctctgcctgtgatggaaacctcagcgcttttcaccacaagcccccgaccagcctcatcagggtttgtgcttccactgtcattggggtatccgaaggtgagcttagcagtccagctgcacccagcttcgtcttcctttcctgggagaactcagggcacccagcattccacagatcagtccacccacagatcagcccaccgcctgagacaacagacagcccctcccagtaaacaaagattaagcacgcacacaccctgggcatctggctcttacccgtattcgccacctgctggtctagagacggaactgcacaacccaatacaaaaccttttgaccgaagtgcacagcgctatgaaccagcatctgtttaacaaagcacatcttgcaccgcccttaatccatttaaccctgagtggacacagcacatgtttcagagagcacagggttggggctgctggcgtcccaatgaggcaccgccccccgggaaacggcaacggccgggatcccccgcgtgcgcggcccaaccatccggcactgcaacgaagccggcacgcacaggcccacggggaggatcaatctccccagccggcgagggggcctcacgatcccgaagatcccgaagcacagttgggacgcgggaagcatgccagggctccccttgagagatcagagggcggggacactaggactggagcgaggcaagagggcgtcgcgggctggacagagaaattaaaagggaagctggaggaggtggaaaaaaggcgacagcttccagctacgtggagagttgaggttaaagtaaagcctgagcccgagggaggtgaacgatgcagggagccatgcacgcaacgctggacggcagagcgaacacaagaagcggagagcggagagaagagaaaaggaaaggggaggggagggaggaggggagtggaagagagagagagacaacctacagaatgggagaaaatatttgcaaactatacatctgacaaaggaatgaagccgcagatcctcgcgctgagtgtcacagctcttacagatggtgtccggagtttgttccctcagatgttcagatgtgtccggagttttttgcctctgtgggtttgcggtcttgctgactgcaggcatgaagcagtgagtatcacagctcataaaggtagtgcggacccaaagagtgagcagcagcacaatttattgccaagagcaaaacaagagacactccacagggtggaaggacactggagggaatccgtaccagagtaccagatggcttttcagacagaggttggaaaccatcccacttttgaggatatgcaggttctcgtgtctagggaaaaacagagacccaagttcccagaagcctggaaagaaaatagcctggcagtgaggtcactcaaggagacaatcgaagactgttgggaccaggatgcagaggctcggcttactgcacagtgtgctgaggaaaggatggctgaacttatgatgatttgggaaagaaacaaatctgtgagcccaacagtcaatccaatgtctactgctatgcagaatgaacgaaaaatgtacgtttggaagaaaatgaaaaacaactcagactttaaaatcagaggtgttaaatttggagagacagtttgtcataaatatccatcagaggaatcactatctaagtctgcagacccagcgaaccctgaatccacttgcctggtatcgcttaagccgaccccagcgttcaaaccaccagtttcaccacctggcggcgtggtattccggctgacccggaagcgtccagttgagctccagagaaatatctccgtcagcattgatgcgaggcttaccgcaccggttaatgagacattgtcggcgctcaccttgagttccgatggtaatgcctgcgttaatgaacagctttcgtcctgtttctcacgtttaaggcacaagtttgattgcggaaaattaagcacccgttccagttcgcgaaacgccgtttgccgatgcccggatcgcgtcagtcacgttcgcgttatccagttgcaaacgccagtttttagaggattaaataacggatcgggactggacgtatctgcctgggtatgtacggttattgcacagtcaggtgccagcccggcggcgaacgtcgcctgttttacgggtacgctcgtcgacatcagcaataatcgcgacctgaccagactgcgggcagccctttttcgccagcaatccgtcggctaccagacgctggcgttggtaatgtccgagataggcgattag

SEQ ID NO: 387 - DNA, 3078 bp, Homo sapiens
  SIMILAR (859)..(2955): 981254mologous to Human endogenous retrovirus env,accession number X82272,Smith-Waterman Score=3668.
ggcctttgactaaagcaaatgaacaagctgacttactggtatcatctgcactcataaaagcacaagaacttcatgctttgactcatgtaaatgtagcaggattaaaaaacaaatttgatgtcacatggaaacaggcaaaagatattgtacaacattgcacccagtgtcaagtcttacacctgcccactcaagaggcaggagttaatcccagaggtctgtgtcctaatgcattatggcaaatggatgtcacgcatgtatcttcatttggaagattatcatatattcatgtaacagttgatacttattcacatttcatatgggcaacttgccaaacaggagaaagtacttcccatgttaaaaaacatttattgtcttgttttgctgtaatgggagttccagaaaaaatcaaaactgacaatggaccaggatattgtagtaaagctttccaaaaattcttaagtcagtggaaaatttcacatacaacaggaattccttataattcccaaggacaggccatagttgaaagaacaaatagaacactcaaaactcaattagttaaacaaaaagaagggggagacagtaaggagtgtaccactcctcagatgcaacttaatctagcactctatactttaaattttttaaacatttatagaaatcagactactacttctgcagaacaacatcttactggtaaaaagaacagcccacatgaaggaaaactaatttggtggaaagataataaaaataagacatgggaaatagggaaggtgataacgtgggggagaggttttgcttgtgtttcaccaggagaaaatcagcttcctgtttggatacccactagacatttgaagttctacaatgaacccatcggagatgcaaagaaaagcacctccgcggagacggagacaccgcaatcgagcaccgttgactcacaagatgaacaaaatggtgacgtcagaagaacagatgaagttgccatccaccaagaaagcagagccgccgacttgggcacaactaaagaagctgacgcagttagctacaaaatatctagagaacacaaaggtgacacaaaccccagagagtatgctgcttgcagccttgatgattgtatcaatggtggtaagtctccctatgcctgcaggagcagctgcagctaactataccaactgggcctatgtgcctttcccgcccttaattcgggcagtcacatggatggataatcctatagaagtatatgttaatgatagtgtatgggtacctggccccatagatgatcgctgccctgccaaacctgaggaagaagggatgatgataaatatttccattgggtatcgttatcctcctatttgcctagggagagcaccaggatgtttaatgcctgcagtccaaaattggttggtagaagtacctactgtcagtcccatcagtagattcacttatcacatggtaagcgggatgtcactcaggccacgggtaaattatttacaagacttttcttatcaaagatcatttaaatttagacctaaagggaaaccttgccccaaggaaattcccaaagaatcaaaaaatacagaagttttagtttgggaagaatgtgtggccaatagtgcggtgatattacaaaacaatgaatttggaactattatagattgggcacctcgaggtcaattctaccacaattgctcaggacaaactcagtcgtgtccaagtgcacaagtgagtccagctgttgatagcgacttaacagaaagtttagacaaacataagcataaaaaattgcagtctttctacccttgggaatggggagaaaaaggaatctctaccccaagaccaaaaataataagtcctgtttctggtcctgaacatccagaattatggaggcttactgtggcctcacaccacattagaatttggtctggaaatcaaactttagaaacaagagatcgtaagccattttatactgtcgacctaaattccagtctaacagttcctttacaaagttgcataaagcccccttatatgctagttgtaggaaatatagttattaaaccagactcccagactataacctgtgaaaattgtagattgcttacttgcattgattcaacttttaattggcaacaccgtattctgctggtgagagcaagagagggcgtgtggatccctgtgtccatggaccgaccgtgggaggcctcaccatccatccatactttgactgaagtattaaaaggtgttttaaatagatccaaaagattcatttttactttaatagcagtgattatgggattaattgcagtcacagctacggctgctgtagcaggagttgcattgcactcttctgttcagtcagtaaactttgttaatgattggcaaaaaaattctacaagattgtggaattcacaatctagtattgatcaaaaattggcaaatcaaattaatgatcttagacaaactgtcatttggatgggagacaggctcatgagcttagaacatcgtttccagttacaatgtgactggaatacgtcagatttttctattacaccccaaatttataatgagtctgagcatcactgggacatggttagacgccatctacagggaagagaagataatctcactttagacatttccaaattaaaagaacaaattttcgaagcatcaaaagcccatttaaatttggtgccaggaactgaggcaattgcaggagttgctgatggcctcgcaaatcttaaccctgtcacttgggttaagaccattggaagtactacgattataaatctcatattaatccttgtgtgcctgttttgtctgttgttagtctgcaggtgtacccaacagctccgaagagacagcgaccatcgagaacgggccatgatgacgatggcggttttgtcgaaaagaaaagggggaaatgtggggaaaagcaagagagatcagattgttactgtgtctgtgtagaaagaagtggagattcaccgaaaattgatgagctctcctccttcacacgtaactttaaggcgatcatgtcggggacaccacttgcagagcttatagtttacaatgaatgccacgaaatgg

SEQ ID NO: 388 - DNA, 2307 bp, Homo sapiens
  SIMILAR (2132)..(1488): 731254mologous to Homo sapiens Human PRO1342 (UNQ697) amino acid sequence SEQ ID NO:243,accession number Y99408,Smith-Waterman Score=684.
tcagctgttgttgttgtcgtgtatcatcatataagttgtttctggctggtcaattacctggtagagctgaattatatttgggcggttgggtgtcttcatgatactcatctttctcatcttagcatcacccacactacctagcacagtgccttcgatgggtcctttgctcagcaaatgtttgaatggcagagtcaggactgaaagccggtgctccttccccaaaccgcacaactccttgccacgctgactgccccgagagtggggcgggcactcaggcatatcacagctgagcatatgatggatggctaacacttggacttgctgcggcacctccacggcagaaatggagaagacatggaggcagaagatcttggagccattgtagccgaccacaaagccctgcagcttctgccggtgcatagggaaggtgctggctttgatgttgaggtagcctcctcccgagaagcagagcatgcatgtcctcacactgggtgttccaggccacactgttggcgtttggttccccgtctgggaagtgaggagcgtctctgcctggccgcccatcgtctgggacgtgaggagcccctctgcctggctgcccagtctggaaagtgaggagcgtctctgcccggccgccatcccatctaggaaacatttaattttggcttctgctgctagccggatcttcattgccaaaagaagcacccaaccctctgcagtggctattggccgaccttccgtaccccagtgcactatgcggctttcagttaataactgctctaggccacctggcattttcaaggcatccctgcactcacacagaggtacacaggcactcaccacacagaagaagagcccagcaaagagccccacggccgccacaaccgagaccagggtgatgaggaagatttcccacggcaccagggacccaccaggcttcgcctcactcactgcagtagatgcactatgggaagttgtgtgcattccagtcagagctgctgttccagagcctgcagaggtcacactggacccagagttggtggctgtgttggccccactggaggttgtgctggactcagaattggtggcagtgctggccccactggacactgtgctggactcagagttggtggctgtgctggccccactggaggtcgtgctggactcagaggtggtggctgtgctggccccactggacactgtgctggactcagagttggtggctgtgctggtcccactggaggtcgtgctggacccagagttggtggctgtgctggccccactggaggttgtgctggactcagagttggtggctgtgctggccccactggaggtcgtgctggactcagagttggtggctgtgctggccccactggaggttgtgctggagtcagagttggtggctgtgttggccccactggaggttgtactggactcagagttggtggctgtgttggccccactggagggtgtgctggactcagaattgagttggtggctgtgccggccccactggacactgtgctggactcagagttggtggctgtgccggccccactggaggtcgtgctggactcagagttggtggctgtgccggccccactggagggtgtgctggactcagagttggtggctgtgctggccccactggaggtcgtgctggactcagagttggtggctgtgccagccccattggaggtcgttctggactcagagttggtggctgtgctggccccactggaggttgtgctggactcagagttggtggcagtgctggccctactggacactgtgctggactcagagttggtggctgtgctggccccactggaggttgtgctggactcagagttggtggctgtgctggcctcactggaggttgtgctggagtcagagttggtggctgtgctagccccactggaggttgtgctggagtcagagttggtggctgtgctggccccactggagggtgtgctggactcagagttggtggctgtgctggccccactggaggttgtgctggactcagagttggtggctatgctgatcccactggacgctgtgctgaactcagagttggtggctgtgctgatcccactggaggttgtatggaactcagagttggtgactatgctgaccccattggaggtcacgctggaccctgagatggtggctgtgctgaccccactggaggtcacactggacccagagttggtggctgtgctggctccactggagatcacactggatccagtgttggcagaggtgctagtctcattggaatttgttgctgaagaaatcatataa

SEQ ID NO: 389 - DNA, 642 bp, Homo sapiens
  SIMILAR (1)..(144): 871254mologous to Homo sapiens FKSG61,accession number AF338190,Smith-Waterman Score=225.
atgactcttaaggagcatgctgccttcaagcatctgtttaacaaagcacatcttgcaccgcccttaatccattcaaccctgagtggatacagcacatgtttcagagaacacagggttggggcacacaataatgataatatggacagttacaacatggatcataataaaatgactcacacggatctttatttattatggcattacctgtgcatagagaaagctctttcgaaagaaactgccccacagctttcagagctgtcttatccaaaagaagatcttctggagccacaggaacagcttcccccacctcctttaccgcctcctgtttcccaggttgatgctgctattggattactaatgccgcctcttcagacccctgttaatctctcagttttctgtgaccacaactatactgtggaggatacaatgcaccagcggaaaaggattcatcagctagaacagcaagttgaaaaactcagaaagaagctcaagaccgcacagcagcgatgcagaaggcaagaacggcagcttgaaaaattaaaggaggttgttcacttccagaaagagaaagacgacgtatcagaaagaggttatgtgattctaccaaatgactactttgaaatagttgaagtaccagcataa

SEQ ID NO: 390 - DNA, 3639 bp, Homo sapiens
  SIMILAR (121)..(3354): 991254mologous to Homo sapiens zinc finger protein,accession number L11672,Smith-Waterman Score=5980.
atgactcttaacgagcatgctgccttcaagcatctgtttaacaaagcacatcttgcaccgcccttaatccatttaaccctgagtggacacagcacatgtttcagagagcacagggttgggggtatatgtcctcattttcctcaagacttttggccagagcagagcatggaagattcttttcaaaaagtattactgagaaaatatgaaaaatgtggacatgagaatttacagttaagaaaaggttgtaaaagtgtggatgagtgtaaggtgcacaaagaaggttataataaacttaaccagtgtctcacaactgcccagagcaaagtatttcaatgtgggaaatatttgaaagtcttctataaatttttaaattcaaacagacatacgataagacatactggaaagaaatgcttcaaatgtaaaaaatgtgtcaagtcattttgcatccgtttacacaaaacccaacataaatgcgtttatattacagagaagtcctgtaaatgtaaagaatgtgaaaaaacctttcattggtcctcaacccttactaatcataaggaaattcatactgaagataaaccctacaaatgtgaagaatgtggcaaagcttttaagcagctctcaacccttactacacataaaataatctgtgctaaagagaaaatctacaagtgtgaagaatgtggcaaagcatttctatggtcctcaaccctaactagacataagaggatacacactggagagaaaccctacaaatgtgaagaatgtggcaaagcttttagccattcttcaacccttgctaaacataagagaattcatactggagagaaaccctacaaatgtgaagaatgtggcaaagcttttagccgttcttcaacccttgctaaacataagagaattcatactggagagaaaccctacaaatgtaaagaatgtggcaaagcttttagcaattcctcaacccttgctaatcataagataactcatactgaagagaaaccctacaaatgtaaagaatgtgacaaagcttttaagcgactctcaacccttactaaacataaaataatacatgctggagagaaactctacaaatgtgaagaatgtggcaaagcttttaatcgatcttcaaatcttactatacataagtttattcatactggagagaaaccttacaagtgtgaagaatgtggcaaagcatttaactggtcctcaagccttactaaacataaaagatttcatactagagagaaacccttcaaatgtaaagaatgtggcaaagcatttatatggtcttcaaccctaactagacataagaggatacacactggagagaagccctacaaatgtgaagaatgtggcaaagcttttaggcaatcctcaacccttactaaacataagataattcatactggagagaaaccctacaaatttgaagaatgtggcaaagcttttagacaatccttaacccttaataaacataagataattcatagtagagagaaaccctacaaatgtaaagaatgtggcaaagcttttaagcaattctcaacccttactacacataaaataattcatgctggaaagaaactctacaaatgtgaagaatgtggcaaagcttttaatcattcctcaagtctttctacacataagataattcatactggagagaagtcttacaagtgtgaagaatgtggcaaagcatttctatggtcctcaaccctaagaagacataagaggatacacactggagagaaaccctacaaatgtgaagaatgtggcaaagcttttagccattcttcagcccttgctaaacataagagaattcatactggagagaaaccctacaaatgtaaagaatgtggcaaagcttttagcaattcctcaacccttgctaatcataagataactcatactgaagagaaaccctacaaatgtaaagaatgtgacaaaacttttaagcgactctcaacccttactaaacataaaataatacatgctggagagaaactctacaaatgtgaagaatgtggcaaagcttttaatcgatcttcaaatcttactatacataagtttattcatactggagagaaaccttacaagtgtgaagaatgtggcaaagcatttaactggtcctcaagccttactaaacataaaagaattcatactagagagaaacccttcaaatgtaaagaatgtggcaaagcatttatatggtcttcaaccctaactagacataagaggatacacactggagagaagccctacaaatgtgaagaatgtggcaaagcttttagccgttcctcaacccttactaagcataagacaattcatactggagagaaaccctacaaatgtaaagaatgtggcaaagcttttaagcactcctcagcccttgctaaacataaaataatacatgctggagagaaactctacaaatgtgaggaatgtggcaaagcttttaatcaatcttcaaatcttacgacacataagataattcatactaaagagaaaccttccaagagtgaagaatgtgacaaagcatttatctggtcctcaacccttactgaacataagagaattcataccagagagaaaacctacaaatgtgaagaatgtggcaaagcatttagccagccttcacaccttactacacataagaggatgcacactggagagaaaccctacaaatgtgaagaatgtggcaaagcttttagccaatcctcaacccttactacacataagataattcatactggagagaaaccctacaaatgtgaagaatgtggcaaagcttttaggaaatcttcaactcttactgaacataagataattcatactggagagaaaccctacaaatgtgaagaatgtggcaaagcatttagccaatcctcaaccctaactagacatacgaggatgcacactggagagaaaccatacaaatgtgaagaatgtggcaaagcttttaatcgatcctcaaagcttactacacataagataattcatactggagagaaaccttacaagtgtgaagaatgtggcaaagcatttatatcatcctcaaccctaaatggacataagagaattcatactagagagaaaccctacaaatgtgaagaatgtggcaaagcatttagccaatcttcaaccctaactagacataagaggttgcacaccggagagaaaccctacaaatgtggagaatgtggcaaagcctttaaagagtcctcagctcttactaaacataagataattcacactggagagaaaccctacaaatgtgaaaaatgtggcaaagcctttaaccagtcttcaatccttactaaccataagaaaattcatactatcacacctaaaattcatactagagagaaaccctacaaatataaagaatgtggcaaatcttttaaccggtcttcaacctttactaaacataaggtaattcatactggagtaaaactctacaaatgtgaagaatgtggcaaatcctttttctggtcctcagccctaaccagacataagaaaattcatactggacagcaaccctacaaacaggaaaaatttggcaaagcctttaaccagttttcacaccttactacagataagataactcatattggagagaaatcttacaagtgtgaataa

SEQ ID NO: 391 - DNA, 540 bp, Homo sapiens
  SIMILAR (371)..(451): 451254mologous to Homo sapiens FKSG60,accession number AF336887,Smith-Waterman Score=48.
atgactcttaaggagcatgctgccttcaagcatctgtttaacaaagcacatcttgcccagcccttaatccatttaaccctgagtggacacagcacatgtttcagagagcacagggttgggggaaagaggttggagtttctgagaggaaggctagaaacacagaaggaggatttgatgggtggacagtgtgtggttcaccccacctccctacaatgcagaagaggccatgggcctgcaggagaccttctggaaccattgactgtgtcactggagaaatcagaagttgcacctggtggcggaatgggaatagagctggaaggagaaactggagcggaggcagtgaaaagtttcacatatttggaaatccaaattaacactgatgcaaacaaaagggcccctaagtcattgggaaccggtttggtcggcatcaccacggagacctggggggcagttgtcagaggagagctggctcagatgtcagagatgcacaaacttgcatatgctcagtccacaagcaacacccccgcagctggcatctaa

SEQ ID NO: 392 - DNA, 3225 bp, Homo sapiens
  SIMILAR (2659)..(3114): 421254mologous to Haemonchus contortus ornithine decarboxylase,accession number AF016891,Smith-Waterman Score=315.
atgctgcgctctctccgcctgcagcaggagtggctggaatgggaggaccggcggcgggcggctgcccagcagtgccggagccgcaggtgcccgtcaagtccccgggcccgactcactaggcctcaccgttcctgccgagacccagctgtccaccaagccctcttctccggcaacctgcagcaggtccaagccctgttccaagatgaagaggccgccaacatgattgtggagactgtgagcaaccagctggcctggtcggctgaacaggggttctgggtgctgacccccaagaccaagcagacggcacccctcgccatcgctacagcccgaggctacacagactgtgctcgacacctgatccggcagggagctgagctggatgcccgtgtcgggggtcgcgctgccttgcatgaggcctgtgcccgagcccagtttgactgtgtgcggctgctgctgaccttcggagccaaggctaatgtgctgactgaggagggcacgactcctttgcacctctgcacgatccccgagtccttgcagtgcgccaagttgctgctggaagcaggagcgacggtgaacctggcagcaggcgagagccaggagacgcccctgcacgtggcggcggcgcgcggcctggagcaacatgtggctctgtacctggagcatggcgccgacgtgggcctgcgcaccagccagggcgagactgcgctgaacacggcgtgcgctggggccgagggcccaggtagctgcaggcgacaccaggctgcggcgcgccggctcctggaggctggagctgatgcccgggcggccgggcgcaagcgccacacgccgctgcacaacgcttgtgccaacggctgcgggggcctggccgagctgctgctgcgttacggggcccgcgctgaggtccccaatggggcgggccacacgcccatggactgtgcgctgcaggccgtccaggactcccccaactgggagcctgaagtccttttcgccgcactgctggactacggggcgcagccagtgcgccctgagatgctgaaacactgcgccaacttccctcgggccctggaagtcctgcttaatgcctatccttgtgtcccatcctgtgagacctgggtggaggcggtgctcccagagctgtggaaggagcacgaagccttctacagctcggccctgtgcatggtgaaccagccaaggcagctgcagcacctggcccgactagctgtgcgcgctcggttgggaagccgctgccggcagggtgccacccggctgccactgcccccgctcctcagggactacctgctgctgcatatgaagcggagccgctgccgcgaccgaccgcagccgccgccgcccgaccgccgggaggatggagttcagcgggcagcggagctgtctcagtctttgccgccgcgccggcgagcgccgcccgggaggcagcggctggaggagcggacgggccccgcggggcccgagggcaaggagcagccgcctgccttggcctcccaaagtgccgagattgcagcctctgcccggctgccaccccgtctgggaaggcttctgggattccagaaagcctgcaggtgttggagcctcaaccctcatatcctcatggccctgctgaggtctcttgtcccacctgacaagaaacacccacaggtgtggaggggcaggccaccccttcatctggcgcccaacgtggggcttttctctagggtgaaggtacgctcgagcgtggtcattgaggacaagtcaatgagagattcccgaagaggcctatctcaaagaagaagaaggagaaagaagaagaagagaggtagcagcagcaagaagaagaagaggaggaagaagagaaagaagaagaagaggaagaagaggaagaggaggaagaataggaagaagaagaagaagaggaagaacaagaggaagaagaagaggaagaaggaagaaaagaaagaagaggaagaagaaagaagaaagaaggaggaggaagatgaagaaggaagaggaagaggaagaaggaagaggaagaggaagaagaggaagaaaagaagaagcagaaagaagaaagaaacagcagcagcagcagcagctggagaaaggctgggaaaatggtggccaggagagtgtccggtagagtgtgttgcatactttctaaggcggcggctgcagcagcggctccatccagcccgtcagctcctcctgcaaggcatggctggctacctgagtgaatcggactttgtgatggtggaggagggcttcagtacccgagacctgctgaaggaactcactctgggggcctcacaggccaccacggacgaggtagctgccttcttcgtggctgacctgggtgccatagtgaggaagcacttttgctttctgaagtgcctgccacgagtccggcccttttatgctgtcaagtgcaacagcagcccaggtgtgctgaaggttctggcccagctggggctgggctttagctgtgccaacaaggcagagatggagttggtccagcatattggaatccctgccagtaagatcatctgcgccaacccctgtaagcaaattgcacagatcaaatatgctgccaagcatgggatccagctgctgagctttgacaatgagatggagctggcaaaggtggtaaagagccaccccagtgccaattttcacattggcagtggctgtcctgaccctcaggcctatgctcagtccatcgcagacgcccggctcgtgtttgaaatgggcaccgagctgggtcacaagatgcacgttctggaccttggtggtggcttccctggcacagaaggggccaaagtgagatttgaagagattgcttccgtgatcaactcagccttggacctgtacttcccagagggctgtggcgtggacatctttgctgagctggggcgctactacgtgacctcggccttcactgtggcagtcagcatcattgccaagaaggaggttctgctagaccagcctggcagggaggaggaaaatggttccacctccaagaccatcgtgtaccaccttgatgagggcgtgtatgggatcttcaactcagtcctgtttgacaacatctgccctacccccatcctgcagaagtactcgtcttcctgttgcatgctggctctcacccactccactcccttcattggctcctcagaagaggagatgatggtcccagcccactgccacgccccccaccgggatctttgctttggctga

SEQ ID NO: 393 - DNA, 7552 bp, Homo sapiens
  SIMILAR (3839)..(6463): 951254mologous to Homo sapiens Gag-Pro-Pol protein,accession number AF164614,Smith-Waterman Score=4388.
atgactcttaacgagcatgctgccttcaagcatctgtttaacaaagcacatcttgtatcgcccttaatccatttaaccctgagtggacacagcacatgtttcagagatcacagggttgggggacaggactttatccttcttcgcctttggagtcaggggcatcaggagtccaaaacagccagtgctagtctcagcttccaattcagtgaagccatattgtgtcctctgcttggaaccaaagcccccaaaggagcagaacccagagcaaggaatgagccagccgcatattctcttccccaggttaaacaacagagacatcttagacagcttcagcagcagcaagaggttcatcatactacaagtgtggatgagatcccccagaaagctaaaactattctcttctcccaccctcgggccaagttcttgaatctggctgtttgttctagagttcatccttatcttcatttcctggaaactgagagtttaagcatgctgcctgaaactaatccaagtggttcctgctacccaacccccagacacatacaaataaccatttatgaagatgtactatgctccagagactttgatttaattgttcatgggtttggcctgggatttaaaatgtctagaaatttcgcaggtgattctagcctgcagacaacatttagtaaacactgcggtagaggaagccatactccaaccgaaacatggagccatatcaacaggaaacgctattgttttctctcagtagggatggctgaaagtagcagctgttgtataagccagcatgccaacaaagggacacagggacacatcttggagctacgaaagacaggaaaacagcaaatggcattaattctatttcatccaagagcaagtgcagatggcctggagaggcaaggtgacactctgggcagcagaatggagatggaggggttggggagaaagccatctatcaaaaacattgcaccccactcgagctctgctaagggacagactgcctcttcaagtgggtccctgactcctgtgcctcctgactgggagacaactcccagcaggggtcaacagaaacctcatacagaagagctccggctggcatctggtgggtgccccctgggacaaagtttccagaggaaggaacaggcagcaatccttgctgttctgcacccttcgctggtgatacccaggcaaatagtgtctggagtggacttccagcaaacaccagcagacctgcagaagaggggcccccaaccctgtgctctctgaaacatgtgctgtgtccactcagagttaaatggattaagggcggtgcaagatgtgctttgttaaacagatgcttgaaggcagcatgctcattaagagtcatcaccactccctaatctcaagtacccagggacacaaacactgcggaaggccgcagagacctctgcctaggaaagcaaggtattgtccaaggtttctccccatgtgataagtctgaaatatgctggcctcttgggaagggaaagacctgaccgtcccccagcccaacacccgtaaaggggtgaaggtacgctcgagcgtggtcattgaggacaagtcgacgagagatcccgagtacgtctacagtcagccttacgaacaaggaactttagatctaaaagattggaaaagaattggtaaggaactaaaacaagcaggtaggaagggtaatatcattccacttacagtatggaatgattgggccattattaaagcagctttagaaccatttcaaacagaagaagatagcgtttcagtttctgatgcccctggaagctgtttaatagattgtaatgaaaagacaaggaaaaaatcccagaaagaaacggaaagtttacattgcgaatatgtagcagagccggtaatggctcagtcaacgcaaaatgttgactataatcaattacaggaggtgatatatcctgaaacgttaaaattagaaggaaaaggtccagaattagtggggccatcagagtctaaaccacgagggacaagtcctcttccagcaggtcaggtgcccgtaacattacaacctcaaaagcaggttaaagaaaataagacccaaccgccagtagcctatcaatactggcctccggctgaacttcagtatcggccacccccagaaagtcagtatggatatccaggaatgcccccagcaccacagggcagggcgccataccctcagccgcccactaggagacttaatcctacggcaccacctagtagacagggtagtgaattacatgaaattattgataaatcaagaaaggaaggagatactgaggcatggcaattcccagtaacgttagaaccgatgccacctggagaaggagcccaagagggagagcctcccacagttgaggccagatacaagtctttttcgataaaaatgctaaaagatatgaaagagggagtaaaacagtatggacccaactccccttatatgaggacattattagattccattgcttatggacatagactcattccttatgattgggagattctggcaaaatcgtctctctcaccctctcaatttttacaatttaagacttggtggattgatggggtacaagaacaggtccgaagaaatagggctgccaatcctccagttaacatagatgcagatcaactattaggaataggtcaaaattggagtactattagtcaacaagcattaatgcaaaatgaggccattgagcaagttagagctatctgccttagagcctgggaaaaaatccaagacccaggaagtgcctgcccctcatttaatacagtaagacaaggttcaaaagagccctatcctgattttgtggcaaggctccaagatgttgctcaaaagtcaattgccgatgaaaaagcccgtaaggtcatagtggagttgatggcatatgaaaacgccaatcctgagtgtcaatcagccattaagccattaaaaggaaaggttcctgcaggatcagatgtaatctcagaatatgtaaaagcctgtgatggaatcggaggagctatgcataaagctatgcttatggctcaagcaataacaggagttgttttaggaggacaagttagaacatttggaggaaaatgttataattgtggtcaaattggtcacttaaaaaagaattgcccagtcttaaacaaacagaatataactattcaagcaactacaacagggttttcagggacaacaacccccactgtcccaagtgtttcagggaataagccagttaccacaatacaacaattgtccctcaccacaagcggcagtgcagcagtagatttatgtactatacaagcagtctctctgcttccaggggagcccccacaaaaaatccctacaggggtatatggcccactgcctgaggggactgtaggactaatcttgggaagatcaagtctaaatctaaaaggagttcaaattcatactagtgtggttgattcagactataaaggcgaaattcaattggttattagctcttcaattccttggagtgccagtccaagagacaggattgctcaattattactcctgccatatattaagggtggaaatagtgaaataaaaagaataggagggcttgtaagcactgatccaacaggaaaggctgcatattgggcaagtcaggtctcagagaacagacctgtgtgtaaggccattattcaaggaaaacagtttgaagggttggtagacactggagcagatgtctctattattgctttaaatcagtggccaaaaaactggcttaaacaaaaggctgttacaggacttgtcggcataggcacagcctcagaagtgtatcaaagtatggagattttacattgcttagggccagataatcaagaaagtactgttcagccaatgattacttcaattcctcttaatctgtggggtcgagatttattacaacaatgggaaaaaccggtgtgggtaaatcagtggccgctaccaaaacaaaaactggaggctttacatttattagcaaatgaacagttagaaaagggtcacattgagccttcgttctcaccttggaattctcctgtgtttgtaattcagaagaaatcaggcaaatggcatacgttaactgacttaagggctgtaaacgccgtaattcaacccatggggcctctccaacccgggttgccctctccggccatgatcccaaaagattggcctttaattataattgatctaaaggattgcttttttaccatccctctggcagagcaggattgtgaaaaatttgcctttactataccagccataaataataaagaaccagccaccaggtttcagtggaaagtgttacctcagggaatgcttaatagtccaactatttgtcagacttttgtaggtcgagctcttcaaccagtgagagaaaagttttcagactgttatattattcattatattgatgatattttatgtgctgcagaaacgaaagataaattaattgactgttatacatttctgcaagcagaggttgccaatgctggactggcaatagcatctgataagatccaaacctctactccttttcattatttagggatgcagatagaaaatagaaaaattaagccacaaaaaatagaaataagaaaagacacattaaaaacactaaatgattttcaaaaattactaggagatattaattggattcggccaactctaggcattcctacttatgccatgtcaaatttgttctctatcttaagaggagactcagacttaaatagtcaaagaatattaaccccagaggcaacaaaagaaattaaattagtggaagaaaaaattcagtcagcgcaaataaatagaatagatcccttagccccactccaacttttgatttttgccactgcacattctccaacaggcatcattattcaaaatactgatcttgtggagtggtcattccttcctcacagtacagttaagacttttacattgtacttggatcaaatagctacattaatcggtcagacaagattacgaataacaaaattatgtggaaatgacccagacaaaatagttgtccctttaaccaaggaacaagttagacaagcctttatcaattctggtgcatggcagattggtcttgctaattttgtgggacttattgataatcattacccaaaaacaaagatcttccagttcttaaaattgactacttggattctacctaaaattaccagacgtgaacctttagaaaatgctctaacagtatttactgatggttccagcaatggaaaagcagcttacacagggccgaaagaacgagtaatcaaaactccatatcaatcggctcaaagagcagagttggttgcagtcattacagtgttacaagattttgaccaacctatcaatattatatcagattctgcatatgtagtacaggctacaagggatgttgagacagctctaattaaatatagcatggatgatcagttaaaccagctattcaatttattacaacaaactgtaagaaaaagaaatttcccattttatattacttatattcgagcacacactaatttaccagggcctttgactaaagcaaatgaacaagctgacttactggtatcatctgcactcataaaagcacaagaacttcatgctttgactcatgtaaatgcagcaggattaaaaaacaaatttgatgtcacatggaaacaggcaaaagatattgtacaacattgcacccagtgtcaagtcttacacctgcccactcaagaggcaggagttaatcccagaggtctgtgtcctaatgcattatggcaaatggatgtcacgcatgtaccttcatttggaagattatcatatgttcatgtaacagttgatacttattcacatttcatatgggcaacttgccaaacaggagaaagtacttcccatgttaaaaaacatttattgtcttgttttgctgtaatgggagttccagaaaaaatcaaaactgacaatggaccaggatattgtagtaaagctttccaaaaattcttaagtcagtggaaaatttcacatacaacaggaattccttataattcccaaggacaggccatagttgaaagaactaatagaacactcaaaactcaattagttaaacaaaaagaagggggagacagtaaggagtgtaccactcctcagatgcaacttaatctagcactctatactttaaattttttaaacatttatagaaatcagactactacttctgcagaacaacatcttactggtaaaaagaacagcccacatgaaggaaaactaatttggtggaaagataataaaaataagacatgggaaatagggaaggtgataacgtgggggagaggttttgcttgtgtttcaccaggagaaaatcagcttcctgtttggttacccactagacatttgaagttctacaatgaacccatcggagatgcaaagaaaagggcctccacggagatggtaacaccagtcacatggatggataatcctatagaagtatatgttaatgatagtatatgggtacctggccccatagatgatcgctgccctgccaaacctgaggaagaagggatgatgataaatatttccattgggtatcgttatcctcctatttgcctagggagagcaccaggatgtttaatgcctgcagtccaaaattggttggtagaagtacctactgtcagtcccatcagtagattcacttatcacatggtaagcgggatgtcactcaggccacgggtaaattatttacaagacttttcttatcaaagatcattaaaatttagacctaaagggaaaccttgccccaaggaaattcccaaagaatcaaaaaatacagaagttttagtttgggaagaatgtgtggccaatatgattatgggattaattgcagtcacagctacggctgctgtagcaggagttgcattgcactcttctgttcagtcagtaaactttgttaatgattggcaaaagaattctacaagattgtggaattcacaatctagtattgatcaaaaattggcaaatcaaattaatgatcttagacaaactgtcatttggatgggagacagactcatgagcttagaacatcgtttccagttacaatgtgactggaatacgtcagatttttgtattacaccccaaatttataatgagtctgagcatcactgggacatggttagacgccatctacagggaagagaagataatctcactttagacatttccaaattaaaagaacaaattttcgaagcatcaaaagcccatttaaatttggtgccaggaactgaggcaattgcaggagttgctgatggcctcgcaaatcttaaccctgtcacttgggttaagaccattggaagtactacgattataaatctcatattaatccttgtgtgcctgttttgtctgttgttagtctgcaggtgtacccaacagctccgaagagacagcgaccatcgagaacgggccatgatgacgatggcggttttgtcgaaaagaaaagggggaaatgtggggaaaagcaagagagatcaaattgttactgtgtctgtgtag

SEQ ID NO: 394 - DNA, 1719 bp, Homo sapiens
  SIMILAR (2)..(109): 691254mologous to Homo sapiens Human secreted protein, SEQ ID NO: 6953,accession number G02872,Smith-Waterman Score=115.
ccttctgggttcgggcggttctcctgcctcggcctcccgagtagatgggattgtaggctcctcccaccacgcccggctaatttttgtgtttttagtggagacggggtttccaccatgttggccagcgtggtcttgaactcctgacctcaggtgattcaccagcctcggcctcccaaggtgctgggattacaggtgtgagccactgcacctggcctattattatttttaaatttttttttttaattgatcattcttgggtgtttctcgcagaggtgggatttggcagggtcataggacaatagtggagggaaggtcagcagataatctgcaagtgctcacaggtctctggtattcctaggcagaggaccctgcagccttcccacggtgtttgtgtccctgggtacttgagattagggagtggtggatgactctttaacgagcatgctgccttcaagcatctgtttaacaaagcacatcttgcaccgccctgaatgccatttgaacccttaagtggaacaccagcacatgttttcagagagcaaggggttgggggtaaggttatagattaacagcatcccaaggcagaagaattttccttaagtaacaagaaaaatggagtctccctatgtcctacttctttcctacacaagacacaagtaacaatctgatctctctttcttttcccccacattgtcccccttttctttttgacagaaccaccatcgtcatcatggccctttcttcatggtcgctgtctctttggagctgtttggtacacctgcagaaaggctgtcacttcacacttggaagattgcacagcggccaggcagaggcactcctcacttcccagacgggcggtggccaggcagagacgctcctcacttcccagacggggtcgcggccgggcagaggcgctcctcacatcccagatggggcggcggggcagaggcgctccccacatctcagacgatgggcggctgggcagagacgctcctcacttcctagacgggatggcggccgggaagaggcgctcctcacttcccagactgggcagctgggcagaggggctcctcacatcccagacgatgggcggccaggcagagacgctcctcacttcccagaaggggtggcggccgggcagaggctgcaatctcggcactttgggaggccaaggcaggcggctgggaggtggaggttgtagcgagccgagatcacgccactgcactccagcctgggcaacattgagcattgagtgaacgagactccctctgcaatcccggcacctcgggaggccgaggctggcagatcactcgcggttaggagctggagaccagcccggccaacacagcgaaaccccgtctccaccaaaaaaatagaaaaaccagtcaggcgtggcggcgcgcgcctgcaatcccaggcacttggcaggctgaggcaggagaatcaggcagggaggttgcagtgagccgagatggcgggagtacagtccagcttcggcttggcatcagagggagactagggaaaggggagaggggagaggttagtattttcaaaaatcatcatatagtacgtggttacacaactctgaatatactaaaacacattgaattgtatactttaaaggagtgaactatatctcaatatataaggggtgagttatagctcaataaagctgttaacaacaaaacaaaaatgccataccaaaaaaaaaaaaaaaaa

SEQ ID NO: 395 - DNA, 827 bp, Homo sapiens
  SIMILAR (575)..(399): 461254mologous to Homo sapiens precursor polypeptide (AA -16 to 47),accession number X16560,Smith-Waterman Score=70.
tttttttttttttttttcgatttgtatttcccttttattatataaattaccaacaaaatcctgacctgggaatcaaaaatttaatataacctcagtttaacaccattaaataagctaaatcacagagagtaatactggaatgttacccaaataataaagtaggcaaaatggcccaattattacattcccctatttcaaaaaagaggcattaagcattcacgtcataagtttaattgacaaaacatatcctagtaagggcattatgagttcctaagtttggaccccacttcccaagaggctgcaccctccttaaaaatgctccttccatatcttgttaaaatggaggaacttgaaacatcctatatgttttaacgccagattgggttgtccttacctccaaggaagggtgtagcaaatgcagatcccaaagtacaaacagcatcttaggctagtaacggaccacttggttttccactggaaaatgggcaatttcttcccaggggccctcctcataggtgggctcctacggaccaccagaggttgtggaacctccgggatgcttctgggcccaacatagccgcttgctggaaagctctgcgaaaaggcggcagagaatcgagggacagatgaaatgggcggcacctccaccaagacctttttttttcacgaccttgttccctcggtgcgcaaggactgaaaagaaagatgggaaatggggcggagccttgaggaaacgcgacaaagcggaaatcgccctggattgtgggaattgtagttcagaccattgcggagccttatcagcccccgaaggattgtgggaaatgtag

SEQ ID NO: 396 - DNA, 243 bp, Homo sapiens
  SIMILAR (118)..(14): 421254mologous to Homo sapiens glycoprotein CD28,accession number M37815,Smith-Waterman Score=60.
atggagaggaatgcaccgacaggcaccagcatgccagcaggccaccgaccaggagaactatcctatacggagtttagctggggcactgagtggccggactccagtggaaaaccttcccactccatccccttctggcttcctccatctgctgagagctacctccgctcaataaaaccttgcactcactctccaagcccaggtgtgatccgattcttccagtgcaccaagatttcagcagtttga

SEQ ID NO: 397 - DNA, 601 bp, Homo sapiens
tcttcactctagctcggagcgcatctatggtgctttagacgaccattcttcgtttcactaccaaagacatgtcggaatgcatttaggaccagcatctatagctgctggcatttttttcaaatagactgagctacattgaaaaggcagaccattatataacttgtgaagattaaatagccagagtatttctcgcatttgttctagcttacttacaaggtgaattaatgagcattctctccaaatgaagacatgacagcctcattcctaacacagaaagttatttatttcaaatacagtttcggtgggtaaataaggtggcgcattccttctacagaggacacacctaggagagcaagatacgtcccagtgaaacacagcttcgtcaccaacttcagtcaactctttggcaacatcacatcagcccatcaacttaacagatttcgagaagttttggcagaaaatgatgtactgccatgggaaatagtctacatcttcaagcaagtcctgaaagacttcctaagcagctctgacagagggagtgagcaagaggacctggaggactcagggagcatggactgctctgctccttctgtgatccaag

SEQ ID NO: 398 - DNA, 439 bp, Homo sapiens
  SIMILAR (41)..(283): 961254mologous to Homo sapiens Similar to CG11985 gene product,accession number BC000198,Smith-Waterman Score=421.
ctgcgtcctctgacctgagagcgaaggggaaagcggcgagatgactgaccgctacaccatccatagccagctggagcacctgcagtccaagtacatcggcacgggccacgccgacaccaccaagtgggagtggctggtgaaccaacaccgcgactcgtactgctcctacatgggccacttcgaccttctcaactacttcgccattgcggagaatgagagcaaagcgcgagtccgcttcaacttgatggaaaagatgcttcagccaccgcagtgcggggcacctctcccagcgtttctccggtttgccaatcctcttaagtattcctgtctccaaaggaccggctctccatggctcctgcgcctcgtgctttccgcgtacagaagtgcttgcccggggagtcccgcctgacctgccttcatgtggacccttagaacagca

SEQ ID NO: 399 - DNA, 995 bp, Homo sapiens
  SIMILAR (606)..(442): 381254mologous to Homo sapiens Human secreted protein fragment encoded from gene 7,accession number Y30863,Smith-Waterman Score=85.
  misc_feature (1)...(995): n = a,t,c or g
atcgagttcgctaccccatgnggnggaattccgccattcttctgcgacggcgcggacctggagcttccgcgcggtggcttcactctcctgtaaaacgctagagcggccgagttgttaccttgcgtcctctgacctgagagcgaaggggaaagcggcgagatgactgaccgctacaccatccatagccagttggagcacctgcagtccaaagtacatcggcacgggccacgccgatcaccaccaagtgggagttggctggtgaaaccaacacccgcgacttcgtacttgctcctacatggggccactttcgacctttctcaaactactttcgccatttgggaagaaatgagaagcaaagcgcagacgtccgctttcaactttgatggaaaaaagatgctttcagcccttgtggacccgcccaagccgaaaaaagccccgaggagaacctggagacctcctgcccttaaccccacccgaattgcggggcaaccttctccccaagcgtttttctccggggttttggcccaatccctccttaaagtattccctgtcctcccaaagggacccgggttttccatggggttcctgcggcttcgttgtttttccgcggtacagaaagtgcttgccccggggagtcccgcctgaccctgcctttcatgtggaccctttagaacagcactggggagacctagcgaggactcctgagaaactgtgctggttggagaggtcctagaagccggcgagcgtttgagaaagagggcatggcgcgtacagaagtgcttgcccggggagtcccgcctgacctgccttcatgtggacccttagaacagcactgggagaccagcaggactcctgagaactgtgctggtggagaggtcctagagccggcgagcgtttgagaagagggcatggcgctggagtgagatgggatttggcgtctcgtttttggctaattgattgtcattggctttttccataaagtttagaaatcgttc

SEQ ID NO: 400 - DNA, 789 bp, Homo sapiens
  SIMILAR (361)..(579): 321254mologous to Streptomyces coelicolor A3(2) hypothetical protein SCJ1.06,accession number AL109962,Smith-Waterman Score=78.
atgcatgttcaggggaaggcagccatccttggaagacacttttccatcagttctcttctcccaggagctctattgctgctcaccgttatcaaaggccacactcacccagaggagaagagtccaggtgcccatgagaaagctgtgacgggtgaacccaagtgcctcggggccctgccgtactgtgattccggaggaaagaaggccacgaagaagaaagatgctggggaaatgagatcaagaataaaggatggtgtcctcgtactaaaatgtatcagtctgcaagtcggccttgcctcctggattgtgagttggctgaggaccgaggccacaggatacacctttgctctcctgcctcctggcacccatcacacggagcagacccccagtaaacatgagcaaaatggagctgaattgttctgcaactgcgtgtcttgctttgaagacccctgtccctgccaggtgcctgggacacagccaggaaaccgcctctctgaggagcaccaggcctcttcccaggctgacgtgaccaactcgtctgcccctaaacaaccgcacccaccaccggcaccatgcaagggtgtctgttcacattgctgagctgggcgagatcgtctggtcagtcattacataaaacaggagcccagtgacctttgcgaagtacacaaggtggaagtcatgagcgaaagagatcatgaacgcttcaaatatggctacggagttataagcgtcatcaccaactcactgaagattaaggaatctgggaacaaattagcctgttgtagacagtga

SEQ ID NO: 401 - DNA, 1605 bp, Homo sapiens
  SIMILAR (322)..(435): 681254mologous to Homo sapiens silent information regulator 2 homolog,accession number AF160214,Smith-Waterman Score=120.
atgggggcacgttatgtggggcccactgagcgggctgaggatgaggactttggtcttattactaatgttacagaccacaagttctgggatctgaatgcaactgaaattgacttgaggccaaaacagttttcccaacaagacttcattggagtttatgcctggaacatagataccctggagcgaatagccggctggaacaggaggacttggtggaggcgcacggcaccttctacacatcaactgcgtcagcgccagctgccggcacgaatacccgctaagctggatgaaggacttcctgaaggtggacctcctcctggtcatgggtacctcctgcaggtgcagccctttgcctccctcatcagcaaggcacccctctccacccctcgcctgctcatcacaaggagaaagctggccagggacgtggcctggctgggtgaatgcgaccagggctgcctggcccttctgagctccttggatggaagagtttcttggtcacaggacgtgaccccagccaggcctggtgttgaggtcaggacctttaccaggagaagtcaatacctaccagtccagaagattcccagaggtgtgtccctggaatctccaacctctgcatgccagacctgccccatctcctggcctttctatcagcagcagctactggaagaggaggaggaagaccttgaaggaaaggaggaaggaagggggacgaccctgaagaggaaggccctgaggacgtgctcaccattcacgtcagtctctggtcagggcccggagcagctacgtggccaggcagtaccgaagcttcgggtgcgcatcgcctcagattctgggggtccccacgggtctggggcccggccacggagctgcttcaggatgtgcggcacctccttactgacctcaggatcacctggcaaaggactcctacatcagggctgtctttggaagcagggtcctgggctccccaagaaggacgaggatccaggtaatgggaggactgaagggagcccccacgggttcaagccccggctggagacggcggtgtgccaggcggtgctggcgcccctgaagccggcctgtggacacgactccgcacactccgagcaccggagctgcggcggctgcgcggcgacagacagccctgcgggcgggggcggggcctccgggggcacagggccgggaccggaagggcagagccccgcccccgccttgcggagccgcatcacgagcgccttgcgcacctccacgctgcctgcgccccgcgccgcaagtcccctgggggccgacgccttcctgccggcgctgaccgaggaactcatcggagcccggacattggggacacgcagctggacctgggtctacctgaccacgtggtttggggcgctgcaccacattgcccactaccagccgaaacagaccgcgctccccgggggctcagctccgaggcccgcgcctcctgcaccagtggcaccgcaggcggacgctgcacagaaaggatcatcccaagcccaggtgactgcccatctggctgcaagtagaagggagggccaacctgcccttaaggagccatgggcagaagagactgtgacagggaccagtgacaactag

SEQ ID NO: 402 - DNA, 351 bp, Homo sapiens
  SIMILAR (64)..(348): 531254mologous to Homo sapiens Human breast tumour-associated protein 1,accession number Y48540,Smith-Waterman Score=200.
atggggcacctggctccaaccctcacgctacctggggcatctggccctctggctgctctcctacagaaacatccggaacccttcttcgccctcgccaaggaacttatcctgggcagttcaagtgcctgtggctgttccctgcagtcgtcagcagtgctgtcgctcttccctgcgccaaccatctgtcactacttcatgcgcctgctgaaggacaaggggctatcctgcgctgctacacgcagataccctggagcgaatagccgggctggaacaggaggacttggggaggcgcacggcaccttctacacatcacactgcgtcagcgccagctgcggcacgaatacccgctaa

SEQ ID NO: 403 - DNA, 1136 bp, Homo sapiens
  SIMILAR (5)..(520): 901254mologous to Mus musculus SIR2L2,accession number AF302272,Smith-Waterman Score=832.
atggcagagccagaccgactcagattcagactctgagggaggagccgctggtggagaagcagacatggacttcctgcggaacttattctcccagacgctcagcctgggcagccagaaggagcgtctgctggacgagctgaccttggaaggggtggcccggtacatgcagagcgaacgctgtcgcagagtcatctgtttggtgggagctggaatctccacatccgcaggcatccccgactttcgctctccatccaccggcctctatgacaacctagagaagtaccatcttccctacccagaggccatctttgagatcagctatttcaagaaacatccggaacccttcttcgccctcgccaaggaactctatcctgggcagttcaagccaaccatctgtcactacttcatgcgcctgctgaaggacaaggggctactcctgcgctgctacacgcagaacatagataccctggagcgaatagccgggctggaacaggaggacttggtggaggcgcacggcacccttctacacatcacactgcgtcagcgccagctgccggcacgaatacccgctaagctggatgaaagagaagatcttctctgaggtgacgcccaagtgtgaagactgttcagagcctggtgaagcctgatatcgtcttttttggtgagagccttccagcgctttctttctcctgttattgcagttcagattttctgaaggttggaccttcttctgggtcattgggtacctcctttgcaggtgcagccctttgcctccctcatcagcaaggcacccctctccacccctcgcctgctcatcaacaaggagaaagctggccaagtcggaccctttcctggggatgattatgggcctcggaggaggcatggactttgacttccaagaaaggcctacaggggacgtggcctggctgggtgaatgcgaccagggctgcctggcccttgctgagctccttggatggaagaaggagctggaggaccttgtccggagggagcacgccagcatagatgcccagtcgggggcgggggtccccaaccccagcacttcagcttcccccaagaagtccccgccacctgccaaggacgaggccaggacaacagagagggagaaaccccagtga

SEQ ID NO: 404 - DNA, 870 bp, Homo sapiens
  SIMILAR (469)..(534): 811254mologous to Mus musculus stress-70 protein (PBP74/CSA),accession number D17666,Smith-Waterman Score=88.
atgaggaaccgtcttggaggtgctttactggaagaaagtaagaaccaccttcatccttccaaaatagagccagaccttggccaggcgctgtggtataatgccagcactttgggaggccaagaggaatggccattccagcaaataattaaatcctctgtgaatgttgtgatggaactgtggataagttctctagaagcacagaggatcaatgacaagctcaagaagccagagaaggcttttacagagaagaaggatgaacgcttcttgggcactgtctctgaagtccactcgccgccccaggttctccacgtgtgtcctgggggacagcagcacagggttgaggccaagcctgtgggtatctcctacgtggacatgagcttagtgcatctctttgacaaagatttggcaatgatgtattttattcaacacatcattctgaaagaacgttcagcagactgtacaggatctttttggcaggccccaagtaaagctgtcaatcctgatgaggctgtggccattggagctgcattcagggagattgaagttacatttgacattgatgccaatgggatagtacagtttctgctaaagataaaggcacaggacgtgagcagcagatgcaacaagctgaaagaagagatttccaaaatagggagctcctggctagaaaagacagcgaaacaggagaaaatattagacggcagcatcctctcttcagcaggcatcactgaagctgttcgaaatggcaacaaaaagatggatctgagcgagaaggctctggaagttctggcactggggaacaaaaggaaatcaaaaggaggaaaaacagtaataatagcagaaattttgaagccagaagacaacatatga

SEQ ID NO: 405 - DNA, 2877 bp, Homo sapiens
  SIMILAR (91)..(1365): 991254mologous to Homo sapiens MTHSP75,accession number L15189,Smith-Waterman Score=2121.
ggtttccagaagcgctgccgccaccgcatcgcgcagctctttgccgtcggagcgcttgtttgctgcctcgtactcctccatttatccgccatgataagtgccagccgagctgcagcagcccgtctcgtgggcgccgcagcctcccggggccctacggccgcccgccaccaggatagctggaatggccttagtcatgaggcttttagacttgtttcaaggcgggattatgcatcagaagcaatcaagggagcagttgttggtattgatttgggtactaccaactcctgcgtggcagttatggaaggtaaacaagcaaaggtgctggagaatgctgaaggtgccagaaccaccccttcagttgtggcctttacagcagatggtgagcgacttgttggaatgccggccaagcgacaggctgtcaccaacccaaacaatacattttatgctaccaagcgtctcattggccggcgatatgatgatcctgaagtacagaaagacattaaaaatgttccctttaaaattgtccgtgcctccaatggtgatgcctgggttgaggctcatgggaaattgtattctccgagtcagattggagcatttgtgttgatgaagatgaaagagactgcagaaaattacttggggcacacagcaaaaaatgctgtgatcacagtcccagcttatttcaatgactcgcagagacaggccactaaagatgctggccagatatctggactgaatgtgcttcgggtgattaatgagcccacagctgctgctcttgcctatggtctagacaaatcagaagacaaagtcattgctgtatatgatttaggtggtggaacttttgatatttctatcctggaaattcagaaaggagtatttgaggtgaaatccacaaatggggataccttcttaggtggggaagactttgaccaggccttgctacggcacattgtgaaggagttcaagagagagacaggggttgatttgactaaagacaacatggcacttcagagggtacgggaagctgctgaaaaggctaaatgtgaactctcctcatctgtgcagactgacatcaatttgccctatcttacaatggattcttctggacccaagcatttgaatatgaagttgacccgtgctcaatttgaagggattgtcactgatctaatcagaaggactatcgctccatgccaaaaagctatgcaagatgcagaagtcagcaagagtgacataggagaagtgattcttgtgggtggcatgactaggatgcccaaggttcagcagactgtacaggatctttttggcagagccccaagtaaagctgtcaatcctgatgaggctgtggccattgggagctgccattcagggaggtgtgttggccggcgatgtcacggatgtgcttgctccttgatgtcactcccctgtctctggggtatttgaaactctagggagggtgtcttttacccaaacttattaataggaataccactattccaaccaagaagagccaggtattctctactgccgctgatggtcaaacgcaagtggaaattaaagtgtgtcagggtgaaagagagatggctggagacaacaaactccttggacagtttactttgattggaattccaccagcccctcgtggagttcctcagattgaagttacatttgacattgatgccaatgggatagtacatgtttctgctaaagataaaggcacaagacgtgagcagcagattgtaaatccagtcttctggtggattaagcaaagatgatattgaaaatatggttaaaaatgcagagaaatatgctgaagaagaccggcgaaagaaggaacgagttgaagcagttaatatggctgaaggaatcattcacgacacagaaaccaagatggaagaattcaaggacccaattaccctgcctgatgagtgcaacaagctgaaaggaaggagatttccaaaatgaggggagctccctggctagaaaaagaccagcgaaaactgggaggaaaatattagaccaggcagcatcctctcttcgagcgaggcatcgactgaagcttgttcgaaatggcataccaaaaagatgggcatctgagcggagaaggcttctggaagtttctggcactgggggaacaaaaaggaagatcaaaaaggaggaaaaacagtaataatagcagaaattttgaagccagaaggaccaacatatgaagcttaggagtgaagagacttcctgagcagaaatgggcgaaccttcagtccttttacctgtgtttttgcagtattcctatatataatttccttaatttgtaaatttagtgaccattagctagtgatcatttaattgacagtgattctaacagtataaaagtttcacaatattctatgtccctagcctgtcatttttccagctgcatgttaaaagggaggtagggatggattggttccttattaaaggttttaactatttttatgctggaagtgacccttttttccagggggtggaacccttctcggcacacagcaatgaaggtagtcatccatagacttgaaatgagaccacatatggggatgagatccttctagttagcctagtactgctgtactggcctgtatgtacatggggtccttcaactgaggccttgcaagtcaagctggctgtgccatgtttgtagatggggcagaggaatctagaacaatgggaaacttagctatttatattaggtacagctattaaaacaaggtaggaatgaggctagacctttaacttccctaaggcatacttttctagctaccttctgccctgtgtctggcacctacatccttgatgattgttctcttacccattctggaatttttttttttttaaataaatacagaaagc

SEQ ID NO: 406 - DNA, 416 bp, Homo sapiens
  SIMILAR (287)..(156): 321254mologous to Mus musculus CIP7,accession number AF038507,Smith-Waterman Score=75.
gagaggtttctgctacgaaaactttctaccccatgcactggcggacctctggggcgcctggctcagaggcccccagcaaaggaggacagatcctaaaccggacagcaagctgcgtccagctggttctccctttccgtgactgcttcaaagctcttataaacaagacagtccaaagaaaggaggacaagtcagcaagggaggggacaccagcaagaggaggtgtggcactggacagccggctggctgaggcagtgacagcaaacctcagcacaaggcctgcagccactgtgctgaaacagccagggaaaaacagcctgccaactgggcccttctctctgggcttgcttgacaccagccagtgctttctgctctcccggcctccagggcctcctcgcctgtatgaggagggggtgtga

SEQ ID NO: 407 - DNA, 670 bp, Homo sapiens
  SIMILAR (109)..(50): 551254mologous to Brugia malayi collagen-like antigen,accession number J04644,Smith-Waterman Score=47.
cccacgcgtccggaagtcccatggagtcacataattccatctgggagagacctggagccatcagccctcacaccccctcctcatacaggcgaggaggccctggaggcccggagagcagaaagcactggctggtgtcaagcaagcccagagagaagggcccagttggcaggctgtttttccctggctgtttcagcacagtggctgcaggccttgtgctgaggtttgctgtcactgcctttgggcgcacagagactgggaactcctgggaccggatgtggtcaggcttcctgagagtcgcctggcaggcgaggagtccccagctggcccaccctgagccctgacctcagccagccggctgtccagtgccacacctcctcttgctggtgtcccctcccttgctgacttgtcctcctttctttggactgtctgcagggagggaggacaagggccagcctagatctggcctgcaggacagaggcctcagtggctcaggacctttccctgcccctccccaggaacaagcagaggcagctgaggtagtagcagcctcctgcaggtttagagacagacaggccagggttcaaatcctagctcttcctctcactagccatgggattactgatgggtcacagagcatctgtaaaatgagacaagaacgctgatttcactg

SEQ ID NO: 408 - DNA, 348 bp, Homo sapiens
  SIMILAR (34)..(195): 301254mologous to Pectobacterium carotovorum subsp. carotovorum protease inhibitor,accession number AF141295,Smith- Waterman Score=70.
ccctcctacctgcgcacgtggtgccgcccctgctgcctcccgctcgccctgaacccagtgcctgcagccatgggtcccgggccagttggggaggcccttacggagcggggcgcacaaattcatgggtatgcttgctccttctcaccaaaactttatgtttgcaaagatgggggggacaaagtaatgcacatggaagcaaagagggcattgaagacattcacgcttaacaagggtggaaaaacggaaaaggttgaggagagacagacctgctctttatgtaaaggtgaaattaagcttttgagcctgcaaggtgaaggactagcagctgaaggttttacatttagcgag

SEQ ID NO: 409 - DNA, 1946 bp, Homo sapiens
  SIMILAR (64)..(1839): 1001254mologous to Homo sapiens 5-aminoimidazole-4- carboxamide ribonucleotide transformylase,accession number D89976,Smith-Waterman Score=3021.
aacttgcgcacgtggtgccgccgctgctgcctcccgctcgccctgaacccagtgcctgcagccatggctcccggccagctcgccttatttagtgtctctgacaaaaccggccttgtggaatttgcaagaaacctgaccgctcttggtttgaatctggtcgcttccggagggactgcaaaagctctcagggatgctggtctggcagtcagagatgtctctgagttgacgggatttcctgaaatgttggggggacgtgtgaaaactttgcatcctgcagtccatgctggaatcctagctcgtaatattccagaagataatgctgacatggccagacttgatttcaatcttataagagttgttgcctgcaatctctatccctttgtaaagacagtggcttctccaggtgtaactgttgaggaggctgtggagcaaattgacattggtggagtaaccttactgagagctgcagccaaaaaccacgctcgagtgacagtggtgtgtgaaccagaggactatgtggtggtgtccacggagatgcagagctccgagagtaaggacacctccttggagactagacgccagttagccttgaaggcattcactcatacggcacaatatgatgaagcaatttcagattatttcaggaaacagtacagcaaaggcgtatctcagatgcccttgagatatggaatgaacccacatcagacccctgcccagctgtacacactgcagcccaagcttcccatcacagttctaaatggagcccctggatttataaacttgtgcgatgctttgaacgcctggcagctggtgaaggaactcaaggaggctttaggtattccagccgctgcctctttcaaacatgtcagcccagcaggtgctgctgttggaattccactcagtgaagatgaggccaaagtctgcatggtttatgatctctataaaaccctcacacccatctcagcggcatatgcaagagcaagaggggctgataggatgtcttcatttggtgattttgttgcattgtccgatgtttgtgatgtaccaactgcaaaaattatttccagagaagtatctgatggtataattgccccaggatatgaagaagaagccttgacaatactttccaaaaagaaaaatggaaactattgtgtccttcagatggaccaatcttacaaaccagatgaaaatgaagttcgaactctctttggtcttcatttaagccagaagagaaataatggtgtcgtcgacaagtcattatttagcaatgttgttaccaaaaataaagatttgccagagtctgccctccgagacctcatcgtagccaccattgctgtcaagtacactcagtctaactctgtgtgctacgccaagaacgggcaggttatcggcattggagcaggacagcagtctcgtatacactgcactcgccttgcaggagataaggcaaactattggtggcttagacaccatccacaagtgctttcgatgaagtttaaaacaggagtgaagagagcagaaatctccaatgccatcgatcaatatgtgactggaaccattggcgaggatgaagatttgataaagtggaaggcactgtttgaggaagtccctgagttactcactgaggcagagaagaaggaatgggttgagaaactgactgaagtttctatcagctctgatgccttcttccctttccgagataacgtagacagagctaaaaggagtggtgtggcgtacattgcggctccctccggttctgctgctgacaaagttgtgattgaggcctgcgacgaactgggaatcatcctcgctcatacgaaccttcggctcttccaccactgattttaccacacactgttttttggcttgcttatgtgtaggtgaacagtcacgcctgaaactttgaggataactttttaaaaaaataaaacagtatctcttaaaaa

SEQ ID NO: 410 - DNA, 321 bp, Homo sapiens
  SIMILAR (49)..(96): 871254mologous to Homo sapiens Human secreted protein encoded by gene 162 clone HSAAS44,accession number W74889,Smith-Waterman Score=76.
atggggcgcacacctaaagtcgtcccagaagtatttactattcttaaatatagccagttgtttggggaagaagatgctgatcaagaagtatctcctgcagagctgaccctgaagctgcctggctgccgcgtatccccggtcccgtcgcgtatgctcgtcgtgtctggcgtgcttgctgtgtgggcctgctggctcatgttgacttcggatgagcgacggctggctgcctctgtcgcattggtgcccagacatgatgtggacatggtcaagtctgtgcgtgctctcctgatgtgtcccggtatgtctttatcagcagcatga

SEQ ID NO: 411 - DNA, 2651 bp, Homo sapiens
  SIMILAR (717)..(815): 1001254mologous to Homo sapiens anthracycline-associated resistance ARX,accession number U35832,Smith-Waterman Score=173.
ggcacgagctccgccgcggctcgtggttgtcccgccatggcactgtcgcgggggctgccccgggagctggctgaggcggtggccgggggccgggtgctggtggtgggggcgggcggcatcggctgcgagctcctcaagaatctcgtgctcaccggtttctcccacatcgacctgattgatctggatactattgatgtaagcaacctcaacagacagtttttgtttcaaaagaaacatgttggaagatcaaaggcacaggttgccaaggaaagtgtactgcagttttacccgaaagctaatatcgttgcctaccatgacagcatcatgaaccctgactataatgtggaatttttccgacagtttatactggttatgaatgctttagataacagagctgcccgaaaccatgttaatagaatgtgcctggcagctgatgttcctcttattgaaagtggaacagctgggtatcttggacaagtaactactatcaaaaagggtgtgaccgagtgttatgagtgtcatcctaagccgacccagagaacctttcctgggctgtacaattcgtaacacaccttcagaacctatacattgcatcgtttgggcaaagtacttgttcaaccagttgtttggggaagaagatgctgatcaagaagtatctcctgacagagctgaccctgaagctgcctgggaaccaacggaagccgaagccagagcttagagcatctaatgaagatggtgacattaaacgtatttctactaaggaatgggctaaatcaactggatatgatccagttaaactttttaccaagcttttttaaaggtgacatcaggtatctgttgacaatggacaaactatggcggaaaaggaaaccttcagttccgttggactgggctgatgtacaaagtcaaggagaagaaacgaatgcatcagatcaacagaatgaaccccagttaggccggaaagaccagcaggttctagatgtaaagagctatgcacgtcttttttcaaagagcatcgagactttgagagttcatttagcagaaaagggggatggagctgagctcatatgggataaggatgacccatctgcaatggattttgtcacctctgctgcaaacctcaggatgcatattttcagtatgaatatgaagagtagatttgatatcaaatcaatggcagggaacattattcctgctattgctactactaatgcagtaattgctgggttgatagtattggaaggattgaagattttatcaggaaaaatagaccagtgcagaacaatttttttgaataaacaaccaaacccaagaaagaagcttcttgtgccttgtgcactggatcctcccaaccccaattgttatgtatgtgccagcaagccagaggtgactgtgcggctgaatgtccataaagtgactgttctcaccttacaagacaagatagtgaaagaaaaatttgctatggtagcaccagatgtccaaattgaagatgggaaaggaacaatcctaatatcttccgaagagggagagacggaagctaataatcacaagaagttgtcagaatttggaattagaaatggcagccggcttcaagcagatgacttcctccaggactatactttattgatcaacatccttcatagtgaagacctaggaaaggacgttgaatttgaagttgttggtgatgccccggaaaaagtggggcccaaacaagctgaagatgctgccaaaagcataaccaatggcagtgatgatggagctcagccctccacctccacagctcaagagcaagatgacgttctcatagttgattcggatgaagaagattcttcaaataatgccgacgtcagtgaagaagagagaagccgcaagaggaaattagatgagaaagagaatctcagtgcaaagaggtcacgtatagaacagaaggaagagcttgatgatgtcatagcattagattgaacagaaatgcctctaaacagaaccctcttactatttagtttatctgggcagaaccagattgttatgtcctttgttccaaagggaaaaaattgacagcagtgacttgaaaatgattctgctccctttgaaagcattcattttgctagaactgttagacacattgcagtatgctgtattgaaagtaggaatatagttttaaaaaccctttgaacaaagtgtgtgcataaccagtcatgagataaaacaacacaatgcatgttgcctttttaatgtaaatacccttaggtatcattaatagtttcaaaatattgtggtttagtaaagttgatacctggttataaatattatgcctttatttttggctagaagaagaattatttttagcctagatctaaccattttcatactcttaactgattgaaacagattcaaagaagtatcgagtgctatgcattgaaacttgtttttaaatgttagatggcactatgtatattaatgtaaaacaatgttaatttactcaagttttcagtttgtaccgcctggtatgtctgtgtaagaagccaatttttgtgtattgttacagtttcaggttatttatattcgatgttttgtaaaactcaaataacgactatacttatggaccaaataaatggcatctgcattcttgttacaaaaaaaaaaaaaaaaaa

SEQ ID NO: 412 - DNA, 510 bp, Homo sapiens
  SIMILAR (370)..(507): 841254mologous to Homo sapiens A human pathogenesis-related protein designated HPRP,accession number W63115,Smith-Waterman Score=206.
atggttgtttctaatctggctgccaggcacagacggcacgtctgcagcacctgccagcccacgcactggcctgcctggacatcacaagtgaccagggttactcggcactatcatatctctcaaagaagaaacaactcctccaacggcaacatctgtggggctgcttttgaactatcagcaattcatttgagcaagagctgggagcatttttcccctgggcctgatcaactagggacaggggccatcttcccggatttcagggagtcgtcatcagatctaaacaatgtggattctgtcagcaggaagagagtgggcaatgtttgctggatgggcaaacgtggcatctatggggccatttggaaaagaactaattcctctatagagataagtgcagagggccctgacaagcctagcgtcgtgtcagggctgaactcgggccctggtcatgtgtggggccctctcctgggactactgctcctgcctcctctggtgttggctggaatcttctga

SEQ ID NO: 413 - DNA, 1111 bp, Homo sapiens
  SIMILAR (2)..(949): 971254mologous to Homo sapiens Amino acid sequence of protein PRO328,accession number Y13392,Smith-Waterman Score=1594.
caagacagagaggatcggctgtggttcccacttctgtgagaagctccagggtgttgaggagaccaacatcgaattactggtgtgcaactatgagcctccggggaacgtgaaggggaaacggccctaccaggaggggactccgggctcccaatgtccctctggctaccactgcaagaactccctctgtgaacccatcggaagcccggaagatgctcaggatttgccttacctggtaactgaggccccatccttccgggcgactgaagcatcagactctatgaaaatgggtactccttcttccctagcaacggggattccggctttcttggtaacagaggtctcaggctccctggcaaccaaggctctgcctgctgtggaaacccaggccccaacttccttagcaacgaaagacccgccctccatggcaacagaggctccaccttgcgtaacaactgaggtcccttccattttggcagctcacagcctgccctccttggatgaggagccagttaccttccccaaatcgacccatgttcctatcccaaaatcagcagacaaagtgacagacaaaacaaaagtgccctctaggagcccagagaactctctggaccccaagatgtccctgacaggggcaagggaactcctaccccatgcccaggaggaggctgaggctgaggctgagttgcctccttccagtgaggtcttggcctcagtttttccagcccaggacaagccaggtgagctgcaggccacactggaccacacggggcacaccttctccaagtccctgcccaatttccccaatacctctgccaccgctaatgccacgggtgggcgtgccctggctctgcagtcgtccttgccaggtgcagagggccctgacaagcctagcgtcgtgtcagggctgaactcgggccctggtcatgctgcaagctgggctccccccttactccccagtgttcaaatcctggattcactgctggaagtacctgagtgtgcaggacattcctgggcccaggagagcctgtgggtggggctgggccacgtggggaactggcagcagtaccaaccttgggttctcgtgttctgtaccgaagctacctctccgtag

SEQ ID NO: 414 - DNA, 466 bp, Homo sapiens
  SIMILAR (460)..(380): 921254mologous to Homo sapiens protein kinase Njmu- R1,accession number AF305686,Smith-Waterman Score=133.
ttttttttgttcttcagatttttatttaagttaaattggtaaaatacaaaaagaaaatctggattgagtttcaaatcatcttaaatagcaatcctatgaacaattataactgcaatttcaaacactaagacttaaatatacaacttgatcatacaattatctcaaaacatatgatcaaaaactttggtcaagagcttctttcatgaattcttcaaggacagctatcacatttttggcttcaggcatttcttcatgttccactttaacaatcttcaaaagtatatctccactaccacagttctttaggaacatgtaacatttaaacaaagcataatgattcatttctgcctgtcggataaatctcttcaaattgtttgtgtcttgtatggcctgcattgcagaactgaggctgggagctgctgcaatcgatgaccacagacttatgctgctcctctgtcatgggcca

SEQ ID NO: 415 - DNA, 171 bp, Homo sapiens
  SIMILAR (170)..(66): 1001254mologous to Homo sapiens protein kinase Njmu- R1,accession number AF305686,Smith-Waterman Score=193.
ctgttaatgtctctctttgttttttcatctgattctttaacttcaacaggagtgtaactcaaagccacatattctgaagggttacgttcagagtctatcgttactgtttcaggaagcagtttttcattttggaaaaggcagtaataacaaccaactcggtaacctggaatt

SEQ ID NO: 416 - DNA, 230 bp, Homo sapiens
  SIMILAR (3)..(104): 971254mologous to Homo sapiens protein kinase Njmu- R1,accession number AF305686,Smith-Waterman Score=183.
gaagtaaccggttttgtgaggattggatgcaagcttttttaaatggtgccaaaggaggtaacccttttcttttccgacaagtactggagaactttaaactaaagaactgtggtagtggagatatacttttgaagattgttaaagtggaacatgaagaaatgcctgaagccaaaaatgtgatagctgtccttgaagaattcatgaaagaagctcttgaccaaagtttttga

SEQ ID NO: 417 - DNA, 407 bp, Homo sapiens
  SIMILAR (244)..(203): 781254mologous to Homo sapiens Human secreted protein, SEQ ID NO: 5909,accession number G01828,Smith-Waterman Score=64.
tgttacatgttcctaaagaactgtggtagtggagatatacttttgaagattgttaaagtggaacatgaagaaatgcctgaagccaaaaatgtgatagctgtccttgaagaattcatgaaagaagctcttgaccaaagtttttgatcatatgttttgagataattgtatgatcaagttgtatatttaagtcttagtgtttgaaattgcaggcgtgggccactgtgcccagccagcttttaaagttttaaaaaggatttgttcagacatggaatatatttgtgtatattacttgtgtgctgtacacacagaggaaatgtatgtttgtcatgtatgaagaatggcttcagtttctccgtaattaatttggtaatattattattaaaacttagcttctcatcaaaaaaaaa

SEQ ID NO: 418 - DNA, 1982 bp, Homo sapiens
  SIMILAR (353)..(1183): 521254mologous to Homo sapiens protein kinase Njmu- R1,accession number AF305686,Smith-Waterman Score=555.
  misc_feature (1)...(1982): n = a,t,c or g
atgagtttttctaccatcctcatgactgtggtaactcaacctctccaggaagttcttctgcttaaaactaaaatcaagtatatctcaagagactactgccgatctgaaatgcctctgtcatgtgttgtccgcaatcagaatcctcttttaaatgtagttgaaatgagagataaggaaactgacaatgttactgaatgggagatagaggccagtccttgcctgcgaacccggggaaaccagcggaacgcaggtgtgcgagggccgggagccggacgagccctgataccgacggctgcacgggagcaggggagcggtttggcggagacacagggccgctcagaggccgccggcaatgctcccctctttgcaggagtcgatggatggagatgaaaaggaactagagagcagcgaagagggaggctcagccgagggagcggagactcgagccgccggtccagcagccactactgtctttacagctatcgcggaagcagtattggcacagcaacgaggggacagtgaggacggaagcccaagtggcacaaatgcagaaactccctcctggtgatgatttcagcctctccttgggcagatactaatctaccatcccgaagtgggagccagagcttgcgcagttttcattgctaaggcgtcttttcaagagggtgcagtctttgaagggctgggtaatgtttgcatctgtgggagctaaaaattccagggttaccgagttggttgttattactgcctttttccaaaatgaaaaactgctttcctgaaaacagttaacgatagactctgaacgtaaccccttcagaatatgtggtctgttttttagggagggtctgaaaaaggacttgagctttttcaggcttgaattggacaagtacattcaagggctgaaaaataacatgaattgtgaggcaaggggcctggagagtcacataaaatcctatctgagcaagctggtttgaagatgttgtatgcccaatccaaagggttgttcttctctttcaggaaaagcttacctttctgctacatgctgcatttgagttacactcctgttgaagttaaagaatcagatgaaaaaacaaagagagacattaacaggtttctgagtgtggccagtcttcaaggacttattcatgaaggcaccatgacttctttgtgcatggccatgacaagaggagcagcataagtctgtggtcatcgattgcagcagctcccagcctcagttctgcaatgcaggaagtaaccggttttgtgaggattggatgcaagcttttttaaatggtgccaaaggaggtaacccttttcttttccgacaagtactggagaactttaaaccaaaggcccataccaagaccacaaacaatttgaagagattttatcccgacagggcagaaatgaatcaatatgccttggtttaaaaatgnttaccatggcccccaaagaaccgtggtaagtggagatatacttttgaagattgttaaaagtggaacatgaagaaatgccctgaagcccaaaaatgtgatagctgtcccttgaagaattccatgaaagaagctccttgacccaaagtttttgatcatatgttttgagataattgtatgatccaagttgtatatttaagtcttagtgtttgaaacttgcagttataattgttaatacagattgacattgtaagatgatttgaaactcaatggagattttctttttgtattttacaaatttaacttaaataaaaatctgaagaacatcttcactgagtcctagatagataatgtatgtgagagttgtgaaattttagtgtctcactggccccataaattccacgcttcaggaagttgttgcttaaaaaatttcagagatgattttgtttgtggcttttctcaggaaaagcctgagtttgctgcagtatttagcaacttttcttctcagaaaaaccataatacttccttttcagtggactgtagcttctt

SEQ ID NO: 419 - DNA, 486 bp, Homo sapiens
  SIMILAR (416)..(333): 961254mologous to Homo sapiens Human secreted protein, SEQ ID NO: 5640,accession number G01559,Smith-Waterman Score=142.
tgaaggtcattttaaaaacaaagttaaagacaatctgagaaaaaaattgcacagaatacactcattaaataggtatggtttatggtgattaaaatcaaaataagggaaatatgttatcttctgcaattccagaaataggttctgttgtccggaaggttcttatacatccaaaaagagggaatgatcatggcaattaaagctgcctcttaatcatgtaaatctacagtagcaactaaatttttctgttcttcccattaagtcagtttcgatcttcaaactgtgccttgttttttaaaagataagatgctagaaattcaatgggatttggtggtctcaacgttgtctgtgagaccgtactcagagtgaggattttctgcaacctgcgtttgtccctcctgcatctgctctggctccatggcggaccctgcaagtcacagtccccggataccagtccgctcccaagccgttcgttcttaagagccctgc

SEQ ID NO: 420 - DNA, 1115 bp, Homo sapiens
  SIMILAR (901)..(863): 1001254mologous to Homo sapiens dpy-30-like protein,accession number AF226998,Smith-Waterman Score=66.
tttttttatcccctttgcaatgcttttattagtactccaactttaatgtacattagaatcacctgtgatacttgttaagccattgaagatgcccagatcccacccttagaaaggtccagaaacaatgctgagaaaaattggctgaattttttaaattatacttgactgctgtattttctctctgttgtaaaactctgcagcatttgaagacagaagaaaaagagaaattcataaaacaattcaatcatgtaaaatatttgtcatacagaacaaaaactactttaaaataatggtgttttgacagtttattttgaaggtcattttaaaaacaaagttaaagacaatctgagaaaaaaattgcacagaatacactcattaaaataggtatggtttaagggtgattaaatcaaaaataagggaaatatgttaaccttctgcaatcccagaaataggttctgttgtccggaaaggttcttgatacatccaaaaaggagggaatgaatcatggccaattaaagctgcctcttaatcatgtaaatctacagtaggcaacttaaatttttctgttcttccccatttaaggtcagtttcggatcttcaaaactggtgcccttgttttttaaaaggataaggatgctaggaaattcaatgggggatttgggtgggtctttcccttttgccaaggcacaggcaaggtcccctggtaatagggatagggggcaccactgtctgaatcccaggtaggcacgaagttggcaaaagactgggagatctaccttctgctttgatgacttttctgcattaatcttctcattttctactattctctcaacgttggtctgtgagaccgtactcagagtgatgggttttctgcaacctgcgtttgtccctccagcatctgctactggctccatggcggaccctgcaagtcgcagtcggcgtataccagtctgggcgcgggagcaccacgagcagtagagcagcagagtgggacagtccacgactgggcgcctacatggggtctggaaactttacgacagtcccaagtgcctagaataagtcagaaagtgggggaaagggagctgattacccgcgaacaagccgttcgttcttaa

SEQ ID NO: 421 - DNA, 309 bp, Homo sapiens
  SIMILAR (277)..(140): 541254mologous to Homo sapiens Human secreted protein encoded by gene No. 47,accession number Y27761,Smith-Waterman Score=124.
aatctaaaagacactgctggcacccttgccagtgaggtggagggtaggatccagcgcccagaacatcacgggcattcagtaaaaattagtcgtgctgaaaacattatgctcgctgaaaaaagccagacaacaaaagaggagcagagtggtgtggcagagaaggagagaagacagaaacaattgaatgtcaaagaggcagctgaacggaaaggagttcagctatcccaaactccaggggaagattatcttcccactccatcccctttccagctctccatcccactgagagccacctccatcactcagtaa

SEQ ID NO: 422 - DNA, 606 bp, Homo sapiens
  SIMILAR (212)..(301): 501254mologous to Hepatitis B virus truncated X protein,accession number AF258596,Smith-Waterman Score=72.
cgccctggctgcacccctgtctcctatggcagctgcactgaaaccttgcggatgccaaactttcatggagatttcatggcaacaatggggagaatggccctctccctctttgagtcctacagcagggcttcctgggcccagtgtattacagaacttcccattctacccacacagcctgctgctagcttgttgctgaacccagatatgaagccacggacttgggctggggacaaatccaaggagtcatacctgtgcccttcttgggacctcccaggtcagccctctatgcccaactccttcttaagttcttattctctccaggaaactcctcatcgctcctgtacgtcatgtctggtgggtccgtgcgcccagttcagcagacctgctcaaaggcatgtctgatttccatgcgtattgagtcagtcctacccctacatccacctgctgccctgccacatgcacacgtgtgtgtacacgcatgctcgctcgtgtgatttaatcagcaaactgacgtttggggattggtgaaaggaatggtccttaagatgaaactctccttgcactaagaagacaccctaagcagctccctcctacctctgcttctca

SEQ ID NO: 423 - DNA, 309 bp, Homo sapiens
  SIMILAR (108)..(158): 941254mologous to Homo sapiens Human secreted protein clone fh116_11 protein sequence SEQ ID NO:110,accession number Y94952,Smith-Waterman Score=78.
atgcacccggcaggcttggcggcggcggctgcggggacgccccgctgcatcgaccgcttcatccccatcaccaagctcaagtttactttgctgtggacaccatcaatgctttcatcacctacgttttggtggctggtcttgcgctggggacccaggaaggatgattggcggggtcctcatgggcctctcttcgggaagattggctactacctggtgctgggctggtgctgcgtagcatctttgtgttcatggccgggtgtcaccgggaagtcccccttcacccgctccaagaccttgcctggcatttga

SEQ ID NO: 424 - DNA, 742 bp, Homo sapiens
  SIMILAR (168)..(272): 911254mologous to Homo sapiens Human secreted protein clone fh116_11 protein sequence SEQ ID NO:110,accession number Y94952,Smith-Waterman Score=170.
cggacgcgtgggcggacgcgtgggtggacactgtcaacaccgacctcaccaccatcgacctggtggccttcttgggctacaaatatgtcgggtgagtacccccgcccttcacgccagccccagcccttgggccttgtcctcacacagcctcctctccctcccccaggatgattggcggggtcctcatgggcctgctcttcgggaagattggctactacctggtgctgggctggtgctgcgtagccatctttgtgttcatgtttccccttttgccgggcgcggtggctcatgcttgtaatcccagcactttgggaggccgaggcggtcggatcacgagatccggacgctgcggctgaaagatcttgggcagacgcagcagctgagggggtcccggtgcgtggggcccggaaccagctgcgcatgtaacctgaccatggcggtggcggcggcgcagcctatgctcatgtactggctcaccttccacctggtgcggtgagcgcgcccgctgaacctcccgctgctgctgctgctgctgggggccactgtggccgccgaactcatctcctgcctgcaggccccaaggtccaccctgtctggccacaggcaccgcctccatcccatgtcccgcccagccccgcccccaacccaaggtgctgagagatctccagctgcacaggccaccgccccagggcgtggccgctgttacagaaacaataaaccctgatgggcatggaaaaaaaaa

SEQ ID NO: 425 - DNA, 466 bp, Homo sapiens
  SIMILAR (225)..(293): 951254mologous to Homo sapiens apoptosis related protein APR- 3,accession number AF144055,Smith-Waterman Score=113.
gactctgatactgccacaacatgtcaactgtcctggaggaattaatgcctggaatactatcacctcttatatagacaaccaaatctgtcaagggcaaaagaacctttgcaataacactggggacccagaaatgtgtcctgagaatggatcttgtgtacctgatggtccaggtcttttcttcgggattctgggagccaccactctatccgtctccattctgctttggcgacccagcgccgaaaagccaagacttcatgaactacataggtcttaccattgacctaagatcaatctgaactatcttagcccagtcagggagctctgcttcctagaaaggcatctttcgccagtggattcgcctcaaggttgaggccgccattggaagatgaaaaattgcactcccttggtgtagacaaataccagttcccattggtgttgttgcctataataaacactttttctttta

SEQ ID NO: 426 - DNA, 786 bp, Homo sapiens
  SIMILAR (223)..(453): 971254mologous to Homo sapiens Human transforming growth factor alpha HIII,accession number W27087,Smith-Waterman Score=440.
atggcgcctcacgacccgggtagtcttacgaccctggtgccctgggctgccgccctgctcctcgctctgggcgtggaaagggctctggcgctacccgagatatgcacccaatgtccagggagcgtgcaaaatttgtcaaaagtggccttttattgtaaaacgacacgagagctaatgctgcatgcccgttgctgcctgaatcagaagggcaccatcttggggatactgccacaacatgtcaactgtcctggaggaattaatgcctggaatactatcacctcttatatagacaaccaaatctgtcaagggcaaaagaacctttgcaataacactggggacccagaaatgtgtcctgagaatggatcttgtgtacctgatggtccaggtcttttgcagtgtgtttgtgctgatggtttccatggatacaagtgtatgcgccagggctgcctgtcagctgcagctccacaggccctggctggcaagtggcctccaaaaaactgccaccttcccagctttgtggatggtcagccccagggacaaaaagaaccttgtaataattacccttccatatacacctttgtgcctgtgtgtgggcaaatctgtggcataaaaatgctaaaaacagaattgctgcatctgaagtactgggatattgggccaggaaataggaactcttataagtttgctgctgggaatgtaaagtttgcagtcactctggaaaacagtctgctaattcctcaaaaggctaaacgtaattaccacatgacccagcaattccgctcctag

SEQ ID NO: 427 - DNA, 1312 bp, Homo sapiens
  SIMILAR (425)..(1048): 401254mologous to Homo sapiens Human transforming growth factor alpha HIII,accession number W27087,Smith-Waterman Score=218.
ccgagtttctgcgaagccgcgacctcggcgtccggacgcggtgaacaccgggccgagggagtctgcagtcggctccgggaagccgcgcggcgaccgggggaggccttcactaaaggggaaaaggaagagggggtcggccagtatccccgaaagagggctagggcgcatgaagaccagcgcaaagctccacgagcaggaaaagcccccaagcagccccagggcgacctggaccgggccgcttaggccacgcccggggaagagggccctgactgcgctgcggggcggggcgcgcggggccgggtcgcgcgagcagcggagcaccaagggaacggaaaatggcgcctcacggcccgggtagtcttacgaccctggtgccctgggctgccagccctgctcctcgctctgggcgtggaaagggctctaggcgctacccgagatatgcacccaatgtccaggggagcgtgcaaaatttgtcaaaagtggccttttatttgaaaacgacacgagagctaatgctgcatgcccagtgctgcctgaatcaaaagggcaccatcttggggctggatcttcagaactgttctctggaggaccctggtccaaacttttattaggcacataccactgttcatcatagacctgcaagcaaaccccctgcaaaggtgacttggccaacaccttcccgtggctttactcagctccagactctgatactgccacaacatgtcaacttgtcctggaggaattaatgcctgggaatactatcacctcttatatagacaaccaaatctgtcaaggggcaaaagaacctttgcaataacacttggggaccccagaaatgtgtcctgaagaatggaatcttgtgttacctgaatggtcccaaggtcttttggcagtgtggtttgtgctggatggtttcccatgggatacaagtgtatggcgccaggggctccgttctcactgcttatgttcttccgggattctgggagccagcactctatccgtctccattctgcttttggcggacccagcgccgaaaaagccaaggactttcatggaacttacatagggtctttaccatttgaccttaagatcaatctggaactatctttagcccaagtcaagggaagctctgcttcctaggaaaggcatctttcgcccagtgggatttcgcctcaaaggttgaaggccgccattgggaaggatggaaaaattggcactccccttggtgttaggacaaattaccagtttcccatttgggtgtttgttggcctataaattaaacacttttttcttttttaaaaaaaaaaaaaaa

SEQ ID NO: 428 - DNA, 454 bp, Homo sapiens
  SIMILAR (435)..(355): 371254mologous to Homo sapiens acetylcholinesterase,accession number M76539,Smith-Waterman Score=52.
cattgaagcgccgtcggtagatgccccgtaagacccgggccgacccacgcgtccgagaaacattaccctgtaagaataatttgaagtaaaaagcatttaaatgtaaatgcagcatgagtttttattcagctaaaagaatccagctgtttttctttccagccatattaattaggagacactggagggggatcctggggtttcccagcggatttggggtttgagatgttttgcacagagccgggctctcaaaaggagtggccccttctgcacatttggtgagcagggggggcctcgttttcctgggttctctctgctggtacccgttcacacagcttgtcgtgcatgtgggcatggacaccgccgccaaggcgatcattctggaacagtctggcaagaaccaaggctaccgggacgcctgacattcgcagcttctggtccgagggcggcgtgtgcc

SEQ ID NO: 429 - DNA, 489 bp, Homo sapiens
  SIMILAR (133)..(342): 951254mologous to Homo sapiens Human secreted protein, SEQ ID NO: 7697,accession number G03616,Smith-Waterman Score=353.
atgattaaatcagtgcctgaactcgggcttgaagcctcttggtgcgactctagaagccccccctggtatacctgtatagggcacttagcgtcagtagagcttgcaggactggaagttgctctaggtgtcagtaaaaagatggcctatcagaaggtccatgcagatcaaagagctccaggacactcacagtacttagacaatgatgaccttcaagccactgcccttgacttagagtgggacatggagaaggaactagaggagtctggttttgaccaattccagctagacggtgctgagaatcagaacctagggcattcagagactatagacctcaatcttgattccattcaaccagcaacttcacccaaaggaagaagaaaagaagaatatagtctgggaattaagaattcatttcaagcactttatataacagaaattgcatgtcagttactcactttcgggcttgaaagcctctcggtgcgactctaa

SEQ ID NO: 430 - DNA, 199 bp, Homo sapiens
  SIMILAR (152)..(172): 851254mologous to Homo sapiens Human secreted protein, SEQ ID NO: 4427,accession number G00346,Smith-Waterman Score=31.
atggactgggaaggcagccttcccttggtgtttaattattgcagggatgcctctctgattattcacccacgtttcaaaggtgtcagaccacgcagggacgcctgccttggtccttcacccttagcggcaagtcccgcttttctgggaaaggggcaaaccatcacggacgccgagcttcgggtaactctcacagtggagg

SEQ ID NO: 431 - DNA, 239 bp, Homo sapiens
  SIMILAR (121)..(192): 751254mologous to Homo sapiens Human secreted protein, SEQ ID NO: 5576,accession number G01495,Smith-Waterman Score=73.
gcctggtggaaccgccatcaataaatcaagtgtgatcagggtgaggaacaggaaagaaggaaatctggggaaatggggtgaatgtcaggtggatcggagagatacagtcatgggggtcagggggcttctgaggcgatctggtagtgtcagtcttcagccgctaagccgagaagatctgggaaggagtcagtcagagagccttgggccagagttccaggggctctgggagtggctgccag

SEQ ID NO: 432 - DNA, 423 bp, Homo sapiens
  SIMILAR (415)..(293): 871254mologous to Homo sapiens calbindin D28K,accession number S46006,Smith-Waterman Score=193.
gtgagcaacaaggctgtttatttcacctgggtgcaggtgggatgagtccgaaaagagagtcagtgaagggagataggggtggggccattttataggatttgggtaggtaatggaaaattacagtcaaagggggttgttctctggctggcaggggtgggggtcataaggtgctcaatgggggagattttgagccagaaggaatttcacaaggcagtgtcatcagttaaggcaggaacaggccattctcacttcttttgtgattcttcagttacttcaggccatctggatgtatacccgatttaaaattggtgagatgttccttgggctggttggtctgaggacccgaggtcgtaggtggatctctctcatggagtaaagagcaggaggacaggggattgatctcccgagggaggtcccctgatc

SEQ ID NO: 433 - DNA, 386 bp, Homo sapiens
  SIMILAR (381)..(262): 951254mologous to Homo sapiens calbindin D28K,accession number S46006,Smith-Waterman Score=214.
caaggactggcatttgcacttattttgtggtggaatgtcatcagttaaggcggggcagcgcattttcacttcttttgcgattcttcggttacttcaggccacccgggcatataccttcaaatcacaggggatgcgatggcttggcttgggttcagaggccctccacttgagagtcacctgaagttgggcatctgtgatggtccagggggcttctgaggtgatcaggcagcattaatcttcagtcgctaagttgagcagatcagatttgaaattcgtgagatgtttcttgggctggtcagtctgaggacctgaggtcataggtggatcgttctcacagagcaaagagcaggaggacaggggattgatctcccaagggaggtccccca

SEQ ID NO: 434 - DNA, 1896 bp, Homo sapiens
  SIMILAR (277)..(432): 861254mologous to Homo sapiens Human secreted protein, SEQ ID NO: 5210,accession number G01129,Smith-Waterman Score=239.
atgaataatgatccttacattcctgcatctgcttttggggctcgccctgttaaaaccacagaagctcccccactgagcaccttgagacccctgcccctgcccaccaaagaacaaccccctttgactgtaattttccattaccttcccaaatcctataaaacggccccacccctatctccctttgctgactctcttttcggactcagcccgcctgcacccaatgaaataaacagccatgttgctcacacaaagcctgtttggtggtctcttcacacggacgcgtatgaaatttggtgccgtgactcggatcgggggacctcccttgggagatcaatcccctgtcctcctgttctttgctccgtgagaaagatccacctacgacctcaggtcctcagacccaccagcccaaggaacatctcaccaattttaaatcagacaaaggagacatgttttatccgtggacccaaaactccagtgccggtcacggactgggaaggcagccttcccttggtgtttaataactgcagggacacctctctgattatacacccacgtttcaagggtgtcagaccacgcagggatgcctgccttggtccttcacccttagcggcaagtcccgcttttctggggaaggggcaagctgctcctcgccaggccgagctaggtcccaattcttcctcagcctctgctcctccaccctataatctttttatcacctcccctcctcacacctggtccggcttacagtttcgttctgtgactagccctcccccacctgcccagcaatttactcttaaaaaggtggctggagccaaaggcatagtcaagaccatcacagacgccgagcttcgggtaactctcacagtggaaggccgagacagtttaactaaattatctgcttccctgacgattcctggactacagccacatctcattgccgtccttctccccaacccaaagcctccttcgcgtcttcctctcatatccccctaccttaacccacaagtatgggacatctctactccttccctggcaactgatcacatgcccattaccatcccattaaaacctaatcacccttaccccactcaacgccaatatccaatccctcagcacgctttaaaaggattaaagcctgttatcactcgcctgctacagcatgggcttctaaaacctataaactctccttaccattcccccattttacctgtcctaaaaccagacaaggcttacaagttagttcagaatctgcgccttatcaaccaaattgttttgcctatccactccatgaatgctccttattttctctccgagtcgtggactctatgcctgctcatgtgtcaagacgtagctcaacttccaacttcactaaaattatcaacctcacgaactagctaccaagtgaccactttgacgagccttgaggaaaaggcggagggggctttagcacacactcagctaacgaaagtgtgccggttcatttcccacagctccacacaaactcccagggcctctgcagttctgggagaaccagtacccatcagtgctctagggctcccaagtcctgcagccttctgggaatgcctttcctttcccatctgccatcacactaatgataatagtcggccacctccaggatgccctaggattcccaaggccacatcacctacaccacttcttgacagagccaagagtgatgctggaaggggaagcaggaagcagaagaagaaagggacccagaacagtggaatgcaggagctcaggggccacgcaggagtgtggttctgcgtctggcccaggcacatcacacctgccttgggcatagtatcctcaaacctgctagttgaggggcgggaaaaattcacagaatattttagtgatttcttgctcagataa

SEQ ID NO: 435 - DNA, 331 bp, Homo sapiens
  SIMILAR (42)..(122): 811254mologous to Homo sapiens Human secreted protein, SEQ ID NO: 5210,accession number G01129,Smith-Waterman Score=125.
atgttgctcacacaaagcctgtttggtggtctcttcacacggacgcacatgaaatttggtgccgtgactcagatcaggggacctcccttgggagataaatcccctgtcctcctgctctttgctctagagagacaaaggagacacgttttatccatggacccaaaactccggtgctggtcacggactgggaaggcagccttcccttggtgtttaatcattgcagagatgcctgattattcacccacgtttcaaaggtgtcagaccacgcagggacgcctgccttggtccttcacccttagcagcaagtcccgcttttctggggaaggggcaa

SEQ ID NO: 436 - DNA, 344 bp, Homo sapiens
  SIMILAR (8)..(130): 901254mologous to Homo sapiens calbindin D28K,accession number S46006,Smith-Waterman Score=204.
atcgggggacctcccttgggagatcaatcccctgtcctcctgttctttgctccatgagaaagatccacctatgacctcaggtcctcagaccaaccagcccaaggaacatctcaccaattttaaatcgggtgtcagaccacgcagggacgcctgccttggtccttcacccttagcggcaagtcccgcttttctggggaaggggcaagtaccccaaccccttatatctctgtgccccgatcccttatttccgcaccccaacctcatatctctgcgccccaatcccttatgtccgcaccccgacctcgtatctctgtgccctgacccctttcccgcttttctggagg

SEQ ID NO: 437 - DNA, 434 bp, Homo sapiens
  SIMILAR (117)..(428): 551254mologous to Sus scrofa domestica polyprotein,accession number U77600,Smith-Waterman Score=300.
agacaaaggagacatgttttatccatggacccaaaactccggcgccggtcacggactgggaagacagccttcccttggtgtttaatcattgcagggacgcctctctattcacccacgtttcaaagcatgctttaaaaagattaaagcctcttatcactcgcctgctacagcatggccttttaaagcctataaactctccttacaattccccgattttacctgtcctaaaaccagataagccttacaagttagttcaggatctgcgccttagcaaccaaattgttttgcctatccaccctgtggtgcccaacccgtacactcttttgtcctcaataccttcctccacaactcactattccgtgcttgatcttaaagatgcttttttcactattcccctgcaccccttgtcccagcctctctttgctttcacttag

SEQ ID NO: 438 - DNA, 595 bp, Homo sapiens
  SIMILAR (454)..(594): 841254mologous to Homo sapiens calbindin D28K,accession number S46006,Smith-Waterman Score=210.
catggactctatgatgcgccagcaacacgttttgctttatccaacacatgtcctgttaagtcacggactagtgtggtctatgggctggcagaggtgaaaagatctcccttttcatgtagcttgcccacctacttacagcgttgcatcacagggtcaagtgtttctcctccacttcacgcagctcgggagccctcttgtctggaaaggctcttccctgctggtgcctccaggctgggctggttgttgctcctctatgctcccgaggtcctcagtgcctgcctttatcagaacagaggccacagcgcaccttggttaaatgtacagtctctgggaccagactgcctggactcacaactctggctccgccatttacagcccacctgcacccaggtgaaacaaccagccatgttgctcacacaaagcctgtttggtggtctcttcacacagacgcgcatgaaatttggtggatcaggggacctcccttgggagatcaatcccctgtcctcctgctctttgctccatgagaaagctccacctaccacctcaggtcctcagactgaccagcccaagaaacatctcaccaatttcaaatccg

SEQ ID NO: 439 - DNA, 408 bp, Homo sapiens
  SIMILAR (176)..(301): 881254mologous to Homo sapiens calbindin D28K,accession number S46006,Smith-Waterman Score=198.
  misc_feature (1)...(408): n = a,t,c or g
ttgnnnnnnnnnnnnnnnnnnnnnnnnnnnnnnnnnnnnnnnnnnnnnnnnnnnnnnnnnnnnnnnnnnnnnnnnnnnnnnnnnnnnnnnnnnnnnnnnnnnnnnnnnnnnnnnnnnnnnnnnnnnnnnnnnnnnnnnnnntgggttatgaaatttggtgccgtgactcggatcgaggaccttcccttgggagatcaatcccccgtcctcctgctctttgctccgtgagaaagatccacctacgacctcaggtcctcagacggaccagaccaagaaacatctcaccaatttcaaatctggtaagcggcctctttttactctcttctccaacttccctcactatccctcaacctctttcttctttcaatcttgacgatacacttcaatctctcccttctcttaatttca

SEQ ID NO: 440 - DNA, 453 bp, Homo sapiens
  SIMILAR (152)..(238): 601254mologous to Homo sapiens Human secreted protein, SEQ ID NO: 5576,accession number G01495,Smith-Waterman Score=70.
  misc_feature (1)...(453): n = a,t,c or g
atcactactccagtgcggtggaattcgggagagcagagcacgtgtgtttttacgagaattatgctgagataggtaacagatgaggatgaaatttgggcttgactgaagtgggggggtgtgtctgtgaagccttgcggaagtacagcccagggcttccgaggcaaccgagcagcagtcttcagccgctaagccgagaagatctgggaaggagtcagtcagagagccttgggccggagttccaggggctctgggagtggctgcnnnnnnnnnnnnnnnnnnnnnnnnnnnnnnnnnnnnnnnnnnnnnnnnnnnnnnnnnnnnnnnnnnnnnnnnnnnnnnnnnnnnnnnnnnnnnnnnnnnnnnnnnnnnnnnnnnnnnnnnnnaggaaataatgatatgaaataacaaggagggggaagaaaataattgtcctccttgggtcaaccctctggt

SEQ ID NO: 441 - DNA, 375 bp, Homo sapiens
  SIMILAR (51)..(122): 831254mologous to Homo sapiens Human secreted protein, SEQ ID NO: 5576,accession number G01495,Smith-Waterman Score=90.
gctgtgatggcttggagaaacagtgtaaaccggcagtgtaaacaagagcaggggcttccgaggcgatcgggcagtgtcagtcttcagctgctaagccgagaagatctgggaaggagtcagtcagagagccttgggccagagttccaggggctctggaagtggctgccagatgaatcctctgtctggccggccccaggttgtctgcttctttactgcacacatgttgacaaagaaaagggaagaaggagcctccatgttgaacatgccttgcttccagtgaaaggaagagatgatccaagcaaatttaggaccaatagcagactcttcacactgcctggggatagagggaccaccctgggctcctcttactcctgg

SEQ ID NO: 442 - DNA, 437 bp, Homo sapiens
  SIMILAR (315)..(434): 401254mologous to Simian T-cell leukemia virus gag,accession number Y07616,Smith-Waterman Score=100.
  misc_feature (1)...(437): n = a,t,c or g
caactcccttgtcttnaaaacaggttttgtttttttaaatccatctggaaaggtggtgggtgcccacacaanttaagctgtcttcccctctggcaggcaggcttcctgggaactacacattgggtaatcttgtcccataaaatgccgattggacacttattgtagaaatgccgagggcactgtagattcagatagtccccatcacaggcataggtggtgtggttttacaggagtttggttaggtaacctccactgtgagacaaaccccagccacatctccagcacacaagaacttccaaatgcctgaaccgcagcggccaggcgttactccagaaccttctcccccaggagcttgctacaagtgccagaaatctgactaccaggccaaggaatgcctgcagcccaggattcctcctaagccgcgtcccatctgtgcg

SEQ ID NO: 443 - DNA, 357 bp, Homo sapiens
  SIMILAR (148)..(279): 481254mologous to Human T-cell lymphotropic virus type 1 Gag,accession number S74562,Smith-Waterman Score=143.
atggagagtgctcagaaagaggcagtagagatttttggtcagcctcatgctgcctccagcagtggtgatgttaaaccattgctattcattgatttttacaaatgctctggtgaaaaggttgtttgcatggaacatgctctcagagcttgctacatgtgccggaaatctggccactgggccaaggaatgcccgcagcccgggattcctcctaagctgtgtcccatctgtgcgggaccccactggaaatcagactgttcaactcacctggcagccactcccagagcccctggaactctggcccaaggctctctgactgactccttcccagatcttctgggcttagcggctgaagattga

SEQ ID NO: 444 - DNA, 729 bp, Homo sapiens
  SIMILAR (293)..(727): 691254mologous to Homo sapiens Similar to splicing factor, arginine/serine-rich 4,accession number BC002781,Smith-Waterman Score=441.
atggaggcaagggaaacaggcccttggaaagaaggtaatgtggagcgggtagcctccgtattgattaagaaggggacgggcttaccttccactgtgagagttaccggaagctcggcgtccgtgatggtctacggggcttccgaggcgatcgggcagcatcagtcttcagccgctaagccgagaagatctgtgaaggagtcagtcagagagccttgggccagagttccaggggctctgggagtggctgccagcatgaagtcacatggacacaacaggtatcccatgtctcctcaggtcgggctcccgctcccggagcaagagccggagccggagccagagtcggagccggagcaagaaagagaaaagcaggagccccagcaaggacaagagcctgcagccgcagccatagcgctggcaagagccgcagcaagagcaaagaccaagctgaagagaagatccaaaacaatgacaatgtcgggaaacccaagagccggagtcctagcaggcataaaagagtcaggagaggagagtggaggaggagaagcgagggagtgtgagcaggggcaggagccaggagaagagcctccgccagagtcggagccggagcaggagcaaagcgggcagcaggagccggagcaggagccgcagcaagagcaaggacaagaggaagagcaggaagagaagcagagaggagagccgcagtcgcagtcgcagccgcagcaagagtga

SEQ ID NO: 445 - DNA, 1287 bp, Homo sapiens
  SIMILAR (769)..(1263): 411254mologous to Murine leukemia virus gag-pol polyprotein,accession number U13766,Smith-Waterman Score=280.
atgaattttgaaggaacagaaacccttcattgcaatggtcattgcaaggtcatagcaatgaccttgggtaaccaagaagtcaaccagagaaattttagcactgggacaacaggccccatggagggcatgtggctactatcctcaaattcacatcatagtctaaagtatgctggagctctggccatcctgtctgcattccagtatcaggaaagaggaagccaggcaggacatagggacagctggccagagacaaaggagacacattttatctgtggacccaaaactccggcgctggtcacggactgggaaggcagccttcccttggtgtttaaccattgcagggacgcctctctgatcattcacccacgtttcagcggtgtcagaccacgcagggatgcctgccttggtccttcacccttagcagcaactccacagaccatcacggacaccgagctttgggtaactctcacagtggaggtatgggacatctctactccttccctggcaactgatcacatgcccgttaccatcccattaaaacctaatcacccttaccccgctcaacgccaatatcccatcccacagcacgctttaaaaggattaaagcctgttatcactcgcctgctacagcatgggcttctaaaacctataaactctccttacaattcccccattttacctgtccaaaaactggacaagtcttacagattagttcagaatctgcgccttatcaacaaaattgtttcacctatccatcctgtggtgcccaacccaccagcctttactagtcaaatcacccaagcagtttctcaggctcttggtattcagtggaaccttcatatcccttatcatcctcaatcttcaggaaaggtagaacggactaatggtcttttaaaggtacacctcaccaagctcagcctccaacttaaaaaggattggacagtacttttacctcttgctcttctcagaattagagcctgtcctcgagatgctacagggtacagtcgatttgaacttttatatggacgcactttcttgcttggccccaacctcatcccagacaccagccctctaggcgactatcttccagtcctccagcaggctagacaggctgctaatcttctcttgcctactccagatccccagccacatgaagacaccctagctggacgatcagttcttgttaagaatctgacccctcaaactctacaacctcgatggaccggaccccacttcatcatctatagtaccccgactgccgtctgcctgcaggatcctccccactag

SEQ ID NO: 446 - DNA, 410 bp, Homo sapiens
  SIMILAR (203)..(259): 841254mologous to Homo sapiens Human secreted protein, SEQ ID NO: 5576,accession number G01495,Smith-Waterman Score=87.
atgtccaagacaaaggcaccagcagatttggtgtctggtgagggcctgttcctcaaagaaggtacattctatttgtcttcccatggtggaagaagttgggatcagcttgggaccaggagatactctccctgtgagaaaaggggggcttctgaggcgattgggcagcgtcagtcttcagccgctaagccaagacgatctgggaaggagtcagtcagagagccttgggccggagttccaggggctctagaagtggctgccaggaccaacacctacaagttacttccagctccaagaggccgtgcagaggaaggggcctctgtgtgtaatttttctgtcaggataggccatctgttcctggtttgcattaagagtcttgtacgtgttggtgcactcctggcaatttggaccaa

SEQ ID NO: 447 - DNA, 411 bp, Homo sapiens
  SIMILAR (109)..(222): 861254mologous to Homo sapiens Human secreted protein, SEQ ID NO: 5576,accession number G01495,Smith-Waterman Score=172.
atggtatggagagataatgggcgatgtttctcagggctgcttcgagcgggattaggggcggtgtgggaacctagagtgggagacattaagctgaaggaagattttatggggacttccgaggcaatcgggcagcatcagtcttcagccgctaagccaagaagatctgggaaggagtcagagagccttgggccagagttccaggggctctgggagtggctgccaggggcccaaggaccagtgtacaagggcccatcactgtcagtaactctgcccactccagtagtaaagcagccaaatgctcacatacccacacatgggcacaaggaccagtctggttggggcttgctgtggcagctatccccactcagtctagtggttgggatgccacatgaccaatccagaggcccatga

SEQ ID NO: 448 - DNA, 420 bp, Homo sapiens
  SIMILAR (106)..(219): 841254mologous to Homo sapiens Human secreted protein, SEQ ID NO: 5576,accession number G01495,Smith-Waterman Score=161.
atgttgacactcaaggattcagaaattccacttcttggtatgcagcatcaagagattgttgaagatgtacaaggagacttatacaaggattttctttgcaacaagggggcttctgaggcgatcgggcagtgtcggtcttcagccgctaagccgagaagatctgggaaggagtcagagagccttgggccagagttccaggggctctgggagtggctgccaggctcccctgcaccactctcttcgcagaagtttgctaattatttaatccgtgcattgtcagagattctgcagaaacagagtgcctctggtggaaaatcagatcctaactggagaaacaaacatcctacatacctgcatgcacacatggttctaagaccatgtttggaaggtgacataaaacacttgggggaactggtttag

SEQ ID NO: 449 - DNA, 555 bp, Homo sapiens
  SIMILAR (1)..(210): 941254mologous to Homo sapiens Human secreted protein, SEQ ID NO: 7284,accession number G03203,Smith-Waterman Score=348.
atgagtgaactcccattcacaattgcttcaaagagaataaaatacctaggaatccaacttacaagggatgtgaaggacctcttcaaggagaactacaaaccactgctcaatgaaattaaagaggacacaaacaaatggaagaacattccatgctcatgggtaggaagaatcaatatcgtgaaaatggccatactgcccaagctctgctggtcaacagacacagctgtgttcctcgtcaacaaacagcaacaactgcctgccatatcgggggacctcccttgggagatcaataccctgtcctcctgctctttgctccatgagaaagatccacctacgacctcaggtcctcagaccgaccagcccaagaaacatctcaccatttcaaatccggtggctgaagctaaaggcatagtcaaggttaatgctcctttttctttatcagacctctcccaaatcagtgagtgtttaggctctttcatcaaatatgaaaaacccagcccagttcatggctcgttcgtcagcaaccctgagatgctttacagctctagaccctaa

SEQ ID NO: 450 - DNA, 1035 bp, Homo sapiens
  SIMILAR (544)..(488): 571254mologous to Homo sapiens PNAS-146,accession number AF279900,Smith-Waterman Score=53.
atgaatcctcctgggagctccattaatgtgaaagatgactcaaagcacttgattgtaatgataagagagggagacacacagctggcggtgcagcaacaaccccctggtgccactggtcttccgaagacaaaggggacatcttttatccgtggacccaaaactccggcgccggtcacggactgggaaggcagccttcccttggtgtttaatcattgcagggacacctctctgatttttattcacccacgtttcagaggtgtcagaccaggcagggacgcctgccttggtccttcacccttagcggcaagtcccgcttttctgggggaggggcaagtaccccaacctcgtatctctgtgccccaatcccttatttccatgccccgacctctctctgtggcccaacctcttatctctgtgccccaacccctcatttccacgccccaacccctttcccgctttcctggaagatattttaatctttccctctgtgtcaactttgatgaccctgacagtgaaggtgagcatgataccgagatttctgagtgtcgtcttctcatcaggtgctcagataagagctcctatgctaggtcctttggacaacagagaaaaccaatgaagggtgtgcattctaggccccaaaatgtggaattcaaagccgtggtactgtactacatcacaggtcacccaggaaaacaatatctagccctcaataatagaagcaatgcctggaaaggttatggacaagctgctccctgcgggatggaagcagggacagacatactgggggcttataaagcctctgtcaataagaaaccgggctccacaataattttaaaccacaacaggaaacctggggccctgctcgatgattataaacagaaaactgtaaacttggacaaagaaaaggagaaaactaactgcttaagtataggtcgtgcccaagctgatctgaatgattcagaactaacagttatagcaacaggtcatgaagatggtcatgtagaaactagaggtcttcagtcaactcatgggtga

SEQ ID NO: 451 - DNA, 807 bp, Homo sapiens
atgaatccactccatgaaggctgtcagtctgacacacggaactacgtggggtcttggcaaggaaaacactcagacacatacagatacttgggagctttagatactccagctcctgtcttcccaacaaaagtatctgcaactcctgcaaagcagaaggttagacctccatacatacccctgaggaaagagtttgaatcccagtatttgggtgacttagtcatttcagcctttgagctttgcagaaccctagctgactggggtgaaagtggtacctcagcacaagcacagcggctctatgaaagatcatacgccaatcctcttatggcagctgagccagcccaagctgtaaagcttgggtggagaccttcacccaagccacacattggagacaagtcagtatcattttggctcctgtggatggagacaaaggagacacattttatccgtggacccaaaactccggcgccggtcacggactgggaaggcagctttcccttggcgtttaatcattgcagggacacctctctgattattcacccacgtttcaagggtgtcagaccacgcagggatgcctgccttggtccttcacccttagcagaaagtcccgcttttcaggggaaggggcaagtaccccaaccccttctctccttgtctctaccccttctctgcttttccagggaaaaggcaatctggctttcagtacaggagatgcaaggagacagagtaaatgaacgagaaacacattatgtgaagtcactggcagcaatcaaggacaagccacacaaaaagcctgcaggaaccagatga

SEQ ID NO: 452 - DNA, 1485 bp, Homo sapiens; identical to SEQ ID NO: 245
  SIMILAR (784)..(933): 761254mologous to Homo sapiens calbindin D28K,accession number S46006,Smith-Waterman Score=195.

SEQ ID NO: 453 - DNA, 2963 bp, Homo sapiens
  SIMILAR (2630)..(2713): 321254mologous to Homo sapiens NAG13,accession number AF194537,Smith-Waterman Score=45.
agacaaaggagacatgttttatccgtggacccaaaactccggtgccggtcacggactgggaaggcagccttcccttggtgtttaatcactgcagggacacctctgtgattattcacccacgtttcaaaggtgtcagaccacgcagggacgcctgccttggtccttcacccttagcggcaagtcctgcttttctggggaaggggcaagccgagctaggtcccaattcttcctcagcctctgctcctccaccctataatctttttatcgcctcccctcctcacacctggtccggcttacagtttcgttcggtgactagccctcccccacctgcccagcaatttactcttaaaaaggtggctggagccaaaggcatagtcaagcggctgaagactgacactgcccgatcgccttggaagacccctagaccatcacggacgccgagcttcagaaaagcagaacggactaaaggtcttttaaaaatacacctcaccaagctcagccaccaacttaaaaaggactggacaatacttttaccactttcccttctcagaattcaggcctgtcctcggaatgctacaagactggctactggccaattgggatatccttttatcagtcaaagctatgtcctggtcaatggatttcaaactgttgaggatctatgtgaagctgcagaccttcgagtgagtgttgcagaccttcgagtgagtgttacagctcttaaggtggcgcgtctggagttgttcgttcctcccggtgggctcgtggtctcgctggcttcagcagtgaagctgcagaccttcgcggtgttacagctcataaaagcaaaaagatgggactggggcaccttggagcagggggcggcgctcatcggggaggctcgggacgcacaggagcccacggagggggtgggaggctcaggcatggcgggctgcaggtccagagacctgccccgcgggaaggcagctaaggcccggcgagaaatcgagcgcagcgccgggctgacgatcaagaaggaaagatgcatacgaaatggatacagcaaagaaaaaatgaaactcatagttgtttctcatggcctccatgtaaatgacttgcagcataaactgacgcttttcaccaaggaaacatacacatacctagccagggattcagagaagcagaagcaggggtatctagcaggacttgaaggagcccatgccaacagggtgaaccagcagatcagtgacaacttagtagttaaaacaggggccttaccccctccttatagaaccaagggagaaaagctctatttttatatgtccagacagaactgccttttcagcgtatcagggcaactcctccaaggtttctttcctaatggaggacaagctgcacctaacccttatgctctgctttcccaaataccagaagaagcagaatggtttacagtcctggaccttaaggatgactttttctgcatcccttacatcctgactctcaattcttctttgcctttgaagatccttcgaacccaacgtctcaactcacctggactgttttaccccaaggtttcaggccatctatttggccaagcattagcccaagacttgagccagttctcatacttggacactctcgtcctttgtggggtgttaaagtctcccattattattgtgtgggagttgaatcaaatagacacaataaaaaatgataaaggggatatcaccaccgatcccacagaaatacaaactaccatcagagaatactataaacatctctacacaaataaactagaaaatctagaagaaatggataaattcctcaacacatacaccctcccaagactaaaccaggaagaagttgaatctctgaatagaccaataacaggagctgaaattgaggcaataattaatagcttaccaaccaaaaaaagtccaggaccagatggattcacagccgaattctaccagaggtacaaggaggagctggcttccgaggcaatcgggcagtctcagtcttcagctgctaagccgagaagatctgggaagaagtcagagaaccttgggccagagttccaggggctctgggagtggctgccaggtgagtcgaacagtccgattttcagtggggtcccacacagatgggacgcagcttaggaggaatcctgggcagcgggcattccttggcccagtggccagatttccggcacgtgtagcaagctccttgtctatgatgcaaagacctttgttcacgtgtttgtcggctgaccctctccccacaattgtcttgtgaccctgacacatccccctttgtcccttcctcagaaaatcgggacttgccgctaagggtgaaggaccaaggcaggtgtccctgtgtggtctgacacccttgaaacgtgagtgtataatcagagaggtgtccctgcaatgattaaacaccaagggaaggctgccttcccagtccatgaccggtgccggagttgggtccatggataaaacgtgtctcctttgtctcccttcttttaaaacaaatcttttgtctttgtcttcatttctgcattcgtccccttcgttcaatcctgtaggaattgacagtgatattggggagttcccatccctggatttgggatttcctcgagtttccagccctgtccttgtggccaaaaagtggcacagtttggtttttgaatcctgttcgtgacgccaaaaatattctgcaggtattgggagatccacagctaagacaccaggacctcctggaagcctagaaacagtgagagtgccggtccgacatccttcagttttattctgggcctgggttttagtactttctggagataaaccaagatacccactatggctatgtctgctaaaatgtctaatggatattagctcttgggtcactttctcccttaggaccacctgaagtatagagtgtagcctctcaagggagcaggtggcagccttggggctgaaaggcat

SEQ ID NO: 454 - DNA, 991 bp, Homo sapiens
  SIMILAR (901)..(665): 961254mologous to Escherichia coli RecC1004,accession number AF176618,Smith-Waterman Score=406.
atgcccgggcaccaaaaagcacctctgagacccgcagtttccaaaaaggtagtcaatgttggagaaaggcaaaatcaagtaattattgaaaccggaggggattttgccgatttcggaaccaccatcaaacaggattttcgcctgctggggcaaaccagcgtggaccgcttgctgcaactctctcagggccaggcggtgaagggcaatcagctgttgcccgtctcactggtgaaaagaaaaaccaccctggcgcccaatacgcaaaccgcctctccccgcgcgttggccgattcattaatgcagctggcacgacaggtttcccgactggaaagcgggcaggggcttccgaggcgatcgggcagtgtcagtcttcagccactaagccgagaagatctgagaaggagtcagtcagagagctttgggccagagttccaggggctctgggagtggctgccaggtgagatgaacagtccgattttcggtggggtcccacacagatgggacgtggcttaggaggaataccgtgctgtgggcattccttggcccagtggcagatttccagcatgtgtagcaagctccagcatcccaaagctgaagacactgaagctgatcccttcagcatcccaaagctgaagacactgaagctgatcccttcagcatcccaaagctgcggcaaccagccagttatctgcacaccgttgcaggcgagatcaatttccatactctgccccggctggcgacaggcaatgactctgtcggcaagctgctgcatctcctggcactgtgtttcccagaaaatttcaccaaaagcgccatacggtaaatcccctgccgctcggaagcggcggaacaagcgttcggcatcatcctgctcaaccagtgcattcaataatggttgggacttttttaagaaaaccttccaattggccccgttgtagggaaaaatgtttgaaaaagttattttccggcctaatgaaatacaaaattccat

SEQ ID NO: 455 - DNA, 2134 bp, Homo sapiens
  SIMILAR (1993)..(1292): 851254mologous to Mus musculus protocadherin,accession number AF281899,Smith-Waterman Score=1033.
aagctcccccactgagcaccttgagacccctgcccctgcccaccaaagaacaaccccctttgactgtaattttccattaccttcccaaatcctataaaacggccccacccctatctccctttgctgactctcttttcggactcagcccgcctgcacccaatgaaataaacagccatgttgctcacacaaagcctgtttggtggtctcttcacacggacgcgtatgaaatttggtgccgtgactcggatcgggggacctcccttgggagatcaatcccctgtcctcctgttctttgctccgtgagaaagatccacctacgacctcaggtcctcagacccaccagcccaagaaacattctcaccaatttcaaatccgagacaaaggagacacgttttatccgtggacccacaactccggcgccagtcacggactgggaaggcagccttcccttggtgtttaataactgcagggacggcctctctgatcattcagccacatttcaagggtgtcagaccatgcagggatgcctgccttggtccttcacccttagcggcaagtcccgcttttctggggaaggagcaagctgctccttgccaggctgagctaggtcccaattcttcctcagcctctgctcctccaccctataatccttttatcacctcccctcctcacacccggtccggcttacagtttcgttccgtgactagccctccccctcctgcccagcaatttactctgaaaaaggtggctggagctaaagacatagtcaaggatttaattaacctcgccttcaaggtgtacaataatagaaaaaagttgcaattccttgcctccactgtgagacgaaccccagccacatctccagcacacaagaacttccaaatgcctgaactgcagcggccaggccttcctccagaacctcctcctccaggagcttgctacaagtgccagaaatctggccaccaggccagggaattcctgcagcccaggattcctcctaagccacgtcccatctgtgccggaccccactggaaatcggactgttcagctcacctggcagccactcccagagcccctggaactctggcccaaggctgactgactccttcccagatcttctcggcttagcggctgaagactgacactgcttgatcgcctcggaagccccctgggtatattgcatgatgttgaggtttggggtatgattgattctgtcacccagatactgagtatagtacacaatagttaatttttcaattgtctcttctccctctctccctccatagtagtccccagtgtcttttgttgccatcagcagctgtatgacactgtccccaggtctcatgtctgtataaacatacacatcataggatatttcagggaaggttggcgtgttatcatttgcatccatcacttgaatattgacgatgactggctcactttcttgtacaccatcaaatgctgttatcgaaaaggtgtaagtttgctgttcttccctgtccactggttgaagtaaggtgaggtagcgagtaataccagtctgtgtgacggtgaagactgaggtgtagtcattcagaaaaaggtgaagctctgggtcttttgtatcttctatgtccttgtccagagctactattcttaaaggtgaagtcaaattgagactgtccgaaatggttgctcccactggggcagattccaggatatagccttgataactgggcattgtaaaatatggactttgattgttttcatccagtatttcaatgtgtagaccggcaaaggcaggaagaggatgaccattgtcttgttcagccttaataaccaaatcaaatttctggtgaaagtctctgtttactggctccaggagactaagttctgctgtcctaggatgcatatggaaaaatcgtgggtaatcctcaggagtccctttgctccagttaccaacaagttcctcatctctatctgagaccacctcagcctggttttcatcattaatatcattatcagcattttggtcaaagccattcggtaagtctctagagagttccaaactttctcgcatcttcctatcttctacagagccctgcaaactgttccaatctctgcctgttacccagttccaaagtcgtttctgcat

SEQ ID NO: 456 - DNA, 2581 bp, Homo sapiens
  SIMILAR (1)..(477): 721254mologous to Homo sapiens Sequence encoded by human reg cDNA,accession number P81514,Smith-Waterman Score=580.
atggctcagaccagctcatacttcatgctgatctcctgcctgatgtttctgtctcagagccaaggccaagaggcccagacagagttgccccaggcccggatcagctgcccagaaggcaccaatgcctatcgctcctactgctactactttaatgaagaccgtgagacctgggttgatgcagatctctattgccagaacatgaattcgggcaacctggtgtctgtgctcacccaggccgagggtgcctttgtggcctcactgattaaggagagtggcactgatgacttcaatgtctggattggcctccatgaccccaaaaaggatcacaactcctcatcagcaaggaaacaaaactggatagacaatgagtttgatgaattgacagaagtaggcttcagaaggtgggtaataacaaacccctctgagctgaaagagcatgttctaacccaatgcaagaaagctaagaatcttgataaaaggttacaggaactgtttcacgtgactcagaaagagagagactctgtttgcttgggcgaaagtaaggaaaaagaacaagagctgctacctggtaatacagagaattcttccagatcctgtccaagaacatcaaggcagtacctctatgagtatgcaagaaccacagtattactgggcttggagacaaaggagacacgttttatccgtggacccaaaactccggcgccggtcacagactgggaaggcagccttcccttggtgtttaatcattgcagggacacctctctgattattcacccaggtttcagaggtgccagaccacacagggacacctgccttggtccttcacccttagcggcaagtcccgcttttctggggaaggggcaagctgctccttgccaggcggagctaggtcccaattcttcctcagcctctgctcctccaccctataatccttttatcacctcccctcctcacacctggtccggcttacagtttcgttcggtgactagccctcccccacctgcccagcaatttactcttaaaaaggtgcctggagctaaaggcatagtcaaggttaatactcctttctctttatcccaaatcagatagtgtttaggctctttttcatcaaatataaaaatctagcccagttcatggctcgtttggcagcaaccctaagacactttacagccctagcccctaaaaggtcaaaaggccatcttattctcaaaatgcattttattttattacccaatctgctcctgacattaggaaaaaacttcaaaaattagaatctggccctcaaaccccacaacaggaattaatcaaccttgccttcaaggtggtccaatattaaaagtagaagcagccacgtagcaatgtatttctgagttgcaattcctccttgcctccactgtgagacaaaccccagccacatctccagcacacaagaacttccaaacgcctgaactgcagcggccaggcgtttcctccagaacctcctcccacaggagcttgctacacgtgccggaaatctggccactgggccaaggaatgcccgcagcccgggattcctcctaaggcgcgtccccatctgtgtgggaccccactgaaaatcggactgttcaacttcacctgggcagccactcccagagccccgtggaacctctggcccaaggctctcttgacttgactccttcccaagatctttgggcttagcaagctgaagactgacacttgcccgatcgcctcagaagccctccaaattttgccatggctactaatggtcatgtctagttgaaagtcagaagacaagggagacaaataaatgtcattactgtggttttgatttgcatttctctgatgaccagtgatgttgagcttttttctcctatgattgttggctgcatctatatcttcttttgtaaagtgtctgttcatgtcttttgcccactttttgatggggttgtttgatttttttcttgtaaatttgtttaagttctttgtagattctggatattagacctttgccagatgggtagattgcaaaaattttctcccattctgtaggttgcctgttcactctgatggtagtttcttttgctgtgcagaagctctttagtttaattagatcatgtgtttctattttggcttttgttgccattgcttttgccatcttcatcatgaaatctttgccagttcctgtgtcttgaatggtattgcctagattgtcttccaggacttttatagttttgggttttacatttaagtctctagtccatctggcagccacttccagagcccctggaactctggcccaaggctctctgactgactccttcccagatctcggcttagcagctgaagactgatactgccgaatcgcctgtggcttgtttttggtttggtttctatgctccatagctactgagactgacatctcttctcttgttgcaactttaatctgtccaaccaatatgcaggttagtctctccccacctgagagtttaggtaccaagtttcccaaggccttgccaattgctagcttctccctatatacctccagactcccaggagctatcccccatagatggccagacat

SEQ ID NO: 457 - DNA, 2074 bp, Homo sapiens
  SIMILAR (1582)..(2016): 341254mologous to Homo sapiens neutral protease large subunit,accession number M27826,Smith-Waterman Score=90.
  misc_feature (1)...(2074): n = a,t,c or g
atgactgacgagctgagagaagaaggcttcagacgatcaaattactctgagctacgggaggacattcaaaccaaaggcaaagaagttgaaaactttgaaaaaaatttagaagaatgtataactagaataaccaatacagagaagtgcttaaaggagctgatggagctgaaaaccaaggctcgagaactacccaggaagctgctggtctgtcctgcgagcttccctggggtcttctccatgcgagcgcagcagtgcccctcccgtgctccgactgttgtcatcactgcaagcctcgtgtttagctttcataaagccatcctgacaaatccgttccgctctttccttaatcattcctgctgcgattctctaaacaacgcccgatttgttgacatctccagggatgttcagctaagagctgtacatagaatccaggactcttttggagtcttcttggaggcgacaaccaaagataaagccacctcttacatttggtcatctttgcagacaggtaaagtggagtcaaaaggcaagagagcaaggactgcccttgagttttttggtgtcagaagagggtcagacattaaggattgtggcacattgcctaggtatgcaagtgccctgagctccctggtgttgaaaggcagctgcgcctatcaggactgtgagaccaagaggaggaatcttgcctctgtcatcatcaggatgagagtgtccattgcccatccacctatgacctcaggtcctcagaccgaccagcccaagaaacatctcaccaatttcaaatccgagacaaaagagacacgttttatctgtggacccaaaactccggcaccggtcacggactgggaaggcagccttctcttggtgtttaatcattgcagggacacctctctgattatacacccacgtttcaagggtgtcagaccacgcagggacgcctgcctcagtccttcacccttagcggcaagtcccgcttttctggggaaggggcaaatacccctcaaccccttctctccttgtctctaccccttctgtgcttttctggggcaggggcaaatacccctcaaccccctctccttcacccttagcggcaagccctgctttcctggggcaggggcaagtacccccaatcccttatctctgtgccccgatcccttatttctacaccccaacctcttataactttgcaccccgacccctttcccgcttttctggagggtaagaacccccgaaccccttccctgcgtgtctctactctctctttcctctggggttgcatccttcactatgggcaagcttctaccctgcattgccgcttctcccttaggctgtgttcttgaaagcctgaaaccgttttcactgacacgtgacctttttttgctccccaattcttttttccccaccccggacccttccactttttttggagggtaagaaaccccgaaccctttccctccggttttggactttttcttttctgggggctggcaccttcccttagggcaagtttttacccctccatttccccctttttccctggcagccactcccagagcccctggaactctggcccgaggctctctgactgactccttccctgatcttctccacttagcagctgaagactgacgctgccctatcacctcggaagccccgtagaccattcacggacgccgagcttcgcgtaactctcacagcggaaggtaagcctgtccccttcttaatcaatacggaggctacccactccacgttaccttcttttcaagggcctgtttcccttgcctccataacctgttgtgggtattgacgggccaggcttctaaacctcttaaaaactccccaactctggtgccaacttagacaatactcttttaagcactcctttttagttatccccatctgcccagttcccttattaggctgagacactttaactaaattatctgcttccctgactattcctggactacagctgtatctcattgccaccttcttcccaatccaaagctcctttgtgtctcctcttgtataccccancttanccacaagtataagatatctctactcctccttg

SEQ ID NO: 458 - DNA, 594 bp, Homo sapiens
  SIMILAR (298)..(471): 271254mologous to Homo sapiens Human secreted protein, SEQ ID NO: 7791,accession number G03710,Smith-Waterman Score=67.
atggcccaacctcctccttcaggagaggcgattccccttattgtatgtctcttcgttgttcaactttccgccgacttcacctattttggccggtatgaaaatataaactatcgtctgactttccccgccgtcattactccgagagttgccgtcctttcgccggagctgaaaacgatctgtcccaattaccaacttatgaggcttgaggaaaacataatttcttctccctttcattttggcatagttggcaggaaattctgggccactttactcgttctgggacttgcagacacaatcctgggagaacagaacaggcagaagctggtaggaaaagataattcttacaaaggcagctctcccaaatctctacctgtagagcctggtcaagaggggaagtggagatttagtggtgccccccgcgcccaaatgtttaatagaaagagaagtggttttgacaatctttctgaagaaaaccacccaagtattctccgaacgcaaggcctaaaagctgctgatggcattgacttcgagaaactcccactcaatggtacagcagcacccaacaatcggcttggcaggggcccccctcactaa

SEQ ID NO: 459 - DNA, 420 bp, Homo sapiens
gttactactttgtaacttttatttttatgtaactttattttaactttattttattgtaactttattttaaaaacaaagtatttgctattgtatttgttcaaaaaagcttacaaatcaaaatgagagaactattctgtttgtcaaccctgagaaactacttaatgttttctgactcctttcgatgtatagtcagcattcgactatccatatctgaacctcctacacacactgtctctttgatgtaaaaactgcaggcaaaaattccatattgcatgcatttttgccttaaacctttttaactgaaatgatatagatgaaaagaaaccatacagtggcggggggagtataaaaaaactagacaaaagtgaatgaaagcggacgcgtggatggcatcaattccgggcgtccgacggttcaaat

SEQ ID NO: 460 - DNA, 387 bp, Homo sapiens
atgtgcttctggttagaacttcagaaagcttccacttatgatgaaagggaaaaagaaattgatgtgtgcagatcacatggtgagactaacacattaccagcagtggtgtccaaactcctgcttgaggaaagcagaggaaaatataaaggggaccttgtcttgcatcttaggtatcaactgccacaagggtgtggagcaccaagcgggctcttggggtccctgatcccaggacttgactcttggatggcatgtctagaccttccaaaggcaagaggggagcccattgccgaaggtttttacatcaaagagacagtgtgtgtaggaggttcagatatggatagtcgaatgctgactatacatcgaaaggagtcagaaaacattaagtag

SEQ ID NO: 461 - DNA, 1800 bp, Homo sapiens
  SIMILAR (1646)..(1798): 311254mologous to Ipomoea batatas reverse transcriptase,accession number AF223326,Smith-Waterman Score=69.
atgaatgaaaaaaagacccgtactgatgcacattattgtgaaatttcagaaagccaggataaagaaaaggttcagaaaaaaatagcccacatccgaacaatcaggaatcagaacattattggtcctggcagcagcaggagtagaagctcacaaagagctagagcccggttctgtaagtctttagctgaaatggtccagtacaaaagcactggaaatgagtgggctaggaggacaaggaccgtctcctgcgtgaggagttggttggaggtccccaaggccagacttagtgataaattcccaccaaggcaaccagacacatccatgggtgtcacagctcagagctgggatttactagcttatgtggaaagtccaaagacccaagtcagaaatctccagactctcccctgccagtcctaccggacagtatcaggcaatagttatagagaccccagggtggaagtgaggatctatcttgcatctcctacagatgtagctgtgtgtaaggcaccaaatattgggatggctaatgtaaaaagggtacctagctacatttccttctataaccaaaaaggagaagcctcatgcccatcagctctcattaatgtcttatcaatgcatccagaagggtccccagcccacattgtgtggagtcaggattcaatacacagttggattatccactacgtgaaagaggatccacctaaaggatctctacagggccaacgattccaaggaatcctgtacttccttgggagcactgaaccaccagatggtgcagcgcatcgtaggagcatttatttccgctgtgctgtgcaagctgatagagcagaggaaggcacaggcaatgctgatttaaatctatccaaccgtggagaggtgctcggtgttctgacggaggctaactctgcagcagcagcacagaggatgcaagcacagatcctgagggaggaagatgaggcttacaaaggtcacgtcttttctccctttcccctttctacattctggaatgcagagttaatggcaggaaacaaagcagccacattggaccatgagatgcaagccaagtatgaggatggcagggccacagaatcaccaaagaacaaagggagaatatttcagccatcttctagtatccagtggattggcagaattcttttaggaagggatataatcaggaaatttccatctccacagaaagtattactaaagaaaatgcatgttcctcccattatccaaatggatatggaggtcttgggccaggaacaaagctccgaacagctggatttagaggagatctcaaggaaaatttcattccttgacaaatggagggaaatctttagttatcacaggttgggaaccaataattcaactcctcagaatcatgaaggcaaccatacatctgctgatgaaaatgaagatggaacaggactatctcagcccaaaggacaaggacatttgccatcaagtggcctttgttctattcccaacccctctatcatctcttcaaaattgggtggctttcctatctccctagcaatggccacggccaaagctggaggtagtgccttggcaaatgtccaaaggaccagctgtcatggtcaaaaagatgccattggaaacttgggaagcagaggcaagggtcaagccaagatgcctgaagccacaggaagatgggcaggtatgcagagctcccggaacactgcactcagctcactggccttcaagcctctggatggagccttaacttgtatcttatatagatacttaatcgctgtcctttcaagcaacgaagatagataa

SEQ ID NO: 462 - DNA, 606 bp, Homo sapiens
  SIMILAR (28)..(135): 441254mologous to Human immunodeficiency virus type 1 envelope protein,accession number M98908,Smith-Waterman Score=66.
atgaatgaaaaaaagacccgtaatgatgcacattattgtgaaatttcagaaagccaggataaagaaaaggttcagaaaaaaatagcccacatccgaacaatcaggaatcagaacattattggtcctggcagcagcaggagacactgtagagtatcggttgctggcccttgtgatgctgtgactgactgggagctgcgcttagtgcctctacccagcattgagagtttcttatcgcttattactagcctgggaaaagaccaaaattcaaaactcaaagtgcggtttctaccgaatgcttataactttcagaccatcatgatgttgaaaaatcgaaccatcgtaggttgggatccatcctataagacgagctacactgccggaagtgtaagactgctatgctgccggaagatggggcatagtggacaactgcaagtcctgacaacaggaggactgcacgcaagtgagcagacaccaccgacttcctttctgcgtcaccagtgtcgtcagcagagagaggacagcacaggctcaaggttggtagtgaagtcaggttcggggtgcatgggctgtggtggtgttgatcagttgctccagtgtttgaaataa

SEQ ID NO: 463 - DNA, 938 bp, Homo sapiens
ggcgtgggaatatctggcttaggactgtttctctctaagacaccattgttttcccttattttaaaagtgatttttttaaggacagaacttcttccaaaagagagggatggctttcccagaagacactcctggccatctgtggatttgtctgtgcacctattggctcttctagctgactcttctcgttgggcttagagtctgcctgtttctgctagctccgtgtttagtccacttgggtcatcagctctgccaagctgagcctggccaagctaggtggacagacccttgcagtgatgtccgtttgtccagattctgccagtcatcactggacacgtctcctccgcagctgcccctagcaaaggggagaccattgtggtcagctatcaagacatgggacagaaactgacttagtgctcacaaagccccctaacaccttctgggcttgaagatcaccccaagcttgtgttcagaattttcttactgtgcttaggactgcacgcaagtgagcagacaccaccgacttcctttttgcgtcaccagtgtcggtcagcaggagagaggacagcacaggcttcaaggttggtagtgaagtcaggtttcggggtgcatgggcttgtggtggtgttgatcagtttgctccagtgttttgaaataaagaagactcatgtttatgtctggaataagttctgtttgtgctgacaggtggcctaggtcctgggagatgagcaccctctctctggcctttaaggagtcccctcttaggacaggcactgcccaacagcaagggcagcagagatgggtgttaagttcctgaggagctcgaggtttcgagctgggctttagacattggtgggacccaggatggtttggcaggatgccctgatcctaagaagggggcctgtgggtgcgtgcatcctgtcggggagaccccactttgt

SEQ ID NO: 464 - DNA, 1112 bp, Homo sapiens
  SIMILAR (536)..(868): 471254mologous to Homo sapiens Human secreted protein encoded by gene 151 clone HTLEF62,accession number W74879,Smith-Waterman Score=206.
atgcatgtgaagcccacacttagcacagggccagaacgtgctgcacccacctccaccctcacctgtgaccaggaccacagaagcaaaagttctcactcaaactgggtgtggccatctgccccctaccaccggcctcgcagcgtgctcgtatcgagcacctacgtgtatcaccgtgctgggtgtggggtccaaaagagaacccagcagatgggtccctgtgctgaggattcagtgaaatcacacatcgggtgccgagcatggtctcagcagacaggacatgtgcactcgaggttggggctaaaaggaaacaatagagaaagggagagtggccacgagggtgaatcacgccttccacacaaggaggatgccaaggatgggcgcttgttcaatgagcagaacttcttccaggggccgccaagcctctgcaaggtacctgacagggaactgggcaaggagggagataacaagtggaagaagctgtactcgaccccactgctggccatccctacctcatgggtttcggtgttcaccaggacaaatacaggtgactttggcaggctatggcttcgccttccgctattgcccaagtggaaacacgtggcctacgtggaaggcagcaggagccctcacgagggggacctgagttcattagcatggacctgcacaagggatgcgggccctcccgccgcagcgcctccagagcctgggctactgcatgctgaagtggctctacgggtttctgcatggacaaattgccttcccaacactgaggacatcatgaagcaaaaacaaagtttgttgataagccggggcccttcgtgggaccctgcggcactggatcaggccctcagagaccctgcagaagtaccgaaggtggtgatggccctcacgtatgaggagaagccgccctacgccatttatccaggccagcagctcggggtcctccccaacacccttgctcccccagcagcctcctccaaccttcggtcccggggcagaggcttcatcctgtttatcgatggagcgagcgcaggcttcccgtcgtcagtgccgctgtgtctcacagtgccttcctcacccagggcaaagggcatttagagcctgacacctga

SEQ ID NO: 465 - DNA, 1544 bp, Homo sapiens
  SIMILAR (1)..(1200): 721254mologous to Homo sapiens vaccinia related kinase 3,accession number AB031052,Smith-Waterman Score=1361.
gacagttctgagtctgaagatactctgagttcctctgagagatccaaaggctccgggagcagacccccaacccccaaaagcagccctcagaagaccaggaagagccctcaggtgaccaggggtagccctcagaagaccagctgtagccctcagaagaccaggcagagccctcagacgctgaagcggagccgagtgaccacctcacttgaagctttgcccacagggacagtgctgacagacaagagtgggcgacagtggaagctgaagtccttccagaccagggacaaccagggcattctctatgaagctgcacccacctccaccctcacctgtgactcaggaccacagaagcaaaagttctcactcaaactggatgccaaggatgggcgcttgttcaatgagcagaacttcttccagcgggccgccaagcctctgcaagtcaacaagtggaagaagctgtactcgaccccactgctggccatccctacctgcatgggtttcggtgttcaccaaggacaaatacaggttcttggtgttacccagcctggggaaggaaccttcagtcggccctggatgtcaagcccaaagcatgtgctgtcagagaggtctgtgctgcaggtggcctgccggctgctggatgccctggagctcctccatgagaatgagtatgttcatggaaatgtgacagctgaaaatatctttgtggatccagaggaccagagtcaggtgactttggcaggctatggcttcgccttccgctattgcccaagtggcaaacacgtggcctacgtggaaggcagcaggagtccttcacgagggggaccttgagttcattagcatggacctgcacaagggatgcgggccctccccgccgcagcgacctcccagagccctgggctaactgcatgctgaaagtggctcctacgggtttcctgcccatggacaaattgcccttccccaacactgaggacatcatgaagcaaaaacagaatgtttgctgataagccggggcccttccgtgggaccctgcggtcactggatcaggccctcagagaccctgcagaagtacctgaagggtggtgatggccctcacgtatgaggagaagccgccctacgccatgctgaggaacaacctagaagctttgctgcaggatactgcgtgtgtctccatatgaccccattggcctcccgatggtgccctaggtggaatccaaaactttccatttgcagtgtgcaacagaaaaaaaaaaatgaagtaatgtgactcaaggcctgctgtttaatcacagataagcttctagaacaagccctggaatgtgcattcctgccactggtttcaggatactcatcagtcctgattagcctcccggagggccccagtttccctcccgtgaatgtgaagttccccatcttggtggcctgcccttcagccagtgtcctagcaaagctggatggggttgggccggcccacaggggggacccctcctacccttgacccctctgtgctttggtaataaattgaatttccagaaaaaaaaaaaaaa

SEQ ID NO: 466 - DNA, 429 bp, Homo sapiens
  SIMILAR (117)..(1): 921254mologous to Mus musculus FI58GM,accession number AB047544,Smith-Waterman Score=199.
ccaggactctggaaattcctcatgtaaataccgtatctgctccatggcttcccacgtcagggtcctgggcggggcaccaggcgcctccatttgcctccgaattttctggaatcggattgcttgtttctgtcgtttcagggtgctgggggaagagaaccaatggcagaagccatgcgtggaagcagaatggatgtttaaagagcctcaggctaaatcatggagcgcccagccctcttctctttgatcgcaagggcaaccgggccatgttgccggcttagagctgctccgtacacccagaaagctaacacctagaacaataactgcctgtaagcatgccgaactctctaaactgatgatgaaatacgtcactaatgaagggaccagtggtcccaggggagctgaacacctgacgctgcgcggacgcgtggg

SEQ ID NO: 467 - DNA, 1251 bp, Homo sapiens
  SIMILAR (1118)..(1246): 581254mologous to Homo sapiens Human secreted protein, SEQ ID NO: 6812,accession number G02731,Smith-Waterman Score=119.
atgaataacagtgttaaggagagacactgctctcggtctgagagagctcaggttggagcgcgccctcaggctgagagagctcaggtgctagatccagacttggttgggaaggatcacttccctggctcactggctgacagaggagttgctgtggtgtcctgtgggcagaacttgttggcaatcctccctcgagagagccgggaaagctgttcatggggagctagttcacaggaggagctccataacaaaccatataaagggacagtgggcgaggaagctgagtgcgctgactaccataccctgcaggaactgaacgcaggagatgccgcacatgccacaggagttggaagcgctctgctacaaattcactgcgtgggaggggagggagatacttggatggcactgagcagcaaagaacacctcagaggaggcagtttatcctatttacttactggaggaaatagcaaatggctaagatttgccaaaggactaagtgccccttactatggcaggaaaaagtattccattcagtggggtggtagagtgggtcagattgggggtggaacaaggagtgggaccacaggtagagaagcttcgcccagtgttatactttctgccattattggtaggaattgggtgctagaggagagagccaatggcagaagccatgtgtggaagcaggatggatgtttgaagagcctcaggctaaatcatggagcacctagccctcttctctttgatagcaagggcaatcggtccgtatctgccagcttggagctgctctgtaaacccagaaacctaacacctagaataataactgcctgtaagcatgccgaactctctaaactggtgatgaaatatgtcactagtgaagggactagtggtcccaggggagctggacacctgacactgtgctctggacattggcctagggacttcgtgccctgtgtcctaggtgctccagccatggctaaaaggggccaagatacagttccggccatggtttcagagagtgcaagccccaaaccttggcagcttccatgtggtattgagcctgtgggcacacagaagtcaagaattgaggtttgggaatctgcacctagatgtcagaggatgtatggaaattccaggatgtccagacagaagtttgctgcagggaaggagccctcatggagaacctttgctagggcagtgcagaggaaatgtagggttgaagctcccacactgaagcactgcctagtggagctgtga

SEQ ID NO: 468 - DNA, 765 bp, Homo sapiens
  SIMILAR (97)..(240): 1001254mologous to Homo sapiens Human secreted protein, SEQ ID NO: 6379,accession number G02298,Smith-Waterman Score=244.
  misc_feature (1)...(765): n = a,t,c or g
atgaaagggaaatccccaggtgctagacaagaaaatgagctcaaagtcagagcagggaatcttactgaaaacagtggatccacaggcctactggctggtcacctgacttttgaatgccgcaattttctccgagtagaccctaaaagggacatagttttggatgtcagcagtacaagtagtgaagatagcgatgaagagaatgaagaactgaataaattgcaggcattacaggaaaaaagacagtattcaataaattacatgagatattcaatgctttattataaaataggctttgtgttagatgattttgcccaactagaggctaatgtagcccttatgtccactaaagtaaatgcttatgttgtagaagcatcgaacatcaaccaatgtcatggcacagcaccaaagattgcaaatacctcactatggtgcgcttagaaattttcaaattgataacctatagatacggctgcaggtgaattcatgatagtgaaatcagctaagtatacttaacctcacaggctagaaaggtttactgattcttgtttcacctggcacccaatgtggataccctcagtaagactcagggagccttataactcctcttaacatatgcttacccatgcttaaattctagggaagctgtatccacagccctctgcattgcagccatgagagctctcacgctttcaacccttccataacctaatttagtcatttgggcctctcaaaaggaaatgctnttgtttaaataggtcagtcagt

SEQ ID NO: 469 - DNA, 495 bp, Homo sapiens
  SIMILAR (253)..(131): 421254mologous to Homo sapiens ORF,accession number X63118,Smith-Waterman Score=67.
atgactaaattaggttatggaagggttgaaagcgtgagagctctcatggctgcaatgcagagggctgtggatacagcttccctagaatttaagcatgggatgtgtcgaagaggcatgggcactggaatttgggtgtatgtggggaaaggattgcaggtggaaggggaagtgaggtctggagtccagtacactgccaagacccaagcacaagacatcctgcttgcctttctgttgcttagcaacggccacctccttgattacccgagttgtcatagtttttctgtagctatctactctgacacccagtacattggcctacaaagaacaaggcaaaagcctggtcattcagcccaatacaagatgacttgcagtgataagccagtacacactagtatgggcagttctcagtacagggagcaacaagaccgatttcatgctgaacccaaacgtcgagtaccagacagggaagggaaggaaattccaccgattctgtaa

SEQ ID NO: 470 - DNA, 373 bp, Homo sapiens
  SIMILAR (30)..(65): 751254mologous to Homo sapiens GLUT4 enhancer factor,accession number AF249267,Smith-Waterman Score=50.
cgagggccagctccttggctgcagccatcccgcttagcctgcctcacccacacccgtgtggtaccttcagccctggccaagctttgaggctctgtcactgagcaatggtaactgcacctgggcagctcctccctgtgcccccagcctcagcccaacttcttacccgaaagcatcacctctactgtctcctccctgggctaagcaggggagaagcgggctgggggtagcctggatgtgggccaagtccactgtcctccttggcggcaaaagcccattgaagaagaaccagcccagcctgccccctatcttgtcctggaatatttttggggttggaactcaaaaaaaaaaaaaaaaaatcaatcttttctcaaaa

SEQ ID NO: 471 - DNA, 1213 bp, Homo sapiens
  SIMILAR (1138)..(512): 521254mologous to Homo sapiens smooth muscle protein,accession number M95787,Smith-Waterman Score=421.
ttttttttttttttttttgcctgagaaaagattgattttttttttttttttttttgagttccaacctgcaaaaatattccaggtacaagatagggggcaagcctgggctggtccttcttcaaatgggcttttgccgcccaaggaggacagtggaacttggccccaacatccccagcctaccccccaaacccgctttctcccctgctttagccccagggaaggaagacaattagaggtgaatgggggcagccgggagggaggggcccaaggcaagtgatgctttcgggtaaagaagttgggctgaaggctgggggcacagggaggagctgccccaggtgcagttaccattgctcagtgacagagcctcaaagcttggccagggctgaaggtaaccacacgggtgtgggttgaggcaggctaagccgggatggctgcagccaaaggagcctgtgtggagggccgggcttcaagggcttagccctctccgcttctaactggatgatctggccgagggtcgtcccgtagccctgtcaatgccgggcctggggaggccccctctgttggctgccccatctggaagggccaatggacatgctttccctttctgcagctgggctcttctgtgaaattccctcttatgctcctgcgctttctttcataaaaccagtctgggatcttccacggtagtgcccatcaattcttggtcacctgccaaagctgcccaaaagccatcaagggtcctctggaactggttgccatgtcctttgcctttcaaagaggttcaaagatcttgaaaaatgttagattttggacgaaccccatagtccttcagccgccttcaggaaatgaggcaacggctccgtcttgcttgaagaacaagaaggggggggtttttcgggcaccttcaaccggctttgaggcatcaggggtaaaggttgttcacagcctgtcaagaatcacggccattcttcagccagactgggaagcccaagggcccacggtctgggcggcccacatcagggccacactgcactatgatccactccaccagccgctcctccagctcctcgtcatacttcttctcgattttggactgcacttcgcggctcatgccataggaaggacccttgttggccatgtctggggaaagaaggcttcctcagggctcgcaggaaggagtgaagacttgtgtctgggttcggacagacaggat

SEQ ID NO: 472 - DNA, 813 bp, Homo sapiens
  SIMILAR (305)..(415): 641254mologous to Homo sapiens Human secreted protein, SEQ ID NO: 6812,accession number G02731,Smith-Waterman Score=125.
  misc_feature (1)...(813): n = a,t,c or g
atgcagaggccctggagaggagtgtgggaagaggtatgtggaactttgaaacttgagggagatgatttcgggtatctggcagaagaaatttctaagcagcaaagcattcaagangcctgggaacttggtgccctgtgttccagccactccagccatggtaaaaggggccaaggtagagcttgggccacggctgcagagagtgcaagctccaagcctggccagtttccacatagtgttgagcctgtgggtgcacagaagtcaagaattgaggtttgggaacctccacctacatttcagaggatgtatggaaatgcctggatgtccaggccaaagtttgctgcaggggcagggcccttacagagaacctctactaggacattgaggaagggaaatgtggagttgaatcccccaaacagagtccccactgggaaactgcctagcggagctgtgagaagagagccaccgtccttcagagcccggaatggtagatccaccaacagcttgcactgtgtgactggaaaagacacagacactcaacgccagcctgtgaaagtagccaggagggaggctataccctgcaaagccacaggggcagagctgcccaagaccatgggaacccatttcttgcatcagtgtgacttggatgtgagacatggagtcaaaggagatcattttggagctttaggatttgactgccctgctggatttcagacttggtgtgggtcctgtagcccctttgttttggcctatttctcctatttggaatgggtgtatttatccaatgcctgtaccctcattgtatctaggaagtaa

SEQ ID NO: 473 - DNA, 1239 bp, Homo sapiens
  SIMILAR (784)..(1032): 611254mologous to Homo sapiens unnamed protein product,accession number AK024120,Smith-Waterman Score=256.
atggaatactatgcagccataaaaaaggatgagttcgtgtcctttgcagggacagggatgaagctggaaatcatcatcctcagcaaactaacacaggaacagaaaaccaaacaccgcatgttctcactcataactccccatccgtcctgtggagagccatctccatcacccaataaaatccccacattcaccatctttcaagtccgtgtgttacctgattcttcctggatgccagacaagaacctgggtaccaagagggcactcagctggttaacacttaagctgtctgtagatggcagactaagacagcactgtagcatgcccaggtctgcaggatggacccggcagctggtgccctgtgtgaggaacgctgcaacggactgcgacagaaccctcgaaaacgaaggtgaagagactgtgcagtcatgtgacagacacatcaaaccataccatggcgtggctaagacccaagctggtatcaaaaataaaggaaacgacgctgcaggacccgcagccccagacgatgtggcttcctccgatgacacaggccccagacattacctgggggaagctgaagaagacaactcaggaggccgagtgaatccttctctggacacagacaccatcactccagataatctgttccttgctatgctctctattgtaccttgcaactctcataggaagtcaagaactgaggtttcggaacctccacctagatttcagaggatgaatagaaatgcctggatctccaggcagaagtttgctggagaggcaaggatctcacggagaacctctgctaggacagtgcagaaggaaaagctgagatcacagccccaacacagagtccctactgaggcactgcctagtagagctgtgagaaggccaccatacgccagaccccagaatggtagatccactgacagcttgcactgtgtgcctacaaaagccacagacactcaacactggcccatgaagacagccaagaaggaggctgtaccctgcaaagccacaggggaagagttgcccaagaccttgggaacctaccttttgcatcagcatgacctggatgtgagaaatggagtcaaaggagatcactttggagctttaagatttgactgccccaccagattttggacttgcatgggacctgtagcccgtttgttttggccaatttcttccatttggattggctgtatcttcccaatgcctgtacccccaactatatctaggaagtaa

SEQ ID NO: 474 - DNA, 585 bp, Homo sapiens
  SIMILAR (548)..(438): 481254mologous to Homo sapiens Secreted protein encoded by gene 151 clone HNHED86,accession number W88684,Smith-Waterman Score =74.
tttttttaggtttgagggagatgatttagggtatctggcagaagaaatttataagcagcaaagcattcaagaagtgacttaggtgctgttaaaagcattcagttttaaaagggaaaaagagcagaaaatttgcaccctgactatgcaataggaaagaaaaacccattttttgaggagaaattcaagctggctgcagaaatttgcataagtaacaaggagccaaatgttaatccccaaaacaagggggaaaatgtctccagggaatgtcataggtcttcatggcagcacctcctatcacagacccagaagcctcttgcatcagcatgacctggatgtgagacatggagtcaaaggagatcattttggaggtttagaatttgactgcccttcgtgccacgcactccagcctgggcgatgagcgagactccatagttctgcatggctgggaaggcctcaggaaacatacagtcatggtggaagggaagcaaacacgttcttcttcacatggtggcaggagaaagaagtgggtttcgatcggggtaggccaccgagcccctgcgaaaacccggagtaacggattcggcg

SEQ ID NO: 475 - DNA, 851 bp, Homo sapiens
  SIMILAR (63)..(404): 781254mologous to Homo sapiens Rab30,accession number U57092,Smith-Waterman Score=443.
agaagtccatagtgatatgggtgcacattaggcctgtgatggtctgcattgcatttggcagcagaatggaagaaggacagcctgcaagtcaaggagccacaattggagttgattttatgattaagacagtggagattaatggtgaaaaagtaaagctacagatctgggacacagcaggtcaagagagatttcggtccattacccagagttactaccgaagcgccaatgccttgatcctcacctatgacattacctgtgaggaatccttccgttgccttcctgagtggctgcgggagatagaacaatatgccagcaacaaggtcatcactgtgttagtggataaaggaagggaaaaggatatcctcagcagaaaccaaaaagctcagaacaataacaacaagttcaaatgtaaccaagtggcttcctttgattactttcaggtggttgtgccaccacgacaccagattatcaacaacttcccagagttagtgggatgtgacagggtagaagggaatgtggagtcagagcccccacacagagtctctactggggcaatgcctagtggagctatgagaagagggccaccatcctccagatcccagaatggtagacccactgacagcttgtaccgtgagcctggaaaagccacagacactcaatgccagccagtgaaagcaactgagagggaggctgtaccctgcaaagccacaggggtggagctgcccaagaccatgggaacccacctcttgcatcagtgtgacctggatgtgagacctggagtcaaaggagatcattctggagctttaaaatttgactgcccactggatttcggacttgcatggggcctgtaa

SEQ ID NO: 476 - DNA, 2006 bp, Homo sapiens
  SIMILAR (316)..(867): 781254mologous to Homo sapiens ribosome S6 protein kinase,accession number AF090421,Smith-Waterman Score=660.
atgtacagcttcttggagaaccttgccccagccctgcaaggaattggcatccatctggtgctgtacctgagtcttccagaggccattccatcaagccacctgcttcaggatggtggagaacatgctaatttgacaggacatgctgagaaggtgggaatagaaaattttgagctcctgaaggtcctaggaactggagtaagatgctctggtaatcatgtttaccagattgaaataagcacacctggaggcatagctagtgtggtggatgaccaagtcaccatttcacaagattccagtaatctggaaagattaattttaggagtgattaatatgattcttcagttagtagaaattctctcgtatgacacagttgcttatggaaaagtatttctagttcgtaaaataagtggccatgatactggaaagctgtatgccatgaaagttttgaaaaaggcaacaatcgttcaaaaggccaaaaccacagagcatacaaggacagaacgacaagtcctggaacacattaggcagtcgccatttttggtaacattacattatgctttccagacagaaaccaaacttcatctcattttagtgtatgaactgcagaacaatggagagatttctgagttcaacgttaagtcaaatcagatgtgcaaagacgagcagcctgaaactgtgcaacaagagcgtttcacagagcatgaggtgcagatttatgttggagagattgtgcttgccctcgaacatctccacaagttggggattatatatcgtgatattaagcttgagaatattctacttgattctaatggccatgtggtgctgacagattttggtctgagtaaggagtttgtggctgatgaatctagggacttggtgccctgcttcccagctgctacagccatgactaaaaggagccaaggtacagctcaggctgttgcttcagaggatggaagcctcaagccttggcagcttccatgtggtagtgagcctgtgggtacacagaagtcaagaattgaggtttgggaacctccgcctagatttcaaaggatgtgtggaaacacctggatgcccaggcagacgtttgctgcaggaatggggccctcacggagaacctctgctagggcagtgcagaagggaaatgtagggtcagtgtccccctcctacagtccccaatgtggcactgcctagtggagctgtgaaaagagggccaccatcctccagaccccagaatggtatatcaaccaacagcttgcactgtgcacctggaaaaactgcagacactcaatgctaccccttgaaagcagccaagagttgggctacaccctgcaaagccacaggggtagagctgcccaagaaaatgggaacccacctcttgcatcagcatgacctggatgtgagacatggagtcaaaggagatcattttggagctttaagatttgactgccccagcggattttggactttcatggggcctgtagcccctttggtttggccaatttctcccatttggaacagctgtatttacccaattcctgtaccccccattgtatctaggaatcctattctctacacaacttgccaatttaacagatctggattcttgtaaaccaccctgtaagagtaggggccttaacgacactagtgcaaatggtaacatgaagggagaaactgccacactaattgatttggatcctgtaagaaccactggagaatttcttagtcctgccccagtggctgtggcgcgctgcacaccgaaggagactgttgatatcctgaatggtgaaattgaggaggagaggaaaatccagaagcataaaaccctccctaagatgtctggaggatgggagcggcagttaaatgggacagaagctaaattagtgggaaaagctgccggggaaagatcgctgtcactttcaacattaacaacagcatcccaccgacacttgatggcaaggaggaaccctcgaaagggcagcaagttggagaacaggagcctgaattga

SEQ ID NO: 477 - DNA, 561 bp, Homo sapiens
  SIMILAR (520)..(434): 481254mologous to Sindbis virus capsid,accession number AF035696,Smith-Waterman Score=65.
atggtagatccactgacagcttgcactgtgtgcctggaaaaccaataccagcctgtgaaagcagctgggagggaggctgtaccctgcaaagccacaggggtggagctgcccaagaccatgggaacccacttcttgcatcaccatgacctggatgcgagacatggagtcaaaggagatcattttggagctttaagatttgactgccctgctggattttggacttgtctgtggcctgtagcatctttgtcctggccaatttctcctgtttggaatggctgtatttacccaatgcctgtatccctgttgcgggaagtcacggaccacgaatggagggactggctggagctgccgcagaggaacataaattgtgaagatctcattttaatatggacattttctttactgtggaatctcatcaaagacttggaagcaggggtggtgagaggggcctggggcgtggtgtggagggtcgagttctttgtcgtcccacagtcacccccaggaccaccttgcgaagccgaaaatacacatctgcattttaccgacaaggaacgccactga

SEQ ID NO: 478 - DNA, 596 bp, Homo sapiens
  SIMILAR (544)..(437): 691254mologous to Homo sapiens Human secreted protein, SEQ ID NO: 6812,accession number G02731,Smith-Waterman Score=142.
ctgagtctttccccaaggttttttgacccccaaccgggtttgggaatgggtttaatgaattcattccgaaaggggcctccaaaaagaggcttgtggcttattagaggggtgtttaggccaaccaaagggcaagggaagtcctggacagttattgtgtcacccacagggctgtcattggtgcccaggaaattggatttgatttcatccaagccacgctgatgcaacaggtgggttcctatggtcttgggcagctccacccctgtggctttgcagggtacagcctccctcctggctgctttcataggctggtgttgagtgcctgcagcctttccaggtgcatggtacaagctgtcagcggatctaccattctggggtctggaggacagaggccctcttctcacagctccactaggcagtgccccagtagggactcggtgtgggggctctgaccccacatttcccttccacactgccctagcagaggttctccatgagatccccgcccctgcagcaaacttttgcttgggcatccaggcgtttccatacatcttcttaaatctaggtggaggttcccaaacctcaataatgacttccat

SEQ ID NO: 479 - DNA, 777 bp, Homo sapiens
  SIMILAR (624)..(502): 871254mologous to Homo sapiens Human secreted protein, SEQ ID NO: 7420,accession number G03339,Smith-Waterman Score=175.
atgcatggggattccatcctccatgtctgtgttcatagcagcagcagtggcagtgtgaaccagagtgaagaggatggggcaactggtgtccatgtgcatgttcactctggcagccatgttggtgcagatgcaggacactggcagagttcaaggctgccagcctccatgcacatgttcacaccagcagcggcagtggcagcatgggatgcagaaaacactttcaataaaatccaacattacttcattataaaaacactcaacaaactaggcattgaaagaacatacctcaaaatagtaagagccatatatgacaaacacacagccaacatcataccgaacaggtatgtctttatcagcagcatgaaaacagatgaatacagtaaattggtaccagtagagtggggtgctgctgaaaatatacccaaaaatatggaagcgactttggaactgggtaacaggcagaggttggaacaacttggaggctcacaaggaaacagaaaaatgtgggaaggtttggaacttcctagagacttgttgaatggctttgcccaaaatgctgatagtgatatggacaataaagtccaggctgaagtggtctcaaatggagatgaggaacttgttgggaactggagtaaagacttagatgtagagaagcaggagcagaaacagcaaatattggtgccccatcctcaattcagtgcaaaacacattgtccagtgggaaattgtgaaagtaaatgaaataatgcctgagaagtaccgaaaacttttcgtttga

SEQ ID NO: 480 - DNA, 645 bp, Homo sapiens
  SIMILAR (106)..(222): 541254mologous to Homo sapiens Human secreted protein, SEQ ID NO: 7513,accession number G03432,Smith-Waterman Score=97.
atgatctcctttgactccatgtctcacatccaggtcatgctgatgcaagaggtaggttcccatggtcttgggcagctccacccctgtggctttgcagggtatcttttcagcagcaccccactctactggtaccaatttactgtatcagtctgttttcacgatgctgataaagacatacctgagactgggaaatttgcaaaagaaagagatttaatggacttacagttccacatggctggggaggcctcacaatcatggtggaagagtggaatgggatcacaaagcaagagacttggccttccacgagacattaatgctgcagaggaaatctcttgccggaagccgtgccacagagcacacaggcagtttgcagagaaggatgcaacccacaccatgtccgaagcgggctctggggaaggcaaggggccagctgaagctacccgtacacatcgttttacaagccctgggctgtcaatgggtcttttaaaaccagctgaactgcgttttgcttttcagtgtgtgacaactgggctgcaattggagctcagagcagaactcaccaggaaggaagcagtgtgtgtttcacagtccactgttgagctaattattcccagaggcctacgggactacacaggcttatattga

SEQ ID NO: 481 - DNA, 1749 bp, Homo sapiens
  SIMILAR (427)..(1251): 921254mologous to Homo sapiens putative p150,accession number U93565,Smith-Waterman Score=1382.
atggctgaaaggggccaatgtagagctcgggctgtgacttcagagggtgaaagccccaagccttggcagcttccacatggtgttgagcctgcagggataacctctgctaaggcagtgcagaagggaaatgtggggtcagagcccctgcacagagtccctactagggcaccaactagtggagctgtgagaagaaggccaccgccctccagaccccagaatggtagctccaccaacagcttgcacagtgagcctggaaaagccacagacactcaatgccagcccatgaaagcacccaggagaggggctatatcctgcaaagccacaggggcagagctgcccaagaccatgggaacctacctcttgcatcagcgtgacctggatgctaccagatgcttttgtctcatggctctgagaattatttctttcaacaaatggaagaacattccatgcttatggataggaagaatcaatgtcgtgaaaatggccatactgcccaaggtaatttatagattcaatgccatccccatcaagctaccaatgactttcttcacggaactggaaaaaactactttaaagttcatatggaaccaaaaaagagcccacattgccaagacaatcctaagccaaaagaacaaagctggaggcatcacactacctgacttcaaactgtactacaaggctacagtaaccaaaacagcatggtactggtaccaaaagagagatacagaccaacagaacagaacagaaccctcagaaataataccacacatctacaaccatctgatctttgacaaacctgagaaaaacaagcaatggggaaaggattccctatttaataaatggtgctgggaaaactggctagccatatgtagaaagctcaaactggatcccttccttacaccttatacaaaaattaattcaagatggattaaagacttaaatgttagacctaaaaccataaaaaccctagaagaaaacctaggcaataccattcaggacataggcacgggcaaggacttcatgtctaaaacaccaaaagcaatggcaacaaaagccaaaattgacaaatgggatctaattaaactaaagagcttctgcacagcaaaagaaactaccatcagagtgaataggcaacatacagaatgggagaaaatttttgcaacctactcatctgacaaagggctaatatccagaatctacaaagaactcaaacacatttacatgaaaaaaacaaacaaccccatcaaaaaaataaaagctggagagtgcagttttttagctgctgaagattctgagctgtgctgtagattagctagacattacaaaaagcccctcctgagtcagctaaacagtgaaatgaagttcctcaaagttggtttagcactgttaacgtggacccagaataaagttgagaaaagtcagctaccaattgaagaaaattctcagctttatggggcttatgtggttagatcccagaatggtacatccatcgacagcttgcactgtgcacctggagaagccacagatactcaatgccagcctgtgaaagcagccaggaaggaggctgtaccctgcaaagccacaggggtggagctgcccaagaccatgggaacccgcctcttgcatcagcatgacccagatgtgagacctggcgtcaaaggagatcattttggagctttaaggtttgactgccctgatggatttcggacttgcgtgtggctggtacatgctaaagatgcagacttttag

SEQ ID NO: 482 - DNA, 1306 bp, Homo sapiens
  SIMILAR (717)..(890): 561254mologous to Homo sapiens Human secreted protein, SEQ ID NO: 6812,accession number G02731,Smith-Waterman Score=157.
cctcaggtatgtcttcatcagcagcatggaaactgatgaatacagtaaattggtaccagtagagtggggtgctgctgaaaagatactagaaaatatggaagcgactttggaactgggtaacaagcaaagagatttgtggaactctgaacttgagagagatgatttaaggtatctggaggaagaaatttttaagcagcaaagcattcaagagatgatttgggtgctgttaaaggcattcagttttgtaaggggagcagagcataaaagtttggaaaatctgcagcctgacagtgcagtagaaaagaaaatcccattttctgaggagaaattcaagcctgctgcagaaatttgcgtaagtagtgaggagccaaatgttaagccccaagaaaatagggaaaatgtcttcagggcatgtcagaagtcttcacagcagcctgtcccatcacaggcccagcagcctaggaggaaaaaatggttttgtgggctaggcctagagtcactgtgctgtgtgctgtctagggacttggtgccctgcatcctagctgcttcagcaccagccatggttaaaaggggccaagatacatttcaggccatggcttcagagggtgcaagccataagccttggcatctcccatgtggtgttgagcctatgggtatacagaagtcacaaactgaggtttgggaacctctacctagatttcagaggatgtataaaaatgcctggatgtctaggcagaagtttgctgcaggggcagagccctcatggagaacctctgctagggcagtgctgaagggaaatgtggggtcagagccccccacacagagtccctactggtgcactacctaatggagctatgagaagaaggccaccatcctccagaccccagaatgatggatcaaccaacagcttgcaccttgtgcctggaaaagccacagacactcaaggccagcccatgaaagcagccatgagggagaacataccctgcaaagccacaggggtggagctgcccaagaccatggggaacccacctcgtgcatcagcatgacctggatgctggagacatggagtcaaaggagatcattttggagctttaagatttgactgcccttcgtgccacgcactccagcctgggcgatgagcgagactccatagttctgcatggctgggaaggcctcaggaaacatacagtcatggtggaagggaagcaaacacgttcttcttcacatggtggcaggagaaagaagtgggtttcgatcggggtaggccaccgagcccctgcgaaaacccggagtaacggattcggcg

SEQ ID NO: 483 - DNA, 392 bp, Homo sapiens
  SIMILAR (115)..(267): 421254mologous to Homo sapiens hBD-1,accession number X92744,Smith-Waterman Score=59.
ttagtaatataaggtgtagagtgaggcaatgtttcctatagttttaggttctacaatcttgtgggcagtgttctatagtcttatgattaggtctcagcgaatccttatgcctctatactgtgaactttaaatgtgcttctgagtcataggatggctagtgtgggctggagttgtgtattaaccttccccaagttccattatgctctggttacatctggagggcaggccttgttaagaagcaaatgctgtggcatatttcaaaatgttcccttccctccaatcttcttggaagcatgaggagatttttctccaatattcactgtgagactctggttgagctcttggatataaaatctgtaaaggtgtgggggctcacctataactgggtcccc

SEQ ID NO: 484 - DNA, 407 bp, Homo sapiens
  SIMILAR (397)..(47): 981254mologous to Homo sapiens PMS2L13,accession number AB017004,Smith-Waterman Score=583.
agtcccaaccttcgccgatacatggcaggtagaaatggtgacatcactgaggtaggtcggcaaactcttgaatcttagatgtgtgatgtttcagagttaagccttcgaagttttcttcttctaccccacatccattgcctgaaacttcaatgagatccactccatagtccttaagctttagatcaatattagtggcaccagcatccagactgttttctactaactccttcaccgcagtgcttagactcggtaccaccggcccagagcaaatctgatggactgacttccgatcaataggtttgatggccttagcaggttctgtactcgagctctcagctcgctccaaggatgcaacaccggatccgcctcggggaatgggaaagttccctccacacgaaatcgtcgac

SEQ ID NO: 485 - DNA, 300 bp, Homo sapiens
  SIMILAR (202)..(101): 821254mologous to Homo sapiens homologue of yeast PMS1,accession number D38436,Smith-Waterman Score=140.
gtcttttttctttttgggggggatggagtctcgctctgtcacccaggctggagtgcggtggcgtgaacccaggaggcagaggaaccatttgtgcagatcatctagaagaacctggaccattcttgatggagctgaatacagtgatcacgttgtcctcctaggagcaggggtggggggaggggggtggggtccttctaggagtccttggagaaaagtaagaaaccaggagcgtttcttacggacttgcagtccaggaggatttgaaggcacaatgcaggggctcagattgggacagaattc

SEQ ID NO: 486 - DNA, 394 bp, Homo sapiens
  SIMILAR (131)..(394): 641254mologous to Homo sapiens hPMSR2,accession number U38964,Smith-Waterman Score=265.
ctgcatgtcacttttggcagctttcgcagcattgaaaatatcattggctggtggctctgactgtttccggctatgacgatgtaccgcttgggaccctttctttggatattttgccacctggtacatcagcatggcgcaaccaaaacaagacagggtggcgcgtgccacacaccaaccgtcggaaaccgccagacaccaaccgtccagaaaccgccagacaccaacgctcggaaaccgccagacaccaacgctcggaatacacgccacaccactactgcacggcgaccacctctcttctgactctgctgcgggcgttcggaaaaaaaaacgcatccggtgtgctgtgattggtccaggctctttgacgtcacggactcgacctttgacagagcca

SEQ ID NO: 487 - DNA, 197 bp, Homo sapiens
  SIMILAR (197)..(12): 601254mologous to Homo sapiens stromal antigen 3, (STAG3),accession number AJ007798,Smith-Waterman Score=187.
ttaaggataagtatcagtaatctgacggcctccactgccacactgtactctctgtccacgatcatggaaaccatccagtcctgcatgtcacttttggcagctttcgcagcattgaaaatatcattggctggtggctctgactgtttccggctatgacgatgtaccgcttgggaccctttctttggatattttgccac

SEQ ID NO: 488 - DNA, 712 bp, Homo sapiens
  SIMILAR (614)..(381): 341254mologous to Pseudorabies virus glycoprotein gX,accession number U27488,Smith-Waterman Score=89.
agtgaatgagtggcccctgcctctcctatgggtcctttgggatctgagctctgggccacagtctggccgcagccctgaagctcctagcccctctactctcagctcttcgggacagttctctgcctggcacacaaaagaccctcctgacaccagccgacctagacacaccccctccaaagatcccatcggagcccaccatcctgggagcatcacccaaaacccttcctctggcttctcggatttgcatctgaccttcgaatacccctccatcctgcaatttccaaatgagtacagtcaccccaacactgagccggacgctctcctggtggtgcccctgagcagcaacctgatttctgtcctcagctacctggccaatgacatggaggaggacgacgaggaccccaaacaaaacatcttctacttcctgtatgggaagacccgctctcgcatacccttggtccgtaaccgtcggttccagttatgccgttgcatgaacccgagggccaggaagaaccgctctcagatagccctgttccagaaacttcggttccagttcttctgttccatgagcggcagggcttgggtttcccgggaggagttggaggagaacaccggacccacgggagatgtggattttcagcaggaacttaattccaatgctaatggcagtcaacaggaaagaggagaggaaccatttgtgcagatcatctag

SEQ ID NO: 489 - DNA, 1104 bp, Homo sapiens
  SIMILAR (478)..(909): 441254mologous to Xenopus laevis p33 ringo,accession number AJ249978,Smith-Waterman Score=260.
atggacagaacggagactaggttccgtaagaggggacagattaagggaaagatcacgaccagccgtcaaccgcacccccagaatgagcagagtccccagcggagcacctcggggtactccctccaggaggtggtggatgatgaagtgttgggatcatcagcccctggggtagatcccagccccccatgtaggtcccttggctggaaaaggaagaaggagtggtcagatgaatctgaggaggagccggagaaggagctcgcccctgagcctgaggagacctgggtagtggagatgctgtgtgggctcaagatgaagctgaagcaacagcgagtgtcacccatcctccctgagcaccacaaggacttcaacagtcagcttgcccctggggtagatcccagccccccgcataggtccttttgctggaaaaggaagagggagtggtgggacgaatctgaggagtcgttggaggaggagccacggaaggtgctcgcccctgagcctgaggagatctgggtggcggagatgctgtgtggcctcaagatgaagctgaagcgacggcgagtgtcgctcgtgctccctgagcaccacgaggccttcaacaggctgcttgaggatcctgtcattaaaagattcctggcctgggacaaagatctgagggtgtcggacaagtatctcctggctatggtcatagcgtatttcagccgggccggcctcccctcctggcaataccaacgcattcatttcttcctggctctctacctggccaatgacatggaggaggacgacgaggaccccaaacaaaacatcttctacttcctgtatgggaagacccgctctcgcatacccttggtccgtaaccgtcggttccagttatgccgttgcttgaacccgagggccaggaagaaccgctctcagatagccctgttccagaaacttcggttccagttcttctgttccatgagcggcagggcttgggtttcccgggaggagttggaggagaacaccggacccaggggagatgtggattttcagcaggaactttattccaatgctaatggcagacaacaggaaagaggagaggaaccatttgtgcagatcatctag

SEQ ID NO: 490 - DNA, 1096 bp, Homo sapiens
  SIMILAR (2)..(70): 911254mologous to Homo sapiens PMS2L14,accession number AB017005,Smith-Waterman Score=123.
gactcgactggtgtttgatcacgatgggagaatcatccagaaaaccccctacccccaccccagagggacccacagtcagcgtgaagcagttattttctacgctacctgtgcgccataaggaatttcaaaggaatattaagaagaaacgtgcctgcttccccttcgccttctgccgtgattgtcagtttcttgagggctccccagccatgcttcctgtacagcctgcaaaacttacagaacctgctaaggccatcaaacctattgatcggaagtcagtccatcagatttgctctgggccggtggtactgagtctaagcactgcggtgaagaagatagtaggaaacagtctggatgctggtgccactaatattgatctaaagcttaaggactatggaatggatctcattgaagtttcaggcaatggatgtggggtagaagaagaaaacttcgaaggcttatctctttcagctctgaaacatcacacatctaagattcgagagtttgccgacctaactcgggttgaaacttttggctttcaggggaaagctctgagctcactttgtgcactgagtgatgtcaccatttctacctgccacgtatcggcgaaggttgggactcgactggtgtttgatcacgatgggaaaatcatcaagaaaaccccctacccccaccccagagggaccacagtcagcgtgaagcagttattttctacgctacctgtgcgccataaggaatttcaaaggaatattaagaagaaacgtgcctgcttccccttcgccttctgccgtgattgtcagtttcttgagggctccccagccatgcttcctgtacagcctgcaaaactgactgtaactggagagctacgggcatgcagaagttggaagacgagggaaggcatcacagaggctgtggggtgaaccgacttcaaggaatgggtccttcccttcagaaccacatgtgtgcgggacacccagacagaaaacacaaatgcaaagtcaagtggagggcatttggaaggagcagtgaagccaagccaggaaacaccaagatggcgagccagtgtggttgtagagattgcagagagggacaagataag

SEQ ID NO: 491 - DNA, 329 bp, Homo sapiens
  SIMILAR (1)..(225): 1001254mologous to Homo sapiens RPB11b1alpha protein,accession number AJ277739,Smith-Waterman Score=382.
ctgggaaacatcattaaatcacaactcctaaaagacccgcaagtgctatttgctggctacaaagtcccccaccccttggagcacaagatcatcatccgagtgcagaccacgccggactacagcccccaggaagcctttaccaacgccatcaccgacctcatcagcgagctgtccctgctggaggagcgcttccggacgtgcctgcttccccttcgccttctgccgtgattgccagtttcctgaggcctccccaaccacgcttcctgtacagcctgcagaactctgccccagagcacatcagctatgtgccccagctctcaaacgacacc

SEQ ID NO: 492 - DNA, 2172 bp, Homo sapiens
  SIMILAR (268)..(687): 901254mologous to synthetic construct InsB peptide,accession number Z37515,Smith-Waterman Score=652.
atgctgctgtgtcttttggaggaagaacccttcgagagctccagtgaagaagagtttggtggtgaggaccatcagagcctaaattccattgttgatgttgaagatttgggcaaaattatggatcacgtgaagaaagaaaaggtttcttcggaatcctattatggccctatacagagaagagcggctgctggggactggtattatctactgacggggtggtgcgtaacggcaaaagcaccgccggacatcagcgctatctctgctctcactgccgtaaaacatggcaactgcagttcacttacaccgcttctcaacccgccgggcagtgacgtcatcgtctgcgcggaaatggacgaacagtggggctatgtcggggctaaatcgcgccagcgctggctgttttacgcgtatgacagtctccggaagacggttgttgcgcacgtattcggtgaacgcactatggcgacgctggggcgtcttatgagcctgctgtcaccctttgacgtggtgatatggatgacggatggctggccgctgtatgaatcccgcctgaagggaaagctgcacgtaatcagcaagcgatatacgcagcgaattgagcggcataacctgaatctgaggcagcacctggcacggctgggacggaagtcgctgtcgttctcaaaatcggtggagctgcatgacaaagaggagctcgcagccctcttctctgagctgaagcaggagcagaagaaggtggatgagctcatcgccaaactggtgaaaaaccggacccgaatcgtcaatgagtcggatgtcttcagctgggtgatccgccgcgagttccaggagctgcgccacccggtggacgaggagaaggcccgctgcctggaggggatagggggtcacacccgtggcctggtggcctccctggacatgcagctggagcaggcccagggaacccgggagcggctggcccaagccgagtgtgtgctggaacagttcggaaatgaggaccaccatgagttcatctggaagttccactccatggcctccagtgtccagaagaaggccatggacagaacggagactaggttccgtaagaggggacagattacgggaaagatcacgaccagccgtcaaccgcacccccagaatgagcagagtccccagcggagcacctcggggtaccccctccaggaggtggtggatgatgaagtgttgggaccatcagatgaggggactggtggaagaagaggtgggataggattgactaagacgaaggaagggggccgggagctcgcccctgagcctgaggagacctgggtagtggagacgctgtgtgggctcaagatgaagctgaagcaacagcgagtgtcacccatcctccctgagcaccacaaggacttcaacagtcagcttgcccctggggtagatcccagccccccgcataggtccttttgctggaaaaggaagatggagtggtgggacaaatctgaggagtcgttggaggaggagccacggaaggtgctcgcccctgagcctgaggagatctgggtggcggagatgctgtgtggcctcaagatgaagctgaagcgacggcgagtgtcgctcgtgctccctgagcaccacgaggccttcaacaggctgcttgaggatcctgtcattaaaagattcctggcctgggacaaaggtctgagggtgtcggacaagatcccatcggagcccaccatcctgggagcatcacccaaaacccttcctctggcttctcggatttgcatccgaccttcgaatacccctccatcccgcaatttccaaatgagtacagtcaccccaacactgagctacctggccaatgacatggaggaggacgacgaggaccccaaacaaaacatcttctacttcctgtatgggaagacccgctctcgcatacccttgctccgtaagcgtcggttccagttatgccgttgcatgaacccgagggccaggaagaaccgctctcagatagtcctgttccagaaacttcggttccagttcttctgttccatgagctgcagggcttgggtttccccggaggagttggaggagaacaccggacccaggggagatgtggattttcagcaggaactttattccaatgctaatggcagacaccaggaagaaggagaggaaccatttgtgcagatcatctag

SEQ ID NO: 493 - DNA, 1338 bp, Homo sapiens
  SIMILAR (1219)..(935): 361254mologous to Haliotis rufescens lustrin A,accession number AF023459,Smith-Waterman Score=89.
atgaacgatgacatcagagattccgaccttcctgattggagggaccggactccgtgtgtccagaagaaggccatggacagaacgaagactaggttccgtaagaggggacagattacgggaaagatcacgaccagccgtcaaccgcacccccagaatgagcagagtctccagcggagcacctcggggtaccccctccaggaggtggtggatgatgaagtgttgggaccatcagcccctggggtagatcccagccccccatgtaggtcccttggctggaaaaggaagaaggagtggtcagatgaatctgaggaggagccggagaaggagctcgcccctgagcctgaggagacctgggtagtggagatgctgtgtgggctcaagatgaagctgaagcaacagcgagtgtcacccatcctccctgagcaccacaaggacttcaacagtcagcttgcccctggggtagatcccagccccccgcataggtccttttgctggaaaaggaagagggagtggtgggacgaatctgaggagtcgttggaggaggagccacggaaggtgctcgcccctgagcctgaggagatctgggtggcggagatgctgtgtggcctcaagatgaagctgaagcgacggcgagtgtcgctcgtgctccctgagcaccacgaggccttcaacaggctgcttgaggatcctgtcattaaaagattcctggcctgggacaaagatctgagggtgtcggacaagatcccatcggagcccaccatcctgggagcatcacccaaaacccttcctctggcttctcagatttgcatccgaccttcgaatacccctccatcccgcaatttccaaatgagtacagtcaccccaacactgagggtgggtgccagtcctgagctagggacagtcccttaccttcctctctgggaagctgacctcagccggaggcctctcctggtggtgcccctgagcaccaacctgatttctgtcctcagctacctggccaatgacatggaggaggacgacgaggaccccaaacaaaacatcttctacttcctgtatgggaagacccgctctcgcatacccttggtccgtaaccgtcggttccagttatgccgttgcttgaacccgagggccaggaagaaccgctctcagatagccctgttccagaaacttcggttccagttcttctgttccatgagcggcagggcttgggtttcccgggaggagttggaggagaacaccggacccaggggagatgtggattttcagcaggaactttattccaatgctaatggcagacaacaggaaagaggagaggaaccatttgtgcagatcatctag

SEQ ID NO: 494 - DNA, 795 bp, Homo sapiens
  SIMILAR (1)..(792): 1001254mologous to Homo sapiens hPMSR3,accession number U38979,Smith-Waterman Score=1399.
atgtgtccttggcggcctagactaggccgtcgctgtatggtgagccccagggaggcggatctgggcccccagaaggacacccgcctggatttgccccgtagcccggcccgggcccctcgggagcagaacagccttggtgaggtggacaggaggggacctcgcgagcagacgcgcgcgccagcgacagcagccccgccccggcctctcgggagccggggggcagaggctgcggagccccaggagggtctatcagccacagtctctgcatgtttccaagagcaacaggaaatgaacacattgcaggggccagtgtcattcaaagatgtggctgtggatttcacccaggaggagtggcggcaactggaccctgatgagaagatagcatacggggatgtgatgttggagaactacagccatctagtttctgtggggtatgattatcaccaagccaaacatcatcatggagtggaggtgaaggaagtggagcagggagaggagccgtggataatggaaggtgaatttccatgtcaacatagtccagaacctgctaaggccatcaaacctattgatcggaagtcagtccatcagatttgctctgggccagtggtactgagtctaagcactgcagtgaaggagttagtagaaaacagtctggatgctggtgccactaatattgatctaaagcttaaggactatggagtggatctcattgaagtttcagacaatggatgtggggtagaagaagaaaactttgaaggcttaatctctttcagctctgaaacatcacacatgtaa

SEQ ID NO: 495 - DNA, 410 bp, Homo sapiens
  SIMILAR (258)..(88): 801254mologous to Homo sapiens stromal antigen 3, (STAG3),accession number AJ007798,Smith-Waterman Score=236.
caaaaaaaatcccttcacattttaactcaggagataacaccaacaagtcacttccggcagacctcatggccacactgcatgtcacttttgggcagctttcgcagcattgaaaagatcattggctggtggctctgactgtttccagctatgacgatgtaccacttgggaccctttctttgaatgttttgccaccggcattgttttcagtggtcgttttgttgctttcttcttcacaccgcgattgaagctgtcctcaaatcattttcttgtcttcttgtctggtacatcggggtggcgcgtgccagacaccaacggtcggaaaccgccagacaccaacgctcggaatccacgccaggccacgacggagggagaatacctcccttaaaaccctgctgctggcgttcacgaaa

SEQ ID NO: 496 - DNA, 1322 bp, Homo sapiens
  SIMILAR (546)..(977): 451254mologous to Xenopus laevis p33 ringo,accession number AJ249978,Smith-Waterman Score=251.
ggtcaagtccagggctgcgttactgggtcctggagcccaagtcctctggaagtgtccagaagaaggccatggacagaacggagactaggttccgtaagaggggacagattacgggaaagatcacgaccagccgtcaaccgcacccccagaatgagcagagtccccagcggagcacctcggggtaccccctccaggaggtggtggatgatgaaatgttgggaccatcagcccctggggtagatcccagccccccatgtaggtcccttggctggaaaaggaagagggagtggtcagatgaatctgaggaggagccggagaaggagctcgcccctgagcctgaggagacctgggtagtggagatgctgtgtgggctcaagatgaagctgaagcaacagcgagtgtcatccatcctccctgagcaccacaaggacttcaacagtcagcttgcccctggggtaaatcccagccccccgcataggtccttttgctggaaaaggaagatggagtggtgggaccaatctgaggagtcgttggaggaggagccacggaaggtgctcgcccctgagcctgaggagatctgggtggcggagatgctgtgtggcctcaagatgaagctgaagcgacggcgagtgtcgctcgtgctccctgagcaccacgaggccttcaacaggctgcttgaggatcctgtcattaaaagattcctggcctgggacaaagatctgagggtgtcggacaagtatctcctggctatggtcatagcgtatttcagccgggccggcttcccctcctggcaataccaacgcattcatttcttcctggctctctacctggccaatgacatggaggaggacgacgaggactccaaacaaaacatcttccacttcctgtataggaagaaccgctctcgcatacccttgctccgtaagcgttggttccagttaggccattccatgaacccgagggccaggaagaaccgctctcgcatacccttgctccgtaagcgtcggttccagttataccgttccacgaacccgagggccaggaagaaccgctctcgcatacccttgctctgtaagcgtcggttccagttataccgttccatgaactcgagggccaggaagaaccgctctcagatagtcctgttccagaaacgacggttccacttcttctgttccatgagctgcagggcttgggtttccccagaggagttggaggagaacaccggacccaggggagatgtggattttcagcaggaactttattccaatgctaatggcagacaccaggcaggaggagaggaaccatttgtgcagatcatctag

SEQ ID NO: 497 - DNA, 1315 bp, Homo sapiens
  SIMILAR (821)..(1111): 731254mologous to Homo sapiens PMS2L13,accession number AB017004,Smith-Waterman Score=362.
gcaccccttccatgttcttaaggataagtatcagtaatctgacggcctccactgccacactgtactctctgtccatgatcatggaaaccatccagtccttgaagcggccagtgaagagctccaggcgtgcggtcaggtcccggttaccgtacagccctttcagagccttcacgcacttcacgcggacttctcggtgcttatcatgcagagtccacccaatatattttaaatagctgtcggtgaggaaagacgtgctgtagctttgcatccaacacccaatttcctcaatgcagatagcacggatctcaggaaggacatccctgcatgtcacttttggcagctttcgcagcattgaaaatatcattggctggtggctctgactgtttccggctatgacgatgtaccgcttgggaccctttctttggatattttgccaccggcgttgttttcagtggtcgttttgctgctttcttcttcacaccgcgattgaagctgtcctcaaatcattttcttgtcttcttgtctgcaagtggccagtgccaagtgctgggccgccgctcctgccgtgcatgttggggagccagtacatgcaggtgggctccacacggagaggggcgcagacccggtgatagggctttacctggtacatcggcatggcgcaaccaaagcaagagagggtggcgcgtgccagacaccaacggtcggaaaccgccagacaccaacggtcggaaaccgccaagacaccaacgctcggaaaccgccagacaccaacgctcggaaaccgccagacaccaaggctcggaatacacgccagaccacgacggagggcgaccacctcccttctgaccctgctgcgggcgttcggaaaaaaaacgcagtccgtacagaacctgctaaggccatcaaacctattgatcggaagtcagtccatcagatttgctctgggccggtggtactgagtctaagcactgcggtgaagaagatagtaggaaacagtctggatgctggtgccactaatattgatctaaagcttaaggactatggaatggatctcattgaagtttcaggcaatggatgtggggtagaagaagaaaacttcgaaggcttaagttgggactcaactggtgtttttgatcacgatgggaaaatcatccagaaaaccccctacccccaccccagagggaccacagtcagcgtgaagcagttattttctacgctacctgtgcgccataaggaatttcaaaggaatattaagaagccagttggtgagaagtacatgcggtctgtggacacccaagcttgcagctgcatctga

SEQ ID NO: 498 - DNA, 461 bp, Homo sapiens
  SIMILAR (139)..(20): 921254mologous to Homo sapiens Human secreted protein encoded by gene 75,accession number Y76198,Smith-Waterman Score=187.
ttttttttttttttttttaatttatgaagaaaagaggtttaattgactcacagttctgcaggctgtacaggaagcgtggctggggaggcctcaggaaactgacaatcacggcagaaggcgaaggggaagcaggcacgtctggccatgttggagcaggagagacagagagagtgaagcgggaggtgctgcacacttttcaacaagcagatcccacgagggctcactcactgtcacgagaacagcaaggggggaagtcggcccccatgagccaatcacctcccaccagggtccctgccacaacactgggaattacaatttgacatgacattttgggttgtggatacagagctgaaccatgtcaagggtagttcaaccgctgagattgattgattgattgattgactgagatggagtcctgctctgttacctaggctggagtgcagtggcacaatctcggctca

SEQ ID NO: 499 - DNA, 826 bp, Homo sapiens
  SIMILAR (410)..(613): 751254mologous to Homo sapiens Human secreted protein,accession number Y02781,Smith-Waterman Score=237.
atggggctaccctgggggcagcctcacctagggctgcagatgctcctcctggcgttgaactgtctccggcccagcctgagcctggagctggtgccctacacaccacagataacagcttgggacctggaagggaaggtcacagccaccaccttctccctggagcagccgcgctgtgtcttcgatgggcttgccagcgccagcgataccgtctggctcgtggtggccttcagcaatgcctccaggggcttccagaacccggagacactggctgacattccggcctccccacagctgctgaccgatggccactacatgacgctgcccctgtctccggaccagctgccctgtggcgaccccatggcgggcagcggaggcgcccccgtgctgcgggtgggccatgaccacggctgccaccagcagcccttctgcaacgcgcccctccctggccctggaccctatcgggaagacccccggatccatcgacacctggccagggcggcgaagtggcagcatgatcgtcattacctccatcctctcttctctggccggcctcctactcttggccttcttggcagcctctaccatgcgcttctccagcctgtggtggccggagaggccccggagcagctgcggatcggctccttcatgggcaagcgctacatgacccaccacatcccacccagagaggccgccacactgccgaaacgtgcctgcttccccttcgccttctgccgtgattgtcagtttcttgagggctccccagccatgcttcctgtacagcctgcaaaactgtgagtcaattaaacctcttttcttcataaaaaaa

SEQ ID NO: 500 - DNA, 3420 bp, Homo sapiens
  SIMILAR (1463)..(1603): 331254mologous to Homo sapiens PMS2L13,accession number AB017004,Smith-Waterman Score=55.
atggatgttggctgggacctcggtgaggactgctggcaagaacacctacacacggccttttcctttgactgctggccttgctcacagaatggtgaccgggttcccagtgtgaacccagtgggcgggggggccccgcgctcctacctgcaagtggccagtgccgagtgctgggccgccgctcctgccgtgcatgttggggagccagtacatgcaggtgggctccacacggagaggggcgccgaccccgtgatagggctttacctggtacatcggggtggcgcgtgccagacaccaacggtcggaaaccgccagacaccaacgctcggaatccacgccaggccacgacggagggcgactacctcccttctgaccctgctgctggcgttcggaaaaaacgcagtccgtacagaacctgctaaggccatcaaacctattgatcggaagtcagtccatcagatttgctctgggccggtggtaccgagtctaagcactgcggtgaaggagttagtagaaaacagtctggatgctggtgccactaatattgatctaaagcttaaggactatggagtggatctcattgaagtttcaggcaatggatgtggggtagaagaagaaaacttcgaaggcttaactctgaaacatcacacatctaagattcaagagtttgccgacctacctcaggttgaaacttttggctttcggggggaagctctgagctcactttgtgcactgagtgatgtcaccatttctacctgccatgtatcggcgaaggttgggactcgactggtgtttgatcactatgggaaaatcatccagaaaaccccctacccccaccccagagggatgacagtcagtgtgaagcagttattttctacgctacctgtgcaccataaagaatttcaaaggaatattaagaagaaacgtgcctgcttccccttcgccttctgccgtgattgtcagtttcctgaggcctccccagccatgcttcctgtacagcctgcagaactggcccctctcctgcctggacggctctgctggtctccccgtcccctggagaagaacaaggccatgggtcggcccctgctgctgcccctactgcccttgctgctgccgccagcatttctgcagcctagtggctccacaggatctggtccaagctacctttatggggtcactcaaccaaaacacctctcagcctccatgggtggctctgtggaaatccccttctccttctattacccctgggagttagccacagctcccgacgtgagaatatcctggagacggggccacttccacaggcagtccttctacagcacaaggccgccttccattcacaaggattatgtgaaccggctctttctgaactggacagagggtcagaagagcggcttcctcaggatctccaacctgcagaagcaggaccagtctgtgtatttctgccgagttgagctggacacacggagctcagggaggcagcagtggcagtccatcgaggggaccaaactctccatcacccagggctccagcgcggcccaagcctccacgaggagcgccgccccctgctccacggcgcccggtcccatcgaccgcccaagggccgaggagtgcgggagcaaggcgcagaactggcaggcagctctacctgctgcctggtcccttggctgcaaaaggaagagggagtgtttggatgaatctgatgatgagccagagaaggagctcgcccctgagcctgaggagacctgggtggcagagacgctgtgtggcctcaagatgaaggcgaagcgacggcgagtgtcgctcgtgctccctgagtactacgaggccttcaacaggctgcttgcccctggggtagatcccagccccccacgtaggtcccttggctgcaaaaggaagagggagtgtttggatgaatctgatgatgagccagagaaggagctcgcccctgagcctgaggagacctgggtggcagagacgctgtgtggcctcaagatgaaggcgaagcgacggcgagtgtcgctcgtgctccctgagtactacgaggccttcaacaggctgcttgcccctggggtagatcccagccccccacgtaggtcccttggctgcaaaaggaagagggagtgtttggatgaatctgatgatgagccagagaaggagctcgcccctgagcctgaggagacctgggtggcagagacgctgtgtggcctcaagatgaaggcgaagcgacggcgagtgtcgctcgtgctccctgagtactacgaggccttcaacaggctgcttgcccctggggtagatcccagccccccgcgtaggtcccttggctgcaaaaggaagagggagtgtttggatgaatctgatgatgagccagagaaggagctcgcccctgagcctgaggagacctgggtggcggagacgctgtgtggcctcaagatgaaggcgaagcgacggcgagtgtcgctcgtgctccctgagtactacgaggccttcaacaggctgcttgaggatcctgtcattaaaagattcctggcctgggacaaagatctgagggtgtcagacaagatcccatcggagcccaccatcctgggagcatcacctaaaacccttcctccggcttctcggatttgcatccgaccttcgaatacccctccaccccgcaatttccacatgagcacagtcaccccaatgctgagctatctggccaatgacatggaggaggacgacgaggcccccaaacaaaagatcttctacttcctgtacgggaagacccactctcacatacccttgcgccctaagcattggttccagttatgccgtcccatgaacccgagggccaggaagaactgctctcagatagccttgttccagaagcgtcggttccagttcttctgttccatgcgctgcagggcttgggtttccccggaggagttggaggagaacaccggacccaggggagatgtggattttcagcaggaactttattccagtgctaatggcagacatcaggaaggaggagaggagccatttgtgcagatcatctagaagaacctggaccattcttgacagagctgaatacagtgatcacgttgtcctccaaggagcaggggtggggtggggtacttctaggagtcagttctgcaggcttttaaagggtataaaattttatagcatgaaagatgatattttagtcatacattaatggcccaaaaataatgtcccatctttttactcatcatccctactgtggactaagaattaagtacaagtgggtattatatccaggaaaaatgtcaaaaagcaacctcatcataatcttctaattcacacacaaaggcaacagccagaacaagaattacgctaagtatctgaaacttggtggagccaaagcctctgaagcacaaaacagtcccgtgcttttctgag

SEQ ID NO: 501 - DNA, 1177 bp, Homo sapiens
  SIMILAR (1042)..(1176): 681254mologous to Homo sapiens PRO1902,accession number AF118082,Smith-Waterman Score=156.
cggacgcgtggataaaatgcaaagtgtgcatgattctatctgttacaatctgtggcactgatatttcacaaaagaattctgtcccaatctgagcccctgcattgtgccttcaaatcctccctggactgcaagtccgtaagaaacaggacctccaggttccgccccagggaggttggaattcagcaatataaaaagggtggtggtgccgcaggaaagggtggaactggaaacgctcctggtttcttacttttctccaaggactcctagaaggaccccacccccctccccccacccctgctcctaggaggacaacgtgatcactgtattcagctccatcaagaatggtccaggttcttctagatgatctgcacaaatgggttcctctcctcctgcctggtgtctgccattagcattgggaataaagttcctgctgaaaatccacatctccccttgggttccggtgttcttggaagcgagagagacaatgtcacacttcaaggaggcagctctctagacaggaaagttattcacgtcccatgtcaagtctagagttcagagcaattgagaaatgcaattttatctgctgcctttcattctataccctgcttctgaaccatcgtgttcaactgtgaaactcacactttggtgaccatgactccaaaactcacttaatacacccaaggtcagcccccagtgatctgcttcatagcagggactttgggtgggtctgcccagggagtagggcaccctcagagaatgtggctttggactttatcacagctggggccttttgtgtcacttaagatctaaacttgtaaccatgctagatgtgttttctaatgtgacaacatcacgaaccacgagtccagaagcctaatccttaatcctacctcctcatgatgaagtctcatgctctgtgctcaacgtggttagctgcacaagatgtaaaccaaagcttcactgaaccctcgacccaaatcagtaactcaagtgcgtcaatcataatgaacctccccaaactcagtatttatgattatttttgaggcagggtctcactctgtcgcccagactggagtgcagtggcaggatcagggctccgtgcagccccaaccttccaggctccagcaatcctcccgcctcagcctcctgagtagttgggattacaggtgcccgccac

SEQ ID NO: 502 - DNA, 3319 bp, Homo sapiens
  SIMILAR (1029)..(1571): 831254mologous to Homo sapiens PMS2L13,accession number AB017004,Smith-Waterman Score=772.
  misc_feature (1)...(3319): n = a,t,c or g
tcagtccagggggacttccacgggaaaccagcactgggtgtccagggccagtggcagaaccatgggcccttccttcatcgaaccaatacgtttgggtgggggcgagctcctctcgcctgatttttcaattgctccctgcacaatggcagaaattcctggagattctcctaggaggtggaaggtccctggccctggctccatgtggcacgtgctctggtccttctccagcagcaggcttgtcagaccctcccagtccttcagctgagtccctgcacagtcccacaggttgtctactaagtaagcagcgtggtcgtggagcttgctctccacaaagaaggacagcagaagctggaagaaagtcctctgggcacctgggctctggcgttgctctcttccacccatcgttcttatctcgcactcagggtagaaaagtacaatggggtagacgctctcacagtccacgtccatcagcaccccttccatgttcttaaggataagtatcagtaatctgacggcctccactgccacactgtactctctgtccacgatcatggaaaccatccagtccttgaagcggccagtgaagagctccaggcgtgcggtcaggtcccggttaccgtacagccctttcagagccttcacgcacttcacgcggacttctcggtgctgcatgtcacttttggcagctttcgcagcattgaaaagatcattggctggtggctctgacatgtttccggctatgacgatgtaccgcttgggaccctttctttggatattttgccaccggcgttgttttcagtggtcagttttgctgctttcttcttcacaccgccgattgaagctgtcctcaaatcattttcttgtcttcttgtctggtacatcggcatggcgcaaccaaagcaagagagggtggcgcgtgccagacaccaacggtcggaaaccgccagacaccaacgctcggaaaccgccaagacaccaacgctcggaaaccgccagacaccaaggctcggaatacacgccagaccacgacggagggcgaccacctcccttctgaccctgctgcgggcgttcggaaaaaaaacgcagtccgtacagaacctgctaaggccatcaaacctattgatcggaagtcagtccatcagatttgctctgggccggtggtactgagtctaagcactgcggtgaagaagatagtaggaaacagtctggatgctggtgccactaatattgatctaaagcttaaggactatggaatggatctcattgaagtttcaggcaatggatgtggggtagaagaagaaaacttcgaaggcttaactctgaaacatcacacatctaagattcaagagtttgccgacctaactcgggttgaaacttttggctttcgggggaaagctctgagctcactttgtgcactgagtgatgtcaccatttctacctgccacgtatcggcgaaggttgggactcgactggtgtttgatcacgatgggaaaatcatccagaaaaccccctacccccaccccagagggaccacagtcagcgtgaagcagttattttctacgctacctgtggcgccataaggaatttcaaaggaatattaagaaggctcagaggctcaggcaagagctacagatgctcatgaccgaatgtctcacctgggcccggaatggcagcagcaagcaccctctcagcctagcccagaagccagagttcctatttcatcagttgcaaagcagagacaatgccatctgcccgatagcagagcaaaaggcagaggggaagttctcttcaaggtacagaaaccacgactccgcagagaaccgcagagatggcagcatgaccagaccacggacagactggactctgaaacgggcatgtacagagaagaggagaccccaacacgcttcaagctttgagtggagaggacacagcctctgctgggacagggaacagagggatgcggagaccctgaagatgcttttggacagtggtctgagtgtccagaagaagatcaaggacagaacagagactaggtttggtgagatgggacagattttgggaaagatcatgatgagccatcaaccgcagccccaggaagagcagagcccccagcggagcacctcagggtaccccctccaggaggtggtggatgatgaagtgtcgggaccatcagcccctggggtagatcccagccccccacgtaggtcccttggctggaaaaggaagagggaatgtttggatgaatctgatgatgagccagagaaggagctcgcccctgagcctgaggagacctgggtggcggagacgctgtgtggcctcaagatgaaggcgaagcgacggcgagtgtcgctcgtgctccctgagtactacgaggccttcaacaggctgcttgaggatcctgtcattaaaagactcctggcctgggacaaagatctgagggtgtcggacaagatcccatcggagcccaccatcctgggagcatcaccgaaaacccttcctccggcttctcggatttgcatccgaccttcgaatacccctccaccccgcaatttccacatgagcacagtcaccccaatgctgagctatctggccaatgacatggaggaggacgatgaggcccccaaacaaaacatcttctacttcctgtacgaggagacccgctctcatatacccttgctccgtgagctttggttccagttatgccgttacatgaacccgagggccaggaagaactgctctcagatagccttgttccggaagtatcggttccacttcttttgttccatgcgctgcagggcttgggtttccctggaggagttggaagagaacaccggacccaggggagatgtggattttcagcaggaactttattccaatgctaatggcagacatcaggaaggaggagaggaaccatttgtgcagatcatctagaagaacctggaccattcttgacagagctgaatacagtgatcacgttgtcctccaaggagcaggggtggggtgggggtacttctaggagtcagttctgcaggctgtacaggaagcatggctggggaggcctcaggaaactgacaatcacggcagaaggcgaaggggaagcaggcacgtttctggccatggtggagcaggagagacagagagagtgaagcaggaggtgctgcatgcttctaaacaaccagatcccatgagcgctcactcacttcttaatattcctttgaaattccttatggcgcacaagtaggcgttaaaaaatacctggtttacgctgactggtggtcctctggtggtatagtggggctnttttctctataaatatttt

SEQ ID NO: 503 - DNA, 2378 bp, Homo sapiens
  SIMILAR (573)..(881): 991254mologous to Homo sapiens PMS2L13,accession number AB017004,Smith-Waterman Score=542.
  misc_feature (1)...(2378): n = a,t,c or g
gctaagtctcaaaaaaaaaaaaaaaggaacatgctctctcattcaaggttacccccttcctatcactcccaaggattcaccccataatcttatctttcttgatatgttacactcactaaaatgttcacatcaaatcaagtttgtagacacttgtccttaccaccttacaaaaaagtgagatggtatcaacaagaggtaagacactgctttacctgcatgtcacttttggcagctttggcagcattgaaaagatcattggctgggtggctctaactgtttccagctatgacgatgtaccacttgggaccctttctttggatgttttgccaccggcattgttttcagtggtcgttttgttgctttcttcttcacaccgcgattgaagctgtcctcaaatcattttcttgtcttcttgtctgcaagtggccagtgccgagtgctgggccgccgctcgtcccggtgcatgtggggcagccagtacatgcaggtgggctccacgcggagaggggcgcggtcgcctgagatagggcttttcatggtacctcgggctggcgcgtgccagacaccaacgagtcggaagccgccagacaccaacgctcggaatccacgccaggccacgacggagggcgactacctcccttctgaccctgctgctggcgttcggaaaaaacgcagtccggtgtgctctgattggtccaggctctttgacgtcacggactcgacctttgacagagccactaggcgaaaaggagagacgggaagtattttttccgccccgcccggaaagggtggagcacaacgtcgaaagcagccgttgggagcccaggaggcggggcgcctgtgggagccgtggagggaactttcccagtccccgaggcgggatccggttgttgcatcctggaagcgagctgagagctcgagtccagaacctgttaagcccatcaaacttatggacggaagtccagtccttcagatttgttcggggccgggggtaccgagtctaaggccgaatgcggtgaaggagttagtagaaaacagtctggatgctggtgcccactaatgttgatctaaagcttaaggactatggagtggatctcattgaagtttcaggcaaatggatgtggggtagaagaagaaaacttcgaaggccttaatctctttcagctctgaaacatcacacatctaagattcgagagtttgccgacctaactcgggttgaaacttttggctttcaggggaaagctctgagcctcactttgtgcactgagtgatgttaccatttctacctgccacgtatcggcgaagggttgggactctgactggtgtttttgatcacgatgggaaaatcatcccagaaaacccccctaacccccaccccagagggaccacagtcagcgtgaagcagttattttctacgctacctgtgcgccataaggaatttcaaaggaatattaagaagaaacgtgccttgcttccccttcgccttctgccgtgattgtcagtttcctgaggcctccccagccatgcttcctgtacagccctgcaaaatttgnatttcctagaagtaccccaaccccacccctgctccttggaggacaagcgtgatccctgtattcagctcttgtcaagaatggtccaggttcttctagatgatctgcacaaatggttcctctcctccttcctgatgtctgccattagcattggaataaagttcctgctgaaaatccacatctcccctgggtccggtgttctggaagtgagagagacaatgtcacacctcaaggagacagctctctagacaggaaggttattcacgtcccatgtcaagtctagctagagttcagagcaattgagaagtgcgattttatctcctgcctttcattctataccctgcttctgaaccatcgtgttcaactgtgaaactcacgctttggtgaccctgactccaaaacttaatacacccaaggtcagccccagtgatctgcttcatagcaaggactttgggtgggtcttcccagggagtagggcacccttcagagaatgtggctttggacttcatcacagctggggccttttgtgtcacttcagatctaaacttgtaaccgtgctagatctgtttctaacgtgacaacatcacgaaccacgagtccagaagcctaatccataatcctccctcctcatgacaaagtctcatgctctgtgctcaacatggttagctgcacaagatgtaaaccaaagcttcactgaaccctcgacccagatcggtaactcaagtgcatcaatcataatgaacctccccgaactcagtatttatgattatttttgaggcagggtctcaatctgtcggccgggctgggagtgcagtggcaggatcaggg

SEQ ID NO: 504 - DNA, 750 bp, Homo sapiens
  SIMILAR (408)..(494): 411254mologous to Dictyostelium discoideum cyclic AMP-binding protein,accession number X55975,Smith-Waterman Score=62.
gggccaaagccaccctaggcccccaccagaaccaatgggttttcccagtgaaagacagcaggaaccatcctttccatacttaggattttctttgttttaccatcagatttgggttatgtttgagtgacttttattgcttcagccacttagctttctggtttattgggatgctctgcttctggccgccctgaaaggctggcactgctgaaaaacccgcctccctcagggcaagcaggggctggagtgatgaggccatgtagtattagttccgctgagcagctgctgctggcaatttctggtgttggaaaagaatgggaagctgttccagttagaattaaagcttacatcttaagagagtgttttctctctcctgagagagtctgcagatatgcagccgctggctccaggaagtctttagggaccccacgtcgccttccccagggtactgggatctcctactcgtgggacaaggtggagacgtttgttttcctggcagcagtttggaaactgccggcgcgatacttcggctttcaccccatttgctggaacttagtcccgtggccgtacccagatgcagagaagccttggaaatatgcccacttaaaaattccattatgtgaaagaagacgagaaaggggggatattaggggccaaagagcaacctctgtcacagaaccttgggaaagaaacagtgagatctttaccattatttctcaaggaaaaattgcttttcatacaacatatgtttaa

SEQ ID NO: 505 - DNA, 585 bp, Homo sapiens
  SIMILAR (11)..(124): 1001254mologous to Homo sapiens Human protein comprising secretory signal amino acid sequence 6,accession number W37869,Smith-Waterman Score=201.
gagaaacgagatgggggtgaagctggagatatttcggatgataatctacctcactttccctgtggctatgttctgggtttccaatcaggccgagtggtttgaggacgatgtcatacagcgcaaggtgggcataagaggagtgtttgagggttcattccaggggtgggagagggtgtggggcagcagtctgctggggactaatgtctgcctcccataagccgaccctgccctgatgtggggctctggaggcctttggctcgtgtcccatttgtgacttttccttacagagggagctgtggcgcacctgagaagccatgacttcaagagatagaggaattcaaagagaggttacggaagcggaagcggcgggaggagaagctccttcgcgacgcccaacaaaaactcctgaggcctccaagtgggagtcctagcccctcccctgatgaaatatacatatactcagttccttgttattcaaaagaaaaaaaagaaaattttttttattaaggggccgaaggttttttcctttaagggggggtaattttaacttggccctggcccgggttttaacaccgtgggaacgga

SEQ ID NO: 506 - DNA, 1578 bp, Homo sapiens
  SIMILAR (297)..(214): 851254mologous to Homo sapiens Human secreted protein, SEQ ID NO: 7678,accession number G03597,Smith-Waterman Score=120.
tttcagtctgaactcccacctgtctttccacctcagcattcaggatagttgttgatataaggaaagtacttggatacttgtagtcaaggacatacctcatgctgagaggggggccatggtggtgctgaaggctgccagatgcatgaagccaccagaatgcgtcagtgggatcagcgggaggtaaaagttctatttttgtgaatgtgaaatcagtgtgtccggaattggtgggttcttcgtctcactgacttcaagaatgaagctgcggaccctcccggtgagtgttacagttcttaaaggcggcgtgtccggagtttgttccttctgatgttcagatgtgttcggagtttcttccttctggttggttcgtggtctcgctggcctctggcgtgaagctgcagaccttcacgatgttacagctcataaaggcagtgcagacccaggataagcagcagcaagatttattggaaagatcaaaagaacaaagcttcctatgtggaaggatgccgttgactccagagccgccctctgggcgcgtggaggggccccccgcatgggaagcagccccatggccctcactgccctgtgggccctgcatccccatcatgctggtcctggccaccctggctgcgctcttcatcctcaccaccgctgtgttggctgaacgcctgttccgccgtgctctccgcccagaccccagccaccgtgcacccaccctggtgtggcgcccaggaggagagctgtggattgagcccatgggcaccgcccgagagcgctctgaggactggtatggctctgcggtccccctgctgacagatcgggcccctgagcctcccacccagcaacttgggcccccagaccgtactggaggtcccagcccggagcaccttctgggggccccagccctgggaggggaggccccccgccacaggcctgtgtttaccgaagccaccaataccaaagagaacgggtcctgcggtgctgaacagcctcggtgtggcgatgacagctggcaggagatgacaggaatccagtttcccagagccacaaatcctgttctccttggccactcacccactgtgaggtcctctaggaaaatacacaaagagaggaccagaccaggcagaggaacattttgtttcatatgaactgtggctttgacccccaaactgcaaggaggaacttgctgggccaagctgcagcggcgctgtcttgctggagtggggacctagagtcagagaaaacccacaggctcctctgcccattctcctccatctgcacacgtctcagcctcggaccctcaccactccatggtgaggaaggccatggccaggggaaactgagtttcatccaatgtggagaggagcgttgtccagagagacagatttgccacaagctaggcttacttataatgctccaccctacagaaatgggaccccaagtacccgatcttccctttaggagaggcaggcaggtgggtgagcagcagatgtagtttccatttccctgggggtttaattttccaaactttgtcttttttttttttttttttttgagacagagttgagattctgtctc

SEQ ID NO: 507 - DNA, 888 bp, Homo sapiens
  SIMILAR (7)..(711): 231254mologous to Saccharomyces cerevisiae mal5, sta1, len: 1367, CAI: 0.3, AMYH_YEAST P08640 GLUCOAMYLASE S1 (EC 3.2.1.3),accession number Z38061,Smith-Waterman Score=101.
atgaggcctgtggaccccgatgggactgagcattcactcttctgcccactgacagctttacggggaatggtgaactcgagaatccagaagtctccagggaagcccagtgtgtgcgacgtgcctcttcctatctcccctgggcagtcttcccagctccatggaaaagtctttggtcagctgaacgcaggcaaggctgctgaattcctgaagtccccgcctgaccaccaggcccaggcagcatccacctctgggccacagaagacgaccctgagcaaacgtggcttaaggctccaaccctgtcaactccactcagccccacactccttccagctccttccactcacacaaaagagcacctgggacttgagaggcagcgcgcctctccacgcagcacagacttcactttccgagttctcctgccaccgacctgacgtggaagacacacttggcacaaaaggaccagacaaaacccagtgccagtcagagaattccacacggccacagtacagtccagaaaccagccagaaccagcccgtgggcaagggaacagacctgaaagtcacaaagcttggcgtgccctccctgatggcccaagatggggtcaactactcggtgaaaacagaggcccattccacaggcaccactgctgagcctctgagttcccaggacagggctgtccgaggacacaacactgacagccatgtgcagacccccgacctgggcgaggataccgccctctgagactcagtcgcctgtctacaaaaaaggaaaagataccacattaccgtgaccatctagtctaatgaaaatgccaccaggatcaaagaccataacgcaaagccctctgtttgcaccttagtccgaacaagcacccaggatacactcgct

SEQ ID NO: 508 - DNA, 796 bp, Homo sapiens
  SIMILAR (257)..(135): 391254mologous to Vicia sativa VsPRP1,accession number Y09230,Smith-Waterman Score=67.
gggagatccaaatgatctgacccaaccacagaatggccagaaaaaggttgcaagtcagaacaagggttggtggtctggccaaacagtgacagggcaaactatcaatcaagacccagaagagtggtggtatgaaggaggtgagtatgggactggtgtgggagactcaatcatggaagtgggggaaatggggaaaagggagtgtgaggagatgtggatttgtctgaaatcccttctgtgggcttctggggatttctgtggctgtgaggatttctctaaatacccgcaggacagactagtgcagattcagtatgtgaggagaccacccaaaagcatggatactagaaggcgccaatcgcagggggccatttcagaagctgactaccacaaccaaggattaaagagagtttcttcagccaaaaggcgaatgtctgttgagtggaaaggagaggacggagtcgatgttgtcccctgtgagatgtcatgtctcaggcagtatgctggacattcccgagacgccagctctgctcaggtgacttgtgtgccctgcccttgtaagcctcgaattactcatcgtgaaattgagttttctgctgcagccatttggacagtgttgattagttttcctgaggtgctgtttgggcgtctccccagccacctaggtacagatggagtgtgtttggcttgtgatggtgacagaggggcggctgcccttcctcgtacttcttctggcattgaagaagcagctctgaaatctccaactgggataggccaagaaaatttggatgtggatacatga

SEQ ID NO: 509 - DNA, 456 bp, Homo sapiens
  SIMILAR (8)..(37): 601254mologous to Homo sapiens dJ657D12.1 (collagen, type IV, alpha 6),accession number AL109943,Smith-Waterman Score=42.
atgcccaaggagccagggaaggccttgcggtgggaagaccggtctaagggaaatagccaagaaggcaaagccaggcgtttgaaagctgtaggaaaaatcgttcgggaaaaagggaatgaatggcctataggaagaggatgtattaatgttcggacaaaattcaagggtttaacatctgttctgaaacttgttttacgttgttacagaaagattactggctgttcggtgctggcatcctgctataaatttgttcgcttgctgaagcagaaagaactggctcatatgcaggctcttgcagaggaatggaagaaaagggaccgagaaagagaatcactagtaaagaaaaagggaacctcagcttctcaagcacgcaaaggaacaaagcatggagcggagaacaactgtgagcaagttgagacgaagaaggcatcagaagaccgaaatactctgaattaa

SEQ ID NO: 510 - DNA, 487 bp, Homo sapiens
  SIMILAR (43)..(486): 971254mologous to Homo sapiens Human ARF-Related Protein-1 (HARP-1),accession number Y44676,Smith-Waterman Score=759.
ttttccgggttcggagccgttccggatgctttaggctgccggatgtctgatctccggataactgaggcgtttctgtacatggattatctgtgttttagagcactttgctgcaagggaccaccacctgcacgaccagaatatgacctggtttgcataggcctcacaggttctggcaaaaccagtctgttgtccaaactctgcagtgaaagccccgataacgtcgtgtcgaccacaggttttagtattaaagcagtgccattccagaatgccatcttgaatgtaaaagaacttggaggggctgataacatccggaaatactggagccgctactaccaaggatctcaaggggtaatatttgtattagacagtgcctcttcagaggatgatttagaagctgctagaaatgagctgcactcagctctttcacattcacaggtatgcactttaccctttttaatattggccaatcatcaagacaagccagcag

SEQ ID NO: 511 - DNA, 834 bp, Homo sapiens
  SIMILAR (340)..(660): 381254mologous to Herpesvirus papio EBNA-LP,accession number AF200364,Smith-Waterman Score=106.
atgcacagactttctcagtacagccttaagtgtaatcctagaaggcactggcaaatctctgccaggccaatctgcagtcgaaaacgagtgcatgtgtccaacaagatgacaggagggtcaatgtttctaaccgttacttcaactctgcatggcaatagcggttctgcccaacatgcacagcctggcctaaacagccgggttccaatccgtgcacagtggaaccgcggacgcacccaagaccggaatggtggggctatacctgtccctactcagtccgttcgtgccagcctgcgaggtagtttagacccgtctgctttatgggagagaggaaaactctgctcccccggaaagaaagtcctctgcggagagcgcagagggaagccagaagccgatcgcgggcaggggacgcgccgccgcggccgccccatctctcagcagccccagcgcgaccctcgccctgcagccgtgctggcccaggccgcactttacctgtcagctccaccacccacccgccctggaggctgcccctccggtccagggaaaggcttaccagccggctgcgggagaaagaaccccagaggatcctatcccaaagaaagaaagcaaaaaggctgctcctcaaggcaggggccatcgggcacgccgagatccgagaggcgacatgccacccctgccctgccctaccagataatccatgtacagaaacgcctcagttattcggagatcagcatccggcagcctaaagcatccggaacggctccgaacccggaaaaaaaagcagcgtctctggctgcgagcgagcagctcctgaaaaagccagcaacaggaaaatag

SEQ ID NO: 512 - DNA, 246 bp, Homo sapiens
  SIMILAR (73)..(243): 1001254mologous to Homo sapiens Human FADD-interacting protein (FIP),accession number W96153,Smith-Waterman Score=272.
atgtcctgttcctcccggtgctctggcaaaattaactgcgtgctgttaactaggaagcctggacagatgcaggctcagaacgcccagcagctccatgaacgaatccagtcctcgagtatggatgccaagctggaagccctgaaggacttggccagcctctcccgggatgtcacgtttgcccaggagtttataaacctggacggtatctctctcctcacgcagatggtggagagcggcactgagtaa

SEQ ID NO: 513 - DNA, 372 bp, Homo sapiens
  SIMILAR (332)..(48): 321254mologous to Homo sapiens Human apolipoprotein E mutant protein fragment 11,accession number Y20298,Smith-Waterman Score= 76.
atggcacatcatgccaagacccgtaagccagaaatgaagctcctgcagcatgcatttgacgaggaccattccaatgacacaagggaactgatgtcagaggctaagagggggccagtgacaccagaggggatacacaaataccactgggttacaactgcctatggtattcagtacagtaacacgctgtacaggtttacagccgaggagcaacaggctctacaatgtggcccagagctgcagctccccaggctggctgaggccacacctacacagctctgcacacggcacctagcaatccaccaggtggaacaggagccctcaggacagccccgcaccgacacgtgcgccagcggtccacagaggatgcgctaa

SEQ ID NO: 514 - DNA, 411 bp, Homo sapiens
  SIMILAR (84)..(284): 381254mologous to Saccharomyces cerevisiae N1249,accession number Z69381,Smith-Waterman Score=80.
tgatcacactggcagttaggaaaattgctatgatgggtgagttgtcctcctcacctccaagccaactctgaatcaacatgatttcttcttcagtgtgtcaaccagggaacaagcagtcacatccacagtcttcaaactcttatctgtccttctcattggttacttccaggagctgtttttcttttattttggtttccttctgctataatatccttcaccttcacatgcaatttggtgtccatcagcttcagtttttgagaacggatgcactggataccagcattatggggtttgagaagccttgatcagggaagaatcatagacgcaggacatacaggtctcagaaatgtctctcacaaggctgctctagaaatcccggtagacaaggtgaagatacaggaattggatccg

SEQ ID NO: 515 - DNA, 484 bp, Homo sapiens
  SIMILAR (387)..(455): 341254mologous to Paramecium aurelia ND2 protein (AA 1-193) (unusual start codon),accession number X15917,Smith-Waterman Score= 44.
ttaatttgaagctctcaaattatttattttcaattcaagtgaagacaattaggccactgcagtcatttcctcatctgaatcacttgattcatcgtttagttccaattcccccaaatcttggtctacagttatagtagttttcctcttgcacgtcttgggaattgcatcattagcgcaaatttttctcattttaatgtttggtaatttcttcagatcaaagtcccattccctaaatgttttcagattacttgcatttagaatgtctggaatctctttcaattagttcacaagcatctttctttgaatatctcttttttgggggatcaagatgattttgaaaccattgcagtttttcaccaacaaggttgagacgcaaggccttttcattcttcaatttttcctttttttcttgtttgtgggcctctctcgtaatttgagctgcttttctactatatggatggatgactattttttcccgtcctgc

SEQ ID NO: 516 - DNA, 459 bp, Homo sapiens
  SIMILAR (236)..(117): 801254mologous to Homo sapiens Human secreted protein, SEQ ID NO: 7115,accession number G03034,Smith-Waterman Score=163.
atggacttcaggacctggaagcagacgcacttaaaatcttccatgccgacataccaagatccttccaaatgggttcttggcctcgctgacttcaagaatgaagccgcggacccttgcgtggtctcactgacttcaggagtgaagctgcagaccttcgcagtgaatgttacagctcttaaagttggcatgtccggagttgtttgttcctcccagtgggttcgtgggcttgctgacttcaggaatgaagctgcagacccttgcagtgaatgttgcagctcggaatgggactttgatctgaagaaattaccaaacattaaaatgagaaaaatttgcgctaatgatgcaattcccaagacgtgcaagaggaaaactattataactgtagaccaagatttgggggaattggaactaaacgatgaatcaagtgattcagatgaggaaatgactgcagtggcctaa

SEQ ID NO: 517 - DNA, 1887 bp, Homo sapiens
  SIMILAR (486)..(430): 521254mologous to Homo sapiens Human secreted protein sequence encoded by gene 4 SEQ ID NO:118,accession number B24493,Smith-Waterman Score=49.
gtctggctgtccgttgggctagagcttaaaagcccaacacgggcgaaaaagacgcggtctcagttaacggggacgctttagagaaacgcactcgcctctcctgttccggttgggtcggcgcgggcttctcaggcgccacgtgggattcggctccgggtgctcttgtgagctgctgctcctgcgggtggtgagattacctgggtctagagtgcggagctgctccgtggccacgaggacgtcaccatgcccaaagcaccaaagggaaaaagtgcaggacgggaaaaaaaagtcatccatccatatagtagaaaagcagctcaaattacgagagaggcccacaaacaagaaaaaaaggaaaaattgaagaatgaaaaggccttgcgtctcaaccttgttggtgaaaaactgcaatggtttcaaaatcatcttgatcccccaaaaaaagagatattcaaagaaagatgcttgtgaactaattgaaaggtacttaaatcgattcagcagtgagctggagcagattggagttacataacagtatcagggacaggcaggggaggcggcacttgttcccgggagacccgtcatcaagcagacgatggagcgggagcgacagcagttttggaggggatatgggccttgagattccagacattctaaatgcaagtaatctgaaaacatttagggaatgggactttgatctgaagaaattaccaaacattaaaatgagaaaaatttgcgctaatgatgcaattcccaagacgtgcaagaggaaaactactataactgtagaccaagatttgggggaattggaactaaacgatgaatcaagtgattcagatgaggaaatgactgcagtggcctaattgtcttcacttgaattgaaaataaataatttgagagcttcaaattatattcattgattatggtacctaattgtcatgatacaaaaatttgatactgacattctcttatatgatgagagtttcatttgcgtttcaaaaatggtgttatgatacttattttaaaatgaagattgcttttcatttccattaagttgctaaaatagatagatgtgatctgcagaagttgtttagtcttcatctgaatttcaggctgggagggagcaatataactaaggacaaaaaatgttttgtttttcttgtgtatttatgatcacctaatttcacgttttgtgaaatggacagtaacctgtttcctgaaagattcctgtgggtactttttgagctgtgataatagcaaaattgtttttcggtaataatatcacactaatgcttcttttaaacattaaacctattttccttttttacagaataagggaaaatgtgataagaagtttgtatacatttctggattatagattattatttatcttttgaaccagaggctaatggtacaagtaaaaaaaatcagtgatgattgttaggtggatcccccacaattaatttatcttttgacaagggggataaagagtttccagtttagctcccttttgattgtatattattttttgcttttttattgtgaaaagaggtaggttttatttgtggagagagagttgaagattagggaaccagtgattttaattatgctactttttcttctaagagataaattgatatatcattcagtgtcatgaaaaacatgaatgttgtacaattttctdhcctcaaaaaactttttaaatgtaagtatccttatttttttttttaaaagagcacaatgtaggtgtatttgagtattttcaagaaaagaataaaaacattaatgcagtattaggttaactggatatcaactaagccttgttaacagttaaagtattataactttttttaacttctgaaaattaaaaataaaatttwtttctgc

SEQ ID NO: 518 - DNA, 424 bp, Homo sapiens
  SIMILAR (172)..(321): 941254mologous to Homo sapiens Human secreted protein, SEQ ID NO: 6379,accession number G02298,Smith-Waterman Score=238.
  misc_feature (1)...(424): n = a,t,c or g
cccacgcgtacgacaggcccttcccgaccgtagcgagggtgctgctgcgctgggggaaggaaaacgccgctttgactgtgccttgttctcacagctggcgggaagcaagcgccttttcgaaagccagaggctcgagttacccctcttaccaccgtcatggcagtcccagctggtcacctgacttttgaatgccgcaattttctccgagtagaccctaaaagggacatagttttggatgtcagcagtacaagtagtgaagatagcgatgaagagaatgaagaactgaataaattgccggcattacaggaaaaaaagaataattgaggaagaggaaaagaataaagaaaaaagcacagaaaaaatcaaattgnnnnnnnnnnggaaaagggcttactcatccagttccactgaagaggacacttca

SEQ ID NO: 519 - DNA, 624 bp, Homo sapiens
  SIMILAR (259)..(357): 781254mologous to Homo sapiens Human secreted protein, SEQ ID NO: 6379,accession number G02298,Smith-Waterman Score=135.
  misc_feature (1)...(624): n = a,t,c or g
gggaaaacgccgctttgactgtgccttgttctcacagctggcgggaagaagcgccttttcgaaagccagagntcggagttacccctcttaccaccgtcatggcagtcccagttgttgaaattacctccaacattcatgtcagtgattcaccactctccatgaagagctgaactggcacaagtggcaacgtaatgttactgatgtaattggcacgaaactgttttcttattatctccttcactgaagccctatagccaaggttgcaacaaggacagtgtcagagcaggctgtaaaaaatgtgggctaccctgggtcacctgactttttgaatgccgcaattttctccgagtaggaccctaaaaggggacatagttttggatgtcagcagtacaagtagtgaagatagcgatgaagagaatgaagaactgaataaattgcaggcattacaggaaaaaagaataaatgaagaagaggaaaagaagaaagaaaaaagcaaagaaaaaatcaaattgaaaaaaaaaaaggaaaaggtcttactcatccagttccactgaagaggacacttcaaaacaaaagaaacgaagatatcagaagaaagaaaagaaaaaaagagtaaatcaataa

SEQ ID NO: 520 - DNA, 529 bp, Homo sapiens
  SIMILAR (329)..(147): 301254mologous to Mus musculus SPR2F protein,accession number AJ005564,Smith-Waterman Score=64.
tgattcggttcgggaaacccgggccgacgatttcgtggagacgcacgcagctgactttgttttctttttacgactgatacagagggctccagagccttgtctctcctggtaggtttcggctcaggaccctgaatcctggcccacagacaagcctgatgggacgtgcggggtattacttgtatggggagacgcgggaaggaggaagaagcacatctgtcctccgcggcctttagctctgagcatccggccgcgggccctgactttgccgctcagtttggggcgcagcgggggccgtgccctggcggaggagcagaaggcagagggtagcagctgcggctcagcggagagactttgtgcatttgcagctaaaaccaggccctacttgtccttgctctggattgtttgggtagatactgacagggcagataccgtcctcacaatacctgcccagaaagacgagaaagaggaggaagaattcctccttccaccaggaattctgtgggaagcacataagatttcatgctactag

SEQ ID NO: 521 - DNA, 1400 bp, Homo sapiens
  SIMILAR (362)..(922): 661254mologous to Homo sapiens lactate dehydrogenase B (AA 1 - 334),accession number Y00711,Smith-Waterman Score=503.
ctccttttctcgttcacgttctctttccctttctcgttcccgttctcgcctatctcgttccctttcacgctccctctctctttctctccgttctttctcaatttcctgtctttctttgtcctttaggcctttctcttcttccagtttattatgtgtgtctctgaatatgctgatctctcgagatatcaggtctcttttgtcttcttccatttctatagcatttatatcctccttagtgatgagtggataagggatcagtggggcccctggaaatctgcggaaaatgacgcacgcagcctgactttgtcttctccgcacggctgttacagaggtctccagagccttctctctcctgtgcaaaatggcaactattaagcaaaaactcattgcaccagttgcggaagagcgaggcgaacagttccaaacaataagatcacctgtagtgggtgttggacaagttggtatggcgtgtgctatcagcattcctgggaaagtctcctggcctgatgaacttgctcttgtggatgttttggaagataagcttaaaggagaaatgatggatctgcagcatgggagcttatttcttcagacacctaaaaattgtgggcaggataaagattatttctgtggaccgccaaattctaaagatttgtaagtggtaactgccagggagtcccgtccagccaagaagggggaaagtccggctcaaatctgggtgcagagaaatgttaatgtcttcaaattcattattcctcagatcgtcaagtacagtcctgaattgcatcataattgtggtttccaacccagtgggacattcttacgtatgttacctggaaactaagtgggattacccaaacaccgcgtgattggaagtggatgtaatctggattctgctagatttcgctaccttatggctgaaaaaacttggcattcatcccagcaagctgccatggatggaattttggggggaacatggcgactcaagtgtggcttggtgttggaatggtgtgaatgtggcaggtgtttctctccaggaattgaatccagaaatgggaactgacaatgatagtgaaaattggaaggaagtgcataagatggtggttgaaagtgcctatgaagtcatcaagctaaaaggatataccaactgggctattggattaagtgtggctgatcttattgaatccatgttgaaaaatctatccaggattcatcccgtgtcaacaatggtaaaggggatgtatggcattgagaatgaagtcttcctgagccttccatgtatcctcaatgcccggggattaaccagcgttatcaaccagaagctaaaggatgatgaggttgctcagctcaagaaaagtgcagataccctgtgggacatccagaaggacctaaaagacctgtga

SEQ ID NO: 522 - DNA, 441 bp, Homo sapiens
  SIMILAR (92)..(9): 351254mologous to Homo sapiens Human metallothionein Class I amino acid sequence,accession number Y57810,Smith-Waterman Score= 61.
atgtctgggcaagttagggcacagcaagagcaggagggctgcttgcaggctaaaaatgagaaagtacaagaagacattgactcagatcgacattactgctcatgcctaaccttctatgaggcagagatcaatcttcaggtacaaaaacctttactagctaaagtacagtcgaaggcttgcctgggtttgatctataccgtgtatgtggacagcctgaatgtctccttggaaagtctaattgcaaacctttgtgcctgccttgtcccagcggctggagggtctcagaaaaaatggaaaatgaaagcagactgggggaacaatggtggggagcagcaaatgactttgtttgatggtcccttctgtttaggtcattccctgaaaggagaagtaaatcaaagaatgacagaagaaaataatgtccacatggatgaagcttgttga

SEQ ID NO: 523 - DNA, 327 bp, Homo sapiens
  SIMILAR (91)..(231): 481254mologous to Human papillomavirus type 75 E4 protein,accession number Y15173,Smith-Waterman Score=80.
atgcacatgtctgaaactgaaagcatacttaaaatctggctaaactatgaacgtgctccaacccatgcaaaattggtcagcaccccccagacatccaaactatgtcagctcctgcttgtgcttccaaagaggcaacacagaaacaagtcccttaggcagcttcctcaacagccagaatttgggatgcaagctccactcttccctcctccctgtacccccaagcctgagagagttgaggaaggggctgatacaggtcattccctgaaaggagaagtaaatcaaagaatgacagaagaaaataatgtccacatggatgaagcttgttga

SEQ ID NO: 524 - DNA, 909 bp, Homo sapiens
  SIMILAR (1)..(633): 871254mologous to Homo sapiens similar to mouse Int- 6,accession number U62962,Smith-Waterman Score=958.
atggcggggtacgacttaactactcgcatcacgcaccttttggatcggcatctagtctttccgctccttgagtttctctctgtaaaggagatatataaagaaaaggaattattacaaggtaaattggaccttcttagtgatgccaacatggtagactttgctatggatgcatacaaaaacctttattctgatgatattcctcatgctttgaaagagaatagaaccacagttgttgcacaactgaaacagcttcaggcagaaacagaactaattgtgaaaatgtttgaagatccagaaacgacaaggcaaatgcggtcaaccagggatggtaggatgctctttgactacctggcggacaagcatggttttaggcaggagtatttagatacattctacacatatgcaaaattccagtatgaatgtgggaattactcaggagcagcagaatatctttattttttcagagtgttggttccagcaacagacagaaatgctgtaagttcactctggggaaagctggcctctgaaatcttaaagcagaattgggatgcagacatggaagaccttacatggttaaaagagaccatagataataattctattaactttgacttagatggggctaagaaaaagctgagagaatgtgaatcagtgcttgtgaacgacttcttggtggcttgtcttaaggatttcattgacaatgcccatctcttcatatttgagactttctgtcacatccaccagtgtatcagcattaacatgttggcagacaaattgaacatgactccagatgaaactgaaaggtggattgtaaatgtgattagaaatgcaagactggatgccaagattgattctaaattaggtcatgtggttatggtaacaatgtactctcaccctatcagcaagtga

SEQ ID NO: 525 - DNA, 1584 bp, Homo sapiens
  SIMILAR (1259)..(171): 411254mologous to Homo sapiens similar to mouse Int- 6,accession number U62962,Smith-Waterman Score=427.
aacctttttttttttttttttaaaatgaatcaatttaattcccaattcttcaaaatttatacgtaatatgtgtgtttccaaaagtgtgagtgaccgctttatataatagatctattatttcatctttctttgatagtttttttttttcatcttttctttatggttcttcagtagaagcccagaatcttggagttgcccccgttagggagccttctgacctgctattctgatttaggttctttctcattattcatgggccaacatctgggcttctaaaggaaaggcttttgggtcttttcaatcacttgctgatagggtgagactgcattgttacccataaccacattgacctaatttaagaatcaatcttgggcatccagtcttggcatttctaatcaaatttacaatccacctttcaagcttcttctgggagtcatgttcaatttatctggccaacatggttaatggcggatacactggggggatgcgacagaaagtctcaaatatgaagagacgggcattttcaatgaaatcctcaagacaagccaccaaggaagaagtcattcacaagcactgattcacattcccctcagctttttctggagccccatcaaagtcaaggttaacatataaaccattcaacaaattctgtaaattgggtcttttattgtgtaagaactcctgtttgataaaacttaactagatcttttagaacccctgcgacgtttcgaaacatcctttgtttgttatgactgctgatagtcaaatagcgaagaatgtgtggacacattgtctgaattgcattaagatattgtggctgataaaggaagaggtcaataatattatcgcgaccctttggggtgattgaagaaaacaaccagagaccagtgaatgagccatgttctctgctgaagagactgaagtggagaactcacagaattattatctatggtctcttttaaccgtgtaaggtcttccatgggctgcatcccaattctgcatttaagatttcagaggccagctttcccccggagtgaacttaaagcatttctatctgttgcctggaaccaggcactctaaaaaaataaagatattctgctgctcctgaagtaattccccacattcaatactgggaattttgcatatgtgtaagaatgtatcctaaatactccctgccctaaaacccatgcttgtccggcccaggtagtccaaagagcaccctaccatcccctggttgaccgcatttgccttgtagtttcctggatcttcaaacatcttcacaattggttctgtttctgcctgaagctgtttcaggttgtgcaaccactgtggttcttttctctctcaaagcatgaggaatatcatcagaataaaggtttttgtatacatccatagcaaagtctaccatgttggtatcactaagaaggtccaatttaccttgtaataattccttttcattatatatctcctttacagagagaaattcaagaagcggaaagactagatgccgatccaaaaaagtagccgatgcgagtacgtcaagtcgtactccgccatcttgccaaagaaaagggagtctgtgct

SEQ ID NO: 526 - DNA, 826 bp, Homo sapiens
  SIMILAR (588)..(238): 311254mologous to Homo sapiens Human apolipoprotein E mutant protein fragment 12,accession number Y20299,Smith-Waterman Score= 94.
atgggcaattctaataataattctaacagtgatgacagggtttactgttcccattttgtgtccacgtgtactcagtgtttagctcccacttacatcagaggcaaagaggaaccctcattcagagaccacctgcaccagcgcttccgggctgggtcagaaaaacaggtcgtcctcgccgcccgcgccgggcgcctgcagcaggttcctcttctgggagccagcacgcagccagagctccagggaggggggtgcacccggggttagtccaggtcttggggaagatgttgagaagatggtatgtcgctgtcttacctggctgagtagccacaagcaacaagccaaagggcaccctgaggggagaacactgtggctctcagtggccgcctcgggagaaacagcagcagctacacctgcaggcctgcaggggagaggaactttcacccacgtgggggcccctcctccactgcagctcttcatcttagaaagatgccagggaccccccaatgtgagggccgcagagctgtgcccagggctttacccgaaacctgaatgcttcagggaccaggcacaaccaggtgaagccctccagggcctctcgccttctcacccccatcaagccccacaggtcctcagaaggtcaaaagcctcggaaacagttcagccagaacaattttgccacccaaatggtgactcaaggagggaggcagaagaatgcgtttctggcaaccagaactgtgaagaaatacatttctgttgtttgaagccatcagtaattggtgacggcagccccagggaacaaatacaccaagtgttcgcctggctttga

SEQ ID NO: 527 - DNA, 340 bp, Homo sapiens
  SIMILAR (329)..(138): 251254mologous to Melanoplus sanguinipes entomopoxvirus ORF MSV249 hypotehtical protein,accession number AF063866,Smith- Waterman Score=61.
tgctactcaaaatgtggtcctcagaactgcagcatcagcatcatctgagagcttgttacaaatatcaattcttgggactcacctcaaatcttcagagggaggactccagaatctctgtttcaccaagctctccaagcaactgttacgcgtgctaaaatttgagaagcacactgtttgccttgactgcttaaaacaaggaattcatgggcaagtcagaagatgagtgcttcccaaaaattttcctgtgacagatgcgtccttccaagtatgtacaccaaaaagagggggaaaaaatccaataacctgtaacaccacaataaaaattgcaatgtgtttcaag

SEQ ID NO: 528 - DNA, 1909 bp, Homo sapiens
gctacattcttgaagatatacggaagagacgtattattaatgcttgacatatatcatcttgcctttcttggtctagactgacttctaatgactaactcaaagtcaaggcaactgagtaatgtcagctcagcaaagtgcagcaaacccatctcccacaggcctccaaaccctggctgttcacagaaccacaaagggcagatgctgcacagaaaactagagaaggggtcataggttcatggttttgtttgagatattgttgctactgtttttctgttttgaattttcttctttgtgctgattttactttatttaaggggactaggtgtttctgatattttagctttcttgtttggtttgctttgtgttgtctgcgaatggggctttaactgtggatgaatggaccttatctgttggcttaaaggactggtaccatcagaccattttattcttcacgtgaatgttttactttccaaagtgctctcctctgcaccagcagtaataaatacaatgccataatcccttaggtttgcctagtgcttttgcaattttcaaagcacttccataagcattccttccacctccttgataggcatttatggaaagcctgctacatgtcaatcatactgttaggcacaggggacctaaagacacataaaaggatgggatttctgctcattaaattgcaaaacctaatgaaagtgactgcttggtaaacaaattattattattttataaaatgctataaaagagccatattgaaagtgccctgttggagacagggcaaatgccacaaaaatgatgtaaatttacatggaggaaaagtagaatctgcctggtttgtaggcagcagaagacatttttcatcagtgggcaggtgttctttaccttttgtagaaatgggagtcaagtctcaaataggaggctccacaaaatctcatgccaggtctctgataccttattcacagaagttctttgaagtatttattgttattttctttgacttatggggaaaactggggacacaggaagacaggtaaattacccaaccttcacacgtttaagtccaggaactggggagccataatttttgtatcccctgggtataaatagacaatctctcgaagaaatgaagagatgaccatagaaaaacatccgagatatctccagctctaaaatcctttgtttcaatgttgtttggcatatgttatctttggaatttagtgtctgagcctctgtctgttactgtagtatttaaaatgcatgtattataatcatataatcataactgctgttaattcttgattatatacctagggacaatgtgtaatgtaagattactaattgggttctgcccaatctccttttcagattttattaggaaaaaaaaataaacctcctggatcggagacaatgtattaaatcagaagtgtaaactgccagttctatatagcatgaaatgaaaagacagctaatttggtccaacaaacatgactgggtctagggcacccaggctgattcagctgatttcctaccagcctttgcctcttccttgcaatgtggtttccatggggattttgcttcagaaaagccaagtattgggctgttcagaagttcacacctggcatttcctcagctcttctagaggggctaagagacttggtacggggccagggaagaattatgtggcagagctccttggaaattaatgcagattaggtggcatttttgtcagctctgtggtttattgttgggactattctttaaaatatccattgttcactacagtgaaaatctctgatttgaccgtgtactatccacatgcattgctttcatttttccctcgccgctcagtatatgagcgcacaatgtaggtaatgaccatctcatatttaattaaatggtatagtcg

SEQ ID NO: 529 - DNA, 211 bp, Homo sapiens
  SIMILAR (70)..(174): 401254mologous to Galanthus nivalis lectin,accession number M55557,Smith-Waterman Score=65.
atgggttatttaatgagtctcgtggatgagaagaaaaagcctacccaactgctactggattttgctgttacagacaatcttagtagtgactgtggaagcacagttgatacggatggggcagtaccaagccatcgcatgggaggatagttgctgtgggagagtcacacagattcttcacctgactttgtttgagcaacctttaagttcctga

SEQ ID NO: 530 - DNA, 395 bp, Homo sapiens
gtgcttcaaaacaacaaacaaatgacagcatggtgagaaagagtttgacacgtgtggcactgaaaagcttcctcgtattgtcaaagccagtaagccccgaattggactccatttccttcaacatttattctcctaatagcctaagcagaagtagctccagcagcaacctgtttactaatccttaaaatttaaacaaggccgatcagtcagggctgggagtatttacatcaccagcaattcaccatggccttcagctgtagttgctacctgtaacacataataagcaacttggaagcaaacaagaaatagacaaacaaattagttccaagctcctagagggctaacctacatccccgatcctttaaaaagtagagcaaaaatcagggcatatcaat

SEQ ID NO: 531 - DNA, 789 bp, Homo sapiens
  SIMILAR (268)..(381): 441254mologous to Rattus sp. fibroblast growth factor receptor-1, FGFR-1,accession number S73518,Smith-Waterman Score=72.
atggtgagaaagagtttgacacgtgtggcactgaaaagcttcctcgtactgtcaaagccagtgggagaggccttgcatctcaccagaggggctgaaagacagctggctgcggtgaggggacactatgtgaccatagaatgcacaacttcaactgcctcaccctggggcctttacatctgtctccctgggatcccagttgagcagatggacttcaggttagcatccactgtgaccctggcctatggtaacagcaatgacagtaacagcaatgccagtgatctagtgaagtcaattgaggcagatgatgatgatgacaacaaagatgatgatgaagccaaggctctccctaccgaccaaacgctcaacaatgtggtcactccttccctagtgacaaacccccacagtcagccattggctgggacaacgaagggctgtatgttttatgacatcgttcatggccaccaaactgccacttctactccttggaaatcagccaaaaactccaagccacctcctttcccaaacatctttcttcgaggacaaggtatattcccagaagaaatgtgtacatctgtgcatcaagaaacatgtgaaaatgttcaaggcagcattgtttataataacttcaagctggaaacaacccatgtgtccatcaagaactatacgcagcaacatgaagaatccacaaacatgaaaatgagtgaaagaagccagatgcaaaaaagggcacacagcgtgattccatttatgagaggtttaaaaacaagcaaaacaaattgcagtgcctaa

SEQ ID NO: 532 - DNA, 374 bp, Homo sapiens
  SIMILAR (5)..(352): 861254mologous to Mus musculus domesticus oxysterol binding protein,accession number AJ276505,Smith-Waterman Score=500.
ccacccagaccaagacctgttcccactgaacgggtcttccctggagaacgatgcattctcagacaagtcggagagagagaaccctgaggagtcagataccgagacccaggaccatagccggaagacggagagtggcagcgaccagtcagagacccctggggccccggtgcggagagggaccacctatgtggagcaggtccaggaggagctgggggagctgggcgaggcgtcccaggtggagacagtgtcagaggagaacaagagtctgatgtggaccctgctgaagcagctacggccaggcatggacctgtcccgcgtggtgctacccacgttcgtactggagccgcgctcctcctgaacaagctctccgacta

SEQ ID NO: 533 - DNA, 907 bp, Homo sapiens
  SIMILAR (310)..(639): 811254mologous to Mus musculus domesticus oxysterol binding protein,accession number AJ276505,Smith-Waterman Score=460.
atggggcttaccacctgtggtgatgatgctgcgtctccattcctggaaagacctggagaaaggtcacagaggaaagcacggcccgctgcacctgccgacgcacctgcagagaaggctggcgacctggggaccatcctgagaaaccaggatatatgtgcattaccaaatacacagagccggcaggacccctgcaaccctgaccagtgcttcccagtgaagaggaccctcctccctaactccacctgcagaaacctgtgggtggccgtcagagtgggaggctggttccgagtgttctggtttgtgaccgtggagggtcgctgctggctggacgccctggagctggccctgcgctgctctagcctactgagactgggcacctgcaagccgggccgagacggggagccagggacctcgccagacgcatcaccctcatcgctctgtgggctgccagcctcagccactgtccacccagaccaagacctgttcccactgaacgggtcttccctggagaacgatgcattctcagacaagtcggagagagagaaccctgaggagtcagataccgagacccaggaccatagccggaagacggagagtggcagcgaccagtcagagacccctggggccccggccgagggccggcacccacggagatcagagggtgccacgtgggagcacgcgctcctacaaagcacaaacggctcttggtgcccacactggcacctgcttttccgacctgcagagagctcttcctgtcctggccccaggatgtgcaagacagcagggtggagatttgtgggaaagtggggcgtcctcggcagcatcaggccagtccaccgccccaggaccagccatggggacaccccacgtgcagaagctagactcacggagcatcagtgacacatga

SEQ ID NO: 534 - DNA, 728 bp, Homo sapiens
  SIMILAR (185)..(235): 1001254mologous to Homo sapiens Human secreted protein, SEQ ID NO: 8006,accession number G03925,Smith-Waterman Score=87.
atgctcaaccaaaagctcctatatacagaggccaattctagacactggagtgaaggaagtaggcttctagcagacattgccaaggttcttctccaggccttcaaggccctagggccacaacggctgggtaacccagatgctactaccccgcagttcccggacatgatcctctccgcctctcgagggcaccaccacgaggcgatttgtgggccataccaaggatgtgctgagtgtgccttctcctctgacaaccggcagattgtctctggatctcgagataaaacatcaagctatggaataccctgggtcctgaaggaaaaaacggtctctctgtgcgtatataaaggatgggcctgtccccaggaccctgtgagagggaagcccaatgtccaccagacttgctgctgctgccaccattagcgccgacgccaacggaaccagcgctgctgtcaccctccatgcacctgcccaccctccaaggctcctaccacttggcctccaggcccccctcctaccgctcaggccgccctcttactgctccagccccgcctaccgctcaggccgccctcttactgctccagcccccctcctaccgcccggccgccctcttactgctccagcccccctcctaccgctcaggccgcctcttactgctccagctcccgcctaccgctcaggccgccatgttactgctcagccccctcctacggctcaggccgccctcctaa

SEQ ID NO: 535 - DNA, 944 bp, Homo sapiens
  SIMILAR (112)..(630): 511254mologous to Mus musculus activated protein kinase C receptor,accession number AF295529,Smith-Waterman Score=347.
gcggaattcggcacgaggcaaggcggcggcaggagaggttgtggtgctagtttctctaagccatccagtgccatcctcgtcgctgcagcgacacacgctctcgccgccgccatgactgagcagatgacccttcgtggcaccctcaagggccacaacggctgggtaacccagatcgctactaccccgcagttcccggacatgatcctctccgcctctcgaggtacggactaagataaaaccatcatcatgtggaaactgacccagggttgggacccaactatgggaattccacaagcgtgctctgcggggtcactcccacttttgttagtgatgtggttatctcctcagatgggcaattttggcctctcaagctcctggggattgaaaccctgcgcctctgggaatctcacaaacgggcaacaacacgaggcgatttgtgggctcataccaaggatgttgctgagttgtggccttctcctctggacaaccgggcagattgtctctggatctcgagataaaaaccatcaagctatgggaataccctgggtgtgtgcaaatacacctgtccaggatgagagccactcagagtgggtttcttgttttccgcttctcgcccaacagcagcaaccctatcatcgtctcctgtggctgggacaagctggtcaaggtatggaacctggctaactgcaagctgaagaccaaccacattggccacacaggctatctgaacacggtgactgtctctccaagatggatccctctgtgcttctggaggcaaggatggccagggcattgtttatggggatcttcaaacgaaggcaaacacctttttacacggttagatgggttggggacatcatcaacggccctgtggcttcagccctaaaccgctactggctgtgtgctgccaaaaggcccagcttagaatctgggtttagaggaaa

SEQ ID NO: 536 - DNA, 387 bp, Homo sapiens
  SIMILAR (1)..(351): 481254mologous to Homo sapiens HSPC164,accession number AF161513,Smith-Waterman Score=189.
ggggctgccttccaggaggatgatgtcatcgtgctcaatggcaccaaggaggatgtggacgtgctgaagacaaggatggaggagagaaggctgatagcgaagctggaaaagaagccccagggccatcaaaagttaagacagggaagcctgaagaagccagccttgattctagagagaagaaaaccaacttggctcccaaaagcacagcaatgaatgagagctcttctggaaaagctgggaagcctccgtgtggagccacaaagaggtccatcgctgacagtgaagaatcggaggcctacaagtccctctttaccactcacagctccgccaagcgctccaaggaggagtctgcccactgggtcacccacacgtcctactgcttctgag

SEQ ID NO: 537 - DNA, 585 bp, Homo sapiens
  SIMILAR (115)..(582): 951254mologous to Homo sapiens dJ1153D9.1 (A novel protein (protein X 0001)),accession number AL109806,Smith-Waterman Score= 754.
atggcgggaaccctcccaaaatccaagttcccagacaccatccaggcaccagccttgcaagtgatagcactcttaacctgctacgctgacactttgctgtgtgcgggaactttccaaaccaaggctttgaccagaaagccgtgtggggctgccttccaggaggatgatgtcatcatgctcaatggcaccaaggaggatgtggacgtgctgaagacaaggatggaggagagaaggctgagagcgaagctggaaaagaaaacaaagaaacccaaggcagcagagtctgtttcaaaaccagatgtcagtgaagaagccccagggccatcaaaagttaagacagggaagcctgaagaagccagccttgattctagagagaagaaaaccaacttggctcccaaaagcacagcaatgaatgagagctcttctggaaaagctgggaagcctccgtgtggagccacaaagaggtccatcgctgacagtgaagaatcggaggcctacaagtccctctttaccactcacagctccgccaagcgctccaaggaggagtctgcccactgggtcacccacacgtcctactgcttctga

SEQ ID NO: 538 - DNA, 606 bp, Homo sapiens
  SIMILAR (606)..(1): 971254mologous to Homo sapiens HSPC169,accession number AF161518,Smith-Waterman Score=1021.
gcgcttggcggagctgtgagtgataaagagggacttgtaggcctccgattcttcactgtcagcgatggacctctttgtggctccacacggaggcttcccagcttttccagaagagctctcattcattgctgtgcttttgggagccaagttggttttcttctctctagaatcaaggctggcttcttcaggcttccctgtcttaacttttgatggccctggggcttcttcactgacatctggttttgaaacagactctgctgccttgggtttctatgttttcttttccagcttcgctctcagccttctctcctccatccttgtcttcagcacgtccacatcctccttggtgccattgagcacgatgacatcatcctcctggaaggcagccccacacgtgtggcaaacttccgcttttatctctttcaaggctcgctcagaaaacacacagccgcagcaccgaaggaagcagaccctgtgtcggccgttcatctccaggcccacaacggggcagatgaaacgcgcccgctgcaggtcatcgtgcttgtcacctttagtgtttcctttatccccttcccaggcaggattatcagaaagcttcggacgcgt

SEQ ID NO: 539 - DNA, 987 bp, Homo sapiens
  SIMILAR (192)..(91): 781254mologous to Homo sapiens dJ1153D9.1 (A novel protein (protein X 0001)),accession number AL109806,Smith-Waterman Score= 124.
atgggagccatggacatcagctctgccatgctctactgggtggaaacaggtcactcacggtttgaataccaggaatgggacccagctgcaaagacgctgctccagcatgagcacgtccacatcctccttggtgccattgagcatgatgacatcatcctcctggaaggcagccccacactggagagggcaaacaagagagggcagattccatcaccagtcaatggggaggccacgcttcagtcccccactctcagccccaagcagtggcccccaggctccgaaaaatctgtgtccctcttcagtgcactggactcttcggtgcactggatgctcaatgcaggcactaagttttgtctgacttaccactggttgtatgccctgctcacagctgagacaagacctgaaggattgctaaagaatgcccttggtaacaactgtttctccaggaccttgtttggcttccccctggctgggtggaacccgctgtgtgcagccttcgcagggagcccacttccagctggctttggcacccactgtccctcctctcagattcactcttgtcaaggtcaccaggaatacccggtgcacagtacaacaggcacttccatgtcctcgcgggatgggtcttcccagctgcacttgacgcagctgacccaggagagaaccaacgaccctcatgcattgctttttggcaagggaaatgaaggattcaggacagtgggcactgggcacccacagggtttattcaagcagccgaagctcctgcttcagaaccttggcacgtacacccgtgggaagaggagtcggggcatcccttgctggaaataccccagccctgaaggttgctggcaaaaccaccatttaattcagaacaaaaagtctgctccaggagcccctgagagcgtcaaaaagaacaagccaactcaatgtgaagatgacgaggacgaagacctttacgatgatccacttccactttgggaacagtga

SEQ ID NO: 540 - DNA, 416 bp, Homo sapiens
  SIMILAR (106)..(32): 531254mologous to Homo sapiens Fragment of human secreted protein encoded by gene 89,accession number Y02883,Smith-Waterman Score=68.
  misc_feature (1)...(416): n = a,t,c or g
tttcgtgtcagctggtccgcagggaagcctttggcttccccaccggcaatggagcggttgacgttgcctctcggcggcgcggcggcggtggacgagtacctggagtaccggaggtataaacaacataaaactgacttggaagcgattcctcagcagtgccccattgatctgccccgccaagtgactggctgccagtgcagggcttacctttatgtccccttgaatggtagccagcccattcgctgcaggtgcaaacactttgctgatcagcacagtgctgcgcctggctttacatgcaatacatgttccaagtgttcaggattccatagctgcttcacttgtgcttgtggtcagcctgcatatgcccatgacacagtagtggaaactaagcaagaaagattggctcaggaaaaacn

SEQ ID NO: 541 - DNA, 416 bp, Homo sapiens
  SIMILAR (296)..(246): 471254mologous to Homo sapiens Fragment of human secreted protein encoded by gene 34,accession number Y36531,Smith-Waterman Score=44.
ttcaggattccatagctgcttcacttgtgcttgtggtcagcctgcatatgcccatgacacagtagtggaaactaagcaagaaagattggctcaggaaaaaccagtgggacaggacattccttatgcagccatgggaggattaactggtttcagctcgctggcggaaggctacatgcggttagatgacagtgggattgtaggtacaagtagtcaagtttcttcattaaggagacctgaagaggatgatatggctttctttgaaagacgataccaggaaaggatgaaaatggaaaaggctgctaagtggaaaggaaaagctccattgccatcagctacaaaaccttcatgaagactattggagaaattaaaaccatcatccaaaactaaaaatgcctattacttttgtcaaaactcaa

SEQ ID NO: 542 - DNA, 1098 bp, Homo sapiens
  SIMILAR (12)..(59): 501254mologous to Human herpesvirus 4 nuclear antigen (EBNA 1),accession number M13180,Smith-Waterman Score=46.
cggttccaggagggaacgggacgggtcgggcttcgagggcagctggtccgcaaggaagcctttggcttccccaccggcaatggagcgggtgacgttgcctctcggcggcgcggcggcggtggacaagtacctggagtaccggagaattgttggtgaggatgatggagggaaactttttactcctgaagaatatgaagaatacaaaagaaaagttttacctctgcgcttacaaaacagattatttgtgagctggcggccaccaacagggatggattgttaacttgtgggcccagagacactgtgtttttgtacacataggcattaacaacataaaactgacttggaagcgattcctcagcagtgccccattgatctgccctgccaagtgactggctgccagtgcagggcttacctttatgtccccttgaatggtagccagcccattcgctgcaggtgcaaacactttgctgattcagcacagtgctgcgcctggctttacatgcaatacatgttccaagtgtttcaggattccatagctgcttcacttgtgcttgtggtcagcctgcatatgcccatgacacagtagtggaaactaagcaagaaagattggctcaggaaaaaccagtgggacaggacattccttatgcagccatgggaggattaactggtttcagctcgctggcggaaggctacatgcggttagatgacagtgggattggtgtaccttcagttgaatttttagaatctcccattacggcagtagacagcccattcctaaaagcatttcaagcatcatctagttcttctccagaaacgttaacagatgtaggtacaagtagtcaagtttcttcattaaggagacctgaagaggatgatatggctttctttgaaagacgataccaggaaagggaatgctgtgaaagccagagtccctctgtagcactttcaggaaactcatctgcagatgcagggcagactgtgctgccaatgaggcccaaatctaatagtaaaggtggcagggctgcagaggagacagaatgcacagccttgctagtccccagcaaagtcagtgctgacacaaaaacagtggaaccctaa

SEQ ID NO: 543 - DNA, 1364 bp, Homo sapiens
  SIMILAR (163)..(717): 361254mologous to Homo sapiens HTRM clone 619699 protein sequence,accession number Y73346,Smith-Waterman Score=321.
atgcacatcatcacaccatcagcttcagagaatggcagccatttatttgtcccgtgggaaccaatctgcccttttgaagaaaagacaaaggtagaaaggatggtggaggactacctggcaagtggttatcaggattcagtgacgtttgatgatgtggctgtggacttcaccccagaggagtgggctttactggacacaactgagaaatacctctacagagatgtgatgctggagaactacatgaacctggcctctacaagaggctacagtggatggaaactctgtgactgtaagaattgtggagaggtcttcagggaacagttttgccttaagacacacatgagagttcagaatggagggaatacttctgagggtaattgttatggaaaagacaccctcagtgtgcacaaggaagcctctactggacaggaactttccaaatttaatccatgtggaaaagtctttactctaactccaggtcttgctgtacatcttgaagttctcaatgcaagacaaccctacaaatgtaaggaatgtggaaaaggctttaagtattttgcaagccttgataatcatatgggaatccacactgatgagaaactctgtgaatttcaggaatatgggagagctgtcacagcttcttcacacctaaagcagtgtgtagcagttcatacaggaaagaaatccaaaaagactaagaaatgtgggaaatccttcactaatttttctcaacttttatgcacctgtgaaaactcataaaggagagaagtcctttggaatgtaaagaatgtggaagatcctttagaaattcctcatgccttaatgatcacattcaaattcacactggaataaaaccacacaagtgtacatactgtgggaaagccttcactagatcaactcaacttactgaacatgtaagaactcacactggaataaaaccctatgaatgtaaggaatgtggccaagcctttgctcagtactcgggcctttctatacacatacgaagtcacagtggaaagaaaccctatcagtgtaaggaatgtgggaaagccttcactacatccacaagtcttattcagcatacaagaattcacacaggagagaagccttatgaatgtgttgaatgtgggaagaccttcattacttcttcccgtcgtagtaaacatttgaaaactcatagtggagaaaagccctttgtatgcaagatatgtgggaaagcatttctatattcctcacgccttaatgttcacctgcgaactcataccggagagaaacccttcgtatgtaaagaatgtgggaaagcatttgctgtttcctcacgcctaagtagacatgaaagaattcactctggggagaaaccttag

SEQ ID NO: 544 - DNA, 1294 bp, Homo sapiens
  SIMILAR (1)..(312): 371254mologous to Homo sapiens HTRM clone 619699 protein sequence,accession number Y73346,Smith-Waterman Score=195.
atgagagctcagaatggagggaacacttttgagggtaattgttatggaaaagacagcatcagtgtgcacaaggaagcctctattggacaagaactttccaaatttaatccatgtggaaaagtcttcaccttaactccaggccttgctgtgcatcttgaaattctcaatggaagacaaccctacaaatgtaaggaatgtggaaaaggctttaagtattttgcaagccttgataatcacatgggaatccacattggagagaaactctgtgaatttcaggaatgtgagagagccatcacaacttcctcacacctaaagcaagtgtgtaactgttcatactggaaagaaatctaaaaagactaagaaacatgggaaatccttcactaatttttctcaactttctgcacatgtgaaaattcataaaggagagaagtcctttgaatgtaaagaatgtggaagatcctttagaaattcctcatcctttaatgttcacattcaaattcacactggaataaaaccacacaaatatacggaatgtgggaaagccttcactaggtcaactcaccttactcaacatgtaagaactcacactggaataaaaccctatgaatgtaaggaatgtggccaagccttcactcagtacacgggccttgctatacacatacgaaatcacactggagagaaaccctatcagtgtaaggaatgtgggaaagccttcaatagatcttcaacgcttactcaacatagaagaattcacacaggagagaagccttatgaatgtgttgaatgtgggaagaccttcattacttcttcccatcgtagtaaacatttgaaaactcacagtggagaaagagagaaaccttttgtatgtaaagaatttgggaaagcatttgctctttcctcatgcctaagtatgcatgaaagaattcacactggggagaaatactatgaatcggttaagatcgatggcaaggtccgaactgatataacctaccctgctggattaatggatgtcatcaacactgacaagatgggagagaattcccaactgacctgtgacaccaagggtcactttgctgtacaacgtattacacctgaggaggccaagtacatgttatgcaaactgagaaaaatctttgtgggcacaaaaggaatccctcatctggtgactcttgatactcacgccatctgctaccctgatccccttatcaaggtgaatgataccattcagattgatttagagactggcaagattactgatttcatcaagattgacactggaacctgtgtatggtga

SEQ ID NO: 545 - DNA, 1995 bp, Homo sapiens
  SIMILAR (700)..(1206): 541254mologous to porcine endogenous retrovirus viral polypeptide,accession number AJ133817,Smith-Waterman Score=457.
atgacaggcagcagcagtactagtaggaaagggacagttaaggaaggttcttgctccacacaccaagggaaatcagcaccaaaagtcctgtcagacccaacaccagaagaatcatggcaggaattggtaccagcagtaccccctccttatcgagaggaaggggtccccactcctgagcccacagcacctatacctctgccagatagccacactcctagaccacccagagtggacaaaagaggaagtgaagctgtgggagaaactcctcctttggcagctcgcttacagcccaagactggaatccaaacacccctgagagagcagcgatatactggggtagatgaggatggagacgtggtggaaaggcatgcctttgtgtgtcaacctttcacctctgttgacctcctcaattggaaaaataatactccatcttacaccaaaaagcctcaagctttaattgacttgctccaaactattatgcagactcataatcctacttgggctgattgccaccagctactcatgtacctctttaatacagacgaacagcgaaggaagttaagcctggggcccaaccagttagataaaagcagtatccggttcccagagaagctcttgaaggaatccaggttcatctcatccagggaccaaggactaccggccagcacaggacttgcgcttggtcaaccaagctacagtgactctgcaccaacagttcctaacccttacacattgttagagctgctgccagctgaggacagctggtttacctgtctggacttaaaagacaccttctttagcatcagactagctcctgagagccagaagctgtttgcctttcaatgggaagatctggggtcaggtgtcactactcagtacacatggacctggcttccccaagggttcaagaactcccctactatcttcagggaggccctggctcgagacctgcaaaagcttcctgctgaagacctaggctgcgtcttgctcctgtacatggacgacgttctgctgggacactccacagcagttgggtgcacaaaagggacggatgccctgctttggcacctggaagactgtggatataaggtgtccaagaagaaagctaagacctgcagacagcacgtacgctacctgggattcactattcggaaaggggagcacaccctggggcagaaagaaagcaggtcatctgcaacctaccagaacctaaaaccagaaggcaacttatgtacggctccttttgaggatcttcaggtggatttcacagaaatgccgaaatgtggaggtaacaattatttgctggttcttgtgtgtacttactctgggtgggtggaggcttatccaacatcaactgaaaaggtctacgagacaagaagctacagtggatggaaactctgtaagaattgtgaagaggtcttcagggagctgtttttccttaagacacacatgagagctcagaatggagggaacacttttgagggtaattgttatggaaaagacacccttagtgtgcacaaagaagcctctattggacaggaactttctaaatttaatccatgtggaaaagtcttcaccctaactccaggccttgctgaacatcttgaagttctcaatgcaagacaaccgtacaaatgtaaggaatgtggaaaaggctttaagtgttttgcaagccttgataatcacatgggaattcacgctgactgtgggaaagccttcactagatcaattcaacttactgaacatgtaagaactcacactggggtaaaaccctatgaatgtaaggaatgtgggaaagccttcactcagtacacgggccttgctatacacttacgaagtcacagtggagagaaaccctatcagtgtaacaaatgtggaaaagccttcactagatcctcaggccttactcaacatacaataattcagatgggagagaagccttatgaatgtgttgaatgtggaaaaaccttcattacttcttcccatcgtacttaa

SEQ ID NO: 546 - DNA, 279 bp, Homo sapiens
  SIMILAR (79)..(144): 1001254mologous to Homo sapiens Human normal uterus tissue derived protein 48,accession number Y59885,Smith-Waterman Score= 112.
atggagcatctaaggagacccatctcaagagaacaaaatgatgttattctattaattatggacctgaagccgggtccaggtggcttgttgtcagaggccccaaatgaaaaactcttcttcgtggacactggctccaaggaaaaagacacttttctctaccagatgaggaagctgcctctgttcctggctagctatctccttcttatgaatgctgaaaacgattcggacaagcggtcctgcatctaccgcaaacatctcagcatctctccagtcacgtga

SEQ ID NO: 547 - DNA, 748 bp, Homo sapiens
  SIMILAR (117)..(536): 631254mologous to Homo sapiens Human normal uterus tissue derived protein 48,accession number Y59885,Smith-Waterman Score= 357.
tttagattaaaatgtatatatttcaaaagagaaaaggaagcagtaagaaataagatagaggagggcctttgacaagatggcggcaggaggcagtggcagttggtgggaagcgcacgtcgaaaagagatgccgattctggtttcctggggctgcggcccacttcggtggacccagcgctgaggcggcggcggcggcgaggcccaagaaataagaagcggggctggccgggggcttggcttcaggagccgctggggctggaggttgaccagttcctggaagacgtgcggctacaggatgcgcacgagcggtaggcttgttgtcagaggccccaaatgaaaaactcttcttcagtggacactggctccaaggaaaaagggctgacaaagaagagaaccaaagtcccagaagaagtcacttgcttctcaagaaaccccttccgggtttgacctcatcctccgagaacacatccaaagtccctgccccccaaagacgtcctccgcccaccaggttccccaaacgccaagaagctcaggcggtaaggagcagctatgggagaagctggccaagcagggcgatgctgccccgggaggtgcgcagggcccaggcccggctcctcaacccttctgcaacagatgccaagcccgggccccaggacaccgtagagcggcccttctacgacctctgggcctcagacaaccccctggacaggccgttggttggccaggatgagtttttcctggagcagacc

SEQ ID NO: 548 - DNA, 678 bp, Homo sapiens
  SIMILAR (1)..(531): 751254mologous to Homo sapiens unnamed protein product,accession number AK001166,Smith-Waterman Score=621.
atggttcagacattttcccgttgcatcttgtgttccaaggatgaagtggacttggatgagttattagctgctagattggtaacgtttctgatggacaattaccaggaaattctgaaagtccctttggccttgcagacctctatagaggagcgtgtggctcatctacgaagagtccagataaaatacccaggagctgatatggatatcactttatctgctccatcattttgccgtcaaattagtccagaggaatttgaatatcaaagatcatatgggctctcagggaacctctgggcagccttgttgggagggaagtcattaacaggatggccaaactctccaacaaagagaaaaagaagaaactgaagcagtttcagaaatcctatcctgaagtctatcaagaacgatttcctacaccagaaagtgcagcacttctgtttcctggaaaaacccaaaccgaaaccacagctgctaatgtgggcactaaagaagcctttccaaccatttcaaagaactagaagttttcgaatgtaataatacttccacagcaacaggtgctagagaccactgttgttgttttgaatgaatggtggttaggagaaagactttggtggtggaagaaagaaaagcataaaacaaagactactgaaatatagataaagattgccttagttttta

SEQ ID NO: 549 - DNA, 1717 bp, Homo sapiens
  SIMILAR (1543)..(1418): 371254mologous to Homo sapiens hepatocellular carcinoma associated ring finger protein,accession number AF247565,Smith- Waterman Score=71.
tttcttaaatcaaatcaagctgtattgataatgatgatttagcaggaaccactctaaaaatcagaaacaattagaatgccttccccatcaaattattttattaggttaattaaacagcttaaagatgattccttttgtgtggtacccttctagaaaatatttcaagttttgaagtgaacttccaatacataaaacaaaattactttagcatacacaaatttcagatcaaaatacaacactctgtttctgttttcttacagttataaaatccagtcaatacaaacgtacataaaaaagataaaacactttcactgatccttggttcaagaaaaacagcttgaaggcaaaattgttccccaagcacaggtcctgggttcgtgagaagggaccaaccccacaatatactgaagcatgtaaacaaagtgcgtgctacttaatttaggttaacaaatccctttttgcatcagtattacttgtaaaccataaagcaacttttaaaaagaaaggttattaattaaaaattacttctgactgctaaatttcttatcagcaagtgaacagaaaattattccacaaaacaaactagtacctttggaccacaggatgtgagacgtgacatttcaatgaaatcaacttagcacgacttctctactatcctactgaacttggggagtacaattttacaagttgcagccttctagcacttccaatattttgaactttctaaacctgcctatttagctatgattttcattgcaaatccctgtttttcagtagtaggactttattaaagataggataatatcacacacaatacaatcttcactgaatatgtgtctaagcagacctacttggaattctactagataataaagttgcaggatttaaaagaaatactattctgcaggtcccatgtcagaaaacacagatatgttcaacagattggtgtggtatttatatggtattcgtggcattttccttatagtattcaaagcatcccaaatgacccaatcaagactgttaaaaaccagtcttggacaagggtgacagtcacatactcgagggtccagcacaacactggcatgagccaacaggagccacgccggccacctgctgggccagggaccactgcaaagagcagccctgaatttgggagggtcaaatcgaatttacaaatcttgttttcaggaatttcccttaaatagttttcttcaaggccagaagacctatacccgtgatggaaaacaaaagaatgtacacatttctagtgtgtcatgaatgggtctcactcacagataggtacagacatcactgtcactgctaacacacaatgaagtctgcctacgcctacctgaggagcatccgcgataccgtttctgatgaggacaggactctgcggagggcctcccaccaccccatgttgagaggtgacataatcatggtggcagcaacagtggtcactgcacacaaggcactctcccagctgcttacagtcatcacccagttaatcctcacaacaacccgcagaggcaagctgacagacactagggaggatggaggcgaccacgtgtggagtgcagaaggcgcataccggaggaaggtgagggatgttccacagatacatggaacaaatcacatcattcatgattttcagtatcatccaactctatatagttctgccaacctcaactctgcactgaggaaacactttaagtga

SEQ ID NO: 550 - DNA, 1349 bp, Homo sapiens
  SIMILAR (203)..(156): 751254mologous to Homo sapiens Human secreted protein, SEQ ID NO: 7420,accession number G03339,Smith-Waterman Score=70.
caatttggagggctcagaagaagacaggaaaatgtgggaaagtttggaacttcctagatacttgttaaatggctttgaccaaaatgctaatgatatggacaatgaaatccaggcttgggtggtctcagatggagatgaggaacttgttgggaactggaataaaggtgactcttgctatgttttagcaaagagattggcagcattttgggtgtattcagagggtgcaagccccaagccttggcagcttcgtgatgttgagcctgctggagcacagaaatcaataagtaaggttggggaacctctgcctagatttcagaggatgtatgaaaacgcctggatgtccaggcagaaatttgctgtaggggcaggatccttacggagaacctctgctatggcaatgcagaaggtaaacgtggggttgaagtccccacacaaagtacccactggggcactgcctagtggagctgtgagaagagggccaccgtcctccagaccccagaatggtagatccactgacagcttgcactgtgtgcctggaaaagctgcagacagtcaatgccagcccatgaaagcagccaggagggaggctggatgctgcaaagccacaggagcggaactgctcaagaccatgggaacccacctcttgaatcagcattgcataaatgtgagacatggaatcaaaggagataattttggagctttaagatttgactgccctgctggatttcagacttgcaaggggcatgtagctcctatgttttggctaattcctcccatttggaatggctgtatttagccaatgcctgtacctccgttgtatctaggaagtaactaactagcctttgattttacaggctcataggtggaagggacttgccttgtttcagatgagactttggagtatggacttttgagttaatgctgaaatgagttaagactttgggggactgttgggaaggcatgattgatttttaaatgagaggacatgagatttgggtaggggccccagggagagaatgatatggtttgggctgtgtccccccatcccaaatatcaccttaaattgtagctccccataattcccatgtgtcgtgggagggaccctggtggggagataatttgaatcataggggcattttctcccttactgttctgggtggtagtgaataagtctcatgagatctgatggttttataaggggaaacctctttcgcttggttctcatttctcccttgtctgctgccatgtaagacatgcctttcgccttctgccatcattgtgaggcctccccagccacatggaactgtgagttcattaaacctctttttcttcataaaaaaaaaaaaaaa

SEQ ID NO: 551 - DNA, 1384 bp, Homo sapiens
  SIMILAR (576)..(869): 451254mologous to Homo sapiens PRO2852,accession number AF130079,Smith-Waterman Score=178.
tttttttttttttgttttgttgattttgttactttattaaaaattgaatccttgaacttttttaaaattaactcctaatccttgtagaataagtgtacttcatgcttcatactctggaggtactggctgtgctgctctgagtctttcagggagcaccatcactgtgcagcccaagcttttcccagacacttctggacaagtgctcctaagaggcacattcacaagcaaacatgatccaaacagcacatgcagattcagggtaagtaaatactcggacacgaactgccagtcgcacttggtctccacggcaacagattatttcttcacagaaaggagatcgaagacatgtggcaaatgcacgtcttgcatttctatacacaaaatgtattgggaaccctttaaatgtgtgaccatcaggtacagcccttcttatggcatcttgaaattcttcattgcctgctgatatacttgttgtacgctcaaattcataagaagccaaagctggtgataaaaggtaggagagctggtcttcccaaacagtagtgaggccaagatctctgttgtcctggctgggctgccgtggcgtggtctcggttccttgctctctgtgcctcgcaggttccagcgtttctcgtgtctctgtctcttgggtctctgggattcgctctatctttctggttggcctggtgctttttgtttttttagtcgggcctggctttgtttttgttgtctgggctggtctcttcgtcctgacctggggtggtccccccctttgggcgtcccaaagtgctgggattcctggggtaattttctgttgctcgtccctgttttcctttttttcaccaaaagacctattgatatttgttactgacgcgtcaattgtggatgcacacagaggtggaaagggaggaagggatgttgtagctccaggagcacacacagatttaattgcttcctcactcatgggtttccatttggattcatcgttcaaatcaaatacacaggtttctactgcatcagagggttgacaatttcccaggaacatctgatggttgaaaacacaaccaattgttcgatatgggtacagtggtttgggctgttcagcaactggaggttcatcaggattggtaggtttatggatgtacctgtgtcctgttaaactctcccaaaaagtgatggccccatcagttccacaagtcataacccatgcatgaggtactccttttgccttggtcccaacacaaacaaaggcttctaatccatatccaagaagaagggctttgctttctgtatgctttctgtccttctgggtggtgtcgcatatatttttaaaaccacattcagtgtgatgaacacttgttggtacacttctaaggttagtcat

SEQ ID NO: 552 - DNA, 1501 bp, Homo sapiens
  SIMILAR (1067)..(1153): 411254mologous to Homo sapiens oculomedin,accession number AF142063,Smith-Waterman Score=70.
atggatgtccatggtagaataagagaaatccttgctgagactatacgggaagaattggcacctgatcaacagcatttatcaacagaagatttgatcaaagcccttagacgtcgaggaatcattgacgatgtgatgaaagaacttaattttgttactgttttgggtggaaaagctttcttggaacatctgcaagaacctgagcctttacctggacaagtttgttcaacgtttactttatgtttacattatcgaaaccaacgttttcgttctaaacctgttccatgtgcctgtgaaccagattttcatgatggctttttacttgaagtacacagagaaagcttgggtgatggaactagaatggctgattcaacaacaatgttatcaataagtgatccaattcatatggtgctaatcaaaacagacatatttggtgagacgactttagtagcatcatattttctggaatggccgatcggttttgggctcagaaaatggagtgaccagtctgactgtggaacttatgggtgtagactgtggtggtgattccaggaatctacacgtgataaaactgcacagaacttacacgcacacacaaatgagtgcatgtaaaactggtgaaacctggatggactgtattgtttcaggttcccaggatcttggcctcactactgtttgggaagaccagctctcctaccttttatcacccagctttggcttcttatgaatttgagcgtacaacaagtatatcagccgggcaatgaagaatttcaagatgcccataagaagggctgtacctgatggtcacacatttaaagggttcccaatacattttgtgtatagaaatgcaagacgtgcatttgccacatgtcttcgatctcctttctgtgaagaaataatctgttgccgtggagaccaagtgcgactggcagttcgtgtccgagtatttacctaccccgaaccctgcatgtgcctgtttggatcatgtttgccttgtaaatatcgcctcggtattatagggcccaatatttatataagatttatacctgtgtttaattggaattttacacattgtacattacttagctatttagaggtttgttattttaaaatcacaatctggcttgaatggcatacttcaattttgtatatacttgactggtaatgtttaaaaaaaatcatgcattcctttaaaaattaaggctgaaaaacttgtataaatctccctggaatttagtataaattaagtgtatattctattttaataaatgctactttgtttacagttatcagtagtttaaatattaatataaaatgcattcagttttctttacacaaacaggtaatcaaagagatgtttgtctaagggtttgagccctagacaaatcagtatgatcattacttttcacaggttaatggaattattttatacagattaggagaaattaacctcatgacagatttatttattgcattggtgaaaataaatgttaatgaattacca

SEQ ID NO: 553 - DNA, 501 bp, Homo sapiens
  SIMILAR (78)..(119): 621254mologous to Agrobacterium tumefaciens P-450-type monooxygenase,accession number X06826,Smith-Waterman Score=50.
cagagtgagactctgtttcaaaaaaaaaaaatcatttccttggtgcaagctggagggtggaggaagagggagcaaactcaggtcctcacccgtgcccccatgtagaaaggcagactgtggagcccaaggtgtgaccctgataagaaactggtttaagaaagattcacacagggtgtgccccaggagggtagaggcaggcgttatcccattgtcccctggtgaccctggccccagaggcctttatcctttcagtctccaaggcaaggatttccgaaggtttcagggaaaaatgcccaagcccatcccccacgacttgaaaaactagtctgttagattcaagagcccaacacttaggtcaatggcaggggcaggggtttcacagacctccctcctggtggccccggtgctccagagaggagatcagctcagtggacaaacatttggccaactcttcacaattgccagggtgtggaaccagctgagttgtcaacagagaagccg

SEQ ID NO: 554 - DNA, 1076 bp, Homo sapiens
  SIMILAR (686)..(537): 361254mologous to Bacillus subtilis YokH,accession number AF006665,Smith-Waterman Score=72.
ggcacgaggtggtggggggtcgccagcaggttccctctccccggccccagctctggacgctcaccccagtgcaacgccctgagtgacggaaagaggtctggcggcttctctgttgacaactcagctggttccacaccctggcaattgtgaagagttggccaaatgtttgtccactgagctgatctcctctctggagcaccgaggccaccaaggagggagccaagacaatgcaaactcccagttgaacattcccgtgcctgtgctccggctgccccggggccctggatggcttcagccgtggctttggcgcctgaatggacgcagagccccccttgaggccagaggttcctgaaatccaggagtgtcccatagctcaagaatccctggaatcccaggagcagcgggcacgagccgcccttcgggagcgttacctccgcagcctgctggccatgggtgggtcatcaggtgagcttcacgttgcaacgagggtgtgcgtgtggccgcccactttgggagccaccgacctgggatgtgggccaacttcttacgtgttcacagctgcagattcccataggtgttgcaagcagaggcgctgttccgatgttagttgacattattttcatattacctttcaagccttaaagatattgtgtttcatttttctgcttgaggctaaggcactgtatcccatggcctgccaatgttcccgaagccaggaactctgggccccatggagttatgagctccccttggaattttggagccaagctttaagcaagttctgggactcctgagaccttcctgggtcttagttcagttaaaatttctggcaactctaggaattctaagatcccattggaaggaattgctctacctcacagaactctgaaccctacaggaaatatgggcttgctgccatttcctgaagacccgggcatcggggtggggtgataaaaggatacaacctgcacagggcgaagttattaaagaggctgcaaagtccagccaccctgaagatactccccagtgctccccccctgctaaagaaccagttaccccaggaaaaaaaaaaaaaa

SEQ ID NO: 555 - DNA, 1842 bp, Homo sapiens
  SIMILAR (1730)..(1837): 881254mologous to Homo sapiens putative p150,accession number U93572,Smith-Waterman Score=164.
gtccctcccacaacatgtgggaattatggaagtacaattcaagatgagatttggatggggacacagaaccaaaccatatcagtatctgaagagatgatgttccaagcagaggaaatagccagcgcacagaaaatgtggaatcagcatcatatcacaccttccaaagttgaccacatagttggaagtaaagcactcttcagcaaatgtaaaagaacagaaattataacaaactatctctcagaccacagtgcaatcaaactaaaactcaggattaagaaactcactcaaaaccgctcaactacatggaaactgaacaacctgctcctgaatgactactgggtacataacgaaatgaaggcagaaataaagatattctttgaaaccaatgagaacaaagacacaacatgccagaatctgtgggacacatttaaagcaatgtgtagagggaaatttataacattaaatgcccacaagagaaagcagcaaagatgtaaaattgacaccctaacatcacaattaaaagaactagagaagcaagagcaaacacattcaaaagctagcagaaggcaagaaataactaagatcagagcagaactgaaggaaatagaggcacaaaaaacccttcaaaaaatcaatgaatccaggagctggatttttgaaaagatcaacaaaactgatagactgctagcaagaataataaagaagaaaagagagatgaatcaaatagatgcaataaaaaatgataaaggggatatcaccaccaatcccacagaaatacaaactaccatcagagaatactgtaaacacctctatgcaaataaactagaaaatctagaagaaatggataaattcctcaacacatacaccctcccaagactaaaccaggaagaaattgaatctctgaatagaccaataacaggatctgaaattgaggcaataattaatagcctgccaaccaaaaaaagtccaggaccagacggattcacagccgaattctaccagaggtacaaggaggagatgattgaaaaaaaggcctttgacaaaagtcaacagcccttcatgctaaaaactctcaataaattaggtattgatgggacgtttctcaaaataagaagagctatctatgacaaacccacagccaatatcatactgaatgggcaaaaactggaagcattccctttgaaaactggcacaagacagggatgccctctctcaccactcctattcaacatagtgttggaggttctggccagggaaatcaggcaggggaaagaaataaagcatattcaattaggaaaagaggaagtcaaattttccctgtttgcagatgatgtgattgcatatttagaaaaccccatagtctcagcccaaaatctccttaagctcataagcaacttcagcaaagtctcaggatacaaaatcaacgtgcaaaaattgcaagcattcttatacaccaataacagacaaacagagagccaaatcatgagtgaattcccattcacaattgcttcaaagagaataaaatacctaggaatccaacttacaagggatgtgaaggacctcttcaaggagaactataaaccactgctcaacaaaataaaagaggacacaaacaaatggaagaacattccatgctcatggataggaagaatcaatatcatgaaaatggccatactgcacaaggtaattgatagattcagtgccatccccttcaagctacaaaggactcttcacagaattggaaaaaactactttaaagttcatatggaaccaaaaaaggccccgcatttccaagacaatcctaagcaaaaagaacaaagctggaggcatcacgctacgtaa

SEQ ID NO: 556 - DNA, 1570 bp, Homo sapiens
  SIMILAR (865)..(1194): 341254mologous to Mus musculus proline-rich protein,accession number M12099,Smith-Waterman Score=99.
atgctgaagtactacagcacgcatttaccaccgtctccccgggacctggtggaggcgtctgtcacagtccctggtgaaggacacctggagtgccttcatggggcctgtagccccagccctggtcccacccccacccgcgaagctgctctcaggggagaacccagaatacagaccctgccggtggcctctgccctcagcagtcaccgcaccggccctcccccaatcagccccagcaagaggaagttcagcatggagccaggtgacgaggacctagactgtgacaacgaccacgtctccaaaatgagtcgcatcttcaacccccatctccccctgctgccagtccagagagcacgtgcactgccccatgacacccactgctccggggttccaggaacaaggttaaggttctactacaaagacagtcatggccaaggcggctggtctggcagtctagaagaagggggggctgtgcagggtacccagccaaggcagagtccagaggaagtcaaggaagagtatgaatgtccctcccacaacacgtgggaattatgggagctacaattcaagatgagatttgggtggggacacagccaaaccatatcagatgtccaacatcgtcagccatcaaggaaatgcgaatcaataccacaaagagataccactaacacctgttaggatggctatgatcaaaagacaatacaaaagtgttagcaaggatgtggagaagctggaacacgtgtacgctgctgttccactccacgatacctgcctttcttacacggtcacccatatgctgcttctcttcattcacccgttaagtctctgtgcacccctggtagcaagcgtaatgagacaggagggactcgacgccctcagaggctgccgtgtgaacaagactgccaatggagactgccgcagagacccccgggagcggagccgcagccccatcgagcgcgctgtggcccccaccatgagcctgcacggcagccacctgtacacctccctccccagccttggcctggagcagcccctcgcactgaccaagaacagcctggacgccagcaggccagccggcctctcgcccacactgaccccgggggagcggcagcaggcagaacctggctctctggccattgccactgctgttggggagtccctgaaggacacgggaacatctgtcagccctggggtccacatatctcctagccagctggacaacaggggtcatctggaatcccacactgggacctatgccctcttccctccacctttccctggcctcttctacattcagggccagatctcggccaggtaccactttggctctgtggcattgggtataaaggaaacagcactggacttggggcaagacgctcccaattttggatccgggctctaccagccaccagctctctgtgggctagctcgtttctcaggactcagtttccccgcaggaaaatacatctctccattttaccaccaaccatacagaggttatcaaggatacataaaacaactggaaagcacagacccagaacctggcaccgagcagggcctcaggaaatgttaa

SEQ ID NO: 557 - DNA, 1734 bp, Homo sapiens
  SIMILAR (1249)..(1467): 981254mologous to Homo sapiens KRAB zinc finger protein ZFQR,accession number AF309561,Smith-Waterman Score=384.
atggggggatcctctagactcagctggggtcagcccccagtgatgcttttttggcaggtggagaactggacacgcacagctgaccaagcgaggctacttcagaataaaattaacactgagttacaaactgaagtggcaatgttgaaatccatggttctgtggttaggagaacaggaatcactgaccctggaggatgtggctgtggagttcacttgggaggagtggcagctcctcggccctgctcagaaggacctgtaccgagacgtgatgttggagaactatagcaacctcgtgtcagtggggggatcctctagagtcgaccgcagtgcatgcaactcagtcccattctcctcagaggattcacccgggaagaaccccttagagggccaagaagtgggaaaagcccttcacccccaaagtcagtactcaaatgaccaccaaagaacgcaaccagaaaagaggcccggattttgccgatttcggaaccaccatcaaacaggattttcgcctgctggggcaaaccagcgtggaccgcttgctgcaactctctcagggccaggcggtgaagggcaatcagctgttgcccgtctcactggtgaaaagaaaaaccaccctggcgcccaatacgcaaaccgcctctccccgcgcgttggccgattcattaatgcagctggcacgacaggtttcccgactggaaagcgggcagtgagcgcaacgcaattaatgagatgggacaagccatgtgggtgccctcaaggtgcatgcgaccatggaatgggagactggaggaacccagggtggccaaccatgggcccagtccctctctgtacgagctatgagtcagctgagcctgagtgcaaagatggagagaaggccaaccagagtcataagggattttgccgatttcggaaccaccatcaaacaggattttcgcctgctggggcaaaccagcgtggaccgcttgctgcaactctctcagggccaggcggtgaagggcaatcagctgttgcccgtctcactggtgaaaagaaaaaccaccctggcgcccaatacgcaaaccgcctctccccgcgcgttggccgattcattaatgcagctggcacgacaggttttccggactggaaagcgggcagtgagcgcaacgcaattaatgttcttcgtcccttgtatgtcaacccaaggattcactggggatctagaactgcgcaggccagtctaggaagagagagacaggaaagagaagaagaggagagcaaaggctatgaaataaagaactctgttgagtttactggaaatggggactcctttcttcatgctaaccatgaacgacttcatactgcaattaaattccctgcaagtcaaaaactcatcagcactaagtcccaattcatcagtcccaagcatcagaaaacacgaaaattagagaagcatcatgtgtgcagtgaatgtgggaaagccttcatcaagggggtatcctctagagtcagcctaggtatctctcttaaatgtgtgatcaaggaattaccaccaatacagaacagtaacacaggagaaaaattccaagcagtgatgttggaaggacatgaaagctatgacactgaaaatttttacttcagggaaatccggaaaaatctacaggaagttgactttcaatggaaagatggtgaaataaattataaagaagggccgatgacccataaaaacaatcttactggtcaaagaggttcgacatag

SEQ ID NO: 558 - DNA, 810 bp, Homo sapiens
  SIMILAR (379)..(426): 621254mologous to Homo sapiens zinc finger protein ZNF234,accession number AF228417,Smith-Waterman Score=45.
atgattattatttacaaaaaagaagaagaagaaggaggaagggaggaggagaaggaagagaaaagaggagaaaagaagagaaaagaggagggagaggagagaaaagagattttgagaatgaattacgatgtgagcctggcacgacagactaaaggaattgggcctcctagaaaggccacttttatgcctgacggcgactatccagggtcggaggcgtcccagcgtttgcgcagatgcaagatggccgcgccctcgtcgccttggctcatgggggccgccatctttgagtatctgacgtacacaaggcaaagggcggttttggcgctggtgaccggggggacctttgacattcagggatgtagccatagaattctctcagaggagtggaaatccctggaccctgtgcagaaagctttgtactgggatggatgttggagaactacaggaacctggtcttcctgggtctccacagactataccataaaagtgcatttttctcaccctcctaaaaatccctggactcctagttttactacaaataaaccaggattctatttccagtatgaaaagtttgtcagaaaaaaagagactggcctgcgcagttctagatccccagtgaatccttgggtgacatacaagggacgaagaacctataggaaagggaaatctctagctctcgaggtggctttttggatgtctggatgcattcataaccatcctcgtgttgcagaaaggggtcctgatccagatcctgaaaccgccattgcaaattataatgagaattattacagtgaaagggatccgacctaa

SEQ ID NO: 559 - DNA, 1548 bp, Homo sapiens
  SIMILAR (712)..(1545): 581254mologous to Homo sapiens FLJ00032 protein,accession number AK024442,Smith-Waterman Score=830.
gccctttcccttgcgggtcgcaccccgcccaggcccctctcccgccccaggtctctcagtcttttttctcagggcgtgtagcttcctgcacacccggaagcagatcgcgcggggaaaagatcacagcgctgcgcgtcagtttccgtctacctggactaaacatttgcttcgccccgtctgcctgaatcgaacgtgcacttggcagtcttcccttgtccatacccgtttcctggggatcgctacggaccttaaaataccagcaacagccccttcgccccaaggtcttgctctgtcagactagagtacagtgccatgatctccgctcactgcagcctcaacctcctgggctcaagcagtctttctgcctcagagtgctgggaatacagaccggaagccaccacgccaggcctacgagatttgacttgtaaagaattaattatattgactgagagagaagcccagaagaggaagaagaggaaagaaaaggagtcagggatggctcttacacagggaccttttgacattcagggatgtagccatagaattctctcaggaggagtggaaatccctggaccctgtgcagaaagctttgtactggggatgtgatgttgggagaactacaggaacctggtcttcctgggtatccttcctaaatgtatgaccaaggaattaccaccaatagggaacagtaatacaggagaaaaatgccaaacagtgacgctggaaagacatgaatgttatgatgttgaaaatttttacttaagggaaatccagaaaaatctacaggaccttgagtttcaatggaaagatggtgaaataaattataaagaagtgccaatgacctataaaaacaatcttaatggtaaaagaggtcaacatagtcaagaggatgtagaaaacaaatgtattgaaaatcagcttacattaagctttcagtcacgtctgactgaactgcagaaatttcaaactgaagggaaaatttatgagtgtaaccaatctgagaagacagttaataacagttccctagtttcaccacttcaaagaattcttcctagtgtccaaaccaacatttctaaaaaatatgagaatgagtttttgcagctgtcattacccacccaacttgagaaaacacacattagggaaaaaccttatatatgtaaagggtgtggcaaagcctttagagtgtcttcaagtcttattaaccatcagatggtacatactacagagaaaccttacaaatgcaatgaatgtggcaaagcctttcatcggggctcactactaactatacatcagatagtccatacaagggggaagccatatcaatgtggtgtatgtggcaagatcttcagacaaaattcagatcttgtaaatcaccggagaagtcacactggagagaaaccgtacaaatgtaatgaatgtggcaagtcctttagtcaaagttacaaccttgcaatacatcagagaattcacactggagagaaaccttacaaatgtaatgagtgtgggaaaaccttcaaacaggctcatgcctcactacacatcagataa

SEQ ID NO: 560 - DNA, 462 bp, Homo sapiens
  SIMILAR (403)..(462): 401254mologous to Junonia coenia putative,accession number L42135,Smith-Waterman Score=47.
atgatgcaatggaattgctggaggatcttaatgatttaagaatggagggagtaacaaccctggtaccttctgggagcaaatttaaccaaggccgtcctacttaccctgctgagcctcaggccaaggtcacactgaacatctgttcaaggtgtgccaggcttcaaggagacaacctggaagaaaggacagaagagtcactaccaatactccattctccagatgaaaaaatcccagattcattcgattccttgcctgggactgaagaagcactaatggaggagggtgacgaatttgagaaagcatctaaactaacaggacctggagaagcctccagtggagtaggacactcactgaaaaactacatggaagaagatgaatccttaaagcaattgcaggtagttcatcaaccatggatcttgccaagtgacacagaaagtgaaggagtggaagcagaacaagaga

SEQ ID NO: 561 - DNA, 567 bp, Homo sapiens
  SIMILAR (468)..(566): 571254mologous to Homo sapiens SEQ ID NO 448 from WO9922243,accession number Y19730,Smith-Waterman Score=91.
atgcaatccccaagtcttacagcttcccacgtggtgttgggcctgctgctgcgcaaaagacgagagttcagctttgggagcctccatctagatttcagagaatgtatggagatgtctgaatgtccaagcagaaatctgctgcaggtcagagccctcaaggagaacctctgctacagcagtgcagaggatcttaatgatttaagaatggagggagtaacaaccctggtaccttctgggagcaaatttaaccaaggccgtcctacttaccctgctgagcctcaggccaaggtcacactgaacatctgttcaaggtgtgccaggatttttggacgttcgagaatatctgtgatatgtggaagagaaattcaggaaaagcctaaggccacccagagaataagcatcctacaattagggaatgaaaacagtatactggccgctatgaaaaagaataaaatccttttcgtcctttgcagcagcatggatgagctggaggctattattttaagtgaaatagctaagaaacagaaaataaaataccacatgttcttgcttataagtgggagctaa

SEQ ID NO: 562 - DNA, 567 bp, Homo sapiens
  SIMILAR (320)..(451): 451254mologous to Flaveria pringlei incomplete H-protein precursor (N terminus),accession number Z99766,Smith-Waterman Score =92.
atggtgccctgtgtcccagccaccccagctccagccgtggctaaaagggccccagtgaagaaggatgtgtttgcttcctcttctgccatgactataaagagaaaatcagccaggagctccaaagagacctactctatcaaagatccaaattccacgtgtgagaaccaggaaacgaaagagtctcagatccacactcctgtaacattttataagggcatgtttggcagctctgatctgaggctcacgcagcctgactcagatcaagctgcatttgcgaatccagtgctggagggaaggggagtttgggagaagcaattactgggttgcatcggagacaccattgtatctcctgcattcggtgacagagtctcacttttctccactgtcagtgattgccctgagtgtgatgacagtgctcaagtgtctttcaaagcacgtttggctcaaacatatacacatttgcaagcttgccaaggccttcgagtacacatggatgttctaaatgataaaccagtgccagtattagctttaactaacactgaacgctttgggaaaagtaatgcatga

SEQ ID NO: 563 - DNA, 789 bp, Homo sapiens
  SIMILAR (735)..(788): 941254mologous to Leishmania major probable levansucrase precursor,accession number AL160371,Smith-Waterman Score=96.
atgaccccagatgcctttggagacccccgggatcgaactactgcgtggcccatccggtcaagagacgaagcaatcccatacggggtggaccttcattccgcgacacctgtcgtaggggggggggcgaccatttgcggcaagctccgccctcgcggtgcgatccgaagcaatcgatatgtcctttcttcccaaaaacgcacacccaacaaaaaaactggaagcctctgctttgagaatgacattcaagacagtagtgcggaggacatcagcatcacaggtccagttgaacagctgatgaatctaccccgaacagtccagcgaaaccctatttttcgtccagatggggttttaccgcggccgccgggaataaagagaaagtcagccaggagctccaaagagacctactctatcaaagatccaaattccacgtgtgagaaccaggaaacgaaagagtctcagatccacactcctgtaacattttataagggcatgtttggcagctctgatctgaggctcacgcagcctgactcagatcaagctgcatttgcgaatccagtgctggagggaaggggagtttgggagaagcaattactgggttgcatcggagacaccattgtatctcctgcattcggtgacagagtctcacttttctccactatccctaaacagcagcaaaacgaaaaataccaagtgcctcaattcgatcaatcaacgattaaaaatattgagtctgcaaaagacttgatgtgtgggacagctggccgctgcaaaacgctgacggaacagtag

SEQ ID NO: 564 - DNA, 3187 bp, Homo sapiens
  SIMILAR (49)..(1371): 921254mologous to Homo sapiens CDEP,accession number AB008430,Smith-Waterman Score=2090.
cgccgcagccgccggcgctgtggagatattctctaagccgctttcatcatgggagaaatagagcagaggccgaccccaggatcacgactgggggccccggaaaattcggggatcagtaccttggaacgtggacagaagccgcccccaacaccttcaggaaaactcgtgtccatcaaaatccagatgctggatgacacccaggaggcatttgaagttccacaaagagctcctgggaaggtgctgctggatgcagtttgcaaccacctcaacctcgtggaaggtgactattttggcctcgagtttcctgatcacaaaaagatcacggtgtggctggatctcctaaaacccattgtgaaacagattagaaggccaaagcacgttgttgttaagtttgtggtgaaattctttccgcctgaccacacacaactccaagaagaactcacaaggtacctgttcgcgctgcaggtgaagcaggacttggctcaaggcaggttgacgtgtaatgacaccagcgcagctctcttgatttcacacattgtgcaatctgagattggggattttgatgaagccttggacagagagcacttagcaaaaaataaatacatacctcagcaagacgcactagaggacaaaatcgtggaatttcaccataaccacattggacaaacaccagcagaatcagatttccagctcctagagattgcccgtcggctagagatgtatggaatccggttgcacccggccaaggacagggaaggcacgaagatcaatctggccgttgccaacacgggaattctagtgtttcagggtttcactaagatcaatgccttcaactgggccaaggtgcggaagctgagcttcaagaggaagcgctttctcatcaagctccggccagatgccaatagtgcgtaccaggataccttggaattcctgatggccagtcgggatttctgcaagtccttctggaaaatctgtgttgaacatcatgccttctttagactttttgaagagcccaaaccaaagcccaagcccgtcctctttagccgggggtcatcatttcggttcagtggtcggactcagaagcaggttctcgactatgttaaagaaggaggacataagaaggtgcagtttgaaaggaagcacagcaagattcattctatccggagccttgcttcacagcctacagaactgaattcggaagtgctggagcagtctcagcagagcaccagccttacatttggagagaggtgccgaatttccagggggccagagctgccggcgaggaaaggaaccgaaggtttccgccggggagccggggtcgcacccgagccctgcgccgaggagaagccccgcgggtaacaagcaggcggacggagccgcctcggagcccacggaggaagaggaggaggtcgttaaggataggacccagcagagtaaacctcagccctcgcagccaagcacaggctccctgactggcagtcctcacctttccgagctgtctgtgaactcgcaggggggagtggcccctgccaacgtgaccttgtctcccaacctgagccccgacaccaagcaggcctctcccttgatcagcccgctgctgaatgaccaggcctgcccccggacggacgatgaggatgagggccggaggaagagattcccaactgataaagcgtacttcatagctaaggaagtgtctaccaccgagcgaacatatctgaaggatctcgaagttatcacttcgtggtttcagagcacagtgagcaaagaggacgccatgccggaagcactgaaaagtctcatattcccgaattttgaacctttgcacaaatttcatactaattttctcaaggaaattgagcaacgacttgccctgtgggaaggccgctcaaatgcccaaatcagagattaccaaagaatcggcgatgtcatgctgaagaacattcagggcatgaagcacctggcggctcacctgtggaagcacagcgaggccttggaggccctggagaatggaatcaagagctcccggcggctggagaacttctgcagagactttgagctgcagaaggtgtgttacctaccgctcaacaccttcctcctgcggccactgcaccggctcatgcactacaagcaggtcctggagcggctgtgcaaacaccacccgccgagccacgccgacttcagggactgccgagccgctttggcagagatcacggagatggtggcacagctccacggtacgatgatcaagatggagaatttccagaagctgcacgaactcaagaaagatttgattggcattgacaatcttgtggttccgggaagggagttcatccgtctgggcagcctcagcaagctctcggggaaggggctccagcagcgcatgttcttcctgttcaacgacgtcctgctatacacgagccgggggctgacggcctccaatcagtttaaagtccacgggcagctcccgctctatggcatgacgattgaggagagcgaagacgagtggggggtgccccactgcctgaccctccggggccagcggcagtccatcatcgtggccgccagttctcggtccgagatggagaagtgggttgaggacatccagatggccattgacctggcggagaagagcagcagccccgcccctgagttcctggccagcagcccccctgacaacaagtcccctgatgaagccaccgcggctgaccaggagtcagaggatgacctgagcgcctcgcgcacatcgctggagcgccaggccccgcaccgcggcaacacaatggtgcacgtgtgctggcaccgcaacaccagcgtctccatggtggacttcagcatcgcagtggagaatcagttgtctggaaacctgctgaggaaattcaaaaacagcaacgggtggcagaagctgtgggtggtgttcacaaacttctgcctgttcttctacaaatcacaccaggacaatcatccccttgccagcctgcctctgctcggctactcgctcaccatcccctctgagtccgagaacatccagaaagactacgtgttcaagctgcacttcaagtcccacgtctactacttcagggcggaaagcgagtacacgttcgaaaggtggatggaagtgatccgcagtgccaccagctctgcctcgcgaccccacgtgttgagccacaaagagtctcttgtgtattga

SEQ ID NO: 565 - DNA, 1824 bp, Homo sapiens
  SIMILAR (1)..(306): 991254mologous to Homo sapiens ileal sodium-dependent bile acid transporter,accession number Z54350,Smith-Waterman Score=522.
atgaatgatccgaacagctgtgtggacaatgcaacagtttgctctggtgcatcctgtgtggtacctgagagcaatttcaataacatcctaagtgtggtcctaagtacggtgctgaccatcctgttggccttggtgatgttctccatgggatgcaacgtggaaatcaagaaatttctagggcacataaagcggccgtggggcatttgtgttggcttcctctgtcagtttggaatcatgcccctcacaggattcatcctgtcggtggcctttgacatcctcccgctccaggccgtagtgaaacttatctacgatgctgatgtgatgctgctgatccatcctttgaggatgcctacagaagctgctcttactgcaagtgcggttcatggcatcaacctcacccaggagcttgttagaaatgcaggaccttgggcctcctcccagacttactggggtaagaagctgcagtttaacaagatccccagtttgatagataggaatagattaaaactgactctcagatgggttctggaaggagccacagccctggccatcctccctgagaagagacagagtgagtccatcagcggcaggatactctgccttgacttcacagctaatcatatttccccagatctgagaagagactcagcagaatctaagggccccagaggagaatcagatatcattaacccttttattggagatgttattggttttctctgcctgccaggccctgtttcatccctgatacgatggttggttgtcatcgccttccttgacactgctgtgtggctgccagcactctggttagtgtggtctctccccgcctttaagagttgcaggccactgagtcctgttgccccgcaacgctgctgcggcactgctgcttctataagaaaggaagatttcctccttgaattactaaagccatctgagccttttagtgaaagcctgcttattccattcctctctcctttctccttaggtaactggggaaatgcacttgaagacagcttcagacaacagttaaagacaccaccttgtatctcatcaactttgccgaacacctactctgtctgttattcagctggctgcaataaaagcagaaagaaaagcgcatccccaccagaaaagcagcacttagagccactcaagaaagatcagaatcgtgggattgtactggtggttgggcagatagacaccgctggtcagatcaccctcataattgtcatttgtttgggaccgggaccgggatcgggaccgggatcgggacgcttgttctctaagaaggtcgtattcgctatctacgtcactgcagtcaatgaaaggaatggaagtactgctgcctctggcagcccgggatgctggacctgtgcttggctgcgggggctgaggtttactctgctgggtcctatccttaacgacctcctcctcttcctccgtgggcgccgaggcggctccgtccgcctgcttgttacccgcggggcttctcctcggcgcagggctcgggtgcgaccccggctccccggcggaaaccttcggttcctttcctcgccggcagctctggccccctggagattcggcaccttctccaaatgtaaggctggtgctctgctgagactgggtggggtggggaaaaaggtgcggagagatagagaagagggagactgttattccaaggctgaaaacagaaaaggagagccaggcaagaacacccgaggcctctgcggcgggagaactgccccggagctctctggcctagcagcaatcacggaggcacatctgggcatgatccagaaggttccttcagggcgtggcggctga

SEQ ID NO: 566 - DNA, 1413 bp, Homo sapiens
  SIMILAR (784)..(1158): 1001254mologous to Homo sapiens ileal sodium-dependent bile acid transporter,accession number Z54350,Smith-Waterman Score=661.
aaacttatctacgatgctgatgtgatgctgctgatccatcctttgaggatgcctacagaagctgctcctactgcaagtgcggttcatggcatcaacctcacccaggagcttgttagaaatgcaggaccttgggcctcctcccagacttactggggtaagaagctgcagtttaacaagatccccagtttgatagataggaatagattaaaactgactctcagatgggttctggaaggagccacagccctggccatcctccctgagaagagacagagtgagtccatcagcggcaggatactctgccttgacttcacagctaatcatatttccccagatctgagaagagactcagcagaatctaagggccccagaggagaatcaggtatcattaacccttttattggagatgttattggttttcttgcacagagctccctccagataaagagaaaatcagccaggagctccaaagagacctactctatcaaagatccaaattccacgtgtgagaaccaggaaacgaaagagtctcagatccacactcctgtaacattttataagggcatgtttggcagctctgatctgaggctcacgcagcctgactcagatcaagctgcatttgcgaatccagtgctggagggaaggggagtttgggagaagcaattactgggttgcatcggagacaccattgtatctcctgcattcggtgacagagtctcacttttctccactgtcagtgattgccctgagtgtgatgacagtgctcaagcagcagacccagcaatgaatgatccgaacagctgtgtggacaatgcaacagtttgctctggtgcatcctgtgtggtacctgagagcaatttcaataacatcctaagtgtggtcctaagtacggtgctgaccatcctgttggccttggtgatgttctccatgggatgcaacgtggaaatcaagaaatttctagggcacataaagcggccgtggggcatttgtgttggcttcctctgtcagtttggaatcatgcccctcacaggattcatcctgtcggtggcctttgacatcctcccgctccaggccgtagtggtgctcattataggatgctgccctggaggaactgcctccaatatcttggcctattgggtcgatggcgacatggacctgaggtttcaaaatggtaacaataattttctggaaactccacctcaccctgtaaaagtgaagattgggcagggtcagcccctctcagagctgagcgtttcacaggatgaagtgtctttcaaagcacgtttggctcaaacatatacacatttgcaagcttgccaaggccttcgagtacacatggatgttctaaatgataaaccagtgccagtattagctttaactaacactgaacgctttgggaaaagtaatgcatga

SEQ ID NO: 567 - DNA, 1572 bp, Homo sapiens
  SIMILAR (1526)..(1467): 801254mologous to Homo sapiens Human secreted protein, SEQ ID NO: 6720,accession number G02639,Smith-Waterman Score=73.
atgaaagaaacaaaacaccacaacaatcctgtgtccttgattgaggtgaatgggctgagacacctccacgaccccaagggtgcacaaacatcaaaacctgtcagtttaatgtctgatgttcagctaatgtctgagtcatcaaaaggaggatttgtgggagtatccaaccctgtaacaaacgtatgcagggaccaggaagccgactggagagaaatgtgcatggcctcatctgatccaaatcggtgtcataagaacatgttggaagaaatcagattggtcctgggaagtgccagtcatcttttagggctgcagctcattataaaaatgttcacagcagatagaatcttgcttcagcaccgcactattttagagctggcagacacagaaatcgctcatatttacacaatgagcattaaggtcaagtttcaagccctaatcctcagaaaactgacatcagaatcatcaatactgttagtatttagtgtgtccatggagaaacttatctacgatgctgatgtgatgctgctgatccatcctttgaggatgcctacagaagctgctcctactgcaagtgcggttcatggcatcaacctcacccaggagcttgttagaaatgcaggaccttgggcctcctcccagacttactggggtaagaagctgcagtttaacaagatccccagtttgatagataggaatagattaaaactgactctcagatgggttctggaaggagccacagccctggccatcctccctgagaagagacagagtgagtccatcagcggcaggatactctgccttgacttcacagctaatcatatttccccagatctgagaagagactcagcagaatctaagggccccagaggagaatcaggtatcattaacccttttattggagatgttattggttttctcaccaacaaccagggccctcaggacatgaccctgagagtcctccttgacgtggttctcatccgcttcactcaaataattcaccatgaagtcctactggtagaactacctggcttcagtttcatcaccaccactgactcgctgattgacattggaccagccgtcctggctgatcctcagccgagccgacagggacattcatctgagaaagaagattctaatgggggtgggaagcagtggtgcatggcaggggtagtgggtccccaggagttgtggtctagaagggtcatgagacgcttcccgcggaaatctgcatatccacatgttggcggtcctacagagggacgatttctgcctgagggagtcagagaaggtgtctggtgtagttgggatgatctgaggataacaacagatccaatgaggcaaaagtatgagtcctcatgcatgcaaatcggggaagagaaatttgcagctggggattatcctggcggcgccaagactaacaaacaatggagggacaaagcccgtggacatggggagactgaatcatttttactgaggatgatggtttctagcttcatctatgtccctgtaaaggatgtgaactcattcggggccctggatgttgcacgtgtatttgagaaaccctcagcttag

SEQ ID NO: 568 - DNA, 468 bp, Homo sapiens
  SIMILAR (245)..(156): 761254mologous to Homo sapiens Secreted protein 108-013-5-0- G11-FL,accession number Y59684,Smith-Waterman Score=116.
  misc_feature (1)...(468): n = a,t,c or g
tttagcatggagtaaaacatttattttcaaatgtcatagaaacaatatttataagtcctcttctccacctcttgtgtggtgatttactgatttcttgctacccggtccagttgatcttctgttttcattaaatcaagaggacctgtcccatgttacccctggagtttcagctctctacatgtgtacgttaaaagtttaagtggacgaagccagtaagggagcccaggaactcggtttaagccgcactttgacagtctgtgaatctgtttgacaactttctcccctctctgcctctgtgaacgcctgtgcaccaacgaaatagccacctagatccgctgtggtcagcgtcaggaaaacagcaagacccagctatgaatctgttgtcttcgtcctcctttaaatctcagcaatatttcagagagagagagagggaganaaaaaatactgttcagctcaaaaatttcctct

SEQ ID NO: 569 - DNA, 293 bp, Homo sapiens
  SIMILAR (10)..(120): 431254mologous to Ehrlichia canis 28 kDa outer membrane protein,accession number AF082745,Smith-Waterman Score=76.
gctgttttccctgacgctgaccacagcggatctagtttctctgcagaagacagcaagatgccccagggaatgtttgtgaaaaaggatgactggatgggaagcaagctgaagaaaaagaaggaaagaaagagagaaatcagtcaatcaccacacaagagctggagaagaggacttataaatattgtttctatgacatttgaaaataaatgttttactccatgctaatagtgaatgtgatgtcttcagtttgaagggctttaagtgaagctcattaaaacccactattttccaaa

SEQ ID NO: 570 - DNA, 406 bp, Homo sapiens
  SIMILAR (1)..(222): 1001254mologous to Homo sapiens Similar to germ cell-specific gene 1,accession number BC001796,Smith-Waterman Score=411.
agcaactactggtttgtgggcacacagaaggtgcccaagcccctgtgcgagaaaggtctggcagccaagtgctttgacatgccagtgtccctggatggagataccaacacatccacccaggaggtggtacaatacaactgggagactggggatgaccggttctccttccggagcttccggagtggcatgtggctatcctgtgaggaaactgtggaagaaccagcactgctccatccccagtcctggaaacaatttaagagccctcggtccagtggtacagcggcagcaaaaggggagaggtgcccaagtttcattgaacttacatcaccacacaagaggtggagaagaggacttataaatattgtttctatgacatttgaaaataaatgttttactccatgctaaa

SEQ ID NO: 571 - DNA, 645 bp, Homo sapiens
  SIMILAR (360)..(13): 351254mologous to Homo sapiens transcriptional intermediary factor 1 alpha; TIF1alpha,accession number AF119042,Smith-Waterman Score=133.
atggcgccgggcgggcagagcagggcgcgggcgcggcgggcgtcaaggcgagcggcacggggcggtcggcggcggccggatctgcagctggctcaggcactcctggcagaaggtgtgcaagcacgccagcagcttgggcgcgcgcgtgtccgcgtcgaagtagttgtagcagattttgcactcgtagtcctcaagcggagggaggccggagaccgtctccgctgcgtcccgggctcctgcgtctccgcagtccggggctcccttcgcggcgaccccagctccctcccggctcccggggctgctgcttgggctctgctggctgccgccgctgtcgctcgccggcgctgccatggcatgatccgcccctcatcgggggcaagtttctctgcagaagacagcaagatgccccagggaatgtttgtgaaaaaggatgactggatgggaagcaagctgaagaaaaagaaggaaagaaagagagaaatcagtaaatcaccacacaagaggtggagaagaggacttataaatattgtttctatgacatttgaaaataaatgttttacctccatcctaatagtgaatcttactcagtgtgaagacaacaaagacgtagacctttataatgacccacttccacttaatgactag

SEQ ID NO: 572 - DNA, 821 bp, Homo sapiens
  SIMILAR (384)..(434): 641254mologous to Homo sapiens Secreted protein 108-013-5-0- G11-FL,accession number Y59684,Smith-Waterman Score=54.
ctcttcgtgaaaatcgtgatctcatctctccgtccatgggcgaaaaaacagccatcaccaggccattcacgctttgtgcttttgttagcagagccaggcagccctgcagcccacatctagggtacaaacggaacggcaggcgttttccttgtatcatttagaggaaatttttgagctgaacagtattttttttctccctctctctctctctgaaatattgctgagatttaaaggaggacgaagacaacagattcatagctgggtcttgctgttttcctgacgctgaccacagcggatctaggtggctatttcgttggtgcacaggcgttcacagaggcagacgcgcggagaaagttgtcaaacagattcacagactgtcaaagtgcggcttaaaccgagttcctgggctccctcactggcttcgtccacttaaaacttttaacgtacacatgtagagagctgaaactccaggggtaacatgggacaggtcctcttgatttaatgaaaacagaagatcaactggaccgggtagcaagaaataaggcttaagaagcactggtttctctgcagaagacagcaagatgccccagggaatgtttgtgaaaaaggatgactggatgggaagcaagctgaagaaaaagaaggaaagaaagagagaaatcagtaaatcaccacacaagaggtggagaagaggacttataaatattgtttctatgacatttgaaaataaatgttttactccatgctaatagtgaatgtgatgtcttcagtttgaagggctttaagtgaagctcattaaaacccactattttccaaaaaaa

SEQ ID NO: 573 - DNA, 491 bp, Homo sapiens
  SIMILAR (147)..(287): 381254mologous to Homo sapiens Amino acid sequence of a human secreted peptide,accession number Y12951,Smith-Waterman Score=55.
  misc_feature (1)...(491): n = a,t,c or g
nagcgttnntnnccacgataatcgtgtcgcgtgtgctggaattcccgtggccaggcagaggtctgtggagtggagaggcgaggcctcacggtggaactctcagatgtgagttccaacaaattggttcaaaaagaggggggataaacacgctggcccatgctgggcaagcatggcaccaccttccaggcactgtcttcttctgatcagcactctgggtgtctttgcacttaactgcttcaccaaaggtcagaagaacagcacgctcatcttcacaagggaaaacaccattcggaactgcagctgttctgcggacatccgggattgtgactacagtttggccaacctgatgtgcaactgtaaaaccgtcctgccccttgcagtagagcgaaccagctacaatggccatctgaccatctggttcacggacacatctgcgctgggccacctgctgaacttcacgctggtccaagacctgaagctttccctgtgca

SEQ ID NO: 574 - DNA, 584 bp, Homo sapiens
  SIMILAR (309)..(103): 321254mologous to Homo sapiens Human secreted protein (clone cg426_8),accession number Y16782,Smith-Waterman Score=68.
  misc_feature (1)...(584): n = a,t,c or g
aaaccagctgtcaagccagggtgaaggatccgtggccaggcagaggtctgtggagtggagaggcgaggcctcacggtggaactctcagatgacagcatgcaggcaccaagagagtggacgcacatacagaagacagccatgcactgagctggggacatgcaacaataacaggccatacaatgaaagtcgctgaagaagaatatgaattttgcctgcggatttgctaacactcgacaatcctaggaggtgagttccaacaaattggttcaaaaagaggggggataaacacgctggcccatgctgggcaagcatggcaccaccttccaggcactgtcttcttctgatcagcactctgggtgtctttgcacttaactgcttcaccaaaggtcagaagaacagcacgctcatcttacaaaggaaaaacaccattcggaactgcagctgttctgcggacatccgggattgtgactacagtttggccaacctgatgtgcaactgtaaaaccgtcctgccccttgcagttaggagcgaaccagctacaatgggccttttgaccttntggttcacggacacatttgcgttgg

SEQ ID NO: 575 - DNA, 1074 bp, Homo sapiens
  SIMILAR (21)..(290): 341254mologous to synthetic construct agglutinin isolectin 2 precursor,accession number D13456,Smith-Waterman Score=94.
atgcttggcctccatgttgatgcgcagcctcttcagaccacaaatagccaggtattcagtggggagagtgttggtgctgcacagggaaagcttcaggtcttggaccagcgtgaagttcagcaggtggcccagcgcagatgtgtccgtgaaccagatggtcagatggccattgtagctggttcgctctactgcaaggggcaggacggttttacagttgcacatcaggttggccaaactgtagtcacaatcccggatgtccgcagaacagctgcagttccgaatggtgttttcccttgtgaagatgagcgtgctgttcttctgacctttggtgaagcagttaagtgcaaagacacccagagtgctgatcagaagaagacagtgcctggaagcacactgttggacttcatttctgagcttctggtagtgaagtggtaccatgtgattgagttctggccaatggaatatggtggaagattccacgaaggaaccgacggccctagaagatggcagaactgtagacaaaaggctgaatccctgaatgattgctctttggataaatttgtttcaatatctggaatcctcaaggggatggagagaaccaagaatgtaggattgagaagagagatagcaaggatcaaacagaaagtatgggaggagtgtggggtggagacccacgctgggctccagaaacaagtggtcacctgttctcaggtccagtgcccacttgtccagggctgtgcaacccctcttcccgttgagaatagtcacactatgttggacccagccaagcccaaatggatacatctggctacgtcttatgagttgagggggaaccatcttcaggtggttaattgcatacatggaattgttgaaggagagcgaagacgatatgggagggcccagggcagggaagagcagagggatgggacagtggcatttgtgtctttccagcccaaacgtatgcctgaggctgagtccggattgtcgagtgttagcaaatccgcaggcaaaattcatattcttcttcagcgactttcattgtatggcctagacatggcagaaaaaccagaatga

SEQ ID NO: 576 - DNA, 443 bp, Homo sapiens
  SIMILAR (415)..(167): 1001254mologous to Homo sapiens epsilon 14-3-3 protein,accession number U28936,Smith-Waterman Score=410.
  misc_feature (1)...(443): n = a,t,c or g
nnnnnnnnnnnnnnnnnnnnaatttaggtttgttttatttaagtttaatgttaattccatgctgtgtttcagtaagaacaatacagattctgtatctgtggctccagtcagatatccagtagtacaaattagcttcaagttacacatactgaacaaaagaggttgagcgaatcatttttagcttgtcttctcctcccttgttttcttctttctgttcaatgctgctgattattctccaggaggctcttctagctccaatcacattcttatatgcaacagataggaggtttctttcttcaactgtcagctccacatccatccctgctactttcttcattgactccaccatttcgtcgtatcgctcagcctgctcggccagcttcgcctggtacaccagatcctctcgatcatccatagcggcagcggctccggcagggtctgcg

SEQ ID NO: 577 - DNA, 1704 bp, Homo sapiens
  SIMILAR (60)..(824): 1001254mologous to Homo sapiens epsilon 14-3-3 protein,accession number U28936,Smith-Waterman Score=1298.
gagtcggagcactatccgcttccatccgtcgcgcagaccctgccggagccgctgccgctatggatgatcgagaggatctggtgtaccaggcgaagttggccgagcaggctgagcgatacgacgaaatggtggagtcaatgaagaaagtagcagggatggatgtggagctgacagttgaagaaagaaacctcctatctgttgcatataagaatgtaattggagctagaagagcctcctggagaataatcagcagcattgaacagaaagaagaaaacaagggaggagaagacaagctaaaaatgattcgggaatatcggcaaatggttgagactgagctaaagttaatctgttgtgacatcctggatgtactggacaaacacctcattccagcagctaacactggcgagtccaaggttttctattataaaatgaaaggggactaccacaggtatctggcagaatttgccacaggaaacgacaggaaggaggctgcggagaacagcctagtggcttataaagctgctagtgatattgcaatgacagaacttccaccaacgcatcctattcgcttaggtcttgctctcaatttttccgtattctactacgaaattcttaattcccctgaccgtgcctgcaggttggcaaaagcagcttttgatgatgcaattgcagaactggatacgctgagtgaagaaagctataaggactctacacttatcatgcagttgttacgtgataatctgacactatggacttcagacatgcagggtgacggtgaagagcagaataaagaagcgctgcaggacgtggaagacgaaaatcagtgagacataagccaacaagagaaaccatctctgaccaccccctcctccccatcccaccctttggaaactccccattgtcactgagaaccaccaaatctgacttttacatttggtctcagaatttaggttcctgccctgttggttttttttttttttttttttaaacagttttcaaaagttcttaaaggcaagagtgaatttctgtggattttactggtcccagcttttaggttctttaagacactaacaggactacatagaggctttttcagcattactgtgtcgtctccgtgccagatgtggcaagatcaccattagcaaatggaaattacatttgaaagccattagacttataggtgatgcaagcatctaagagagaggttaatcacactatagaggcaataagtggtatcagttttcatttttctaattgtttaaactgtgttttataccagtgtttgcaagtaattgggtgttagcttgagatggttaaaggtggtttggggagggacttcgttgtaatggttttgctgttgctgaaaagcatggtgctggtaacagttcaacaatccgtggctgctcattcttgcctactttactctcccactgaagcaggttagctgttgaaggtggtatggaaaagcctgcatgcctgttcaattcttttgtttcttctccttccccctccccctacctccttcccctcactcctcccctccttcgctcgctcaacctcttttgttcagtatgtgtaacttgaagctaatttgtactactggatatctgactggagccacagatacagaatctgtattgttcttactgaaacacagcatggaattaacattaaacttaaataaaacaaacctaaattaaaaaa

SEQ ID NO: 578 - DNA, 2010 bp, Homo sapiens
  SIMILAR (129)..(818): 531254mologous to Homo sapiens epsilon 14-3-3 protein,accession number U28936,Smith-Waterman Score=459.
  misc_feature (1)...(2010): n = a,t,c or g
ccggcctcggaattctcgggacgacgatttcgttttttgctgcccggacgcggagcgagaggctgagagagtctgagacactatccgcttccatccgtcgcgcagaccctgccggagccgctgccgctatggatgatcgagaggatctggtgtaccaggcgaagctggccgagcaggctgagcgatacgacgaaatggtggagtcaatgaagaaagtagcagggatggatgtggagctgacagttgaagaaagaaacctcctatctgttgcatataagaatgtgattggagctacgaagagcctcctggagaataatcagcacgcattgaacagaaagaagaaaacaagggaggagaagacaagctaaaaatgattcggggaatatcggcaaatggtttgaagactgagctaaagttaatctgttgttgaccattctggatgtactggacaaacacctccattcccagcagctaacactggcgagtccaaggttttctattataaaaatgaaagggggactaccacaggtatctggcagaatttgccacaggaaacgacaggaaggaggctgcggagaacagcctagtggcttataaagctgctagtgatattgcaatgacagaacttccaccaacgcatcctattcgcttaggtcttgctctcaatttttccgtattctactacggaaattcttaattcccctgaccgtgcctgcaggttggcaaaagcagcttttgatgatgcaattgcagaactggatacgctggagtggaagaaagctataagggactctacacttatcatgcagttgttacggtggataatctgacactatggacttccagacatgccagggtgacggtgaagagcagaataaagaagcgctgcaggacgtggaagacgaaaatcagtgagacataagccaacaagagaaaccatctctgaccaccccctcctccccatcccaccctttggaaactccccattgtcactgagaaccaccaaatctgacttttacatttggtctcagaatttaggttcctgccctgttggttttttttttttttttttttaaacagttttcaaaagttcttaaaggcaagagtgaatttctgtggattttactcggtcccagcttttaggttctttaagacactaacaggactacatagaggctttttcagcattactgtgtcgtctccgtgccagatgtggaaagatcacccattagcaaatgggaaattacattggaaagcccattagacttataggtgatgcaagcatctaagagagagggttaatcacactatagggggcataaagtggtatccagttttcatttttctcaaaatggtttaaaaccgggggttttaaaccacaggtgttggcaaattaattggggtggttagcttggagatggttaaaaggtgggttttgggggaagggacttccgttgtaaatggttttgcctgtaaaaaaaatgttttccaaactccggctggaaaatgttgctgaaaaaagcatgggtgctgggtaacaagttcaaacaatcccgtgggctgctccattccttggcctacttttactctccccactggaagcagggttagcggttgaagggtgggtatggaaaaagcctggcatgccctgttcaattccttttggttcttctccttcccccctcccccctaccctccttcccctcactccttcccctcctttcggctcggctcaaacctcttttgttcagtatgtgtaacttgaagctaatttgtactactggatatctgtggctccagtcagatatccagaatctgtattgttcttactgaaaacacagcatggaattaacattaaacttaaataaaacaaacctaaattaaaaatgcccccaaaagaactaaaaaattttaaatttaattctaaattataaaattttnnaaaaatnnnnnttnnnttntntttttggggggggcccctttaaaaaattcttggggggcccttttttg

SEQ ID NO: 579 - DNA, 362 bp, Homo sapiens
  SIMILAR (237)..(275): 461254mologous to Homo sapiens Amino acid sequence of a human secreted protein,accession number Y10861,Smith-Waterman Score=35.
  misc_feature (1)...(362): n = a,t,c or g
tttttttttttttttttcacgcacacagtctggtttattggctcatcatacacacacacatcaaatatgtacacaaacataaatattccaatgtacaaagtttacatgggactcacagatcacccctcgtctctttcatccagcacccccaacttggtgccgtcctcttcctgtttcaggatgaaggcgtgtgaggggctggcactangaggcagggatctggaggagggagaggtcctgctcccctctcctcacaggcacctccgaagggtcctgtcccttttcaatggcaccttagggcagagggctaaatccctcatccctgcttctccatctctgtgtctgttcccacagtgcccctc

SEQ ID NO: 580 - DNA, 570 bp, Homo sapiens
  SIMILAR (524)..(417): 381254mologous to Oryctolagus cuniculus pro-alpha-1 type II collagen,accession number AF050170,Smith-Waterman Score=52.
tttttttttttttttctgtctgccacgcacacagtctggtttattggctcatcatacacacacacatcaaatatgtacacaaacataaatattccaatgtacaaagtttacatgggactcacagatcacccctcgtctctttcatccagcacccccaacttggtgccgtcctcttcctgtttcaggatgaaggcgtgtgaggggctggcactatgaggcagggatctggaggagggagaggtcctgctcccctctcctcacaggcacctccgaagggtcctgtcccttttcaatgggaccttagggcacagggctaaaatccctcatccctctctgctgcagctcaaatccccaactctccttgatccctttgactctccctcctaaatttccttggcttcgtcctctcagcatgtccctgcttctccatctctgtgtctgttcccccagtgcctgcagggaggaggggtctttgggccatggagtccttctggcccctctgccctcttcctgggccttataggaggctaggactacggtgcagctcagcagaggggttggtgccattgg

SEQ ID NO: 581 - DNA, 702 bp, Homo sapiens
  SIMILAR (217)..(387): 911254mologous to Homo sapiens dJ102H19.4 (novel protein),accession number AL096817,Smith-Waterman Score=269.
atgaagcagtgtatgtatgaggaagtgcccacaggagtgtgcctccgggatgaagcaaagcaacagagatccaagcaggagaggctgcaacaggctggagatatgcagagtcttcatgggggaggtgtgtatctaataattgctgaagctggaatttccttcgtgtgcagtcagccacacctcgctatacctgtcaaaccatctcaattatccactccaattgtcatgcctctcgtggtgttcttccagctccgtgccccacatccacccactgtcctcagacctcagctggggctgcaccccaaccctgagtgtgacagagagaagatgagtgttagagatcatgatcctgaagtgctgacgagaaattcaggaagcctgcaagcctagaggtcagctcagtggccaccttctgaagcccagggcaccattggaagctgcctagtttgaggcacggatggaagaggaaaacactgagaacaacatccctcttcctgaggaatgcatacaagggtgcttgggggtaggttggggatcccaaggcaggagagccaaagctggagtcagaggaagctcttcttctgaaacctgtaatttcaatgtcttttcctttcccttcaaaattgtaatttccttctgaaatcattctaaccctttagtaaagacattaatttaaagatgtttaaaaaaaaaaaaaaaaaa

SEQ ID NO: 582 - DNA, 426 bp, Homo sapiens
  SIMILAR (5)..(166): 421254mologous to Homo sapiens Fragment of human secreted protein encoded by gene 4,accession number Y14471,Smith-Waterman Score=72.
gtgagaatttatggtgctttttccgggcctgctcatggaccaatcagcatgcacttcctcccttctgagcccataaaaaccctggattcagccagacttggacagatgtcaatactaccaactgtgggaagaagctacccacttcaggactccttgactcctcaggatgacctgcctacagaaagaagctacccactatgggtcttctctctgctgagagctggatactcgtcaggatgacctgcctgcagaaagagctacccaccatgggtctcctctgaactgttctgttgcccaataaagctcctctcctttttgctcaccctccagctgtctgcatacctcattcttcctggccgcaggacaagaactcgggacccaccgaatggtgggactgaaagaggtgtaacacaaataaagctgaaa

SEQ ID NO: 583 - DNA, 585 bp, Homo sapiens
  SIMILAR (324)..(497): 421254mologous to Rattus norvegicus lin-10 protein homolog,accession number U92010,Smith-Waterman Score=105.
atggagactgaaaaggatggagacagtggggtgtgcttgtatatttttagaggaccaccccagaggattgctgtatccctgtgctatggacccagggagctggatatagctggtactggccagtgcggacagtccagctggtggtcccaccattcggtgggtcccgagttcttgtcctgcgggcaggaagatgaggtatgcagacagctggagggtgagcaaaaaggagaggagctttatgggcaacagaaaagatcagaggagacccatggacacctctttgatgcgaatacacacaaagtgaagaagtttgttctacacaccattaccctgggcattataatttcaacatttatcatcgctgtggttcaagatcccactagccataaagaaagaaaacgcagatggtcagacagaacatgcacgacctacagcaagtgggacaacatccaggagctcctgggccccctgtggagaagcctgttgtcctgcacaggtgagtgggagtttgatgtcccggccaccccacctgactcctcagagcccagaaagcccagggaagccggcacagtggatgttgcttaa

SEQ ID NO: 584 - DNA, 826 bp, Homo sapiens
  SIMILAR (3)..(437): 951254mologous to Rattus norvegicus lin-10 protein homolog,accession number U92010,Smith-Waterman Score=768.
gctgtttcctgggcaatgtctatgctgagagtgtagatgttcttcgagatggaactggacctgcaggtttacgacttcgcctacttgctgcaggttgtggacctggcctattagcagatgccaagatgcgggtatttgaacgttcagtgtattttggtgattcctgccaagatgttcttagcatgcttggctctccacacaaagtcttctataaatcagaagacaagatgaaaattcattctccttcccctcataaacaagttccatcgaagtgtaatgactacttttttaactacttcactcttggagtggacatcctctttgatgcgaatacacacaaagtgaagaagtttgttctacacaccaattaccctgggcattataatttcaacatttatcatcgctgtgagttcaagattccacttacccttaaggaaagaaaacgcagatggtcagacataaacatgcacgacctacagtaggtgggacaacatccaggagctactgggccaccctgtggagaagacctgtgtacatgcacaggtcttactccccaaacaacaccaacccattaggatccacattctgctttggtcttcaacgaatgatctttgaggtcatgcagaacaaccacattgcctcggtgaccctgtatggcccctccaggcctgtgacccacctgagaacagcggaactcccctagggacaccaccacccatgcccctctgtcccgtggaactgtgcatcacatcctgctcaatgggcctctgtaccaccctgtgggttttcttggacacctggccagtgctgaagggctgttgtgatg

SEQ ID NO: 585 - DNA, 368 bp, Homo sapiens
  SIMILAR (202)..(26): 331254mologous to Mus musculus activin beta E subunit,accession number U96386,Smith-Waterman Score=71.
cgctgttgtccatgatagagaagtggtcattttctaccacaagggagaatatcatgctatggatattcgctgttaccgattttgatggacgaccgtgtatagtttgcccctggcataaatacaaaattactttggcaacaggagaaggtctgtaccagtctataaaccctaaagatccatcagcaaaacccaagtggtgctccaaaggaataaagcaaaggattcacacagtgacagtagacaacggaaatatttatgtgactctttctaatgaaccttttaagtgtgactctgatttttatgccactggagacttcaaagtaattaagagttcttcctgataaaaaatatatagaaatgaaaaaaaa

SEQ ID NO: 586 - DNA, 400 bp, Homo sapiens
  SIMILAR (178)..(399): 1001254mologous to Homo sapiens Human secreted protein encoded by gene 38 clone HSLBF69,accession number Y02687,Smith- Waterman Score=371.
atgaatcttgatggctctgcacaagatcctgaaaagagggaatattcttctgtgtgtgtgggcagagaagatgacattaaaaaatctgaaagaatgacagctgttgtccatgatagagaagtggtcattttctaccacaagggagaatatcatgctatggatattcgctgttaccgtgaaattattttggcccttcatcaattagatcttcttcagaaaactattgtcatatactcctcagaccatggagagctggccatggaacatcgacagttttataaaatgagcatgtacgaggctagtgcacatgttccgcttttgatgatgggaccaggaattaaagccggcctacaagtatcaaatgtggtttctcttgtggatatttaccctaccatgcttg

SEQ ID NO: 587 - DNA, 711 bp, Homo sapiens
  SIMILAR (15)..(98): 461254mologous to Homo sapiens Human secreted protein encoded by gene 35 clone HCUIN80,accession number Y14445,Smith-Waterman Score=76.
atgttgagagctgtcctatggaaagatccatgtggcaaggaaccaatgtctctggccaacagcaatgaagacctgggtcctgtcaatagccatatagactcaactgagagatggtccaattccaagctcactcgtgtgccttttggctgcttcagaagatctactccaaagttcactcccatggttgctgggaaccctcagttccttaccatgtggcctctccatagactgcttcagtatgtcctcagctggcttccctctctcagggccacctcacaacctggcggattgtcccatgatgactcggaaagtaaaggaactctaggggatcttattcccaattgttcccacacccatacgccctttacaacaagattgtgtatacttcttccagaaaagttcttcaacacctgcccacatatccacccaacaggtttgattggcatggattttgatggacgaccgtgtatagtttgcccctggcataaatacaaaattactttggcaacaggagaaggtctgtaccagtctataaaccctaaagatccatcagcaaaacccaagtggtgctccaaaggaataaagcaaaggattcacacagtgacagtagacaacggaaatatttatgtgactctttctaatgaaccttttaagtgtgactctgatttttatgccactggagacttcaaagtaattaagagttcttcctga

SEQ ID NO: 588 - DNA, 639 bp, Homo sapiens
  SIMILAR (255)..(464): 291254mologous to Deinococcus radiodurans ferredoxin, putative,accession number AE002033,Smith-Waterman Score=76.
atggaccactctacggatcttgcctctctacaacctctctttccacctgacctctaaatgttgaagtgttttcaggaaattgtcttagaccttcttcccttatctacacttcctctcccaacatggaatccttggatggctctgccaccaagatccttaaaagagggaatattccttctggtgtgttgtgggccagagaagatgacattaaaaaatctgaaagaatgacagctgttgtccatgatagagaagaggtcattttctaccacacgggagaatatcatgctatggatattcgctgttaccactcaggaggacctttacatttgggagatatagaggattttgatggacgaccgtgtaaagtttgcccctggcataaatacaaaattactttgggcaacaggagaaggtctgtaccagtctattaaaccctaaagatccatcagcaaaacccaagtggtgctccaaagggaattaaaggcaaaggatttacacacagtgacagtagacaacggaaatatttatgtgactctttctaatgaaccttttaagtgtgactctgatttttatgccactggagacttcaaagtaattaagagttcttcctgataaaaaatatatagaaatgaaaaaaaa

SEQ ID NO: 589 - DNA, 1330 bp, Homo sapiens
  SIMILAR (284)..(352): 421254mologous to Arabidopsis thaliana putative proline-rich protein,accession number AC005396,Smith-Waterman Score=49.
atgtcctgtggacgccaaagggaacagaaacctgagagaaagaacctggaggcctgcagtcttccagctcctccccaccccgtggacaaaggcattctgcttggagacacagttgctcataccccggaaaaggaagctgagtgccagcggcagcttccacagagggtctggaagcaggcagggacctggaacccatgctccttcccacaagaaaggtggtacatgctgaacacattcatcagtttgctcctctgggcacagcgaggtatcatcatccagccccttggctttaattaccaattccatgccaatgaccccaacatttgtatctccaaccccaacttctcccccaagcttcagattcatatttccaaccacttactgacatctccacgagaaagttcttacaggcatctcaaaagtaacacatctaaacagaacacttttgacattgtccgtaaaactactgatcctgaagtcttgcctagtcaatcagttgacagcatgcgagtctatataccctgcataagccagaaacctgagagactgcctactcaaaataacaccataaagtttaactttcttcaaaaggtcagtcaacttagtgggctcaatgccatccctactgttggggcaaacaacatgagaacaaatatcagtgactggcataagaagctgcccggtccacaaagtcccactaacatcaagcatgatctcacccttaaacagagctacagagcctccaaacatctgcatactcaccaactagtagtacaagagcccacacggtgcaggaaacaacccatcaaccgggaggacgccctccaacacctgctgatgacggactggctcactgggccgggcacccgagggcccttcgcgctacccgggcccggggccgccgtcggctgcgacaaagggtcagagaacaagacgacccctctgcgcgcgtcccccgcaggcctcccggatgcgccgctgtcccggccgcgcccaccccgacgctgccgctaccttgtcctcgggtggcgcaaccggctcatgggccaccctctgcctcagctctgtcatcctgggaaaatcggccctgttgtcgccacgagctagcaacgaagcccccggagcaggcagctcggcgcgggcacgcgcggactcccacggccggccccgccccgcccgggaggcgcgcggctctgagcggctcacagttcccttagcagcccagcagccagccctggagctcggccccacccagtgccgtcaccgccctttcacccgggccgagcgggcattgcctttggtgtttcctgttctttctattcactgccct

SEQ ID NO: 590 - DNA, 835 bp, Homo sapiens
  SIMILAR (329)..(604): 321254mologous to Caenorhabditis elegans contains similarity to Pfam domain: PF01391 (Collagen triple helix repeat (20 copies)), Score=67.1, E-value=1.2e-16, N=3; PF01484 (Nematode cuticle collagen N-ter,accession number Z46791,Smith-Waterman Score=83.
atgcccggcggccctcagctcctgccgttctgccggccgggccgggcccccgggtgcttagaggaaggctttcagcttttgcctattcagtatgatgttagccttgggtttgtcatatatggcctttattatgttgaggtcagtcaacttagtgggctcaatgccatccctactgttggggcaaacaacatgagaacaaatatcagtgactggcataggaagctgcccggtccacaaagtcccactaacatcaagcatgatctcacccttaaacagagctacagagcctccaaacatctgcatactcaccaactagtagtacaagagcccacacggtgcaggaaacaacccatcaaccgggaggacgccctccaacacctgctgatgacggactggctcactgggccgggcacccgagggcccttcgcgctacccgggcccggggccgccgtcggctgcgacaaagggtcagagaacaagacgacccctctgcgcgcgtcccccgcaggcctcccggatgcgccgctgtcccggccgcgcccaccccgacgctgccgctaccttgtcctcgggtggcgcaaccggctcatgggccaccctctgcctcagctctgtcatcctgggaaaatcggcccgacgtcgccgcgagctagcagcgaagccgccggagcaggcagctcggcgcgggcacgcgcggactcccacggccggccccgccccgcccgggaggcgcgcggctctgagcggctcacagttcccttagcagcccagcagccagccctggagctcggccccacccagtgccgtcaccgccctttcacccgggccgagcggg

SEQ ID NO: 591 - DNA, 421 bp, Homo sapiens
  SIMILAR (11)..(46): 501254mologous to Arabidopsis thaliana F12A21.7,accession number AC008113,Smith-Waterman Score=34.
  misc_feature (1)...(421): n = a,t,c or g
ngcagcattttctcagaactggacgggggcaacaagagggtctccttcattctaatatcggggggcttgttccatgcagtcatggtattaggttctggggatgctgcacacagtgacacacactcagtcactgccctgatggggtttttnnnnnnnnnnnnnnnnnnnnnnnnnnnnnnnnnnnnnnnnnnnnnnnnnnnnnnnnnnnnnnnnnnnnnnnnnnnnnnnnnnnnnnnnnnnnnnnnnnnnnnnnnnnnnnnnnnnnnnnnnnnnnnnnnnnnnnnnnnnnnnnnnnnnnnnnnnnnnnnnnnnnnnnnnnnnnnnnnnnnnnnnnnnnnnnnnnnnnnnnnnnnnnnnnnnnnnnnnnnnnnnnnnnnnnnnnnnnnnnnnnncgcgatatcgctgtgagcctgcctctctg

SEQ ID NO: 592 - DNA, 3174 bp, Homo sapiens
  SIMILAR (742)..(1773): 951254mologous to Rattus rattus voltage-gated potassium channel,accession number X62841,Smith-Waterman Score=1695.
atgtgcatttccaaaagaaataagtggattcagcagaccttcaaggaagcggcttctggggtccaggctggaggggacagtggctttgctaaggggctgggtggtgccaatggagagatcttcgcaggacaaaccaaggagaccttcgggatggactggagatgggagatgctggagagggagaggccgagcctggcaaactcttactcatccctcaaggcccactcaactgtcacctctgagaatccttcctgggctctcccagatggcattcacatgaagacccagctggtgatcaattcgtggcaaaaagtgtcagaagctagaagacttatctccgagccttccaacatcagaaataattcaggctatcggacctggactttgcagtccatgtcttcaagcagacagttaccgggtatgatgaatgcgatgtggccaagctgccatgatgacccattagcatcgttggggggtacaccggaaactgacatcatgggtacatctggagaagaagaaccaggtgttacaggatacagggatgaggaaaaggagactgagggatcgggggctatcctaggtgatggggttacgcggagtctcaccacagatgctcaaggcttgacaggcgggaaagacaggacgtcctcatcacgacaaatgcttattatcagtcctgactgtgcagatgaaggaacaggcatagagaggctaagtgactttcctcagggcctaaagctggtagtggcctttgcctctctcttcttcatcctggtctccatcaccactttctgcctggagacccatgaggcctttaatatcgaccgcaacgtgacagagatcctccgcgtagggaacatcaccagcgtgcacttccggcgggaggtagagacagagcccatcctgacctacatcgagggcgtatgtgtgctgtggttcacactggagttcctggtgcgcatcgtgtgctgccccgacacgctggacttcgtcaagaacctgctcaacatcatcgactttgtggccatcctgcccttctacctggaggtggggctgagcggcctgtcatccaaggcggcccgcgacgtgctgggcttcctgcgcgtggtgcgcttcgtgcgcatcctgcgtatcttcaagctcacacgccacttcgtggggctacgcgtgctgggccacaccctgagggccagcaccaatgagttcctgctgcttatcatcttcctggccctgggtgtgctcatctttgccaccatgatctactacgctgagcgcattggggccaggccctccgaccctcggggtaatgaccacaccgacttcaagaacatccccattggcttctggtgggctgtggtcaccatgacgacactgggctacggagacatgtaccccaagacgtggtcaggcatgctggtaggggcactgtgtgcactggctggcgtgctcaccatcgccatgccggtgcctgtcatcgtcaacaacttcggcatgtactactccctggccatggccaagcagaagctgcccaagaaacggaagaagcacgtgccacggccggcgcagctggagtcacccatgtactgcaagtctgaggagacttccccccgggacagcacctgcagtgataccagcccccctgcccgggaagagggtatgatcgagaggaaacgggcagactctaagcagaatggcgatgccaacgcagtgctgtctgatgaggagggagctggcctcacccaaccctggcctcctccccgacccccgaggagcgccgggccctgcgacgctccaccactcgagacagaaacaagaaggcagctgcctgcttcctgctcagcactggggactatgcctgcgccgatggtagtgtccggaaagggtgtttggagggcagcggccgccccaagccggagccccgcagcgcttcttatgatcagctcggtgtgtgtctcctcctaccgcgggcgcaagtcggggaacaagcctccgtccaaaacatgtctgaaggaggagatggccaagggcgaggcgtcggagaagatcatcatcaacgtgggcggcacgcgacatgagacctaccgcagcaccctgcgcaccctaccgggaacccgcctcgcctggctggccgaccccgacggcgggggccggcccgagaccgatggcggcggtgtgggtagcagcggcagcagcggcggcgggggctgcgagttcttcttcgacaggcacccgggcgtcttcgcctacgtgctcaactactaccgcaccggcaagctgcactgccccgcggacgtgtgcgggccgctcttcgaagaggagctcaccttctggggcatcgacgagaccgacgtggaaccctgctgctggatgacctaccggcagcaccgcgacgccgaggaggcgctcgacatcttcgagagcccggacggaggcggcagcggcgcggggcccagcgacgaggccggcgacgatgagcgggagctggccctgcagcgactgggcccccacgagggaggcgcggcccatggcgcccgggttctggggggctgcccccggcctgccagcccccgcaatgtgggccgcttctttcgaaggaatcccctaacttcccttcccccggggcccggcttaaagggggttgaatttgggcaagggagccccggtgttcttccccaattctttgggttcttgcaaaggggttcccgtggttgggctggttgtgtaaggggtccggtgaccttggattgtggtgcttttcctgcgaatggataccgcaaccgagctttgttgtgtaaggacacttcagggatacccaagaccctcagagtactacattccaatgcttacagtactggtggcttcactgaccttattgtgccctacttgtggctacccttgaccccgatggcggaacgggattcttacttgggttatataccaaggaagagaggttgggcacccccttccaaatttggggacagaagacgtttccgtatcccgttcgccaactttcatggacgatcccgtgtaattcatggattgtccccgttgtgtaaccatattcggttcaagggattcgcacaccacgggcacaatttgggggatccgaaacggggacactcgcaccgcccatcattcccatttgctttccacccttggacccgggcgaactag

SEQ ID NO: 593 - DNA, 444 bp, Homo sapiens
  SIMILAR (40)..(249): 251254mologous to Pseudomonas aeruginosa DNA mismatch repair protein MicA,accession number AE004476,Smith-Waterman Score=58.
atggcaaccagctcccagggcgcctgggggcgggatgttgagggcagcagggaggtgaggaaactggagagtaatttgatggagatctcacagatagatttcacaggcgattttgaccatgcttctacactggctctgtggccagccccttggcaccagcaccaccactgccatcgatttctggtccacggccagattgctaattctggctccactggctttgccacttatggcattcacatgaagacccagctggtgatcaattcgtggcaaaaagtgtcagaagctagaagacttatctccggttgtaaaaaccccatcagggcagtgactgagtgtgtgtcactgtgtgcagcatccccagaacctaataccatgactgcatggaacaagcacccggatataggaatgaaggacgctactggtggccccgtccagttctga

SEQ ID NO: 594 - DNA, 1671 bp, Homo sapiens; identical to SEQ ID NO: 243
  SIMILAR (1159)..(1668): 791254mologous to Homo sapiens NAG13,accession number AF194537,Smith-Waterman Score=664.

SEQ ID NO: 595 - DNA, 603 bp, Homo sapiens
  SIMILAR (384)..(551): 511254mologous to Bovine leukemia virus gag,accession number K02120,Smith-Waterman Score=157.
atggccacagcaggcccagaaattggtcccagtggtctccaaggtttctctggcttgaagcacatcgaaggccctcaggctccccggattctgctgagctcagatcccaagtctcagattgtcttgggacttccagacatggaactggggctttatttttggctctgggcatctatgctgcttcctgttatgttgccagattcatacgtgtcagaccacacagggacgcttactcactgcagggacgcctctctgatcattcacccacgtttcaagggtgtcagaccacgcagggacgcctgccttggtccttcacccttagcggcaagtcccgcttttctggggaaggggcaaccacatctccggcacacaagaacttccaaacacctgaaccgcagtggccaggcattcctccagaacctcctcccacaggagcttgctacacgtgccggaaatctggccactgggccaaggaatgcccgcaggccaggattcctcctaagccgcatcccatctgtgtgggaccccactgaaaatcggactgttcaactcacctggcagccactcccagagcccctggaactctggcccaaggctctctga

SEQ ID NO: 596 - DNA, 462 bp, Homo sapiens; identical to SEQ ID NO: 246
  SIMILAR (79)..(135): 891254mologous to Human endogenous retrovirus tripartite fusion transcript PLA2L,accession number Z14310,Smith-Waterman Score=91.

SEQ ID NO: 597 - DNA, 383 bp, Homo sapiens
  SIMILAR (105)..(239): 911254mologous to Homo sapiens calbindin D28K,accession number S46006,Smith-Waterman Score=231.
ctgcacccaggtgaaataaacagctttattgctcacacaaagcctgtttggtggtctcttcacacggacgcgcatgaaatttggtgccatgactcggatcgggggacctcccttgggagatcaatcccctgtcctcctgctctttgctctgtgagaaacatccgcctacgacctcaggtcctcagaccgaccagcccaagaaacatctcaccaatttcaaatccggagcttgctacatgtgccggaaatctggccactgggccaaggaatgcccgcagcctgggattcctcctaagccgcgtcccatctgtgtgggaccccacttgaaaattcggacttgttcaactcaccttgggcaagccactcccagagccccttgaact

SEQ ID NO: 598 - DNA, 771 bp, Homo sapiens
  SIMILAR (309)..(407): 481254mologous to Homo sapiens Fragment of human secreted protein encoded by gene 29,accession number Y36505,Smith-Waterman Score=73.
atggcaaagagcttttcaggcagtggaaagagcgtgtgcaaaagtcccaaaggcaaaaataacacatgggagaccaggatgattggggatggtggactccaggaaggaagtctgacaatgaaatttgaagatgggaaatacctttttggatttaacatcattgagggagatttctgtgaagacagcaattttcaaactggagagtcagtgtcagatgtgtattttgaaaatgtaagtgccctgcagagagagtccacgggctctggcattgcccaggaaagaaatgatgagggcttagaatcaggtagggctgtcctgtgcattgaagaatgtttatcagcatccctggcttctacctctcaatcgtcaatagaacaaccattgcccacaagttctcacaaccaaaacaaaacaaaacatgactccagacattgccgaatatccccagtgggcaatatggacatcgctgaaaacaactacaatagttttaaggccgagctaggtcctaattcttcctcagcctccactcctccaccctataatctttttatcgcctcccctcctcacacctgctccggcttacagtttcattccaccatcacagacgccgagcttcgggtaactctcacagtggaaggaaacagaatgtctgtggtcagaagttccttcttgggactaaaccagttgaagctggcaaaatccatgatggcagcttactcgatctttgaagaacctctagcttcattatactccaacttccatactaaatga

SEQ ID NO: 599 - DNA, 1767 bp, Homo sapiens
  SIMILAR (728)..(684): 661254mologous to Homo sapiens Human secreted protein sequence SEQ ID NO:103,accession number Y87064,Smith-Waterman Score =57.
atgacctgtgatgccggacgaccgccagctcggcttgggcaaccgattgggggtgccccaccatgggcggctccacccccagatcgggatctccccgttcctccccaccgaggcggcggccgtcgaaacccgccaccatgccgaacacttccagcgcttcgagatcatggcccgccgcgcaggcagcttgttgtggagttccctgagaatagaactccacttctgctgcccatgccatcagtggccaccctgcaccaggtgccagctctggagactgaccagcgagaaagcaccatctgtgaaccagaaagtgggccttcatcagaccctgaatctgccagtgccttgattacggacctcccaacctcgagaactgagttggaggagaggtctggggtgaacaaggcctctgaagatggggaagatctggacagggatgtgagtgttgccagcaatatagagccttggactgggtggtgtagggagacacctcccagcaggggtcaacagacacttcatacaggagagctccggctgcatctggtgggtgcccctctgggacgaagcttccagaggacggaacaggcaacaatctttgctgttctgcagcctctgctggtgatagccaggcaaacagggtctggaatggacctccaacaaacgccagcagaccggcagcaaaggggtctgactgttaaaaggaaaagtaacaaacagaaaggaatagcatcaacatcaacaaaaaggacattcacacgaaaactccatctgaaggtcaccaacatcaaagaccaaagaaccaatgacaaaaaccacatgattatctcaatagactcagaaaaggccttcaataaaattcaacatcgcttcattttaaaaactctcaataaactagatattgatggaatgtatctcaaaataagagctatttatgacaaactcacagccaatatcatactgaatgggcaaaaactggaagcattccctttgaaaaccggctcccgaccacaccgacaggggtgttcgggctatagcggtcaggtttcagcatgcgatccgccaccgggcccaggcggagttcctgtcactctttctcaatctggctgccaccactggcaaggaggtcatgaatgtgagggccgtggcgacagacgcctcaagcaagggcgtcaaggcggcctattttcccggaaacaatccggcgcgttcatcgacagcatcgttgcccgaaaggggaacgccgacgagaatttcagcaacatccgtatcgcaggcgatggtggatcggctgcgatgtcgttcgactatgcgttcaagatcgacgacgtggtcccgaactctggcatggaacattggcttcttgtaaacacgaacaatggatggcggatcgtatcggtggcttggtcggctgctcctctccaggccgatctaggtcccaattcttcctcagcctctgctcctccaccctataatccttttatcacctctcctcctcacacctggtccggcttacagtttcgttccgtgactagccctcccccacctgcccagcaatttactcttaaaaaggtggctggagccaaaggcatagtcaaggagcttgctacacttgccggaaatctggccactgggccaaggaatgcccgcagcccgggattcctcctaagccacgtcccatctgtgtgggaccccactgaaaatcggactgttcaactcacctggcagccaatcccagagcccctggaactctggcccaaggctctctga

SEQ ID NO: 600 - DNA, 801 bp, Homo sapiens
  SIMILAR (349)..(798): 451254mologous to Sus scrofa polyprotein,accession number U77599,Smith-Waterman Score=339.
atgtgtcatttcctggagaaagcatttcctggagatagcacagaatactgccactatgtcctcctcttggtgtatggaaagcataagaacagacagagcctttctcagtccttgactaagaatactacagactggataatttgtaaagaagagagctttatttcttacagttctggaagttggggagttgaagggcatatggtgctggtgtctggtgagggcctttgggctgcatcatcccgttgtggaaaagtggaagggcaagttgttcctcgccaggccgagctaggtcccaattcttcctcagcctctgctcctccaccctataatctttttatcgcctcccctcctcacacctggtcgggcttacagtttcgttccgtgactagccctccccctcctgcccagcaatttactcttaaaaaggtggctggagctaaaggcatagtcaagcacgctttaaaaagattaaagcctgttatcactcgcctgctacagcatggccttttaaagcctataaactctccttacaattcccccattttacctgtcctaaaaccaggcaagccttacaagttagttcaggatctgcgccttatcaaccaaattgttttgcctatccaccccgtggtgccaaacccatatactctcctatcctcgatacctgcctctacaacccattattctgttctagatctcaaacatgctttctttactattcctttgcacccttcatcccagcctttcttcgctttcacttggactgaccctgacacccatcaggctcagcaaattacctag

SEQ ID NO: 601 - DNA, 1062 bp, Homo sapiens
  SIMILAR (185)..(6): 761254mologous to Homo sapiens neutral protease large subunit,accession number M27826,Smith-Waterman Score=215.
atggaggcaagggaaacaggcccttggaaagaaggtaatgtggagcgggtagcctccgtattgattaagaaggggacgggcttaccttccactgtgagagttaccggaagctcggcgtccgtgatggtctacggggcttccgaggcgatcgggcagcatcagtcttcagccgctaagccgagaaggagtcagtcagagagccttgggccagagttccaggggctctgggagtggctgccagggcctagggctgtgaagcgtctcagggttatatttgatgaaaaagagcctaaacgctatctgatttgggataaagaaaaaggagcattaaccttgactatgcctttggctccagccacctttttaagagtaaattgctgggcagctgtggaagtttatgacggcaatggtgtagattttctaggggaaggggcaccaggttgtttttcaggccaggtgcatgtggatgcagcaagccagcagcttgtgtggcaggctctccaagaaggtgctgctgtcaggctggatgttggattgagtgtgagtatgcataccagataccatgatattgaatcttccattgcttattataaaggaaattggattcctggttttctgaaagtgttgatgcaggagcagggtactgatgggggtggagctggtgggctctgttcctgccaatgctctgactacagtggtactgtggtgggggaagaggtagtgggatgcactcacgccagccgtagtggcacagcatggtacatcagcacattggcaccggtggggaaggcaagcacccatgcacacatgctccagcaaagcaatgtagggggtgctgttgggcaagtgtttgcagacagagtgccgggggaaggctgcagtgggggcagggcacaggcaggcttgtgtgggtccacagggccatctctgctggagcactctgccagtcatgtgcagtccaccaatgcaggagctatatatgggcctccaggaagtattggggactacacttcaaggaggcccaaccttattgggaacccaggagagcccattagaccatga

SEQ ID NO: 602 - DNA, 3131 bp, Homo sapiens; identical to SEQ ID NO: 249
  SIMILAR (2115)..(2408): 941254mologous to Homo sapiens NAG13,accession number AF194537,Smith-Waterman Score=482.

SEQ ID NO: 603 - DNA, 1615 bp, Homo sapiens
  SIMILAR (634)..(470): 341254mologous to Homo sapiens Protein encoded by the endogenetic fragment of HERV-W,accession number B07702,Smith- Waterman Score=66.
  misc_feature (1)...(1615): n = a,t,c or g
cctcggcgctcctaatgtttcgcggggcttttggagccctcagcaagcgtccttttccagccagtaagccaagagggagtcagtcagagacccttggcccaaagttcccaggggctctgggagtggctgcccaggtgaagttgaacagtccgacttttcaagtggggtcccacacagatggggacgcggcttaggaggaatcccgggctgcgggcattcccttgcccagtgcccagatttccggcacgtgtagcaagctcctgtgggaggaggttctggaggaaccgcctggctgctgccggtccagccgtttggaagttcttgtgtgctggaagatgtggctggggttngtcctcacagtggaggcaaggaggaattgcaactcagaaatatgttgctacttggctgcctctactctattattgtacaccttgatggcgaggttaattaaatcctgttgtgggggtttgagggccggaatttaatttttggagttttatttaatgtcgggaagcagattgggtaatacaactgtatacttgagaataagatggccttttgaccttttagggtctagggctgtaaaacgtctcagggttgctgccgaacaagccatgaactgggctgggtttttcatatttgataaaaaaagagcctaaatgctatctgatttgggataaagaaaaaggagcattaaccttgactatgcctttggctccagccacctttttaagagtaaattgctgagcaagttgggggagggctaagtcacggaacgaaactgtaagccggaccaggtgtgagggaggggaggtgataaaaagattatagggtggaggagcagaggctgatggaagaattgggacctagctcggcctggcaaggagcatgcctggggaggaggggagaggtcacatgggtctgtcgaaaaggaagattagaatgactcagcgacgcttggggttgggactgaggggacaggtgggagggaaagaaggaagatttgggacgagttgcactgggcacagagactaggaagggactgatgtgtaaaagaatgcctggacatcaggcacctcagaccatttgtcaattttaggacaagaattatttagatcttgtaggatggaaaaattgaaagtgccattttccggctatttggaactactgtcgagtttgtattggggtcaagcggcattgcagaagaaaataagtcatttagattttaggtcaggtgtgagttgaagaggttttaagtttttgagaacacaggctaagggagaagaaggaggaatggaaggtggaagcttgcccatagtgaaggaggcaagcccagagaaaagagtagagacatggagaaggggtgggggggttcttgccctccaggaaagcagagaaggggttggggcagggaaataagggattggggcacagagataagaggtcagggtgcagaaataagtgattggggcacagagataagaggttggggtgcggcggaaataagcgattggggggttcttgccccctaggaaagcgggacttgccgctaagggtgaaggagaaggggttgaggggtacttgcccctgccccaggaaacagcacttgctgcta

SEQ ID NO: 604 - DNA, 336 bp, Homo sapiens
  SIMILAR (165)..(245): 441254mologous to Homo sapiens Human secreted protein HDPJF37, SEQ ID NO:164,accession number Y86249,Smith-Waterman Score =63.
tcaaatggtaatatctatgtggcggtagggtgctgaggttgccacgagctaatctgcctgctgtgtagtaactagtagcttttcttactgttagtgaacttgttttagtctgaaggaaggcacccatgccccaggtgaagtccagctgagttcagtgaggacgatggagacccttggtcttggcacccttctgccttacactgggaatgcctcaggcttgctcctgctgtgtgtctgtggatgcccactttctgctggtctccgagagactgattcaggtgttcaggagtctgttcgctattacatcacctccttgtgagaaataaagtggagcag

SEQ ID NO: 605 - DNA, 385 bp, Homo sapiens
  SIMILAR (217)..(2): 321254mologous to Sus scrofa estrogen receptor beta,accession number AF164957,Smith-Waterman Score=81.
atgaaatatattgaacacaaatcgagcaaatatgacttggtcgttaacatccctctgattaaacaggagtgctgctatgagaacgggctgtgccattctgcaggcacacgagagtcgctgggttttagggtagtctctgtggagaatggtgactggaccacgtgggagaggggcttgaggcaggaagggattcaacaccagcctgttggcagtggacctgaccctgaccagtcacggaagccaactgggaaccaacgagggcaacagttagctgctctcagtgccacaacggacgaggatatggggactaatgctgaaaagccacagggcgttgataaggcactagcgataatcactgacctgagcccgttcttattcaaattca

SEQ ID NO: 606 - DNA, 869 bp, Homo sapiens
  SIMILAR (639)..(490): 281254mologous to Aurelia aurita glyceraldehyde-3-phosphate dehydrogenase,accession number AB044092,Smith-Waterman Score=65.
attatctccctgttcttgaccacttgttctgcattttctccatcttccctgggattagaacctcaaccaaatgtcggtgattggactcgcaggcatttactttgcctctaaaataggcagagctccactcccatgggtcctaattttaatcaaatcggtcatttttttccaagcctcatcagcttcgtgcctccactaacggacttttagtttgcatgtctctacgtggattattgttgctgctggacagagctgatcaggaaggaaatttattgcacaagaatgggaagaaattatcaagttaactgatgtgtaagggaggtgtacctggaagatactctttaataggcaatgcaatgtgtggggatatttttaagttttatcggtacaaatgaaatatattgaacacaaatcgagcaaatatgacttggtcgttaacatccctctgattaaacaggagtgctgctatgagaacgggctgtgcaattctgcaggcacacgagagtcgctgggttttagggtagtctctgtggagaatggtgactggaccacgtgggagaggggcttgaggcaggaaggtgagcagactccagagttcaagagatgtttgcatacagcgccctctttgtttccccttacagtgtggctgtggccagtattgaggaaccaagtgttcaggaactcatgctgggcctgccgggtcccacctgacctgagagtggcggggcactcagcgtttcagcaagctgctttcctcaacgatgcttttgatctcttattgttgctgggggaggctggagttccaccccaaatcaagtgggaagtgctgtcagctgctacgtctctcacctaggagctttagaggctca

SEQ ID NO: 607 - DNA, 345 bp, Homo sapiens
  SIMILAR (75)..(179): 371254mologous to Paramecium bursaria Chlorella virus 1 a206L,accession number U42580,Smith-Waterman Score=64.
ctccttctggctatgacctcagcatggctatcatgagggatgtctcctgcggcaaagataggacaccaggtgaagacatatggaagctggagagggtctggttcctagaagctagaacacagcagtcccaccagcacccaggatggtcatgtagctcctggagagctttgccagaaggggaaaagcggccagcttactagagacagcagcccgctggtggactctaaagacccccgcataaacagggaagttgatgaaactttgggttgggggatgcacgtcccgaaacttacattaagaaaagctctttcaattaacaaaatcgaattcagagcaaacgggtga

SEQ ID NO: 608 - DNA, 327 bp, Homo sapiens
  SIMILAR (67)..(288): 291254mologous to Pichia pastoris Gsa9p,accession number AF309870,Smith-Waterman Score=81.
  misc_feature (1)...(327): n = a,t,c or g
gagaaaactgggtgcccacggaggagaaacggaatgcaaggagattgcaatctgtgctttgaaccagatgcactattactaatagctggaggaaattttgaagatcagcttagagaagaagtggtccagagagtttctctnctccttctctattacattattcatcaggaagagatctgttcttcaaagctcaacatgagtaataaagagtataanttttacctacacagcctactgagcctcaggcaggatgaagattcctctttcctttcacagaatgtagacagangattatcttggntttcaccaggcagtactttgacactt

SEQ ID NO: 609 - DNA, 1767 bp, Homo sapiens
  SIMILAR (1767)..(1423): 801254mologous to Mus musculus argininosuccinate synthetase (EC 6.3.4.5),accession number M31690,Smith-Waterman Score=447.
atgaggacacacacatgcacacagagggatgaccacatgagaacatatggagaagatggcatctacaagcccatgagagaggctttgggaggaaccagccctgcccacaccttgatcttggactttcatgctccacgatggtccctcacttgggctctgcttttggtggaaattgaacttaaacacccacctaaacactcaacaggaaatctctgcttctccatcaaagagaataaaaagtctcatccttccctctcgctggcctcaggagtgaagctgcagaccttcgcagtgagtgttacagctcttaaaggcagcatgtctggagttgctggttccttctggtgggttcctggtctccctggcttcaggagtgaagctgcagatcttcatgtgtggggtctgccgagccagcgcctacacagaactcaagctggcaccagagtgctgcccacagtcacggttcccgctggcgcctctccctccacacctcctggcaagcagagggagccagctccacctctgtcagcccagagaggggctcccacagtgcagcgtttgacagtatttgatagagggcttatcggtaatgtggatacagaaggctccaattgtttcagtgaagtgtgtagttggtctttggagctgaagagtgaaggaacatcaagaagcctgatgacacagctagattctgttgaaggagagaaagaaaagaaagaaagaaagaaagaaagaaagaaagaaagaaagaaagaaagagagagaaagaaagaaaaaagaaagaaagagagagagagaaagaaaggaaggaaggaagaaagaaaggaaggaaggaaggaagaaaggaaggaaggaagaaagaaagaaagagagagagaaagagagagagaaagagagagaaagaaagaaagaaagaagaaaagaaaaggaaggaagggagggaggaaggaagggaaggaagaaggaaagaaaagaaagaaagaaagaaagggaaagaaagaaaggaaaagggaaggagggagggagggagacactcccgcacgcacggagggagggaggaaggaaggaaggagaaagaaagtaagaaagagagagaaagaaacaaagaaagaaagaaagaagaaagaaagaaaaagagaaagaaagaaagaaagaaagaaagaaagaaagaaagaaagaaagaaagaaagagagaaagagagagagaaagaaaaaggaaagagagagaaaaaggaaagagagagaaaaagaaaggaacagcaggcttcagcggtaccagggaaaaagttggggcctggcagccccactatactgccagccagggagaacaagtcacaattacgaattatcacaataattagtgtctgttcttggggtatctgcaaagtgtgcaaagtgaggaggccccagctccccctcacggagcttgctttagagacaatgatattccttcagcctgatggaattgatgttgatgaacctggtggcattaattggctcctaatcgccctgcacattcatgctcaccagctcctcattttagagagacagtggggactcctgtctgagtatgtccacctggctcttgaagacaggcacctgcactttcccttccactcactcctgggacttggtgatgcagtggtggacaaattcacattcagggctgtgccagaaactggtgtacaccagctcagcaaatttcacgcccaggccttgtttgattttgcactcttcctgattcatggtgaaggcctcgatgtgtaa

SEQ ID NO: 610 - DNA, 1222 bp, Homo sapiens
  SIMILAR (53)..(355): 491254mologous to Homo sapiens gag,accession number AF156961,Smith-Waterman Score=240.
ggcgtgcgagagtggacgagggaacctttcctgtttcaaccggggcctcgccccggcatcctggaagaacttagggcaaattaagggagatcttggcaagttttcagatgaccctgatagatatatagaggctttccatgatttcactcaaatatttgaactctcctggagagatgtaatgttacttttgaatcagaccctaacagacaatgagaagcaggctgctctgcaagtagcagagagatttggggatgagctttgtttcacatatagtgtcagggaagggggcaaacattatccagctggaagagaagcagtaccaatgaatgaccctaaatgggatcccaatgatgaggtggaagtctcagaccgccctggcctgccatgtccccatcctgtgcctctaaaaacccgagaccctagcagggcagagacagaagcagctggacgtcgaaaggagcacatcagcggaggaacacacaggtggctggacgtggaaaggaaagcaccagcaccggcatgccaacaggccactgaccggcagaaccacatggagtttggctggggcagttggaggaaagcctggctgccagcaacatggatggaagatagccaaagtgaactaacacagaaacagacaacaaaatgccacatgttctcacttataagtggatgcgaagcattgagtacatatggacacaaagaagggaacaacagacaccagggcctacttgggggtggaggtttagagggtgaggatcgaaaaacaacctatcagagaatcaaggagtgtctgaacatagatcaagggcatgatgatgtgtccggagttggttccttccagtgcgttcttggactcgctgacttcaagaatgaagctgcaaaccctcgtgatgttcagatgtgtccggagtttcttccttctggtgggttcgtggtcttgctgacttcaggagtgaagctgcagaccttcgcagtgagtgttacagttcttaaagtttgtgcagacccaaagagtgagcagcagcaagatttacggcgaagagcgaaagaacaaagcttccacagcgtggaaggggacccaagcaggttgccgctgctggctcaggacaccccaactgctgttgggaattacccgatgaccactctagctacttcctgctggacaggggcaaagaaggggccctgcagtgatagtgtcctccagaggggaactctttag

SEQ ID NO: 611 - DNA, 1328 bp, Homo sapiens
  SIMILAR (70)..(23): 641254mologous to Homo sapiens Human secreted protein, SEQ ID NO: 7115,accession number G03034,Smith-Waterman Score=54.
atggacccttgcgatgttcagatatgtccggagtttcttccttctggtgggttcgtggtctcgctgacttcaggagtgaagctgcagaccttcgcggtgagtgttatagctcttaaaggcagcacgtctggagttgtttgttccttctggtgggttcatggtcttgctggcttcaggagtgaagctgcagaccttcccgaaattcctttggttacaagtttaccccataaacggcaacacactcacctccatccaagacagactcaaggtggaggaagcgtggaaatgtgcttccggacaaagctctcagtatcctgggtgccattgtttcttctactcagccgtgttttttctactgagacagacaaaccctcagcccaggatagcagaagccgtgggagttcaggccaaccggcagacctgctacaggttctctctgctggtgaccacccaccccacaaccactcaagaagcctcatcaaaacattgttggagaaaactgggtgcccacggaggagaaacggaatgcaaggagattgcaatctggttagtgaaatagaatggggtcagtgctttgaaccagatgcactattactaatagctggaggaaattttgaagatcagcttagagaagaagtggtccagagagtttctcttctccttctctattacattattcatcaggaagagatctgttcttcaaagctcaacatgagtaataaagagtataaattttacctacacagcctactgagcctcaggcaggatgaagattcctctttcctttcacagaatgagacagaagatatcttggctttcaccaggcagtactttgacacttctcaaagccagtgtatggaaaccaaaacgctgcagaaaaaatctggaatagtgagcagtgaaggtgctaatgaaagtacgcttcctcagttggcagccatgatcattactttgtccctccagggtgtttgtctgggacaaggaaacttgccttccccagactactttacagaatatattttcagttccttgaatcgtacagaataccctccgcctatcataactataccaactcctcaacactctttggaccagaagtgcttggatcacaatgagaaaatccatccatttcgaaggaaacaaaacaacataataacccatgatgcaggactattctaatttctcttcatccatggaaaaagagtctgaggatggtccaatatcctgggatgagacctgcttctctgttaagcagctgccgcgcatatttctacagaaaggcctctcactcatttctaaggaggactttctgcagatgagtccaggga

SEQ ID NO: 612 - DNA, 339 bp, Homo sapiens
  SIMILAR (251)..(337): 531254mologous to Tilapia mossambica taurine transporter,accession number AB033497,Smith-Waterman Score=81.
cagagagctgccgatataggcagctgctcagaaaacctctaccctttttcagcttccctcaccctcagcacctctgctgggcttggtagcttacctgatggtgtgaccccaaccttcattcctaagcgatctgagcccttcttggtcaccatgcctctcatgtatgaggccatgatggatgcccagttagaaaagaactctaaaagggtcccacaggcgacgccatgggctcggatggatgctacccactccatgggctgccgtgaagctgtggaactcaaggccaaaggttcagcatactttgagaaagcagcaaacactgtggcaagcagcaaataa

SEQ ID NO: 613 - DNA, 408 bp, Homo sapiens
  SIMILAR (117)..(52): 361254mologous to Homo sapiens CRF2 receptor, beta isoform,accession number Y10152,Smith-Waterman Score=38.
ttgtgtgtgccaggagagtggcagtgccatgctgctgggagctgccccggagagcagcccaggaccccggcggggccgcccctcgtcctctctcgtccccgaggggtcgggcaggaaggaaaatcaaactttattcccctctgtgacttcctctgtgtgtgtgcatggggaaccggctccctcgagatggatgctgcattgcttcaggaggcaagcttcatcctcttgggtccttaaaggtgcttttgggggtcctttcgagggctactgtataagcgtgttcacgcgtgcctgaagcgggaagggtggtcagcaggcacaggagaagcgaatatgggagtggaggaagaggtgaagatgtggaaagcccagagagttggagagttgagagaaggaagaaagcagtta

SEQ ID NO: 614 - DNA, 669 bp, Homo sapiens
  SIMILAR (471)..(515): 801254mologous to Homo sapiens PRO2532,accession number AF130075,Smith-Waterman Score=77.
cccacgcgtccgcccacgcgtccgctccaaaccataaagctaataaatggaagagctgggattcaaatccatttgtgactttagggcctctgctcttaaccactgaattatattaatattcatagaaaaaagaaggaacaaaaagaagcaaaaagggtgatggtagacttgatgagacttggaattggctgggagtacaaagtgaagactctaaaatggctatgggtcttaaagcctgagagactgaccaaaaagtttgacgtacaattaattgaaatcggaaacattggagtggagcaggtttgggaacatattttacttcagggacttagagggatggagtcctcctatgtcaccaaggctggaatgcagtggtgcttttgggggtcctttcgagggctactgtataagcgtgttcacgcgtgcctgaagcgggaagggtggtcagcaggcacaggagaagcgaatatgaaatgtttagatatacaaatacttaccactgtgttacagttgctgacagtattcagcacagtaacatggtatacagtctcatctttcacctttgttttcttttctctaatccaaattgccgaagggagtggaggaagaggtgaagatgtggaaagcccagagagttggagagttgagagaaggaagaaagcagttaag

SEQ ID NO: 615 - DNA, 842 bp, Homo sapiens
  SIMILAR (413)..(436): 1001254mologous to Homo sapiens PRO1996,accession number AF118087,Smith-Waterman Score=47.
tttttttctgtttcaatataattttattagcagttattacatcaaaattcacatttagaggatccagaggactgtcttagaaaattctaaagcatatttaattaggttttaacagtaagggagaacttaatataacacagcccttaaaaagtcaagactactactgaaaattaagtgcagttctatcaagaactagaaatgaactgcacgcgtagtgtcacttaaagcaaagcttcatgaaaatataatacacttctatgaatgtatcagtggcaaacatcattggcttccaaaaaactgacactaaaggaatttccaatcaaaacacaagcacagtggctttcattcaatatagagctatgataagtctatcaagagaccctgaatccttacgtacttgtaataatgatttttatgctgtgacactagtaccaaaaccacatcaacttcttaatgcattaggatgaccgaccacatgataacacggatacccaaggaaaagccttttttctatatcaggaaaattgccaaggttctccaggtactgtgtagggctcggtcattgctgatccagtgaaattctacgtcctccagcttgagcagtattataggattcacaaatcttacatttcatgcctaatatatgaaactgaacagtggatcggtccattacagtcattgcagagaatatccacagtcatgttctgatattctgatggcataggagtctgtgctacttcatcatccagctgtctccaatacctggtcatatctaaagcagagtgcatacataatggacatctgtagcctctatgtaaaagatgtccacatggcaagacatg

SEQ ID NO: 616 - DNA, 1038 bp, Homo sapiens
  SIMILAR (664)..(879): 661254mologous to Homo sapiens Human secreted protein sequence SEQ ID NO:103,accession number Y87064,Smith-Waterman Score =217.
atgaagaggtcgatgtggctgggagaaataataagtgggagagaagggagccaggtaatggggccagatcatatagggcctagtaaggaaggagagagggagaaagagaagtggggtgaagaaaggtatgatgttgctgtggaaacacaaagcccaaatcctcaaagaacactctgttctagtcccagctgctgtatccatctgcgttgtatctcattagcagaagagcctagtgagataggagttgcatctctgctcatccagatctctagagaagggatctacccctggactttttcctggcttaagctaaaagggggaaattacgggataagtgcaaggctatttcctgccaaacagtcagatagtacagtgggatctcaggacattcacacatcccgtgttgttgctcatgtcttgccatgtggacatcttttacatagaggctacagatgtccattatgtatgcactctgctttagatatgaccaggtattggagacagctggatgatgaagtagcacagactcctatgccatcagaatatcagaacatgactgtggatggtagatcctaccctgtggggaggaaggtcttcagtcagcgactatgtggccaactgccagagggctttcagggtcacaactgtagctccgccctgcagttttatccaatgtcaggcccatttgctgcaggactgctggagtttgctggaggtccactccagtccctgtttgccttggtgtcaccagcagaggctgcagaacagcaaagattgctgcctgttccttcctctggaagtttcatagcagagaggcacccactccagaagttagccagagctctcctgtataaggtgtttgtcaatccctgctgggaggccctcaacggattggatgatgcctctccacggtccacatcggtgagggtgattgtctttactcagcctattgattcaaacactaatctcttctggaaacactctcagactcacccagaagtaatgtttggccagccatcggagcatcctctggcttag

SEQ ID NO: 617 - DNA, 4701 bp, Homo sapiens
  SIMILAR (3)..(2186): 1001254mologous to Homo sapiens KIAA0984 protein,accession number AB023201,Smith-Waterman Score=3839.
gactgcctgcttgcaggctgtgtcacagaagagaacatggcagaacagtatgctcaggagttgataccaagttgaaattcactcttgagccatctttaggtcaaaatggttttcagcagtggtacgatgctctcaaggcagttgccaggctatccacaggaataccaaaggaatggaggagaaaggtttggttgaccttggcagatcattatttgcacagtatagccattgactgggacaaaaccatgcgcttcactttcaatgaaaggagtaatcctgatgatgactccatgggaattcagatagtcaaggaccttcaccgcacaggctgtagttcttactgtggccaggaggctgagcaggacagggttgtgttgaagcgggtgctgctggcctatgcccgatggaacaaaactgttgggtactgccaaggctttaacatcctggctgcactaattctggaagtgatggaaggcaatgaaggggatgccctgaaaattatgatttaccttattgataaggtacttcccgaaagctatttcgtcaataatctccgggcattgtctgtggatatggctgtcttcagagaccttttaagaatgaagctgccggaattatctcagcacctggatactcttcagagaactgcaaacaaagaaagtggaggtggatatgagcccccacttacaaatgtcttcacgatgcagtggtttctgactctctttgccacatgcctccctaatcagaccgttttaaagatctgggattcagtcttctttgaaggttcagaaatcatcctaagggtgtcgctggctatctgggcaaaattaggagagcagatagaatgttgtgaaacagcagatgaattctacagcaccatggggcgccttacccaggagatgctagagaatgatcttctgcaaagccatgaactcatgcagactgtttattccatggctccgttccctttcccacaattggcagagttgagggaaaaatacacctacaacattacaccgttcccagccacagttaaacccacctcagtttctggacgacatagtaaggccagagacagtgatgaagagaatgacccagacgatgaggatgctgtcgttaatgcagtggggtgtcttggaccttttagtgggttcctggctcctgaactgcagaagtaccaaaaacaaattaaagagccaaatgaggagcagagtctgagatctaataacattgcagagctgagtccaggagcaatcaattcctgtcgaagtgaataccatgcagcttttaacagtatgatgatggaacgcatgaccacagatatcaatgcactgaagcggcagtactctcgaattaaaaagaagcaacagcagcaggttcatcaggtgtacatcagggcagacaaagggccagtgaccagcattctcccgtctcaggtaaacagttctccagttataaaccaccttcttttaggaaagaagatgaaaatgactaacagagctgccaagaatgctgtcatccacatccctggtcacacaggagggaaaatatctcctgtcccctacgaagaccttaagacgaagctcaactccccgtggcgaactcacatccgagtccacaaaaagaacatgccaaggaccaagagtcatccgggctgtggggacaccgtagggctgatagatgagcagaacgaggccagcaagaccaatgggctgggggcagcagaggcattcccctctggttgtacagcgacagctgggagagaaggcagcagccctgaaggcagtaccaggaggacgatcgaggggcagtctccggagccggtgttcggagatgctgatgtggatgtgtctgcagttcaggcgaagttgggagccctggaactgaaccagagggatgctgcagctgaaactgagctcagggtgcacccaccctgccagcggcactgcccagagccgccgagtgcacccgaagaaaacaaagccaccagcaaagctccccaaggcagcaactcaaaaacccccatctttagcccttttcccagcgtcaagcccctgcggaaatctgctactgccaggaacttgggattatatggccctacagaaagaaccccaactgtgcactttcctcaaatgagtaggagcttcagcaaacccggcggtggaaacagtggcactaaaaaacgatgatgtctccccgaaactttgtatctggactcaccttttcacagtagtataagggttgcagctgaatggctctaaaagagttttatttgtccagtgaaaatgaataggttcagggatgagcaacagcccataaaaaatgggaactggaagttttataataggagttagaacagggctgttttcccagctacttgctaactgacgaagtggattcttgtggcaaaataaatattgtggttttatagtgtgaagttttcccaatttttcattgtgagctgtttaaaaaagactatatctagattgttaactctcgtccatccttctgttctgggggccttcagagtccctgtgacagcacccccaaaccttccagttctctgggtgttactaatactcaagcatgcacataccagcttgctaggacagaaactgtaaaaagaaagtaagtttcttcgttacaaaaaacttcctgattttccttttcatgctttacggaggggattgtgtcgtgtgagatttcccacagtaccagtttcaaatttttttttattcttatgctaaatcataggagaaaaatctagatggcctttctttaactgtctatttctacctgcaaaatgaagaaaacctttcatctgttgaaatttcaatcgataacccagctgaagatcttatgcacaggacacacttggcatatgctttacgcagttgctccggacagcttgctcgcgccactgagcttttcctgaggtttgtgttcgcctctcaaggagagctttgatcctcagtggtacggatgacttgatgggctccatgcggagcctggcctgcatcccccaccacacagctcactcacccaccagctctagactgcagacgcacaaggcctctgctcagaagccagaacacagcacctgtgactctgttacttgaattttgtgctttttgattggagtcctttgttgagtactttgttaattgaacactgcctttctctggagaaggccccagtgctttctagctccctctcactcctgccctttctagctctctctcacccagcgggtcagggatagcacctcttgtctccactatgcagatgggaactctgagccacacagaggtgaagtagcacttcagttactcaaggtcagtactctcggtattccaagtgacttagccacatttccttcagtgcaataggtgggtttaatgctctttgtacacagatgtattggctacatagcgtgtaaaaaccaagactgggaagccattcactaaaatccctcctgactcaaaggacctgtctccagatggtacagagtcccttgatggcattttacaaaaccagctctgacttccttatcctgaacagggagtttattttaaaaatgcttcatgcacctgttatttggctgaacagaaggctcactcctcaatccccttctcctcgccatcattagaggaatagactcagccttcatgtttgtctctggaagacgattggcgatacttgcaggaatattgttgatgcagccaatattaatttgagctaatggattgttaattctgaaacgaaaactgtaactgtagagcaggcttttactatgagaggtactactttttataatagagaatgtggttgtgtgggctttttttgaacagaaaacacaacaatgacctataccgtgagaaaagccattttatcttcttcgtggtatttttacccccaaaggaactgaagatggaaaatatgactaataagttattgcagttttggtcttgaattctgtgccatctgaagttagcatccagcttcttaaaaagcagccacgcctacagcctgttttttgggaaggctgtaggtggagagatgggcttattttgcataccaccctcagggcccagagacccactgcattttccaaagttaagcatgacaccattttcttccatcagctaaactttacagataatagtgtttccacctcatatccttttctttgccccttctcaaatgagtcagaatagtcatgttccccttgagggatgtctgacttgaatggagaattgttctttcctctcttgaatcagctcactagctccctgatggtctgggttcaaggaaatggttaatgaggtagaggccacttatacaagtccttgggattgtaccattgctgtccacaaacttagtatcaacaacacatgctgtgccctgtgaacactctcctctcacctatttccagggttggtcttcctgagaaggggatggatgaggtaacacacagtttgggatacgtatctgttgaatgaatgaataagtgaaaggataatagtcctctgaggtaaaaatggccttgtcagaattttgaaaatccaacagattcctattaaagcactctgtgtaccaataacatgcatgcattgtaccaagtaatcacaatgtgaattggtcaatttatgagccttgcctactttagaaaataaagaaacctgcagtagcctctaccac

SEQ ID NO: 618 - DNA, 600 bp, Homo sapiens
  SIMILAR (90)..(221): 341254mologous to Danio rerio immunoglobulin light chain,accession number AF246186,Smith-Waterman Score=76.
atggagcgaatgccacgctctgtttccattgcgttctgtcagacaaatcccacaaatatgctgcttgggctcccagattttatggaacttggtgacacagctcttcatgttttgctcacagtcactctgccctcaacaggactcctccgggaatgcagatggaaccggaatgggccatcactgtcaccggaagtacatgggcagaggtggaggagggctggctccccaagcaaaattaaggcaatgttgccaaagcatagtaaattctgggcagcaaagacggcaattgtccacaacaaaccctatgagattgaaattattctcattgtacagatgtggaaattgaagcagcctgaactgagtcagacattcagcattgggagatggccagcagggaacggcatgaaagctgacccaatacctacagtaccagtccccattcaggccaggctccgcatggagcccatcaagtcatccgtaccactgaggatcaaagctctccttgagaggcgaacacaaacctcaggaaaagctcagtggcgcgagcaagctgtccggagcaactgcgtaaagcatatgccaagtgtgtcctgtgcataa

SEQ ID NO: 619 - DNA, 348 bp, Homo sapiens
  SIMILAR (52)..(306): 871254mologous to Homo sapiens Human secreted protein, SEQ ID NO: 4696,accession number G00615,Smith-Waterman Score=402.
ggcacgaggggaacgctgaggtcccgcgctccccgaccgaggtatatctgcatgaataacctaaatgatcccccaaattggaatatccggcctaattccagggcggatggtggtgatggaagcatgtggaattatgccctgttggctccaatgctgggaatggctgcttttcgttggatttggtctagggagtcccagaaagaagtataacaagagagagaagtctaccatcggagaactgctggttttcaacaggatctggcagccaagtaccacgccatgatctcagaacatcggcgtgctgtctctcacttgcccttggaactctgaaaggaccatcccacaacg

SEQ ID NO: 620 - DNA, 1766 bp, Homo sapiens
  SIMILAR (97)..(342): 401254mologous to Homo sapiens Human secreted protein, SEQ ID NO: 4696,accession number G00615,Smith-Waterman Score=84.
ctgtgcaggcaagcacatagttaaaactgaaggaaaaatttcttgaataaaagtagttaacgtttttattctttacttcaaggtatatctccatggaataacctaaatgatcccccaaattgggaatatccgggcctaattccggggcggatgggtgggtgatgggaagcaggtgggaattatggccctgttgggttccaatgctggggattgggctgcttttcgttggatttggtctaggggagtcccagaaagaagtagaaaaagagagagaagcctaccgtcgggagaactgctgcttttcaacaggatctggtaagccaagttaccacggccatgattcttaagaaaatcggcgtgctgtcgctcaggttgtccttggaactcgaaaaggaacaaaacagaactgctagttaccgaggaagcccttatctctcagggacgcaagttggtagaagaaaagaagcttctggaacaggaacgggcccaggtgatgcaagaaaaaagacaggtgcagcctttgagaagtgcgtatttgagctgcctgcaaagggaagaaaactggcaaaggagagccaggcttttgctgaaagaatttgaagctgttctcacagaaagacagaatatctactgcagtctgtttcttcctcgcagcaagcggctgggagatagagaagagcttactggtgcgagcgtccgttcgaccccgtcgcccgctggacctaggagatgggcagccggttttcaccgacatatttcagcatgatacatactgtgggtgatgtctgggaacacccaacaaacgccccggatggcagactcattgtggctctatcttcaaatactgggaactcgtttgttcgaactgaaggaagttttaagagagtagaggaagcccatactagaaaagtaagacaagagtgaaatcaaaacggcttttagtgactcgagcccgggcaagtcatgcgccttctgggtctccggcgtcttccgttcccgtgctgccccgtgtcaaggcccaaaccgtcaccccttcggcagcggacctcccactcccgcccaccgtctgagcagaagtgcaccgaagccctcagagacagagggtctcctcccgatgctctgccgctgttggggatatggtttcttgaagcatttttaggctgccagtattgtatttcagcatgatacatactgtggtgatgtctggaacaccaacaaacgccagaatggcagactcatgtggctctatctcaaatactgggaactcgctgcagggcggaggaggggcagccactgtaatccttgtctggagtgaacattgtatatgaggttgcagtggcttataaaggaaggacttttgcggggaggggttgagattgtactttctaatttcgcttgcttcagacttgactttggaatgaagttcgaaggcatcacaattgacctggacattccaaaaacaaaactgaagaggcagcatttctcttccgtagtccagtcagctcatttggtagatgcgctttttcctcctttgcgcttattcatccataaggatatataatttgcatatatatttcatatgcgtgcatatgtgtgtgtatgtgtgaactggcaggtgttgatttcataaggacaaaattgttctgcaaaccttgcaccaattatggggtgtttcaacggaaaaacttcaccaaatgatctgtgtgttctttcaaagagaagttatgtctaattaaaatgtgtaacggactaaaaaaaaaaaaaaa

SEQ ID NO: 621 - DNA, 1062 bp, Homo sapiens
  SIMILAR (781)..(1059): 1001254mologous to Homo sapiens GABAA receptor gamma 3 subunit,accession number AF228458,Smith-Waterman Score=526.
atggggaccagggggacaggcacaccagaggaggtctactttgtgcacagactttgggaaggaccagatgtgcctctgactccccccaaaactgcagtcaaggtggctaagctgtctgtggctggacagccactgttagctccttctagtgcatttgtggtctggctgacttcaagaatagagccacggacctttgccatgtgtgttacagttctcaaaggtggcaccgacccaaacactgagcagcagcaagatttattgcaaacagcaaagaacaaagcctccacaacatggaaaacgaccctggcagattggcgctgctggctgcggtggccagcttttattcccttatttgtccctgcccaaattctgctgattggtccattttacagagtgctgattggtccattttacagagtgctgattggtccattttacaaacctctagctagccacagagcactgattgaaggccagctgccttcacctctcactaccacgaaagtagtagagcttgggtttggctgccatgactcctggctcagggttttcaaggacacagatgaagagatgcagagggtgacatacggggcaagatgcctggatttcctgtgccctccccaggtactaccctccaggaggtatgatgatgagaagattaaaagatcattgaacaaacattcacagaaggcctacaagagctcaggaagcaaagaaaacggacgaagtgtcatcacggaacttgtattctatggggtagagggaatagatgataaacaaaactattccctcctggacatgaggccaccaccaactgcgatgatcactttaaacaattccgtttactggcaggaatttgaagatacctgtgtctatgagtgtctggatggcaaagactgtcagagcttcttctgctgctatgaagaatgtaaatcaggatcctggaggaaagggcgtattcacatagacatcttggagctggactcgtactcccgggtctttttccccacgtccttcctgctctttaacctggtctactgggttggatacctgtatctctaa

SEQ ID NO: 622 - DNA, 909 bp, Homo sapiens
  SIMILAR (808)..(888): 291254mologous to Homo sapiens Human secreted protein sequence encoded by gene 4 SEQ ID NO:116,accession number B24491,Smith-Waterman Score=40.
atgggtaaagaattgaaggggcatccaaaccaagcaacaggaaatctggattctaatcatggttctgcctcaaaatgtcattatgacgtagggcaaatcgcagaccctgtggtccagttttcctcatctggagaaaagataattaaggccaggtgggatgcatacagtaaaagagggcacctgaacaaacaagcattgaatttggagaatgcctacgagtctgtgctgggctacgttcccaagacagactcagaagttacctgccctgccagagtgctgattggtccattttacagagcactgattggtccattttacaaacctctagctagccacagaccgctgattggtgcattttacaatcctagctacagagtgctgattggtgcattttacaaacctctagctagccacagagtgctgattggtgcatttaacagagcactgattgttgcgttttacaaacctctagctagccacagagcactgattggtgcgttttacagtcctagctacagagtgctgattggcgcattttacaatcctctttgtccaaaactgctaaatgttggattgagggatgctcacactggaagagcagatggaaagtggatagggatgggagacctggtgactgtggggtgcactgttccagagaatggtgtttggaactatgttaagaaatggaatctggcagcattgcctaggattagagaaaagggtggggagactgaaggagggaagccagataagaatgcagataaagataatgagagcaggaagtcccacaaggccaaaatgaaggttttgatccagatgggcttttacctggaggctacggggaagaatccatttccagactctttcagggtgttggaggaatccatatccttacagttgtgggactga

SEQ ID NO: 623 - DNA, 348 bp, Homo sapiens
  SIMILAR (127)..(71): 421254mologous to Homo sapiens Human secreted protein, SEQ ID NO: 6363,accession number G02282,Smith-Waterman Score=41.
ttttacttaaatctatttattgaaaaggtcacaataaatagaatgccactaccacttgtcctaaacaataaagtagccaataaaaatataccattaaaacaaaaacagtgctaaaaaagtctggaattttttccacctgccctaagcccaagtcctgctatgattttgtgccacttaatgcaggccccataccacctaaaagtatcttgggaaccaacggacccacccacactttggaaatgctggactaacgtctcaacaaacccacccctatcagccctcagaggtcaccgctgactcaggtgggacacaggtagacaaggccaaccaggaggaggccacgaacac

SEQ ID NO: 624 - DNA, 1165 bp, Homo sapiens
  SIMILAR (587)..(721): 641254mologous to Homo sapiens Human secreted protein encoded by gene 48 clone HFCAI74,accession number W74777,Smith-Waterman Score=121.
cgcgcttcctgtgaggtcaggtgggaggaaaccgcctggagccgccgggagtggacgccgccgaggcccggagtcgcgcctgcagacacagcatctactcagcgtgggtcacctctgtgaacatcactgactgcaagcctccctcaatttctggtaaattttttccttcaagctttttgaggtcagggggaaaatcctccacagatcttcacgagtctggtcccagatcactaacagctaaaggttttgtggtggggagaacttctgtgccacttggcttccattagcctgcccaccctgaccacacaatgcaggtgcagcccatcagggacccacagcgccctgggaaggatggtgcggatcttggccaatggggaaatcgtgcaggacagacgacccccgagtgaggaccactacccagccaccaagaggtagcattcctcgacagagctttcttcaacaggggccatggtgctcccccagggggtccgtggcccccgccagcaagcaggcaaggtgccaaggctgggtgctgctcagttcccccttcaatgaccttaaaccggcagctggtgaaacatgggctttccgcagttggcatcttcggcaaccattgcttgtgggagccggtgaagatccatcctgcctcctcttcctgctcatgatgcttggtgttcgtggcctcctcctggttggccttgtctacctggtgtcccacctggagtcagcggtgacctctgagggctgataggggtgggtttgttgagagggacttgctgggccttggtgtgagagcaggcatatttggaggggatctggtggtgccttgaaaggtatgaatcagaagagggggaaccacaggtgtgtgttttccctttggtgttaagcgttgaggcagagggagacgttagtccagcatttccaaagtgtgggtgggtccgttggttcccaagatacttttaggtggtatggggcctgcattaagtggcacaaaatcagagcaggacttgggcttagggcaggtggaaaaaattccagacttttttagcactgtttttgttttaatggtatatttttattggctactttattgtttaggacaagtggtagtggcattctatttattgtgaccttttcaataaatagatttaagtaaaaatgaaaa

SEQ ID NO: 625 - DNA, 587 bp, Homo sapiens
  SIMILAR (236)..(30): 311254mologous to Plasmodium falciparum merozoite surface protein 1,accession number AF034636,Smith-Waterman Score=69.
tcccacctgagtcagcggtgacctctgagggctgataggggtgggtttgttgagagggacttgctgggccttggtgtgagagcaggcatatttggaggggatctggtggtgccttgaaggttatgatcagagaggggccccacaggtgtgtgtttccccctttgtgttaaagcgtgaggccagagggagacgttagtcccagcatttcccaaagtgtgggtgggtccgttggttccccgagatacttttaggtggtaatggggcctgcattaagtggcacaaaatcagagcaagaaagcgatgcccttcccaattctctcaaatccttttatgccgagaagatttcaagtggaagcccaacaggttccgatgcctgtggaagacatgccgacgtctcctctgcctagggagcaaggacttgggcttagggcaggtggaaaaaattccagacttttttagcactgtttttgttttaatggtatatttttattggctactttattgtttaggacaagtggtagtggcattctatttattgtgaccttttcaataaatagatttaagtaaaaatgaaaaaaaaaaaaaaa

SEQ ID NO: 626 - DNA, 999 bp, Homo sapiens
  SIMILAR (460)..(651): 901254mologous to Homo sapiens KIF3C,accession number AJ002229,Smith-Waterman Score=301.
atgcctgagcctccccgccactccgtgggctcctgtgcggcccgagcctccccgatgagcgccgcctcctgctccacggcgcccagtcccatcgaccatccaagggctgaggagtgcaggcacacggcgcgggactggcaggcagctccacctgcagcccccgtgggggatccactgggtgaagccagctgggctcctgggtctgtctgcagcttcacccctgaagccagggagaccacgaacccatccggaggaacgaacaactccagacgcgcggctttaagtgctgtaacactcactgcgaaagtctgcagcttcactcctgagccagcgaaaccacaaacccaccagaaggaagaaactccgaacacatccgaacatcagaaggaacaaactgcgaacacgccgcctttaagaactgtaacactcaccgcgagggtccacggcttcattcttgaagctgaaaacataatgtttctggagttggatgtgtcccctccagctgtctttgagatggaattctctcacgaccaagaacaagaccctcgtgcgctacacatggagaggctcatgcgattggacagctttctggaaagaccttccacgtctaaagtccgaaagtccagatcctggagcaagaaaaaaagaaaggagggcaccgacaggaaaaaaagggacagggaaggagaaaaagaggagaaagggaaggaagaaagagagaaagggaaaacgaacagaaggggaaacaaaaaagcgaaaaacagagacgaaaccggaagggagaaagaagagaagaacacgggggcagagaagcagagagcaccgaagagaccaagaaaaagttgcgaaagagaagagaagagagttggacacggcaaaccagaaaaaaagccaggagggccacaggtgatccaaacgcgagccacccaaaaaagctcacagggctctcccacacagcttaatggaactgtttctgggattttgggcattgataagtaa

SEQ ID NO: 627 - DNA, 654 bp, Homo sapiens
  SIMILAR (218)..(370): 411254mologous to Myxococcus xanthus response regulator FrzZ,accession number AF049107,Smith-Waterman Score=105.
atgtggccacgcctggattcaaggcagtctgaggaggtgagtgtttcaaagaggcacatggatgccacagacaaaatcaagtttccatggttgaaggagaagaggacgatagagtttggggaggcagcaggctacgtctgccacagaagatataaagatatggagccacacgagaagatgggggaggctgccaaaaaagtccactgggtacagatgaggagcagggctcgggacctgcagcccgccatgcctgagcctcccacccactcaaagggctcctgtgcggcccgagcctccccgacgagcaccaccccctgctccacgacgcccagtcccatcgaccacccaagggctgaggagtgcaagcacacggcacaggactggcaggcagctccacctgcagccccagtgtggggtccactaggtgaagccagctgggctcctgagtctggccctagaaacaagaaccaatccagcagcaacaagcatctctggcagtctatcatttcccttcaactgaaatcagatcttcttaaagaaatgcttggctctcagactgggaacggaaatgtacaagatgtgcttcgatatctggtcaaatcagaaactcaaaaagctatcaaagtctctttggactgtgtcagaaagaggtga

SEQ ID NO: 628 - DNA, 528 bp, Homo sapiens
  SIMILAR (382)..(525): 931254mologous to Homo sapiens Human secreted protein sequence encoded by gene 26 SEQ ID NO:149,accession number Y91476,Smith-Waterman Score=227.
atgaatatggatattgtggttcttcgtctcactgacttaaagaagccgtggaccctcacagtgagtgttacagctcataaaggcgccgcacgtggatttgctcgttgtgacattcggatgctgatgacagtttcctccttctgctgggttcacgctctcactgacttcagaaaggaagctgtaaacctccgcactagacataaatgttctccaaatccccaccagactcaggagcccagctggcttcacccagtggatcccccactggggccgcaggtggagctgcctgccagtcctgcgcctgcgccttcactcctcagcccttgggtggtcgatgggactgggcgtcggggagcagggggcagcgctcgtcggggaggctcaggcatggtgtttggatttatagcaagttttatgttcctacttgactttatcactatgctgtatgaaaaacgacaggagtcccagctgagaaaacctgaaaataccactagggctgaagccctcactgagccacttaatgcctaa

SEQ ID NO: 629 - DNA, 1283 bp, Homo sapiens
  SIMILAR (1136)..(1207): 751254mologous to Homo sapiens Human secreted protein, SEQ ID NO: 7115,accession number G03034,Smith-Waterman Score=94.
atgactgtatttgaagataaggcctttggaaggataggagccagaagcgctggtgcaagtcaagccttcatcgacattttgaccacacacgtaatgggtttttcagctggaagtctgacgatccagccagccagtgcttctcagcccccttgcagtaagaagcagccagtgggagctcagatgaggcaggaatctagctcccgtaggcctgacagtacctcaggcagcgattcgcgaagggccatctgcagatttttgagggtccctgaatccaatttaggaaggtatgaagtcaaaactcttcgtaacaatagtaagacgtttgcctttgtcactgtgttgatatttgtactgatgcccttggctgcaagtaaggcaggggctgtcgagttggcagctgagtgtgcagctaagaagaaaaggagaacgggctctgagagggctcgggacctgcagtctgccatgcctgagcctcccacccactccatgggctcctgtgtggcccgagcctccccgacgagctccaccccctgctccacggcgcccagtcccatcgaccacccaagggctgaggaatgcgagcgcatggcgcaggactggcaggcagctccacctgcagccccggtgcgggatccactaggtgaagccagctgggctcctgagtctggtggggacttggagaacctttatgtctagctaagggattgtaaatacaccgatgggcactctgtatctagctcaaggtttgtaaacacaccaatcagcaccctgtgtctagctcagtgtttgtgaatgcaccaatccacactctgtatctggctactctggtggggacttggagaacctttgtgtccacactctgtatctagctaatctagtggggatgtggagaacctttgtgtctagctcagggatcgtaaacgcaccaatcagcaccctgtcaaaacagaccacttgactctctgtaaaatggaccaatcagcaggatgtgggtggggcgagacaagagaataaaagcaggctgcctgagccagcagtgacaacccccctcgggtcccctcccacgccgtggaagctttgttctttcgctctttgcaataaatcttgctgctgttcactctttggctccacactgcctttatgagctgtaacactcaccacgaaggtctgcagcttcactcctgaagccagcaagaccacgaacccaccgggaggaatgaacaactccagatgcgccaccttaagagctgtaacattcaccaggaaggtctgcagcttcactc

SEQ ID NO: 630 - DNA, 906 bp, Homo sapiens
  SIMILAR (3)..(509): 601254mologous to Homo sapiens Human secreted protein sequence encoded by gene 25 SEQ ID NO:305,accession number Y91632,Smith-Waterman Score=459.
gagcggtgtacagccccactacggaggaggacccgggccccgccagaggcccccggagcggcctcgctgcctactttttcatgggccggctcccattgctccggcgcgttctcaagggcttgcagctgttgctgtctctgctggccttcatctgtgaagaagttgtatcacaatgtactttatgtggaggactttatttttttgagtttgtaagctgcagtgcctttcttctgagtctccttatactgattgtgtattgcactcccatttttatgagagagttgataccacaaaagtaaaatcatcggatttttatattactttgggaacaggatgtgtgtttttgttggcatccatcatttttgtttccacacatgacaggacttcagctgagattgctgcaattgtgtttggatttatagcaagttttatgttcctacttgactttatcactatgctgtatgaaaaacgacagtaggtcccagctgagaaaacctgaaaataccagctagggctgaagccctcaacttgagccacttaaatgcctaaagactctgggggagcaatgttacctaaggtagtgaccctgcattgtggtgcctgagccctggcagaagcttcttgtaaaattttgttaattgtttaaaccacttctttttggagagcaagggggaaggtcaagaaggcagttttctcaatattgtgtcagtccccacaaagtaggccagataagttaaaaaaaatttttttttaaataataattgaaacttatctccaattggagattttggtgggaggaggagaaaacaattgtttttaaaatcacacagctcaacggttgataaatgattctgtccattctgttacaggtcattcttttactagggcttagcttccaaattatgg

SEQ ID NO: 631 - DNA, 345 bp, Homo sapiens
  SIMILAR (276)..(323): 501254mologous to Hepatitis C virus type 1a core protein,accession number L38342,Smith-Waterman Score=35.
atgggctgctgccaagacaaggactttgagatgtctgatgagcagtccaaggaggaagagtctgaggacggcagggaagatgagaccacagacacacaaagagggcccagggagtgtgagagggggcttcccgagggtaggggcgccgaagatatcgacttgaactccccggaccatccgaatcacaagtcgaacgaaagccttctgattaccgtgctgtggcggcgactatccacgttcggtcgtcggggctcctcgcggccaagcaagaggcaaccagaccagattcggaagcaggagagtccgatccgagaaggcaaccaggaggagccggagaagggatga

SEQ ID NO: 632 - DNA, 443 bp, Homo sapiens
tctctcggaattctgcaggtatacgttagaaattttattctctggaggttggggcggactgagagcaggtcttgggtcatttcttctccggctcctcctggttgccttctcggatcggactctcctgcttccgaatctggtctggttgcctcttgcttggccgcgaggagccccgacgaccgaacgtggatagtcgccgccacagcacggtatgaactacataaggcagaaacccaggtccctgtcacccattcaaagccgtgtcactaagagtttgcctgtcgccatcattccagtatcctcagggagcatcaacgctctcccttcggccctgagtttagcgaggggattggtcttacccgtcggcctgggcgaggccacggaacatgccctccccgcccgggcagtgtctctgaccctggaatatgccatcctcggtgctg

SEQ ID NO: 633 - DNA, 440 bp, Homo sapiens
  SIMILAR (98)..(247): 301254mologous to Arabidopsis thaliana gene_id:MJG19.10~similar to probable membrane-associated salt- inducible protein,accession number AP000375,Smith-Waterman Score= 58.
tttatacgttagaaattttattctctggaggttggggcggactgagagcaggtctggggtcatcccttctccggctcctcctggttgccttctcggatcggactctcctgcttccgaatctggtctggttgcctcttgcttggccgcgaggagccccgacgaccgaacgtggatagtcgccgccacagcacggtaatcagaaggctttcgttcgacttgtgattcggatggtccggggagttcaagtcgatatcttcggcgcctgaggggacgacgaggcctctgagctcacccctaccctcgggaagccccctctcacactccctgggccctctttgtgtgtctgtggtctcatcttccctgccgtcctcagactcttcctccttggactgctcatcagacatctcaaagtccttgtcttggcagcagcccatggcccc

SEQ ID NO: 634 - DNA, 504 bp, Homo sapiens
  SIMILAR (465)..(394): 871254mologous to Homo sapiens Human secreted protein encoded by gene 35 clone HSXEC75,accession number Y41342,Smith-Waterman Score=105.
atgattcctccatccaatgggcaccacgtaggtgtagcttatcttagtcactttgggcagcttgaacaacagacatttatttctcacagttctggaggctggaaattcatcaaggcaccagctgatctagtgttggataacggcccacttcatgattttcagacaatgcttcttgctgtttcctcacatggcagagacagacgcagagagaaaatgccctcctgtagcttttccatgcactggaccttgtactggttagactcatcagggttcagtgagggacccatgcagaaatacctcggcaatgggcagatatatagacgtgaagaaatgtctttcagctatagtaactccaagactgaaatttacagcaagtcttacacaaaacaagatggtgactgggaaaagggagggctccaggagagccctcaggccatgcacaagcccaggacatccggcccagccccagcgagcacactggcctcgagcacactggcctcatga

SEQ ID NO: 635 - DNA, 3872 bp, Homo sapiens
  SIMILAR (736)..(867): 951254mologous to Homo sapiens dJ862K6.2.1 (splicing factor, arginine/serine-rich 6 (SRP55-1)(isoform 1)),accession number AL031681,Smith-Waterman Score=196.
gtgaggcgcgtgttcgggctcttgccgtccccgcacccgcaccgcggttactggcttgcggtccgccgttcgacaaccagcccttgggtccccgcccgccacggacatgccgcgcgtctacataggacgcctgagctacaacgtccgggagaaggacatccagcgctttttcagtggctatggccgcctcctcgaagtagacctcaaaaatgggtacggcttcgtggagttcgaggactcccgcgacgccgacgacgccgtttacgagctgaacggcaaggagctctgcggcgagcgcgtgatcgtagagcacgcccggggcccgcgtcgcgatcgcgacggctacagctacggaagccgcagtggtggaggtggatacagcagtcggagaacatctggcagagacaaatacggaccacctgttcgtacagaatacaggcttattgtagaaaatctttctagtcgggtgcagttggcaagatttaaaggattttatgcgaccaagcaggtgaagtaacctatgcgatgccccacaaggaacgaacaaaatgaggggtgtaattgagtttcgctcctactctgacatgaagcgtgctttggacaaactggatggcacagaaataaatggcagaaatattaggcttattgaagataagccacgcacaagccataggcgatcttactctggaagcagatccaggtctcgatctagaagacggttatgaagtattttgtcgcaggagcagccgcagtagatctcgaaggatctcaaaaagtcgctcccgttccaggtcgcggagcaaaggtcgatcacgttctcgatcaaaaggcaggaaatctagatcaaagagcaaatctaagccccaagtctgatcggggctcccattcacattctcgaagcagatctaaggatgagtatgagaaatctcgaagcaggtctcggtcccgatcccccaaagaaaatggaaagggtgatataaagtcaaaatccagatcaaggagccagtcccgttccaattcgccgctacctgttccaccctcaaaggcccgttctgtgtcccctccaccaaaaagagctacttcaagatcccgttctagatctcgctcaaagtcaagatcaaggtccaggtcgagttccagagattaactcagaactccttgtttgcacattattatggaacactttcctacttaggcagttactcttccatgtttatacttggcctcttctgcaagaggaatctcttgaaaacaggggcacacagaaatttgatttgtggccaaattggatgaaaaagatgaggctctaaggaaatggtggcatgaagaccctctcccttctttgtagaattaagataactttgattttatagcttttgagctaacgtaacttttgtaaagattaagctcatttagtgttgtttttttttttttttttttttttttttttttttttttagtatttcagcaggatctgctggcagggttttttttgttttatttgtttgcttatttttaaattaactgcatttgagctttgaataccttaaggctttagaggagagaacccaacttttcacattatgttcggctttttataacagcttgagttatgtaagatttaaataaaagtttgctaccaagatgattgccttattgaatacggtcactattaaattcctttaaatgttgatatctgccatttgtggaaacaaccgtaaattctacttaagtgtaaacaaggcaagcctcagaccagcaataaattactcagtttggataacattattttgtgcagttaatcaaatttgccaaagtctttatctgcccctttaacaagttgagtaaaaataaaaggtattttttacgtcaatgtgttccatgacttttgccttaaattaatacttttaaggtaatgggaacttttttcaaagggcaaatttaaactatttaagaaatagctcctaatacttgggatcttgtttaggggattccactttctggaagatctcagcataattagtgttgagagtggttcatgtgtctttaatgattgacatgtggaaatggaagtagcctctttttgttctgacattgagtatattcacagtgctgaagcacatactgcattttctgatgaaagatcattatgattaacaggcacttaatctcagcaaagtcagctgccagttaagttccacccagtaagtcaagtcccctttgtagttagtgggattatttgataattggttagatcatacttgtaaattttaatgctttgtgtaattgggttgaaaaacagtgaaatgggtaaaccgcaaaaacttttgtactttattacggagtaaagtgtaatgagtactgtgggaaacccaaatttggaatactgccaaatttgtagggagttactagggttagccaatttggtcccataccatcccataagcctggatgagttgaaattgcagtttgagaagtgaattaacccttacatccctttggttccagataccttaaaaggtacctttatttaaaaagccatttattaaatcttagtctgaaatcaaaatatagattaattggctcagctttaatacctttcctaggaggtgtcacaatgtagggtaccaagggttgggattgtgatggggcatggtccgtaccaccggctcattggtgccacagggtgtgactggaaagcatgatattctagggttggtttgtagattcaaataatccagaaatatgcctaataagattgagtgaaaaatttgagtcaaatatctagggcattcacagagtagctgtgaggttcttggtaatgtgaaaaaggccttgtttttcagaaattcctgggtttcctgttaaaaaatcttaaagcccaaccttaggaatatagtgccccaaaaggcggatgcttcttccattatcttattttctttgatactttatttaattagatgtttataaagaaatgggtttatttttccagcataaacctcagaatttaaggaaagaaaatgatgtcctgttgtttatagttccattgttttgccctactcagcagaagtgatgactctttaaaaattggctttgaccaaaagttctcttgttttcagggaaaagaacataaaagctttttggaactacagcctttttaaaaagagggatggggaggatattacagtaaggaaattaggctttcctaaaaggtatgaaaccatccttcaactggggctccccttgttaatgggaccatccataggggtaatagactgggttggactatattggttagctgcccacagtaagccaggtcattgtatagggtaaaatgccctgcaccccataatttttcctaggtaattagcccacgacccaaattttatttaaccagtccagggcccttatcccttgccctggtaagttctccaagtccactgggatgccacaaaatcacctgtgtaaacattgggctcaacttaggggagcataggggttgactgataaaatgtttaattcccttgctaagcttgtgagaagaatgagttgatgacatgctcccataccaaggggctagatggagtattaaggtggagcagaaaagaagtgagaacatcttgattcccctttcttttacttgatggtgtttatgaacaatgccgtagtgcctttatggcccagtttgagtcctgcctactttgacttttacgttcccatttcctgtgttaccactttcttccggatttgttcccccacttttgtgctttaaatctcaataataaaaatactgagggaaaaaaaggggacattaaacaatgccggggggcgcctttttaaagaaacaaattttatctcgcggggcaggcgga

SEQ ID NO: 636 - DNA, 576 bp, Homo sapiens
  SIMILAR (297)..(395): 481254mologous to Homo sapiens Fragment of human secreted protein encoded by gene 89,accession number Y02885,Smith-Waterman Score=74.
atgaaaggcttttctcctaagattgggaacacgggacataaaaaccagggggaaccgcatgaggaagatcaaagcaaatgtgatgacacccccaactccatgtttcccagcctcctcttctgctcaggagactggggtgtttctgctgaagagggcaggcagtttattaggcacctgctgggtatcacgtgtggagacaagctggacaacgtaacaatccgcaaggcagctacggccttgccctggagctcccagtctagcaggggtggaaaacagtggcctgtggtggaccccagatccacagacacaggccctctccgcacaagggctcacgtggtccccagccaaggcccctacagcactttctacggagccctcttcccaaacatgcacatccagcttgcctctcagccaccccgcctccatctcagctccaaggaggccttggcagcaggctcggggcgccatggaacggttcactgcgtctctgccctggcctcacgtgctgccggctggccttgccattcatcttctgaaggctattctctgatggctctgctggccaccttgatctga

SEQ ID NO: 637 - DNA, 804 bp, Homo sapiens
  SIMILAR (393)..(313): 511254mologous to Homo sapiens Secreted protein 58-49-3-G10- FL1,accession number Y59717,Smith-Waterman Score=67.
ctagacaatccctattctccaaggcaactgtagttgttctttcttttctttctttctttgtttagagccagcaacacgagcgcaggacagcccacatccggagaagagtgctctcagaaaacagccgcagcggacgacctcgtccggagccggtaaaggagccagcccacagcagatatttctatctgcattcacgaaggtgcatagaaagcttatggaaaaggctttttcagaaatcttgtagacaaaaatatgcagattgcccaaaactgtggcctctacacgctccacgcacattgcttgcttttcccaggacagcacgctgagcaggcacaccttcctttctgcccaatttcctgcatccccacttggagactgaccactccccgcaccctcagcaatcctggatctgtttttttgtccctatggttttgcctttgccagaaagtcttatcaatggaatcacataagatgagtttcccgtggtccatgcaacaactgagcataaacttgtggcttaaaacaatggaaactggttctctcacggactgggggccagaagtctgaaatccaagtgtaagcaggctccctccatttgggggctataggggaggacctttcctggcctcttcacctgcagcaggctcaggcactccctggcttgtggctgcatcaccctaatctatgcccactggggtcatgcagccttcaagtcctcttctgtatacattaaatctgtccctctcttacgaggacactagtcatgacaaacagggaccacccagataatgcagaaaaacaaaa

SEQ ID NO: 638 - DNA, 522 bp, Homo sapiens
  SIMILAR (337)..(468): 461254mologous to Human T-cell lymphotropic virus type 1 Gag,accession number S74562,Smith-Waterman Score=136.
atgttgctcacacaaagcctgtttggtggtctcttcacacggacgcacatgaaatttggtgccgtgactcagatcaggggacctcccttgggagataaatcccctgtcctcctgctctttgctctagagagacaaaggagacacgttttatccatggacccaaaactccggtgctggtcacggactgggaaggcagccttcccttggtgtttaatcattgcagagatgcctgattattcacccacgtttcaaaggtgtcagaccacgcagggacgcctgccttggtccttcacccttagcagcaagtcccgcttttctggggaaggggcaagagcttgctacaagtgccagaaatctgaccaccaggccaaggaatgcccgcaacccgggattcctcctaagccatgtcccatctgtgcgggaccacactggaaatcggactgttcaactcacctggcagccactcccagagcccctggaactctggcccaaggctctctgactgactccttcttggcttag

SEQ ID NO: 639 - DNA, 423 bp, Homo sapiens
  SIMILAR (1)..(117): 891254mologous to Homo sapiens Human secreted protein, SEQ ID NO: 5576,accession number G01495,Smith-Waterman Score=187.
atggtctacggggcttctgaggcgatcgggcagcatcagtcttcagccggtaagccaagaaggagtcagtcagagagccctgggccagagttccaggagctctgggagtggctgccaggaaagcgggacttgccactaagggtgaaggagaaggggttgaggggtacttgcccctgccccaggaaagcgagacttgccaccaagggtgaaggaccaagtcaggcatccctgcgtggtctgacatccttgaaactccgtgaccggcaccggagttttgggttcacggataaaacatgtctcttttgtctctaccagaaaatgaaaggaattgaaattaagagaagggagagattgaagtgtggttccaagattgaaaggagaaagaggttgagggataatgagggaggttggagaagagagtaa

SEQ ID NO: 640 - DNA, 436 bp, Homo sapiens
  SIMILAR (292)..(197): 961254mologous to Human endogenous retrovirus tripartite fusion transcript PLA2L,accession number Z14310,Smith-Waterman Score=169.
  misc_feature (1)...(436): n = a,t,c or g
nnnnnnnnnnnnnnnnnnnnnnnnnnnnnnnnnnngcttggcgtccgtgatggtctacagggcttccgaggcgatccagcagcgtcagtcttcagccgctaagccgagaaggagtcagagagccttgggccagagttccaggggctgtgggagtggctgccaggtgagttgaacagtccgatttccagtggggtccggatttgaaattggtgagatgtttcttgggctggtcggtctgagggcctgaggtcgtaggtggatctttctcacggagcaaagagcaggaggacgggggattgatctcctaagggaggtcccccgatcccagtcacggcgccaaannnnnnnnnnnnnnnnnnnnnnnnnnnnnnnnnnnnnnnnnnnnnnnnnnnnnnnnnngtttatgtctccttantcagagctggtccgcatatgc

SEQ ID NO: 641 - DNA, 516 bp, Homo sapiens
  SIMILAR (514)..(449): 861254mologous to Homo sapiens Human secreted protein, SEQ ID NO: 5576,accession number G01495,Smith-Waterman Score=106.
atgacctcaggtcctcagaccgaccagcccaagaaacatctcaccaatttcaaatccgagacaaaagagacacgttttatctgtggacccaaaactccggcaccggtcacggactgggaaggcagccttctcttggtgtttaatcattgcagggacacctctctgattatacacccacgtttcaagggtgtcagaccacgcagggacgcctgcctcagtccttcacccttagcggcaagtcccgcttttctggggaaggggcaagtaccccaaccccttctctccttgtctctaccccttccctgcttttccggggacagggagcttgctacaagtgccagaaatctatctgaccaccaggccaaggaatgcctgcagcccaggattcctcctaagccgtgtcccatctttgcgggaccccactggaaatcggactgttcaactcacctggcagacactcccagagcccctggaactctggcccaaggctttctgaccgactccttctcggcttag

SEQ ID NO: 642 - DNA, 615 bp, Homo sapiens
  SIMILAR (1)..(117): 871254mologous to Homo sapiens Human secreted protein, SEQ ID NO: 5576,accession number G01495,Smith-Waterman Score=176.
atggtctacgggacttccgaagctatcgggcagcgtcagtcttcagccgctaagctgagaaggagtcagtcagagagccttcggccagagttccaggggctctgggagtggctgccagtccgtgaccggcaccggagttttgggtctacggataaaacgtgtctcctttgtctctaccagaaaatgaaaggaactgaaattaaaagaagggagagattgaagtgtggcgccaagattgaaaggagaaagaggctgagggttagggaggttggagaagagagtaaaaagaggccgcttactggatttgaaattgaagagaggggagaggctcctctttactgccacaaggaggacgaagtccaggctcctctcgtggcctgcaccagagaattattcactgtaaggagatcagccttatttctaaataccaggcagagaagtgaagagatggaagggaagagtaatgagaaacaaaagatttgttcaacagaacacctgaaaccttttgaaattggggacaccagtacagtggaaggggcaaaggaggacaagatcatggagatgaagacagagagattatttgatggtttctcaaaggatcttttagacctctaa

SEQ ID NO: 643 - DNA, 495 bp, Homo sapiens
  SIMILAR (150)..(260): 891254mologous to Homo sapiens Human secreted protein, SEQ ID NO: 5576,accession number G01495,Smith-Waterman Score=181.
atgacctcttctttaaagaagccttttgcttctttgagagagtctcaatgggcagatctccctctaatctataacgtcagtgttaacagtgtgtacactgttgagctctatggagctcaacaaacagcacatgttccttttggtgcaaaggggcttccgaggcgatcgggcagcgtcaatcttcagctgctaagccgagaaggactcagtcagagagccttgggccagagttccaggggctctgggagtggctgccagaaaatgaaaggaattgaaattaagagaagggagagattgaagtgtgacgccaagattgaaaggagaaagtggttgagggatagtgagggaggttggagaagagtaaaaagaggccgcttaccagatttgaaattgaaaggctttgtggcaaatgtttatgagcgaagaactttttacctcctctttgtggctgagatccagaaggccaagtgtgcagaaactctgtccctggaataa

SEQ ID NO: 644 - DNA, 771 bp, Homo sapiens
  SIMILAR (70)..(192): 901254mologous to Homo sapiens calbindin D28K,accession number S46006,Smith-Waterman Score=204.
  misc_feature (1)...(771): n = a,t,c or g
atgcgggcaccacctaaaagtggacagctgcagcactgcaggccctcaaggggcgccctaagatcgggggacctcccttgggagatcaatcccctgtcctcctgttctttgctccatgagaaagatccacctatgacctcaggtcctcagaccaaccagcccaaggaacatctcaccaattttaaatcgggtgtcagaccacgcagggacgcctgccttggtccttcacccttagcggcaagtcccgcttttctggggaaggggcaagtaccccaaccccttatatctctgtgccccgatcccttatttccgcaccccaacctcatatctctgcgccccaatcccttatgtccgcaccccgacctcgtatctctgtgccctgacccctttcccgcttttctggaggcacataagaacttccaaacgcctgaaccgcagcagcccggcattccaccagaacctcctcccccaggagcttgctacaagtgccagaaatctgaccaccaggccaaggaatgcctgcagcccaggattcctcctaagccatgtcccatctgtgcgggaccccactggaaatcagactgttcaactcacctggcagccactcccagagcccctggaactctggccgaaggctctctgactgactccttctcggcttagcggctgaagactgatgctgcccgatcacctcagaagcnnnnnnnnnnnnnnnnnnnnnnnnnnnnnnnnnnnnnnnnnnnntcttccttcttcgaattccaccgcact

SEQ ID NO: 645 - DNA, 1812 bp, Homo sapiens
  SIMILAR (367)..(1158): 971254mologous to Homo sapiens putative p150,accession number U93564,Smith-Waterman Score=1333.
atgtccactcaagacgagaggcagatcaatactgaatatgctgtgtcattgttggaacagttgaaactgttttatgaacagcagttgtttactgacatagtgttaattgttgagggcactgaattcccttgtcataagatggttcttgcaacatgtagctcttatttcagaaaacaccagtttgatcatggagagctatttggatggctcttttgcaaagtacatcctggtgctgttgtttttgctatattagcagcaatgtcaataccaggttcagcaaatctgcaaacccagtggaatactgtaggggagttcagcaacttgccacaagaatttatagaatggatcaaatatagtactaaaccagtgttggaagttctggccagggcaattaggcaggagaaggaaataaagggtattcaattaggaaaagaggaagtcaaattgtccctgtttgcagatgacatgattgtatatctagaaaaccccattgtctcagcccaaaatctccttaagctgataagcaacttcagcaaagtctcaggatacaaaatcaatgtacaaaaatcacaagcattcttatacaccaataacagacaaacagagagccaaatcatgagtgaactcccattcacaattgcttcaaagagaataaaatacctaggaatccaacttacaagggacgtgaaggacctcttcaaggagaactacaaaccactgctcaaggaaataaaagaggatacaaacaaatggaagaacattccatgctcatgggtaggaagaatcaataccgtgaaaatggccatactgcccaaggtaatttatagattcaatgccatccccatcaagctaccaatgactttcttcacagaattggaaaaaactactttaaagttcatatggaaccaaaaaagggcccgcatcgccaagtcaatcttaagccaaaagaacaaagctggaggcatcacactatctgacttcaaactatactacaaggctacagtaaccaaaacagcatggtactgctaccaaaacagagatatagatcaatggaacagaacagagccctcagaaataacgccgcatatctacaactatctgatctttgacaaacctgagaaaaacaagcaatggggaaaggattccctatttaataaatgtgccagaacaaaaatagtatactcaatgtatagtcagaaagcagctgaagaagtgaagcgagaactgatagttaaaagtgaactattacattctagaaaagtcatggtgtgtaagaagatccaactgaagactgacactgcccgatcgcctcagaagcctataggaccttcacagatgctctgggtaaccctcacagtggaggggcttctgaggcgatcgggcagcatgagtcttcaaccgctaagccgagaaggagtcagtcagagagccttgggccagagttccaggggctccgggagtggctgccagcttggccatttactatctgaaatcctgaacttctgcgagcctcagtttcctcatcggaacgtatggaatcaatactacttagcttgcagtgttgttgtgagaggcagcgacaagaaacccaatgcaatgctcaacactcacatcaatgggatcctatacatagacaccattattgtcaacacctttgtggaaagcctccccttaaggaggctgaatggagaaggcacagcattcttcttaatagatgtccactttgatgtgggtctaatgttagggggtgatgtcaggactctggacacactgcattctgaagcagcaaacaggcagcaaaaagatagttga

SEQ ID NO: 646 - DNA, 1401 bp, Homo sapiens
  SIMILAR (1)..(132): 831254mologous to Homo sapiens Human secreted protein, SEQ ID NO: 5576,accession number G01495,Smith-Waterman Score=193.
atggcctacggggcttccgaggcgatcgggcagcatcagtcttcagccgctaagccgagaaggagtcagtcagagagcctcgggccagagttccaggggctcggggagtggctgccaggccttcagctcccccaggtgagggagacctttgctttgttcaccgacatatcccaagcattagaactgcgcctggcaccagcaggctggatgctggctgggaaccggccccgcagctccggcgtccccgcctgcctgcgcggccttcagctggggttacggagggctcccagcgccgatccaaaccgcgttccaggcggggtgggcgggcccctggccagcgaggccgaagcaaaacaacccgcccaggcgtccagagcgtatccaaccctggagaacctgccccggaaccaagagccgcagccagctcaggcctctcgagtggggcctttccagcccctgcaacagatcccgggatctgtagttgggcggaggggctcgttatgggaaagggtcatcatcatcgaccctccatctctgcaagaattccatgttttcacgtataacctgtacgtgaaaaaaacaaaaacgtgtttttcctctgctctcacaacaatcaccaacacagaagccttctgtgaccaaatgtgtggggtttttccccacacaccaagtagtggacaccagctgggcatcctccagctcaattcccacaggggactgccagctgtcaatcagctcattagcatgcagaaacatcactttggagattctaaggatttttggagttgtatggcaggaaacagggttaaagaccagagatgtattgacttcatggccattcaacaggtgtttgacggtttgactgcatcccctgcctacctgtatgctggctgtccagctcaggcctgcaacaggaggagcctagaatgcctagcagctttggacactggggcagaagatcaggggaaaattgcggatgatctgaatgatagcagtgaccaccagcaacctacagagctgcccaaccaggaaattgtcagatggaagcaacgcttgcaggcaaagaaggctgaagcaggccaaggcaggaatgaaacagtcataaatgttggagtgaagcgactgacctccccggtccacaccccggcccagcgtcctgcatctgctggaggatggtggagaccatgtggaggatggggacttggcagtggaggagaacatggaagcaggatatggcagtcccctagcgtcccagccacaagtcctctgaagagtgtggatgacgatggtgacttaggtgcatccttcgaatgtcctgagggggagactggagaagcagacacgcaattgtgggaagaaatcaaaggcataaagaactcacagcacaagtccaaagtctga

SEQ ID NO: 647 - DNA, 1151 bp, Homo sapiens
  SIMILAR (608)..(519): 641254mologous to Plasmodium lophurae histidine-rich protein,accession number M15317,Smith-Waterman Score=153.
acaataaaatacctaggaatccaacttacaagggatgtgaaggacctcttcaaggagaactacaaaccactgctcaaggaaataaaagaggatacaaacaaatggaagaacatttcatgctcatgggtagcaagaatcaatatcgtgaaaatggccatactgcccaagagaagcttctctatgccttccacaatatctcccttaaacaatcctccagcttatctctgtctcagaactttcctaataatgaaaacaatgatggcagcaaagatgatgatgatggaggtgatgatgatgatgactgtcaggcctctgaggccaagccaaactcagcctgcctgcacccaggtgaaataaacagccatgttgctcacacaaagcctgtttggtggtctcttcacacggacacgcatgaaaatgacaatggtgatgttggtgatgataatgttgatgatgatgttgatgatgatggtggtgatgatggtaaagatgatggtgatgatgatgatggtgatacggtgatggtggtgatgatgataatgatgatggtgttgatggtggtgatgatagtggtggtggtggtggttgtggtagtggtggcaagcaggaaagcatttctatttttgattaatggagaggagagtgaactagagtctcatttaacaggctttgccaacatcccaaatcatcacttaaccgtccaacacatttatacacctacgttgccaagtggagagacaaaggagacacgttttatctgtggacccaaaactccggcgctggtcacggactgggaaggcagccttcccttggtgtttaatccttgcagggatgcctccctgattattcaaccacgtttcaaagcggcaagtcccgctattctgggggaggggcaagtacccctcaaccccttctccttcacccttagcggcaagtcccgcttttctggggaaggggcaagagcttactacaagtgccggaaatctgaccaccaggccaaggaatgcccacagcccaggattcctcctaagctgtgtcccatctgtgcgggaccccactggaaatcggactgttcaactcacctggcagccgctcccagaacccctggaactctggcccaaggctctctgactgactccttcttggcttag

SEQ ID NO: 648 - DNA, 555 bp, Homo sapiens
  SIMILAR (185)..(6): 761254mologous to Homo sapiens neutral protease large subunit,accession number M27826,Smith-Waterman Score=215.
atggaggcaagggaaacaggcccttggaaagaaggtaatgtggagcgggtagcctccgtattgattaagaaggggacgggcttaccttccactgtgagagttaccggaagctcggcgtccgtgatggtctacggggcttccgaggcgatcgggcagcatcagtcttcagccgctaagccgagaaggagtcagtcagagagccttgggccagagttccaggggctctgggagtggctgccagggcctagggctgtgaagcgtctcagggttatatttgatgaaaaagagcctaaacgctatctgatttgggataaagaaaaaggagcattaaccttgactatgcctttggctccagccacctttttaagagtaaattgctgggcaggtgggggagggctagtcacggaacgaaactgtaagcccgaccagaaaatgaaaggaattgaaattaagagaagggagagattgaagtgtggctccaagattgaaaggagaaagaggttgagggatagtgagggaggttggagaagagtagaggccgcttaccggatttga

SEQ ID NO: 649 - DNA, 1189 bp, Homo sapiens
  SIMILAR (230)..(177): 551254mologous to Homo sapiens Human gene 71-encoded protein fragment, SEQ ID NO:433,accession number Y86518,Smith-Waterman Score=48.
atgtcaggagccaagggattcacaggaggcattccaggggcaggagggggtgtgaaagagggtggggaaccaagggttggcatcctggatactgtggctgtggcacaggatgaggggctccacttgggggaaaagttggattgccctgcagagctcctcagggaggaggaaaggggcctggggaaagggtggattgataggtgtgggttcttggtctcgctgacttcaagaatgaagccgcggaccctcgctgtgagtgttacagttcttaaagatggtgtgtctggagtttgttccttcagatgtccagatgtgtccagagcttcttccttccggtgggttcatggtcttgctgactttaggagtgaagccgcagaccttcacaagtcaaggttttccggcttgggtagccaggtgtcacggcccagtgtccacctgcagctgctttctgtgtcagtcctctgcaccgccaaggtcatagaggtggttgagacaaaagagacatgttttatccgtgaacccaaaactccggcaccggtcatggactgggaaggcagccttcccttggtgtttaatcattgcagggacgcctctctgatgatacactcacgtttcaagggtgtcagaccacgcagggacgcctgccttggtccttcacccttagcggcaagtcccgctttcctggggcaggggcaagtacccctcaaccccttctcctttacccttagcgcacataagaacttccaaacacctgaaccgcagcagccaggtgttcctccagaacctcctcccccaggagcttgctacaagtgccagaaatctgaccaccaggccaaggaatgcctgcagcccaggattcctcctaagccgtgtcccatctgtgcgggaccccactggaaactggactgttcaactcacctggcagccactcccagatcccctggaactctggcccgaggctctctgactgactccttctcggcttagcagctgaagactgatgctgcccgatcgcctcggaagccccgtagaccatcacggatgctgagctttgggtaactctccctgtgattgagctgaatgagcccagatctcttctatgcttccgatttctcctaaaacctttgaaaagtagcttttaaatccatcattactcttaaaatcttcctctatttatgtgattagaaaa

SEQ ID NO: 650 - DNA, 1221 bp, Homo sapiens
  SIMILAR (4)..(300): 661254mologous to Vibrio cholerae MutT/nudix family protein,accession number AE004338,Smith-Waterman Score=320.
atgagcaaatcattacaaaaacccaccattctgaatgttgaaactgtagcccgttcccgactgtttaccgtcgagagcgtggatctggagttcagcaatggcgtgcggcgtgtttatgaacgaatgcgtccaaccaaccgggaagcagtgatgattgtgccgattgtggacgatcacctgatcctgatccgcgaatacgcagtgggaactgaatcctacgaattaggtttttcgaaaggattaattgatccgggtgaaagcgtctacgaagccgctaaccgcgagctaaaagaagagataagagttaggggccatgatgactccttcctcaagaaccatctagtgtttctggtgatttatggcacaaatggaaccttcaaccagaccctggttactgataacaatggcctagctccctttaccttggagacatccggttggaatgggacagacgtttctctggagggaaagtttcaaatggaagacttagtatataatccggaacaagtgccacgttactaccaaaatgcctacctgcacctgcgacccttctacagcacaacccgcagcttccttggcatccaccggctaaacggccccttgaaatgtggccagccccaggaagtgctggtggattattacatcgacccggccgatgcaagccctgaccaagagatcagcttctcctactatttaatagggaaaggaagtttggtgatggaggggcagaaacacctgaactctaagaagaaaggactgaaagcctccttctctctctcactgaccttcacttcgagactggcccctgatccttccctggtgatctatgccatttttcccagtggaggtgttgtagctgacaaaattcagttctcagtcgagatgtgctttgacaatcaggggacagacttaacttccactgtgagagttacccgaagctcggcatccgtgatggtctacggagcttccgaggcaatcgggcagcgtcagtcttcagctgctaagccgagaaggagtcagtcagacagccttgggccagagttccaggggctctgggagcggctgccaggaaagcgggacttgccactaagggtgaaggagaaggggttgaggggtacttgcccctgccccaggaaagagggacttgccgccaagggtgaaggaccaagtcaggcatccctgcgtggtctgacacccttgaaacaaaatgaaaggaattga

SEQ ID NO: 651 - DNA, 2244 bp, Homo sapiens
  SIMILAR (431)..(529): 961254mologous to Homo sapiens Human secreted protein, SEQ ID NO: 5576,accession number G01495,Smith-Waterman Score=158.
atggacttaatttcagagctcagacaattaaatgcacctgcagagatctgcaaggtgtattcttataactgccacaatgaggtgctagagttgctgttcctgaatcagggcatggaggacatgagtctggaatgtgagaaattcactgggatatcccctagtgcttctttctctgtgatgagaatactgagtacagccactattttgaaatgccagcgacagagtggaatctttcatgcacgtccgtgtgaagagaccaccaaacaggctttgtgtgagcaacatggctgtttatttcacctgggtgcaggcaggctgagtccgaaaagagagtcagcaaagggaaataagggtggggccgttttacaggatttgggtaggtaaaggaaaattacagtcaaagggggttacctaaagctcggcatccgtgatggtctacggggcttccgaggcgatcaggcagcatcagtcttcagccgctaagccaagaaggagtcagtcagagagccttgggccagagttccagggggctttgggagtggctgccaggtgagttgaacagtccgatttccagtggggtcccgcacagatgggacacggcttgggaggaatcctgggctgcaggcattcctcggcctggtggtcagatttcgggcacttgtaacaagttcttgcccctgtcccaggaaagtgggacttgccgctaagggtgaaggagaaggggttgaggggtacttgcccctgccccaggaaagcgggacttgccactaagggtgaaggaccaaggcaggcgtccctgtgtggtctgacacccttgaaacatgagtgtataatcagagaggcatccctgcaatgattaaacaccaagggaaggctgccttcccagtccgtgaccggcgccggagttttgggttcatggataaaacatgtctcttttgtctcattgatactgctatgattactactattgttgctattatcattgtcttcatgttctgaggtaattctgagaaatctttctttttcatccaccatgaaatactgtagaagactcaagggctctttgcctttttcttgaactggagatttaggaaccacagccctctgcccaccagtccccctcctgcactccccactcccatggccacccatggaccaatcggcacacacttcctcccctctgaggcccataaaagccctgagatcagccagagcagagcagacatcaggacaaccagctgggaaccgtctgagccaggtctgtgacttcctcttcagagctctgtggttcctggtgtctccaagcttccaggcatacccatgttccctggtgccagctgtagaagctgcctgtggtgcacctggtccagccgcagccttgcagagggccagcacctggagctgccctccccgctggaagcttggagatgccaggaaccacagagcctgaaagagggtgtcacagccctggcttggggatctcctaggtctgtgctccccaaagggctgcagctcttctatcattttgtcttctctccttgtcgcaggcgctggatctcgctgctcgtcgctgcgcgctactaggtcctgctgtcgtccgagtcgcctccgggactctccggaattgtagcggctgtagccggctccttgcctgcggcgcggagggcaggtcccagtggtaggaggatgtgttccctttgcagaatcagaccccctcctgggactgtggggaccctctgtcgccggcctccattggaggatgcgttgtccctggagctgggtgcgctgttgcgtgacctggggcctgggtggtgggcgggcctgtccatggcaaagggcacggctgcgcgctacttcccgagaacccgccagcaggctcttgggaagcagcgatttctccttagtcacagtcagagagggtgatgcgacacactgggcttcactgtgctcgtgaagcggagccagggtgaaaggatcatatggcctaaccctaaccctaatgggagtaacttcacctgcgtcccacaggccccgcaagagtgacgctgccaggcaggcgccgccctgttcggttcctgctgctgtcgctcctcgctccccaccacctccagagctccggtgggtcaccatggaaagggaagccgctgcctggagctgagtcaggttagagagctgagcaaagtgcaggggtagaggaagcagcagaaaggccctgggagctctctgggtccccaggcagcccat

SEQ ID NO: 652 - DNA, 666 bp, Homo sapiens
  SIMILAR (180)..(260): 441254mologous to Homo sapiens Human chemokine alpha-6, designated HFCET92,accession number Y14078,Smith-Waterman Score=64.
ttacccaaccaccagttcagcactctcctctagttctgggtgtctccttttggcagcccctctatgcacatcagaggagcccactatcacatggctgggtcctctgcagtcgggcagcagcactggaaggaggcttcctggaatctgcagcctctcttccagggcatgctgacagtggagttccagcaggcaggagctggttttgctggctgttcctgccaggccaagattcccagcaaaaccctgggaagcccagaggtagcccaagcagtgagcaaagacaaggtcagcctggcttgtttctgcccaagtgataacagtgtttctatttgacagtttgaaatgattagatctgcttcctatgcatggccctgctcctgcaagatggagaaggctggggggttcccctggttcccgggcattggtccttatcagcagagtcacctccagggtaactagagatggggctggttttcagttcctggcagtgatccttgggacttcctattgtgagaatgagccttttgatgcctttttaaagaaactttaattctgaatgaattctaaattaatggcttttaaacttttttgtttgtgacctatagtaagaaatataaattaccataagcttcatccaaacataaataaatataggtggaacagaaa

SEQ ID NO: 653 - DNA, 294 bp, Homo sapiens
  SIMILAR (237)..(46): 311254mologous to Homo sapiens Human secreted protein, SEQ ID NO: 5533,accession number G01452,Smith-Waterman Score=70.
ttaacgtcttgtatatgccctcaaattctccctttttgactgctctgtgaaaatagatctgggacctttaaatatttttcctttgctgactggcactgaagttttttcagtagaggacactagagagccactgacggaggaaaagattttgcttcctggttcgggtgtgttcacttcacaggctcctattgcatagatatagatggcttctccagcaccaggctctagctgtgttggcagtttttccagtgcttctttagcttctgcctgagttattttagaaacttgggagtc

SEQ ID NO: 654 - DNA, 732 bp, Homo sapiens
  SIMILAR (4)..(348): 541254mologous to Homo sapiens ninein isotype 1,accession number AF223937,Smith-Waterman Score=265.
atgagtgtacactgtgtcatagaagtaaacaagaaaaccagtcccttgagcagggagaatatatggctcttagaaaaagcagaagcatgtgaaattgcctggttacatggaacaatccagacacatcaagaaaagccaagagtacagaatctagttatattggaggaaagcattgctctcctaggccttcaagacaaagatattcggtgtcaggtcacaacagcagagttaggactggagaaaaaagttacaagagctgacaaaaaggctgaaggcaagagtcatcaccccagccaaacaaaaagagtaccttctcaaggagaaaaagaggagaagcagaaggctatttccgtgcacgtaaaagcggaatattggaacggttgcacagaacttccaaataatttttaccgccacgcaagatttagccctgaggtcttaatctcaggatttgggacagtaaaagctgtcgtccctccccctcgtccagccggtggcaagcgggtgccgccaggccaaacggacatatccgtcacgtggccagaagctggccaatccggtttgaatctcatttttttcctcttacccccccttctggagcgcgttgtgcgatcagatcgatctaagatggcgactgtcgaaccgaaccccagctccggggctcgggtgcggggcgcgcgcacgtcttccttagaccggtggactggggagctggtgggcgagtgttgccggagg

SEQ ID NO: 655 - DNA, 696 bp, Homo sapiens
  SIMILAR (229)..(179): 521254mologous to Gallus gallus alpha1 (XIV) collagen,accession number X65122,Smith-Waterman Score=50.
tttttttttttttttaaggtaaagaaattttttttaaaaaggactggtcacgtggccgatgggtagggtgcgcggttctcaacgcggcggacactcgcttgctggagggtggtttcagtcctctgctcttccgcctggatagctgcggtcacacttactgccaggcaagcctactgtgccctttgtcgccctgtcctcccatcttccccggaaggttgggaactgcaggctcagcacacacaataaggcttcatttgcttagttgaggtcccaggacaagttgcctgtgtgtttatttagttttcttttgatctcccaccattttctcttagtttcaaaaagaggcggcgatgccagagtcgtttaggcaatcaaccctcccacgtcccctggctcagctaatgctggtggtcattcgttgccatttctgcgaaaggggacggacggaaccgcccgcagtacccgcttgccaccggctggacgagggggagggacgacagcttttactgtcccaaatcctgagattaagacctcagggctaaatcttgcgtggcggtaaaaattatttggaagttctgtgcaaccgttccaatattccgcttttacgtgcacggaaatagcctaagtccagatgccagccagggaagccactccgggccccgctgactaagccctggactgatggtctggagtctt

SEQ ID NO: 656 - DNA, 983 bp, Homo sapiens
  SIMILAR (280)..(858): 361254mologous to Oryzias latipes V-Fos transformation effector,accession number AF056328,Smith-Waterman Score=182.
gaccagcaccatggcggttggcaagaacaagcgccttacgaaaggcgcgcaaaaagggagccaagaagaaagtggttgatccatttcctaggcaaagattggtattgacgtcgaaagcaccctcttatgttccattataagaattattggaaagacggctcgtcacccaggaccccaaggaacccaaaattgcaatctgatggtctccaagggttcgtgtgtttgaaagtgagtcctgctgaattgccagaatgattgaagttgcatctaggaaattcaaggctgattactgaagatgtttcaggggtaaaaacttgccctgactaacttcccatggggcatgggatctttacccgtgacaaaattgttgttccatggtccaaaaaatgggcagaccaatgattgaagcctcacgttgaatgttcaagacttaccgattggttacttgctttcgtctgttctgtgttgggttttacctaaaaaaccgcaacaatcagatacggaagaccctcttatgcttcagccacccaacaggtcccgcccaaatccgggaaggaagatggatgggaaatccatggacccgagaggtgcagaccaatggccttgaaggaagtggccaattaattggtttccggaccaccatttggaaaggacataggaaaaggcttgccaaatctatttatcctcttccatgatgtcttcggttaaaaaagtaaaaatgctgaaggaagcccaagttttgaattgggaaagctcattgggagcttccatggttaaggcagtaggtcctggaaaagccattggggatgaggacaggtgtcaaagttgaagcgagctgatgggtatgataccaccgttccaagaatctgtttatagttccgacttccaatagtgggcaatagaagtggccattgtgtgaaaaaagaaaaacaaagttcacgccgccgcgattttggtgttagtgtccacccgcggattccgcc

SEQ ID NO: 657 - DNA, 1860 bp, Homo sapiens
  SIMILAR (1)..(516): 901254mologous to Escherichia coli Arginine binding protein artI,accession number D90724,Smith-Waterman Score=778.
atgaaaaaagttctgattgccgcgttaattgcaggttttagtctttccgccacagctgccgaaaccattcgttttgctaccgaagcctcctatcctccgtttgaatcgattgatgcaaacaaccagatcgttggttttgacgtcgacctggcacaagcgctgtgtaaagagattgatgcaacctgcactttctctaaccaggcgtttgacagcctgatcccaagcctgaaattccgtcgggtagaagccgtgatggcgggcatggatatcactccggagcgtgaaaagcaggtgctgtttaccaccccgtactatgacaactttgccctgtttgtgggtcagcaaggcaaatacaccagtgttgatcagctggaaggcaaaaaagtcggcgtacagaacgggccgacacaccagaaattcattatggataagcacccggaaataacttacgtttccgatgaaagttaccagaacgcaaaactgggatttgcaaaacggctgtgcggcacgtgcggcccccggttcacggcgttacggcggttggactatacaagcctctacggcgaggccaagcgacgtgctattgaccgccgattccgtgtctttcgcggtgcgctcccgcggcgcggcagcgacggcgtaccaccgctgctgtctcagtggggtcatggtcaacgcagcgactgcctgcgagcacagtacggcatcgcagggcagagcgtcgcgcacggttaccgactccgcagatccccatccgagaagtgtgagaaggcgggcatcatttcggcggtcagggcgcggattctgcggcaccgttcggtagcgcctctatcctgccaatcaagctggatgtacatccgcatgatgggcgcagaagggctgaaaaaagcaagccaggtggcaatcctcaacgccaactatattgccagccgcctgcaggatgccttcccggtgctgtataccggccgcgacggtcgcgtggcgcacgaatgtattctcgatattcgcccgctgaaagaagaaacccggatcagcgagctggatattgccaagcgcctgatcgactacggttttcacgcgccgacgattgtcgttcccggtggcggcatgttttccatggtactagccgacactgtgcaggtgatcgtgcagtccggccgccaccccacagtgctgcagaagctctgccagttgcccttccagtatttcagtgacccacggctgatcaaagtactgttcccttcacttatcgctgcttgttacaacaaccatcagaacaagatcattctggagcaagagatgagctgtgttttactggccactttcattcagacgcgggcccaacaacggaaatacaagcgccgcaacaaccgcggaataccgcgcgagtcaaccgcgcgcgaacaggcgcgccacaacgcgaacaaggcacaacaaccgcgaaaacacgccagaaacggcgcatcacccgcccaacagcggaaaaatcgggcagcagcgcgagacaaggacgaaaaacccgcgcaacagaaggacaaagcgcgacaaagcgcgccagagaagaaaaaccgcgccatacggggcacaaacagccgcgaacaagcggcaaaagccgaacgaaacaggcgccaaagggggggccaaaagggcgcccaaggcgggcagcaccgcgaggaggccggggagccgacgtatgttgacgagaaagcgcaggccgcgaccagccccccaccgcaaacgccacaccccgccccggaccacgacgacgcggaagaccaccgcacaagagacacgaaccgaaacgcacaccagccaaaggtgtacacgcacaaagacacacccacgaacgagagcaggtga

SEQ ID NO: 658 - DNA, 2187 bp, Homo sapiens
  SIMILAR (10)..(1743): 771254mologous to Homo sapiens MSTP063,accession number AF119814,Smith-Waterman Score=2056.
ctttaagttgaagaagtggagcatctttccttgaagaagtacattattgacattgtggttgaaagtacagctccagcagaagctttgaaagatggagaagagcggcaaaaaaataaaaaaaaagccaaaaagataaaagcccggatgaacttcagggctaaggaatatgagagtttaatggaaaccaaaaattctggctctgattcaccttataaagcaaagcttcagcgattagccaaagatcttctaaaacaagtacaagttcaagacagtggctcatgggcaaacaataaagtgtctgctttggatcggaccctaggagagatcactagaatactggaaaaagagaatgtggcagatcagattgcatttcaagctgctggtggattaacagcccttgaacacatccttcaagcagtagtcccagccacaaatgtgaacacagttttaaggaattcctcctaagtctctctggcaatgcaattcaatgtttacaaccttcacctggcaattaactgtttcaggaaaacttgcagtgatgttctgtttagtaacaaggtttaccttcttaatggggcctcctgatacaccagttgacggtttatgttccagatgaaaataatactatttgggggagaaatacaaataaacaagttttgaaaggcttgacaactgggacttctcaaagtcagtgctgtgggttttggggctgcctggattgccaatcgaccaggtggggaaactgccagccaggctaccccaaaaataccaacacaggaaatgaaaaacaaaccctcacaaggtgatccttttaacaatcgagttcaggaccttatcagctacgtggtgaacatgggtctgattgacaaactgtgtgcctgcttcctctcggtgcaaggcccagtgggatgaggaatcccaagatgggccatatttctggcaggcatgccgcaggactcttacatgcaatgtgttacactgtgctttgctgtcactggaaggtcatacagcatatttgacaataatcgccaggatcccacagggctgacagctgctcttcaggcaaccgacctggctggagttcttcatatgctctactgtgtcctcttccatggcaccatcttggaccccagcactgccagtcccaaggagaattacactcaaaataccatccaagtggccattcagagtttacgtttcttcaacagctttgcagctcttcatctgcctgcttttcagtctattgtaggggcagagggcttgtcccttgcattccggcacatggccagctccctgctgggccactgcagccaagtctcctgtgaaagcctccttcatgaggtcatcgtctgtgtgggctacttcactgtcaaccacccagataaccagggtgatcgtgcagtccggccgccaccccacagtgctgcaaaaagctctgccagttgcccttccagtatttcagtgacccacggctgatcaaagtactgttcccctcactttatcgcagcttgttacaacaaccatcagaacaagatcattctggagcaagagatgagctgtgttttactggcccctttcattcaggatttggcacagactccaggtcaagcggaaaaccagccttaccaacccaaagggaaatgccttggtttcccaagactatcttgagctggctaacagattttcctcaggcagggcctggggaaagaagctcgacagtttttcttgaaaaaagagaaaaaataaatgttttggttgattctgtatttgagtacccttgttaatattttaaattgtccaaacaaacattctaattgttccttaagaactcattttcccatgtttatactcttcccacactggtagatatggcatgtactttacactatttataatgactgtagatacttgaatgttctacttgctaattttgcaagttgagtttatttcatttatgcagagtatcttggagtttggtaatttccatcttatgataatatatactttgcatttgtgatatgggtgaaaggagacataaaattagcaagtctgttttgttcttgtaataaagtaacttattctgttttcattgttgacttttcatgttaaggaaatacgaatctgaaagaaaaatgttaactccagctcttgaagtatcttaaataaagacttaattaaagtttaaaa

SEQ ID NO: 659 - DNA, 559 bp, Homo sapiens
  SIMILAR (347)..(198): 381254mologous to Mus musculus alpha-1 type IV collagen,accession number M13043,Smith-Waterman Score=62.
  misc_feature (1)...(559): n = a,t,c or g
agcaaatgaatgagcatcacaagagagcctacacctatgccccctcttacgaggacttcatcaagctcatgaacagcaactctgatgtggagttcttgaagcaactagggtatcaaattgtaggggaaataatccaggcgactacaattagcagctttccccaactgaagagggaccccggtattgaaactggggcaatgaaagctgatctcctgagggccaggaacatgaaaaggttcatcaaccaactgactgtggcgaaaaagcagtgtgaagaagagaatcccgaatcccctgggaggccctgccctatgacccagcaagaggatggggcccctggatgagggggaagggcctcaaagccagaagctctcggttcctacttcagctactcatctgtgatgttcccctgcctccctattccagtgatcagccttgactttcttagtttctggctagtctctgtttagagcctctgcaggaagggccagccccagcattacgnccagggtttnttacagcatttttacacaagttggttgcaaattgcagcttccaa

SEQ ID NO: 660 - DNA, 693 bp, Homo sapiens
  SIMILAR (304)..(489): 1001254mologous to Homo sapiens unnamed protein product,accession number AK026254,Smith-Waterman Score=329.
atggatttaagacttgatgagtttttattttatcctaatttgtattcatttgttcattcattttccaatgtgcttattccagttcaaggtcatgggtggctggagcctgtcccagcagctcagggtacaaggtgggaaccagccctggacaggacaccatcccatcgcagggtgcactcacacatccacactcagtcacactgggaccatatagacatgccagctcacctcatgtgcacagctttgggatgtgagaagaaaccagagaaaacccacgcagacatggagagaaaagacatattgatgtctttgactgttggaaaccttgcagagcaagaatttgtaaccattgcacgtcactaccgtgtgcctgagggcacatgttcagatatggatttcttaatcgcactggcccacgaaaagttcaagaaaaatatgtttgagaatttcgacactttcatttattcctgtgtgtatgaagatcgagaaaactgtgttctaggcattgtgatcattgttttggatatattatctcatttactttttgagaacagcttgaccattcccctaaatgatgaggtgacctttgcaatagaggagaagaaggctcctcttcagcaaaatacagctgccactgagccttttacctctatcaagggtggaaatagagcagttcaggattattccccgtag

SEQ ID NO: 661 - DNA, 706 bp, Homo sapiens
  SIMILAR (430)..(540): 481254mologous to Homo sapiens TGR-CL3C,accession number A27282,Smith-Waterman Score=67.
atggactctggggtctgtgtgcagaaactgggctctaggatgaatgtcacaattagttccatgtgtgagaaagggataaaatccttaatatccatgacggtctggtccgggcatcctgttccacctcatctctttctctgccttgtttcctgcatggcagccgccctggttttcagcccatcaaatgtgaaaactactaactcagactgcactgaagctgactgtggtcacctggcagaaattgagtctcagtttatcttggaggttcttgaagaaagggctgttgacgaaagttctagaaaatacctctgcccatttgcttgcttacaaaagtgctctgtgtcctgtggccgaggcgtacagcagaggcatgtgggctgtcagatcgggacacaccaaaatagccagagagcctgagtgcaacccataccccagcccggagtcggaacgcgactgccaaggcccacggtgtcccctctacacttggagggcagaggaatggcaagaagtaagtagagccacaaaggggtacctgccaggcatttcacgtgtgcgccccttgctatcctcacatctgttccctataaagccagagaagtctccgagcacggttacaatgctggctctttcccaaaaggttcactgtcagactcgcgcattcgctccaacaagggtgggagatcttcttgtttttaagcaattccta

SEQ ID NO: 662 - DNA, 990 bp, Homo sapiens
  SIMILAR (184)..(918): 641254mologous to Homo sapiens cytokeratin 18 (424 AA),accession number X12883,Smith-Waterman Score=754.
atgaggaaaacttacggaatttgtgagaaagtatcaaaggataaaatatttgagtccataggagttagagaagcagaagagaaaaataaagggacaaaaagtgtatttaaagaaatgatagccaaaaaactttccaaacctggagaaagctctgtccttgcgaccacctacggcgcccggctggtcagcagcacagccagagtctatgcaggcgccgggggctctggttcccggatctctgtgtcccgctccaccagcttccagggcggcttggagtccgggggcctggccgcggggatggccgggggtctggcaggaataggaggcatccagcacgagaaggagaccatgcaaagcctgaaagactgcctggcctcctacctggacagaaccatccagaacctgaggattcagatcttcgcaaatactgtggacaatgcctgcatagttctgcagattgacaatgcccgtcttgccgctgatgactttagagtcaagtatgagacagagctggccatgcgccagtctgtggagaacgacatccacgggctccgcaatgtcattgatgacactgtcactcggctgcagctggagacagagatcgaggctgtcaaggaggagctgctcttcatgaagaagaacctcaaagaggaagcaaaaagcttacaagcccagattgccagctctgggttgatggtggaggtagatgcccccaaatctcaggacctcgccaaggtcatggcagacatccgggcccaatatgacgagctggctcagaagaacggagaggagctggacaagcattggcctcagcagattgaagagagcaccacagtggtcaccactcagtccgccgaggttggagctgctgagacgacgctcacggagatgagacgtacagtgcagttcttggagatgacatggactccaggagttatcgaggtcctcagtgtttttaagtacagggtcatcactgaagttgctttgtag

SEQ ID NO: 663 - DNA, 1192 bp, Homo sapiens
  SIMILAR (109)..(690): 751254mologous to Homo sapiens cytokeratin 18,accession number X12881,Smith-Waterman Score=653.
aagaagacctggaagccttaggcctcgatacgcatgtgacggggcgacccacgcgtgcggcgacgtacgcaaagcctgagtcctgtcctttctctctccccggacagcatgagcttcaccactcgctccaccttctccaccaactaccggaccctgggctctgtccaggcgcccagctacggcgcccggccggtcagcagcgcggccagcgtctatgcaggcgctgggggctctggttcccggatctccgtgtcccgctccaccagcttcaggggcggcatggggtccgggggcctggccaccgggatagccgggggtctggcaggaatgggaggcatccagaacgagaaggagaccatgcaaagcctgaacgaccgcctggcctcttacctggacagagtgaggagcctggagaccgagaaccggaggctggagagcaaaaatccggagcacttggagaagaagggaccccaggtcagagactgggagccattacttcaagatcatcgaggaccttgagggctcagatctttcgcaaatacttgtgggacaatgcccgcatcgttcttgcagatttgacagtgcccgtctttgctgcttgattgattttaggagttcaagtattgaggacagagctggccatgcgccagtcatgtggagaacgacatccatgggctccgcaacgtcatttgatgacaccaatatcacacgactgcagctggagacagagatcgaggctctcaaggaggagctgctcttcatgaagaagaaccacgaagaggaagtaaaaggcctacaagcccagattgccagctcctgggttgaccgtggaggtaagatgcccccaaaatctcaggacctcgccaagattcatggcaagacatccgggcccaatattgacgagctggctcgggaagaaccgagaggaagctagacaagtactggtctcagcagattgaggagagcaccacagtggtcaccacacagtctgctgaggttggagctgctgagacgacgctcacagagctgagacgtacagtccagtccttggagatcgacctggactccatgagaaatctgaaggccagcttggagaacagcctgagggaggtggaggcccgctacgccctacagatggagcagctcaacgggatcctgctgcaccttgagtcagagctggcacagacccggg

SEQ ID NO: 664 - DNA, 396 bp, Homo sapiens
aaactatactaccagtacaaatatttcctgaccaaagaaatgtgtcacacttctttcatctttgttttgtttggttctttattttgtgagcaacatcatcatcacactcccccatgaagtgaaactaggcacgtggtcattctcatgaaaaaaattaaaccatttttttttcctcaactaaacttaaactaagcgagggccactgtgaaaaagcatttctttacacatcaaaattttcttaaggaaaacacacaaagagacaatgaattcccaaagtatgatttttaatgatcttccaataaacagctctttgtggcaaaagtgactgtgaactgggtggtccaaccagagggctcctggaagtcaggggagcggtgctcctgttaaatcacacat

SEQ ID NO: 665 - DNA, 560 bp, Homo sapiens
  SIMILAR (423)..(470): 431254mologous to Mus musculus mCMAP,accession number AB029637,Smith-Waterman Score=43.
ttacagttcacccatgtcatcaacattcagctgagaacatctacagtaaataataagcccattaggactgtccgaatcagctaccagatgagcacccaaaatccagaaatctgaagtgctccaataagcatttcctttcacagcatcatgaaggtgctcaaaaagctttagatttgggagcattttggatttcagatttgggatactcaaccagccaagcctcatggacacagagttgcggagctcagtctcccctgcacagatggctgctactaatccaattcttattttctttattgcatggggacacctcccagtggggtcaggccgtcttgccctcgggaggtcttcatcccagcagactccctgagtcggccccgggagctcctcagcttgcctggctgcctgtgtcttctgacacgtgtgttcttcccctgtgccgactatgtctactctgcgccttttgctgtcctcgttgacgaggcgctcctctgccactccacgcttactgctgcccgggcactctgtctggtcagcattccagaaaatggatcctactg

SEQ ID NO: 666 - DNA, 396 bp, Homo sapiens
  SIMILAR (58)..(5): 521254mologous to Homo sapiens GHRH receptor splice variant 4,accession number AF282262,Smith-Waterman Score=53.
atggaggagctgcagccgctgctggtgcaggaggcagtggactccatcctgaacaatctggagagagagaacatccggaatatgcaggttctaaaaaataaaatgaaaagaagtcgtgctaaattggatcagaaatattacaggagagttttagaacttatatttcctgtggccagtgtttatcctggcagtaaggatctctcctgtaacaagccagagctctccaaggtaccagactcttcttactacacaggtaacaacgggctggcagctgaacggactaagacaactaactattatcgctattgttgtaacgccaaaggttcttgccttagccaagccaaagaattggtgtggcggctgcctgccgcgagtgatagagacacggaccaatag

SEQ ID NO: 667 - DNA, 1046 bp, Homo sapiens
  SIMILAR (483)..(983): 1001254mologous to Homo sapiens p20-CGGBP,accession number AJ000258,Smith-Waterman Score=870.
gccgccgcggggctcgatcgggcaacggcggcgacggcggcagcgacggatcctcctcctcccttattcccttgctcctctttcttccttttcttttcctttccggccgggcctcgtccactttgcctaacggcggcctcgatcctacgtaaaggcatgacttcctgggcaccacagggaaaatcgggtgcaagcccagaaactatttccccaccaccacttgttgaaaaactgatttgaaggcatctccggggttgaacaaacggaaagtgccaggatttgatgcgtctctggtttcgctctggagaccattccctgctaagtatcaagaccgaaaaaaactcggaaactaatccgaatttctgtggaatgtttaatcttctggatccatgactgtctgatacgttggcaatttaaagtccttttgaaagagagttcatgttacccagctattctctaaaccatatttatttagagtcagaatggagcgatttgtagtaacagcaccacctgctcgaaaccgttctaagactgctttgtatgtgactcccctggatcgagtcactgagtttggaggtgagctgcatgaagatggaggaaaactcttctgcacttcttgcaatgtggttctgaatcatgttcgcaagtctgccattagtgaccacctcaagtcaaagactcataccaagaggaaggcagaatttgaagagcagaatgtgagaaagaagcagaggcccctaactgcatctcttcagtgcaacagtactgcgcaaacagagaaagtcagtgttatccaggactttgtgaaaatgtgcctggaagccaacatcccacttgagaaggctgatcacccagcagtccgtgctttcctatctcgccatgtgaagaatggaggctccatacctaagtcagaccagctacggagggcatatcttcctgatggatatgagaatgagaatcaactcctcaactcacaagattgttgactaggaggttaccaccattgtgatcaagataaatgtggagtattaaagttatgtgttgat

SEQ ID NO: 668 - DNA, 4522 bp, Homo sapiens
  SIMILAR (673)..(1134): 961254mologous to Homo sapiens p20-CGGBP,accession number AJ000258,Smith-Waterman Score=758.
gttgcccttgggccccagaattcggcccggggttgcggggttccccaaggagctcacctcccattgggggcccccccccccccccccttaccggtgttccgtgttaacgttccccccgtggggaaaaaaaaaaaaaaaaaaacaaaaaaaaaaaaaaaaacacaaaaaaaacaaaaaaaccaaaaaaaaaaaaaaaaaaaaccagctgctcggcggttgctggggaccgcctacgggctctgccataggcggtgcaggcggacggggcgcggcgggggacacggcggccgccgcggggctcgatcgggcaacggcggcgacggcggcagcgatcggagtcctcctcctcccttattcccttgctcctctttcttccttttcttttcctttccgggcgggccctcgtccactttccctaacggcggcctcgatcctacgtaaaggcatgacttcctggcaccacagggaaaatcgggtcgcaagcccagaaactatttccccaccaccacttgttgaaaaactgatttgaaggcatctccggggttgaacgaacggagaagtgccaggatttggtgccgtggctggtttcgctctggaggaccattccctgctaaggatcaagacgaaaaaaactggggaactaatccgaaccatatttatttagagtcaggaatggggcgatttgtagtaacagcaccacctgctcgaaaccgttctaagactgccttgtatgtgactcccctggatcgagtcactgagtttggaggtgagctgcatgaagatggaggaaaactcttctgcacttcttgcaatgtggttctgaatcatgttcgcaagtctgccattagtgaccacctcaagtcaaagactcataccaagaggaaggcagaatttgaagagcagaatgtgagaaagaagcagaggcccctaactgcatctcttcagtgcaacagtactgcgcaaacagagaaagtcagtgttatccaggactttgtgaaaatgtgcctggaagccaacatcccacttgagaaggctgatcacccagcagtccgtgctttcctatctcgccatgtgaagaatggaggctccatacctaagtcagaccagctacggaggcatatcttcctgatggatatgagaatgagaatcaactcctcaactcacgagattgttgactaggaggttaccaccattgtgatcaagataaatgtggagtattaaagttatgtgttgattgtgtggttcatttttgtatttatttcatttaaaatcatgtgacgcagaatagttttgcaatgtgtatatagttgcaggcaaaaaaaaaaccacctcactgcaaaacttattgttaattttagtcaccaatggtataaagcaaaacctaggtttagagtgtgctaggatacctgaaacctgatggttatctttaaaattaatggtttttctcctgaaatgtttgtgcatggaagaactgccctgcttttttaccctgttgccatgtatgattattccttgtgagattacttaattacttggattgaagactagcctattgaagctgctgccaggcaacaccacttaacagtaacttaaaggaattattttctttagaggatcctcttcaaaaaggaagggatagtggaaaactgttcttatatcttcagatccctagcagaaatgactgtttatttcaaactatgttttacttgtatatgatgtagtcaccttaactatctttcaattccatacttcccccgcccccattttaaaggcttattgttgtattttgtagcagcttcaagtgaccaaaagactaaaatctttcaacgtcaatgccaaaagccaaggggaattttgcagtgataggattttagtctcttactatgaatactaatttcgaaccatagctttcattttaagcatcatcttgaatttctaaacttttttctatgtcttggtgttaaaagatttcaagattggcatttttacttaaacagacattttatggttgagttttctctttattatagagaattagtaatctttttttggctgacagatcagataaaattactttctattcattaatttttctctacaactttatgagtttatctaggtgaatagtctagactagaaacaagtttactttatctgctttgcctctggtggtacaaggtttttaacatggattgtaaacaattgtctagaaattctggcaggttttttgtattggagatctggcagtatcctgcataactttgggtgaggaaattgttctcttaaagatcagccatgttcaggaaatgatctctgtttgaacctcactatcctgtaaggttatccaagtagcttagcccagctaagttctatcagagacccaaattatattttttaaaaatttaacagctggaaacttggactagagctttaataaaaaatcttaaattctttgaaattcaagttaaaaatacttatatatttctattacaaagcagtgacaaatgatgccctgtgtgacttggagttatctttgacttttaccacaaatcttcatttataaaagaaaaagccaaagtgaaaaaaagttagattgtgtatttttcagtaacagctttccatgtcttaagatttttttacagacttaagtttctaattcaggttgtcaaactggccatttgacttcagagatttgttttcattaaaaaataagcctgccgccaaaataaatcacttatcaaaatgtgaactgttttcctcatgttcagttatgttaaagtagtatgataaatgcatgcctagagtagtgctctcgttgatgaagcacatgtatgaggagaccagcagcaaaacataaccatatgtgttttgcgtttacttcctctagaaaagaatttgcaggcaaccatgtttaatttgaactatctaagatggtagattttagaagctaggaataattgagttttatagcactattttcagaatacaaaaagatacacaatcattctgttttttgaaattccatgtgattcaaactgttccctattatttgggtattaatttgcactaatagcaaaatgtaatggcagatcagctttgagagtggacctaagcagtaaactggatgatgttgcattagaaaaacatcaataattcatatttaagttttagtagttactactgatttgataatcacttaaattttatatatcttaatgtattttttcagactcctaattaattcccacattcactgtaactaggggcatagtccattctgttaggattatatcctctccttagaaatgttttccatcctgttgtggggatttggtattaatgtttcttcattgattatggaacttttgttccctgaagctagttaactgtgtctaaagttaaataaatacagcagaatgattgttttagcctgctcgaactgatacaaatccctgaaaccatgattggcatatgttagataacaaatgaggatgtctaagaggcatatgctgctttggaggtgtagtgaacgtgtgtacagaagttttcaatcttaactatatagtgttagtgtgatgctatactattggaaaaatagcagcttttttctattttataagttgtatgcataaacataagatttgtaatgtttcatttataaactgccttcttcaacacatgttaatagtgttttctcaaagtattgatagtatgtcctccagaatttcacaatatgcttacagtaaatatttcctagcttgttgaaatgttcaattctttgttggctttcttcttgattctgtgggggtgtataacaagcctgaaggacattgtaatcatttcttacaaggtgaaaattaagaaagattgtgtatgagagcctatatagttgttttatccattatcatctttgattaagactttaaaaaaatgctatttccagttaatgcatttggccctattgaattttcagggaccagaaaacattaaaaagttctgcatcttataatggtaaccaattaagcttgagattgttctgaaagtatcaattgctttaaaactgttgtaagtacagttggcaagatctccaagctgaaacttacacgttaaaacttttgcctgtaagaatttgcacatgaatgttaatggaaaacacaaaactttagatggcccaaaacaaaagccacaaacagttcatcatttggtgcttagtctttgtaagggctctctgtggtttgacttactccagctaccgttaaatgagggcaaatcaccttaaaacatgttcatttgattcataacaaggaaaattgggtctatgattttttgccaatcttagcctaaaagaaattgctttagcttctggtcagcactgattaaaatgtgaatagtgaagtggctatcctaaactggtttatctccacccacactatcatagattccttaggtaaatacaattcttatctagtggtattctacttgtattcagaatactgtattaaaattttactatttcattttt

SEQ ID NO: 669 - DNA, 672 bp, Homo sapiens
  SIMILAR (607)..(666): 851254mologous to Homo sapiens Human secreted protein, SEQ ID NO: 4393,accession number G00312,Smith-Waterman Score=80.
atgatggaaggcgaaggggaagcaagcagcttcttcacaaagtggcaggaaggaaaagagagagcgaagggctggtggcccattgccactgactgctcacagccattgcccgttttagcaagggagccatccagctcaaagttatgcctcatctctgggggcagcccacatctggtgattggccgatgtgggattataaagaattaccagttgacacagtacagtgggcagccatttaagcaaagagaaaattcaagcatgggccacagaccagcagcatcagcagcatcagcatcctctggcagctgtgagcagcgtgtgagaaatgctgattcttgggcctcacccaagtcctgtagtatcagaatctgcgttttcacaagacccctagccatggaacgaggactggagcccccagctcagacctggacactcaccacgatccacccacaggtttgcagagtacagcgaggcaacaaaggaacagaagacagcaagaaaacctcacttcgaccccctgttattccatctctcaccccaccaatcagcactccccacttcccaagaccctacccgccaaatatctttacaaactccgatcctggaatgctcggggagactgatttgagtaataataaaactctggtctcctgcacagccggctctgtatga

SEQ ID NO: 670 - DNA, 371 bp, Homo sapiens
  SIMILAR (291)..(178): 401254mologous to Amsacta moorei entomopoxvirus AMV095,accession number AF250284,Smith-Waterman Score=66.
tggtcaaaaactgccccaacataaagccatctgtaaagatggggagaggttttcttttgtttgtttgttttttcttttggctccaggtgtttaacgaaactctgttaaaaccctagctgattactaagcaaatggaatagacttcagcggccccacatgaccaggaatatagagcttataaaagtagtttagtaaagtcactaaacaagcaaacaacaaccactcacaataagcagcagtaataagccctggggaggggatagaatctgatctgatgctgaaagcaaaagagccaacaaagaattctatatttagcaaaactgtccttcaaaaatgaaggagaacataagacattcccagacaaacaaaag

SEQ ID NO: 671 - DNA, 459 bp, Homo sapiens
  SIMILAR (339)..(133): 301254mologous to Simian immunodeficiency virus vpx protein,accession number M83293,Smith-Waterman Score=72.
atgtttgtggtcatttattacagcagcaagaagaagctattgttaatagaagactcactagttagaattctgaagagagaagctgatcaagaggaagaaccatgtgggcccacagaccagcgccatgtggaaaggaagcggcccatcctccccaggggagattcaatcaccgacacattggcatcccctggaagcttgttagaaaatgcagggcccttgccagagctacagatccagaatctgcattttgacaagagtcccagggatccaaaactggccacactgagaattgacttgaattgtaagagacctgtgaatcagcaagattgccggtttatttccagtagaggctataaacttatcggccaccagctaggacatcttgtttttgactcaagctgtgtaaactgccatacaagccatcagaagaagatgacccttgctatgaagcggaaataa

SEQ ID NO: 672 - DNA, 392 bp, Homo sapiens
  SIMILAR (19)..(309): 981254mologous to Mus musculus TLS-associated protein with SR repeats,accession number AF042383,Smith-Waterman Score=516.
ccgagacacgccgccgccatgtcccgctacctgcgtccccccaacacgtctctgttcgtcaggaacgtggccgacgacaccaggtctgaagacttgcggcgtgaatttggtcgttatggtcctatagttgatgtgtatgttccacttgatttctacactcgccgtccaagaggatttgcttatgttcaatttgaggatgttcgtgatgctgaagacgctttacataatttggacagaaagtggatttgtggacggcagattgaaatacagtttgcccagggggatcgaaagacaccaaatcagatggaagaccacggcgtagcagaagccattccgacaatgatagaccaaactgcagctggaatacccagtacagttctgcttactacact

SEQ ID NO: 673 - DNA, 716 bp, Homo sapiens
  SIMILAR (112)..(714): 991254mologous to Mus musculus TLS-associated protein TASR- 2,accession number AF060490,Smith-Waterman Score=1050.
tcggttgccgtatcaaagccctctatctgtgtgtgtctgaggctcggccgcctgagccgcggacggtttgctgagcccgttagtgcgcccttttctttacacgccgccgccatgtcccgctacctgcgtccccccaacacgtttctgttcgtcaggaacgtggccgacgacaccaggtctgaagacttgcggcgtgaatttggtcgttatggtcctatagttgatgtgtatgttccacttgatttctacactcgccgtccaagaggatttgcttatgttcaatttgaggatgttcgtgatgctgaagacgctttacataatttggacagaaagtggatttgtggacggcagattgaaatacagtttgcccagggggatcgaaagacaccaaatcagatgaaagccaaggaagggaggaatgtgtacagttcttcacgctatgatgattatgacagatacagacgttctagaagccgaagttatgaaaggaggagatcaagaagtcggtcttttgattacaactatagaagatcgtatagtcctagaaacagtagaccgactggaagaccacggcgtagcagaagccattccgacaatgatagattcaaacaccgaaatcgatctttttcaagatctaaatccaattcaagatcacggtccaagtcccagcccaagaaagaaatgaaggctaaatcacgttctaggtctgcatctca

SEQ ID NO: 674 - DNA, 578 bp, Homo sapiens
  SIMILAR (119)..(72): 871254mologous to Rattus sp. sterol carrier protein,accession number M10951,Smith-Waterman Score=73.
tttttaaaacaaagttcactttattacattaattttacacactaaaataatatgaaatgcagacttgtttaaattctcttgctgattctcttgaagacaatgtcacccaatgtcatggtctgaaagccagaaaagaaattatgaagtgttcatctgatgttgtattgtaaaaaacaaaattaagcataaaaaacaaaattaagcttaaaaaacagcaccaaatatgttgggcatatgaaacaattcaaaaattcgtctggtttcctgtagggaccggaggaaagggttgggcaatgttttccaaaatcctatgccaggtctttggtcacttctcctcctcacctggaaagtcctccbgcctttgacttgaattcttttctacatcaatgactggttatagcaagaccatccaaaccagccccaatctaatttctcaaaatttcattgagtacctactatgcaccaaatacatgttgagcaccaaggatacatgtacatggacacaactaggcacacagcctggaaggcagtgggtagtgcataattgtcctcctatagctgtgaagcatataaaaaca

SEQ ID NO: 675 - DNA, 688 bp, Homo sapiens
  SIMILAR (537)..(223): 551254mologous to Homo sapiens L-FABP,accession number M10617,Smith-Waterman Score=181.
  misc_feature (1)...(688): n = a,t,c or g
gattaaattgggaccccccgggtttttcccttccccccctttttaaaacccggcccggccccaattaaaatttaccccccccaaaaggaaaaagcttgggggcccctnnnnnnnnnnccccnnnnnnnnnnnnnnnnnnnnnnnnnnnnnnnnnaaaacaaagttccactttattacattaattttacacactaaaataatatggaaatgcagacttgtttaaattctcttgctgattctcttgaagacaatgtcacccaatgtcatggtattggtgattatgtcgccgttgagttcggtcacagacttgatgtttttgaaagttcgtcaccagttttatggtcaccttccaactgaaccactggtcttgactttctcccctgtcattggtctccagctcacattcctcccccaccgtggaattcggtttggggatcacttggggacccagcgggtgatggggtggaacttggaaggtgctttccccattctggcacggatttccggacacccccttggatatcctttccccttctggggatgaggctctttccgggcaggaccggatttgcctttcatggagggggttcaaaggtttttccgggggttctgcaggttggggacttgccgggaggaaactcatggggggggcaatagagctccctcttcacgactgacctgcggctct

SEQ ID NO: 676 - DNA, 501 bp, Homo sapiens
  SIMILAR (265)..(164): 321254mologous to Gallus gallus retinoic acid receptor-beta isoform 1, RAR-beta 1 {N-terminal},accession number S75943,Smith- Waterman Score=62.
atgagcaaggatgctggtatctcagatttcaggagaactgtgacccatgcagggggtttgagtcccggtgaaagtggagaccctgtcatcctgagaatcatccccagggggaaaccatctttttctaaggcggaatttctcaacggtggaactactgacattttggaccaggaatggatcccagtatggggccagaggaaacctggtatggggcagagggaaacaggtgctggaggtgactaccatcaccctctatgggaaatgtcggccaagctgcaggtgacctccagaaagagtacaagggatgctgatacagcttctatgtttgtccctccaagctacatgttggaatttgatccccagtgttggaagtgggacctaatgggaggtcaacagatgtcctctctgttcctggtcaccgtgctaggtgtggaggacacagagagggagaagacctctctgccttcttggagctcacaagccggccttcctattccctga

SEQ ID NO: 677 - DNA, 435 bp, Homo sapiens
  SIMILAR (291)..(419): 341254mologous to Hepatitis B virus S,accession number AJ003027,Smith-Waterman Score=70.
ctaagtgagatcccaggttcccaggtgggagcaggacagctgactggcaagacagccaagggtcccaaaaggaacggagtagaaacaggcagggaaaggggaccgcaagggggcagacttttcttcctcagctcctcttagcttgaagggctgataccaccatccggttctggagcccagccgccattcagcaggccctgcccacttgccaaggaccttccccaagccaggcatctccggagatggtatggagcctggggtagctcggccaggcctttgatcaccagcgatgccattgctcttccccgtttcgcgtctgctgtggcttgctgctgaggctgctttcagacctctgggctttagggaatttcctagaaccgtggccaacagtaagatggtgctaccctgatctgtgcattcaggacactgattcat

SEQ ID NO: 678 - DNA, 784 bp, Homo sapiens
  SIMILAR (679)..(512): 311254mologous to Zea mays extensin-like protein,accession number AF159297,Smith-Waterman Score=61.
atgacctcagagatctcttttccacctcttgatagtgatgactctgaattaaccgtggtgctccgagccccccaggacctggcaactctgtccctcccccacggggaacccgcgctcatcccctcaggccccaggcggcgaagcttaggggttgttaagctaatgggaataggctacgggctgtttcctggtgctgtaggaggcgctggaactggagccttgcatccgaatgacaaagtgcctgccttcccggagcttacattgagtgcggaggacagaccagggactagccagcagacagtcccatgtgtcagggtctggtgtttgcagagggtgtttgcaggggtagagcatgacaggaagtggctgttttggataagacgatcaggaaaggtacccgtctgcggaagtgatactgggtctggagtgaagcggttggaagaaaactgcacctctctggaggaagacagtgccaggcacagctgaaaatccggggctagagctactgggaggaacaggaggagcagctgggaaactgggtggccggagcagacggggagggtgagcagggagggtaaagataagcaagcaaggggctggggctgtcaccgaggtggggtgcctcggagggtgcaggagcagagtcaggatctgacttaggtttgataggctcctctggctgtcctgcgatttatcagggacccaggttgcgagcaggccgaccactcaagaggcgtctacatcaatgcagtcaaaggctatgctgacttggaccagatggatg

SEQ ID NO: 679 - DNA, 651 bp, Homo sapiens
  SIMILAR (622)..(596): 1001254mologous to Homo sapiens super cysteine rich protein; SCRP,accession number U63332,Smith-Waterman Score=77.
atgcatcagaattacctggagggcttgttaaaacacagattgctgggccccttccgcagagtttctgactcagtaggtctggggtggggcccacgtgatgctgatgccactagactggggacctttaagaaccactaccttagagtgatcaaagagggcaaccaaaaacaagaaaaatctgagaaacagtcacagccaggaggagcctatggagacatgatgactcagtgtaatgtgggaaccaggatgggagcctggaacagaaaaaaaatcagagaggtgcagttttcttccaaccgcttcactccagacccagtatcacttccgcagacgggtacctttcctgatcgtcttatccaaaacagccacttcctgtcatgctctacccctgcaaacaccctttgcaaacaccagaccctgacacatgggactgtctgctggctagtccctggtctgtcctccgcactcaatggaagctccgggaaggcaggcactttgtcattcggatgcaaggctccagttccagcgcctcctacagcacctgcattgaacaagttacttacatcagtggttctcagatggggttcctggatcagcagcagcagcagcagcagcagcacctgggaacttgttcacgtgaacatcttgtga

SEQ ID NO: 680 - DNA, 404 bp, Homo sapiens
  SIMILAR (180)..(398): 821254mologous to Homo sapiens Human CSGP-1 protein,accession number W90961,Smith-Waterman Score=358.
gaagctttggtggggccacccttgactctcccctgctggtcactctttggagctctcttggcagtgacacgttcacacgacttgttgccattcccaatgagctggacagaccaacacctgcaggaaaccccacgctcagacacctgaacatccctcaactctaccttctctgtctaacaggaggtggcggcggtggctactccagttatggcaactccgacaacacgcacggtggagatcaccattcaacgtatggcaatccagaaggcaatatggtagcaaaaatcgtgtctcccatcgtatccgtggtggtggtgacactgctgggagcagcagccagttatttcaaactaaacaataggagaaattgtttcaggacccatgaaccagaaaatgtctgaaga

SEQ ID NO: 681 - DNA, 486 bp, Homo sapiens
  SIMILAR (11)..(403): 791254mologous to Homo sapiens Human CSGP-1 protein,accession number W90961,Smith-Waterman Score=531.
  misc_feature (1)...(486): n = a,t,c or g
gcagcgggtgaatatntaccaaagccaaagccacgcccctcacccccagctgcaatccggcacaagtggaggtactttcaatattggaccgtgatgacggacgcttacccgcccaggcccaggccacggcccgcctgcaggaggtggcggcggtggctactccagttatggcaactccgacaacacgcacggaagagggggctatagacccaactctcgttatggaaatacttatggtggagatcaccattcaacgtatggcaatccagaaggcaatatggtagcaaaaatcgtgtctcccatcgtatccgtggtggtggtgacactgctgggagcagcagccagttatttcaaactaaacaataggagaaattgtttcaggacccatgaaccagaaaatgtttgaagatgttaagatcccctgattactttgagaaaaacaactaaaacaagaaccgtgtttnnnnnnnnnnnnnnnnnnnnnnn

SEQ ID NO: 682 - DNA, 185 bp, Homo sapiens
  SIMILAR (2)..(55): 501254mologous to Homo sapiens twisted gastrulation protein,accession number AJ297391,Smith-Waterman Score=54.
atgggttccgaggagcagatcatgcaccagggcggcctgctcagctctggtgtctgcagccccgtggaaaataaaccccgtgaaagcaatggcgtcatgtgcaacccgaccttggagacagagaccccagagttagcgttgtctacctgggacatctcccagcccaggggtcttactccagaccc

SEQ ID NO: 683 - DNA, 1539 bp, Homo sapiens
  SIMILAR (401)..(439): 691254mologous to Homo sapiens Human CSGP-1 protein,accession number W90961,Smith-Waterman Score=51.
atgggttccgaggagcagatcatgcaccagggcggcctgctcagctctggtgtctgcagccccggtcaaagagacttagcagacgcccttgttgaccctgggcatttatggcctttgtttgtgcttccagtgacacttcaatgcatattgcatttattttctctctttgttcacagaacccaccaagaagccaaactcagcaacagcgcaaccacgtgggcatgggggaaagctcggaaagctggtggcaccattgttcataagaaaaagaaagaacatgaaatgctcaccagtgacatcatcgcgggacacttgggcgatggtgctgctgatatgaatgaaatggtatttccccgaaagatatcattattttctgaaatcatcctgttgtttcccaacagatatctacccaaagctgaagccatgccctcaaccccagcaattctggcaacagtggagagaaggtgggatgagaggcctgagattggggaaaagttggtcacgggtagactacaggctagtgcaggggatgaaggagaaggctccatggctgtatcagtgggtgacacgttcacacgacttgttgccattcccaacgagctggacagaccaacacctgcaggaaaccccacgctcggacacctgaacatccctcagctctaccttctctgtctaacaggaggtggtggcggtggctactccagttataacaagttcggcaacacgcacggtgcccccacatctaggcacgcggccctggtgtctggtgttcccttctttgtgtctatgttgtcaatcaagaaaaatgatgagacgagtgtaaaagatttatttgccaaagttaaggaagaatgtgggctcagagcatggccccaaataggtgatgttggtaaagcaggtttaatgggtggcaagccaggtgatgagagggagacaggaagaggcctgcttagcaagggggtccttgttatgcagatgaaggttcccaggcctccagaccctcagggatgcacatctaatgcaccttcagccaccagtgtaaacagtaaacaagggccagatggcacctgtgcaccttccctagccttgggagagccattggaatctctgcagcctttaagagcatcttgcttcaggtttgctgacctgcttgtttctgaagagggggctatagacccaactcttgttatggaaatacttacggaaaaagaattatgtcttacagaatatgtggagatcaccattcaacctatggcaatccagaagtcagctgtaggtgtggccagcgctttgaccatgtttcctgggtcttcttatgtatttggggccttaggtggaatggttcatctcagcttcatgtggactctcacatccctccaggaagccaggccaggcttcatcacacaccacagaccaggcaatatggtagcaaaaattgtgtcttccatcatatccatggtggtggtgacactgatgggagcagcagccagttattccaaactaaacaataggaggaatttgtttcaggacccatggtaa

SEQ ID NO: 684 - DNA, 545 bp, Homo sapiens
  SIMILAR (64)..(204): 271254mologous to Melanoplus sanguinipes entomopoxvirus ORF MSV095 hypothetical protein,accession number AF063866,Smith- Waterman Score=61.
atggcccgtgcagtgaactttaagggctgtcctgacaacccatgtcctcaacaggaatctgcggtctgttctggaatctggtctttggactcaaatgatcttacctgggtagctaacaaagtcttctgtcttgttcctgctgttaaaaaatccaaggtcacagaaatggaaccttctccgtcacacctcctgatggcagtcagctgtgacccgctgaatccaggacatcatgcattccagtttcatttgcgagaacatttccaggtccggctgaagcctagtggctccagcagaggtctcaacccctttgggatgctcagtgggagacagaatcaagggccaatgatccatgacctagtcctagtgcccatgtcagtttgtcaaaggccctcagagcagattgtgttttccctggcgggggcttgacttctttgctttaaaaaggattcttaagtatttattgcagtaaaattaaccaccttcaaatttctgccagatcccctggaggtatataccttattaacacaaaacaaatgtgacacttg

SEQ ID NO: 685 - DNA, 1575 bp, Homo sapiens
  SIMILAR (559)..(807): 841254mologous to Homo sapiens peroxisome proliferator activated receptor,accession number L02932,Smith-Waterman Score= 362.
atgagaagcccctgtgtcaacaagatccaggggctggagcccaatgccaagcctgtgttgtccccagcgaccctgcagctgctcgctctgatgtaccctgtgccattcaaggaaatgtggtccaggaaaggtaatgcttacaccgctgatagtggtgctgaaaactatcaatcacttattgctggatcgtgcgacaccagaggtctgggatacgttggcggcgtagcatttggcatgatgactacgggtaataatgaatggcccagggcacaaatatcagtaggcactcaagatagggatggatcaggcaatattggtctgcaaatgcatttcaggtttatggcttcagggcaaatatcttacgctggaccgcaaggggctggaagtttccaacaggttccggcatctgacagaaatataaagcacagcataaaggatgatgaatcaagcattgcatacaacaacataaaatcaatgagatttaggaactttatatttaacgatgatgagcaagaaaggcttggagctcggcggcacaaccagcaccatctggtcgcgatggtggacacggaaagcccactctgccccctctccccactcgaggccggcgatctagagagcccgttatctgaagagttcctgcaagaaatgggaaacatccaagagatttcgcaatccatcggcgaggatagttctggaagctttggctttacggaataccagtatttaggaagctgtcctggctcagatggctcggtcatcacggggagcattcaacaaacagcagcagtagaaaaagaagagtatggggcagcagcaacagaagggcatgtggccctcctgggcccttcctccacaattcacaacaaaatcacaaaccgcacccatgactggggtgccctggccctggatggcggccctgtccctcggtgctcaggctgccgggttcaagtggtgggctggctttgcatccctcctaggaaggccaagtgcttgacacagcgtgaacactatcccttttataaggttatcaacacaggatgccaggttcctcacctgaagaagaaccttgatcacctcctggggatgggctcttctcgagcatggcttccaagtacccagattcacaggtggagaggggctgctggaggcccccggacctcacgcttcctgagggccaccccggagcggctgcagccgctggcggcaccgggaaaagcatctcggccaatgtggccccgtcccagagcaccacccgagacatcaggagcccatcgtgggctagggaagatcctccgggacctaacggcccagggaaggactcactccagtcacaagcagctggagatggatggtttggcagagaaggggaaccccagcaccaacccagccccaggccccaccttgcagcaggtctgcccttgccagagtcctcgaggggctcagcctgaccctgacaggtggcctgggggcacccaaggcttcgggcagcccctgagctgggcccaggtctcatggcggtctcagggcaggcagggtcttccacccttggccacctacccaggtgatgcctga

SEQ ID NO: 686 - DNA, 507 bp, Homo sapiens
  SIMILAR (151)..(294): 271254mologous to Homo sapiens T-cell receptor beta,accession number M90475,Smith-Waterman Score=62.
atgagaagcccctgtgtcaacaagatccaggggctggagcccaatgccaagcctgtgttgtccccagcgaccctgcagctgctcgctctgatgtaccctgtgccattcaaggagatgtggtccaggaaacaccccctctcctcttcacctcttcctgctggccacgaggaagccacttcctcagagagaccctaccagatgcggatggaaacagatgcaccaaagcaagccctgatgaaaccgcgacttcctaaggaggtttgtctcaacacttcccatttttacggcattggcattgccaagcatggggaagtatctgctcttctcatgttaaaagtggcccagcttttcttaactcagtccaagctgacttgtttagctgcactggaatttcttaccaaccaaatatttgcatcgagcaaagggggctgtgtgcacctccctaatggcagcgatgatggctgctgtcattcaagcccatcttcagacgtcacagtctggaagtga

SEQ ID NO: 687 - DNA, 498 bp, Homo sapiens
  SIMILAR (247)..(176): 291254mologous to Hypopomus occidentalis ATPase subunit 8,accession number AF040453,Smith-Waterman Score=38.
atgagaagcccctgtgtcaacaagatccaggggctggagcccaatgccaagcctgtgttgtccccagcgaccctgcagctgctcgctctgatgtaccctgtgccattcaaggagatgtggtccaggaaacaccccctctcctcttcacctcttcctgctggccacgaggaagccacttcctcagagagaccctaccagatgcggatggaaacagatgcaccaaagcaagccctgatgaaaccgcgacttcctaagagaaacccttttgtgaggggagaggagctatgggaactgttacctatgggttattaccaaagaacgctggcaattggaaatgtcctgatggaaattctttgcacgtgccggttctctggcatcctccaggtggcccaacccaaagcagaaagcagaaaccacagaccccaatggatcaaggacaatctggctccggaatacgacatcctttcgtctgaagtcacatacaacgggaacttttaa

SEQ ID NO: 688 - DNA, 737 bp, Homo sapiens
  misc_feature (1)...(737): n = a,t,c or g
atgaagttggagagaggatgctggggcctgtgtggcagttcctactttggaactgcacctttttcgcacaaataagaagctgtaagccccaaaatactgagagtataaggcactcactagtagagcacatgtggagagtctgggcccagtccttgctctgggatctgcctcattctcgcgtgtgtttctgtcaaccctctctcttagggttttagcctaatggcattatgaatcccagagggtgtaaccaatatgcaccaagaagttttgccaagttattggaaacaaggtatggggagactcacggggtctgtggtttctgctttctgctttgggttgggccacctggaggatgccagagatccggcacgtgcaaagaatttccatcaggacatttccaattgccagcgttctttggtaataacccataggtatcagttccctaaagagcagacagctatttactatacaagaatagtgaagggtctttagcgaaacactgttgtatgaaatcggtggcctctaatacggagtctaaggcctcgctggtggaagtgactagagatagcctctcttgtgctctgtgcatatacagtgtggtaaagggaacagatttccacattgaaagtaaattctgcatggctcaggagaaatgaagacnnnnnnnnnnnnnnnnnnnnnnnngcgcgcacacacgtgtacgcagtgtacattagatgtttgatttcagcttccag

SEQ ID NO: 689 - DNA, 588 bp, Homo sapiens
  SIMILAR (196)..(405): 281254mologous to Homo sapiens immunoglobulin heavy chain variable region,accession number AJ402513,Smith-Waterman Score=69.
atgggggagcttcacctggatggagactggctctccccgcgtcccagtgccctgcccggcagcgcaacagaaccggagactgggctgcaggacgataccagcacttcaggaaccacggccagtgtggcgaaaccagacctagaacgtcgtatacggctgatagaccaagttcacccgctgcagcaggctgtgagagggaaggcacgttcctgggtcagcagcgtccaaaactcccgtaataggacccagtctggtggacccgagagtaaaaaggacaaaaggacccccactaggacccagatgatgcagtccagcttcaacccctacaaaattgccgagaagcacttctgccaaaggctaaaggatggtaaaagaaaaaggccccggggagcctatagtctctatggaagtaggggggcattaatggattttttggtcgatactggtgctgatttctctgtggtaactcaccaatttagtctccccacaaagaaactgtgctactatcgtaggggctactggcgccaagaaagaggcctttttgcatatccaggagatgtattattgggggacaaaagtgcagcatga

SEQ ID NO: 690 - DNA, 393 bp, Homo sapiens
  SIMILAR (13)..(132): 351254mologous to Mycoplasma capricolum phosphotransferase EII (glucose),accession number Z33293,Smith-Waterman Score=68.
tatttccttttccctttgtcctttgccttttctgtgctgcctcctgttatcgccaaggcacgttttttacccagaggagttttggcataccagttcttaaagctctcttcttcctctttgtacactggattcatgctggttatcgccgtaataaactcaactgcagtgagaggtttatgaatttgccgccggattctctgatctgtgagcacgcctttaaccacttcgactatatgtccttgggtgaagccgtcagtgaccttcgccaggcagctgacattcaaggcactggtgaggactcctccattgcgttcaatgatttgcttccacagaacgtatctggaagcatagtctggtctgggcaccaaaataattttctggtaaactttgcag

SEQ ID NO: 691 - DNA, 1422 bp, Homo sapiens
  SIMILAR (905)..(840): 541254mologous to Homo sapiens Human secreted protein, SEQ ID NO: 7174,accession number G03093,Smith-Waterman Score=62.
atgcttgggtcacttgctgggccctcgtctgtccagcctcctgcctatctgcagcagttcttttccaaggagagaagggtctactctttcggggccccgctctgtcaaggaagaagaaactcctgtcctcacaaaggttacacccacggccacagagtcctggctgaactgctgtacacaccaatgtgtacagtgtcacattcacgcctcactaaacaacattcatataaagagagcattgaccgagtccttgccatgagccagcaccgttcatgtgttaacgcacattcagaatttttgcgaatgctgactgctacactcagtcttcggcagccggctggcctcaggttctatgatgtttacactgcaccaagcaagatgccaacacattgcacaaaaatagaccacagcagtggtccaccctcagatcctttcagcaaccaaggcaggcagtctggaaggtaccaggagagtgagcccctcttcctcctgagcacatatttcccccaccccaatagtggctttgtcccactggtggaacagggcagggacttgggcgggctacatgaagaatcagtcacagccaaaggacacaacccacctccagcaatggccacctctcaaagaaggcacagccagggtggccacaacccttggaacacacatctgctcatcactggtcatggcaacagagaacatggatgggaaaaaaagctaaaagacactcttcaaaccgagaaagacaagcttcacttatttccagaagaagagagctttaagaactggtatgccaaaactcctctgggtaaaaaacgtgccttggcgataacaggaggcagcacagaaaaggcaaaggacaaagggaaaaggaaataaaagaaagagaaaaaggcaaaaaagaaaaagtaatgcctttctgaagaaccatgcttgagtctctctgggatggagaggaccccaactcgccaaagaaaagattcaccattgcccgcctgaagaagccctcaggggaaggaacttagcagtgtgcaggtgagctgatgccgcaaacccgctaaccactgcatgtgctgttatgcctttcccaggctggacacctagctgggtgttcatcataactttccacagctttaatccacgccaagtttgtatataactgaaattcactcttgacaccctccacagtctttccaagttggactcttcctctcatcagtactagttgtcaaatttaaaatgtgacagttaaagaatattctagtttgacaattagtaagcaatgagtatatcatcagtaccctagctttttattaatccatgtaccctgtatagtatcttgcatctattttaataaattaattctttgctctagtaatagattttatataatgaaataaaggtgttgtccttgaaaaaaaaaaa

SEQ ID NO: 692 - DNA, 597 bp, Homo sapiens
  SIMILAR (419)..(360): 451254mologous to Homo sapiens mucin,accession number Z34279,Smith-Waterman Score=45.
atgggctctttccttgcactgtcagccagcaggctgctgaggaccttgtcaatctttgaagaccagtatttcttggtggatttttatgcacccaccgcagctgttgaaagcatggtggagcacttgtctcgagatatagatgtgattagagggaatattgtcaaacaccctctgacccaggaactaaaagaatgtgaagggattgtcccagtcccactcgcagaaaaattatattccacaaagaagaggaagaagatgggtgaggatgaggtcgtttcccaaaacagtcacctgcatctcttcctcggtctcctcggggctgattggaaagacttgactagcccttcccccttcccagggggtgccctgcacaaggtgtctgtcaccatcacagatgacggaacttctgcacataaaatgttgggggaagtgccggttctgggaatctctgaaaagcaggaaggagccgagagttctggcctctgctttgtttttaaccatggcaagaccggaggatggagagatgtgcaagagatgcccaaagcgccaggagggcctggtctcccagctctggcccagcgcctcctccctctgtag

SEQ ID NO: 693 - DNA, 961 bp, Homo sapiens
  SIMILAR (957)..(463): 451254mologous to Homo sapiens Unknown (protein for IMAGE:3162515),accession number BC000547,Smith-Waterman Score=247.
tttcacattcctacaatcaagtttattactcaaagcaaaagttgtccatataatacattggtcgtcaatttttatttccacatggttacacaggctgaatgactagctcacaatcccaggaggtattataagttttgctcttcaaaaaatggtgttacatgttgtaaggggaaaaggtcctcaatgacaaagaaatgacactaatgaaaacaaaatcaagaatgatccactggtactgcaggttacagagaagctgtcagtgagcagttccccaccttttcacaaccaaaggggatcaagggctaaaaataccttagaaaaatcaaacagcacctgcaacacatgcttatataaaggccaaaacttgcaaattcttcccttctcgtccatgctgccccaaaatgtgaaaggaatttacatataagggttaaaattcggggaaatcttcccacttcttacctcttctttgtggaatataattttttctgcgaatgggaactgggacaatccctttcaacattcttttagttcctgggtcaagagggtgtttgacaatattccctctaatcacatctatatctcggagacaagtgcttccaccatgctttcaacagctgcggtgggtgcataaaaatccaccaagaaatacccgcctcttgttgtgcttgctgacttgtgggcagagatcctataaggaagcgctcgttcacccaggttttcccaagtccctcactattgcttctctgtccctcagggccctctatcgtacgtttcaaagtagcagcagtcctctggccgctgcatggctttttaggattaaagccagctcgtagcggggcatgcctggaggatcggcgagtgcggctcggaagccagccggttcccgggacgcgaaggggcgggacggcggggacagtggggacctagaagctgctgcgccggacggctcccaggcggccgc

SEQ ID NO: 694 - DNA, 630 bp, Homo sapiens
  SIMILAR (258)..(509): 781254mologous to Homo sapiens Human secreted protein HELHN47, SEQ ID NO:175,accession number Y86260,Smith-Waterman Score =319.
caaccccgccgccggggacatgtccaacccctgtagccggaggaacgggccagtcagactgcgcccgacaggtatattgaaaagtctgattcagttacaatcagtgtatggaatcacaagaagatccataagaaacaaggtgctggatttctccgttgtgttcgtctttttccagtgccatcaaccacctcaaagacactggttatcagaggttggatttatgcaaacttgggccaaaggacagttagaagacagtagctgaagaagcatctgtagggaatccagaaggagcattcatgaagatgttacaagcccggaagcagcacatgagcactgagctgactattgagtcggaggcgccctcagacagcagtggcatcaacttgtcaggctttgggagtgagcagctagacaccaatgacgagagtgatgttagcagcgcactaagttacatcttgccttatctctcactgagaaatctaggtgcagaatcaatattgttaccgttcactgaacagctattttcaaatgtacaagatggagataggctcctgagtattttgaaaaacaatagaaagagcccctcacagtccagccttctaggtaacaaatttaaaaacaaaatatttg

SEQ ID NO: 695 - DNA, 1536 bp, Homo sapiens
  SIMILAR (943)..(779): 451254mologous to Homo sapiens Human secreted protein clone dd119_4 protein sequence SEQ ID NO:108,accession number Y53051,Smith-Waterman Score=78.
tttttttttttttttaccattaaaaatgatctaacaagctttatttttattattgttaaaaattctcattttgaggaacacaaccacaaagtaaagaaagttttcattgatttaagtaaaaaaccaatatttggtgaacaattttaaaaacataggctccagggccatccacatgctttaactcatgctcaggctcctgatattgatggggttgtctttgtatttttctgatgcccttttatgtgaattcacctctataaggacaaaaaattataatcaaaattattaggtattacagtcacaggatattgcgaggatgaggtttgttcttataggtcatctcctggggaacttctttcatggggcttcacttggacttctggctctttctggttcattctggttcccctgggttctcattaaatataattgggttttttgttggggccccgtatccccattcctaccattcaatggccctttggcttcctgctggctcggctggggaagctttcatcagggagggcctgtttcggcaacatggaggcttgggcacagctcccttgcacatgtgtttctgaacattccattttcaaggtccggataacatgagacatgaactttctcacatcctcgttggggatgagggaccgtagctgctcggttagctgaatttcaagctgatcacccccaaagcctgacaagttgatgccactgctgtctgagggcgcctccgactcaatagtcagctgagtgctcatgtgcctgcttccgggccttgtaacatcttcatgaacgctccttctggattccctacagatgccttccttccaggaacaaatgtatgcctgttaagtccagaccatgccagtgttgcaaatgccagccttgaaccttcttgcaagacagccctcaatgcctatttttaaattgggcagaggcagccaggccatatggcctaggtaagatccctatagatgaaaacacaaaacaataaattagtggtaaagcggttacttgagtaggtaaaggaggcaggccaaccgctaccacaagggctgggcagaaaaggtgttacctgaaggcctgtgggactgggacaagtttgggtaaggaaccagaaggccaatgggaaggaggacacaggtgcccaactgaagggtaagcatggcagtgagtatggtatgcctagaataaaggtggttgggattagaattgggtgacactgatcagtagtttaaattcagaggtatctcttcccgactcaaaagtctcactttgggctgaaagtacagaggaagaaggtagacttctaagaagagtctgaataagcccccaacttctggagtccctttctcaatttctgttggcagtgggaaatattagaaattactctgggcattaaaaatagctcagtttaacctggattgtggagttaaaaaataacaaagattgcattggtcaaatctggacaatttgagcattcaaaagaataacaacaataagctacaacataattaaaatataaaaaaaaaa

SEQ ID NO: 696 - DNA, 361 bp, Homo sapiens
  SIMILAR (135)..(76): 521254mologous to Homo sapiens Human gene 91-encoded protein fragment, SEQ ID NO:491,accession number Y86574,Smith-Waterman Score=42.
ggatgatcaagcttggtggggggaggggcgccaaccattaccaaagcttgaataggtggttttcccctcacagcgtaaacaaagccatggggaagttccagctgagcagagccctccacagctcagcaaagcctctgtagccagactgcctctctagattggtcctcactgggcatgacatctctgaaagaaaggcagcagtcccagtcaggggcttatagacaaaacccctgtctcctggggacagaacacctggggaaaggggtggctgtgggcacagcttcagcagacttaaacattcctgcctgccagctctgaagagagcagcagttctttcagcacagcgcttgagctctgctag

SEQ ID NO: 697 - DNA, 1074 bp, Homo sapiens
  SIMILAR (695)..(946): 311254mologous to Drosophila virilis major larval glue protein,accession number X76203,Smith-Waterman Score=110.
atgtggaggattccatacagagaaggaaattccatggtacaaataggactggacttttcatttaccctgaaagcagcttttaagcaactcaactacattagggccccggggaaggactttacattgccaaaatctacagggctcacccttgacacgccagagtgccctctcagcactggggaagaagccagggagaaactcggagggctggaatggagaaactggattaatcatatttgcaaatcttgcagcaatatggcggatacagccaatgaaatgtcaaagaaagaaggcagttggctgctcagaacttggtggcactttgataatggctctccagcattagtgtaccaggccttagggcttaccctgaatctgagagtagctcagagaatagtgcccttggatgaggagggaaaattgccaaggatgcagaaggaaatgaagatgatcaaagacgaggatgtgcatttcgacttggctgtgaagaagaccccctcctttccccactgcctgcagccagtggcttctcggggaaaggctccccaaagacaccccttcccggaagctctccgagggccattttcccagtttcggtatgaacctcccccaggagacctagatgggttccccggggtcttcgaaggagcagggtctaggaaacggaagagcatgcccacaaagatgccctataaccaccctgcagaagaagtcaccctcgccctccactcagaggagaacaaaaaccacggccttcccaacctccctttgctgttcccgcagcccccgcgccccaagtatgactctcagatgatcgacctgtgcaacgtgggcttccaattctaccgcagcctggaacactttgggggcaagcccgtcaagcaggaacccattaagcccagcgccgtgtggccccagccaacgcccactccattcctgcccacgccctacccctactaccccaaagtccacccgggcctcatgttagctttactaaattacggaaatgaatactggagaatgattagcctaataataaacccacagttgacagtgcactcaaaaggctgttag

SEQ ID NO: 698 - DNA, 1303 bp, Homo sapiens
  SIMILAR (1238)..(1303): 811254mologous to Takifugu rubripes zinc finger protein,accession number U90880,Smith-Waterman Score=97.
atgaggatccaacaattatgtggacatctgtggcagcaaaagaaaatcagccttgaattaatgtcttcatttcacaaaattttgaaaaataaaatggggtgtggagttacacctgatagcaaggagctgctaaagtatctctcctattgtaattcctatccccttaccggaagcccacaagaggccccagtgtctgatgttccccttcctgtgtccaagtgttctcattgttcagttcagctcatcatgtgtctgagaccagaacacatccccaactccccaggaataaagggacaaggtataaaacagcatgaagaaaagcatccaactcttcttcatctggatgcctcacaccttatgacctgctttgtggtggaaatgacactgtatgttttaattgcaggcttcaagagcctatgtagcatccactcttaccctcctagaaccctgagacatttatgtgaaaaagtctgggatagccttcttgagaatgagagacgacatgagaagagaggcccagccaacttcttgcatcgattgccagctgaacaccagtggggaatagtgcaatccagcaacattatggccggtctttcagcccgtctgcagctcttcctggaacacaggccttttcctgtgtttgaactcaccgccaatggctgtcctaccaaaggtcttcaaggggaaatacaggcccaagagtctgagttcagcccagtttgcaaccatagccctggagtcattcaggctgaactaaaacaaggccctagtggtgttcctgaaatcttaccccagctaaactcctgccctacaaaaggtacctgtagatactatccagaggggagtcgcctgccaagtgcaggaaccatcaacaaaggacccagactgggattcagccgtaaaggggaccattcgctaacttcaggggctcctttatatgtgggaaaggaatcaaaagtgcattttagagcatatgaagatcctggtgtgaaggagcataagtgtgggatttgtgggcgggagttcaccctgctggccaacatgaagcgacacgtgctgatccacaccaacatccgcgcctaccagtgtcacctctgctacaagagcttcgtgcagaagcagaccctcaaggcacacatgatcgtccactctgacgtgaagcctttcaaatgcaagctttgtgggaaggaattcaaccggatgcacaacctgatgggccacatgcgcctggctctgaaacggaaaacccttaaagcgcctatattgcccaagcaaattcaccctgaaggggaacctgacacgc

SEQ ID NO: 699 - DNA, 3907 bp, Homo sapiens
  SIMILAR (1430)..(2476): 611254mologous to Takifugu rubripes zinc finger protein,accession number U90880,Smith-Waterman Score=1115.
atggcagcctctgccaatcacgaagaacaggagtttgcttggcaggagaatcagtcaccatctccgagttcctatgcttatggctggactgagccagagggaacagcaagtgcaaacgccctgaagcaggaatgtgctggtgtcttcaaggaacagaaagaagaccagggtgcaggaataacgcacggaaggttgccaggaaagcactgtcacacatttgcatgcaggttaaatttctcaaaatctgagcccctacagcgagtgacagtgggaagtgtgaaagaaaggctcaagattcgctgctgtgctgttgttattgtcaatggtgttatatccacaggcaagcaactaaacgtctctgagcttcagtttctttatctgagaaatggcataatagtactttatggggtttcccagggatcaaatgagataaagtgctttgcacaggacctggcaaatgctgaaccggagactgaccaggttccttcaaggatcctcagccatgcaaaagggaagcgcctttctgagggagccaagcttgcatctagaccttcacagtggtgcaacataacttctcagagatcggcatggtaccattcagtgaatttgggaatttcaggagaagaccaagtgtcagcacactgtctgctgaagtgcgatacctggcttcttaggaaagtggtacaaataggactggacttttcatttaccctgaaagcagcttttaagcaactcaactacattagggccccggggaaggactttacattgccaaaatctacagggctcacccttgacacgccagagtgccctctcagcactggggaagaagccagggagaaactcggagggctggaatggagaaactggattaatcatatttgcatgaaacaggacattctatctttcatatcaaaggaacatgccactcattggccaaggagcctgagccaggatgaagcaggggccatccattctgaggagcactaccccagtccctgctatgccatggctaaagcaccttcctcatgggagatgttcttggcagttaatttacgcgagaatcttgcagcaatatggcggatacagccaatgaaatgtcaaagaaagaaggcagttggctgctcaggaaaattgccaaggatgcagaaggaaatgaagatgatcaaagacgaggatgtgcatttcgacttggctgtgaagaagaccccctcctttccccactgcctgcagccagtggcttctcggggaaaggctccccaaagacaccccttcccggaagctctccgagggccattttcccagtttcggtatgaacctcccccaggagacctagatgggttccccggggtcttcgaaggagcagggtctaggaaacggaagagcatgcccacaaagatgccctataaccaccctgcagaagaagtcaccctcgccctccactcagaaggagaacaaaaaccacggccttcccaacctccctttgctgttcccgcagcccccgcgccccaagtatgactctcagatgatcgacctgtgcaacgtgggcttccaattctaccgcagcctggaacactttgggggcaagcccgtcaagcaggaacccattaagcccagcgccgtgtggccccagccaacgcccactccattcctgcccacgccctacccctactaccccaaagtccacccgggcctcatgttccccttcttcgtgccctcgtcctcgcccttccccttcagccggcacaccttcctgcccaagcagcccccggaacctctgctgccccggaaagccgagccccaggagagcgaggagaccaagcagaaggtggagagggtggacgtgaacgtgcagatcgatgacagctactacgtggacgtgggcggctcgcagaagcgctggcagtgccccacctgcgagaagtcctacacctccaagtacaacctggtcacccacatcctgggccacagtgggatcaagccgcacgcgtgcacgcactgcgggaagctcttcaagcagctcagccacctgcatacccacatgctgacccaccagggcacgcggccccacaagtgccaggtgtgccacaaggccttcacccagaccagccacctgaagcgccacatgatgcagcacagcgaggtgaagccgcacaactgccgcgtgtgcggccgcggctttgcctaccccagcgagctcaaggcccacgaagccaagcacgccagtgggcgcgagaacatctgtgtggagtgcggcctcgacttccccaccttggcccagctgaagagacacctcaccacgcaccggggccccatccagtacaactgctccgagtgcgacaagaccttccagtacccgagccagctgcagaaccacatgatgaagcacaaggacatccggccctacatctgctcagagtgtggcatggagtttgtgcagccgcaccacctcaagcagcactccctcacccacaaggtactgcggggcctctggtggggcggacggggccttgggaagaggagcggggccctgagcagagcactggggagcaggacgcctgtgccgctctgcaccttaccccgaggaggtcttcaaggggaaatacaggcccaagagtctgagttcagcccagtttgcaaccatagccctggagtcattcaggctgaactaaaacaaggccctagtggtgttcctgaaatcttaccccagctaaactcctgccctacaaaaggtacctgtagatactatccagaggggagtcgcctgccaagtgcaggaaccatcaacaaaggacccagactgggattcagccgtaaaggggaccattcgctaacttcaggggctcctttatatgtgggaaaggaatcaaaagtgcattttagagcatatgaagatcctggtgtgaaggagcataagtgtgggatttgtgggcgggagttcaccctgctggccaacatgaagcgacacgtgctgatccacaccaacatccgcgcctaccagtgtcacctctgctacaagagcttcgtgcagaagcagaccctcaaggcacacatgatcgtccactctgacgtgaagcctttcaaatgcaagcatttacgaggtttcttctcagactccacatcattcaatattttgatggatatgttatttatcaaaggcaaatataaaagtgctttgcaagtattgatagagatgaaaaaccaagatgtgaagttcaccaaagatacctatgttcttgcttttgcaatttgctacaaactgaatagccctgagtctttcaaaatctgtactacattaagagaagaagctctactcaaaggagaaattctctccaggagagcatcctgtttcgctgtggcattagctctgaatcagaatgagatggcaaaagctgtgtccattttttctcaaatcatgaatccagaaagcatagcctgcattaatttaaataacacaagactggatgtcaaaaaccatgatcccactagtgcatgtaagccacctctggatttagatttctcatctccttccatcgtggcctatctctcacagttacaagaatctggtaatgggctggccacgggctgcctgactcagggagaaagagaacatgttggtggagccttggatctacccatctttccacttgtccggctgtctacaagtagagagggaaaagggagatgggagttatatctaaaagcccctgactggggctgctgccctttattcagaggtgccctgcctggagaggaggaatctagagtggcagtcgggctacagtggctttgtggagctgcgcctgtggaaactggggaggccatgagagcaggccccctgggggcaatacaccttaagcaaccaggtatccttgattgtgggagttccttggaacatgagcagaag

SEQ ID NO: 700 - DNA, 424 bp, Homo sapiens
  SIMILAR (341)..(421): 611254mologous to Homo sapiens Human secreted protein sequence encoded by gene 11 SEQ ID NO:72,accession number B24447,Smith-Waterman Score=91.
  misc_feature (1)...(424): n = a,t,c or g
nnnnnnnnnnnnnnnnnnnnnnnnnnnnnnnnnnnnnnnnnnnnnnnnnnnnnnnnnnnnnnnnnnnnnnnnnnnnnnnnnnnnnnnnnnnnnnnnaaacatggttaaaaatgtgatttaggctnnnnnnnnnnnnnnnnnnnnnnnnnnnnnnnnnnnnnnnnnnnnnnnnnnnnnnnnnnnnnnnnnnnnnnnngccgtgagggactgtgccatggggaacggtggactccggcccagatactacacttttcccacagtgtttgcaacccacagaccaggagattttcttgggtgcctacatcaccagggccctgggtttcaagcacaaaactggacagccgtttgggcagacactgagctagctgcaggagtttttttttcacatcccagtggtgcctggaatgccagcgagacagaaccg

SEQ ID NO: 701 - DNA, 525 bp, Homo sapiens
  SIMILAR (335)..(418): 781254mologous to Homo sapiens unnamed protein product,accession number AK002154,Smith-Waterman Score=121.
atggcctgtgctcgcctccgaggtgcctgcctggcagctggaacagcttgggcctgccctctcactgaccccctggactctggatcctggcctctcaggctgtcctcccagcctcagctgactttcctggccctcagcaggtggctgcccggaactaagggtcctgcttcgcctccctctggcctgcccgtgtctgtgattgccagcatcctgatgagggagggattcaagaggagagacagaacagctgaggaaacagcagaacggtggaaaatttttgaaagtgttttgagcccacccaacctgaggagagcattcaaagaaaaacaggaagaagaccaggagattctctcgggtgcctacaccaccagggccctgggtttcaagcacaaaaccgggcagccatttgggcaggcactgagccagctgctgttttcaaatgctagcccaagaccagaagaaacttccatcagcccatggcaaaaacagaaaactgagggtgtgaaatgttacatatttttttaa

SEQ ID NO: 702 - DNA, 369 bp, Homo sapiens
  SIMILAR (364)..(308): 571254mologous to Homo sapiens Human secreted protein, SEQ ID NO: 7795,accession number G03714,Smith-Waterman Score=75.
tcactgctccccggggtgggcagtggacctttctgctttgggaagctcaacaggcattgtaatgctgccatgagccatggcctgaaccgtgcaggcagaacctggctctctggccattgccactgctgttggggagtccccccaggaacgcagcaactgcaaatcaaacctcatcaaaatggcaccagctgaccctcctctccacccagggtttctcaacacccctggcaggatgcgaggggatgaggagtcctcgggcttggacccccgaactgtggtcatcatttcatcagatgccagctgtgtagcaacaagagttgctgaggtcaggggatggagaccagcatgggcaacacagccaaacgccat

SEQ ID NO: 703 - DNA, 786 bp, Homo sapiens
  SIMILAR (28)..(201): 811254mologous to Homo sapiens ferredoxin,accession number M34788,Smith-Waterman Score=242.
atggagtcagaacctgatcaaaccacaggtgcatgtgagggaaccctggcttgttcaacctgtcacctcatctttgaagatcacatatatgagaagttagatgcaatcactgatgaggagaatgacatgctcgatctggcatatggactaacagacagttgctttcatactacagcagcaatgttgaagagttgtgacaatgaccacatggcctataaggcctggaatatttgctgtctggctctacgcagtttaagtttgctgacccctgtgcaaacttcgtcaaagcactcggtgctgcagatgacaatctggggtcatactgatctgagtccaattccggcttcagctgtacaaccacaggtgtgcatgggtggaccttgccaccctgctgccactggtgcatatgcacagacctcactgccatgccatcactggacaagtggacacatgtggtctccaccaccccactgccaccagtacccaagtgtgcatgctaactctgctgtgccactgcactgccacccccatatacatgcaggtttcggtccactcagcgctcttagtgaggaagaattaggcaaatacaaccctgaaagggaaaaaaggagccaaatgggggaacagcatggaaacctggaaaagagcagaggaaacagacacatagagactggacaatggtggggaccaggggaagttgtcttagtcctgatgcaactcaccgatgaagatgttgaacaggttaaagccaggcaggaggactgtcagcgaacaacagcaccttag

SEQ ID NO: 704 - DNA, 777 bp, Homo sapiens
  SIMILAR (1)..(183): 1001254mologous to Homo sapiens ferredoxin,accession number M34788,Smith-Waterman Score=300.
atggctgccgctgggggcgcccggctgctgcgcgccgcttctgctgtcctcggcggcccggccggccggtggctgcaccacgctgggtcccgcgctggatccagcggcctgctgaggaaccgggggccgggcgggagcgcggaggcgagccggtcgctgagcgtgtcggcgcgggcccggagcaggccctttgctagttgctcaagtgttgaaagcccctgcgttgaagtaatctgccgggacttgaaacttggctttggcactgattgtctgacgtgcctaacttgctcagaagataaaataacagtccactttataaaccgtgatggtgaaacattaacaaccaaaggaaaagttggtgattctctgctagatgttgtggttgaaaataatctagatattgatggctttgtgcagaagggaaatgtggggttggagcccccacacagagtccctattggggcaccgcctagtggagctgtgcgaagagggccactgccctccaaacctcagaatggtagatccactgacagcttgcatgatatgcctggaaaagccacagacactcaatgccagcccatgaaagcagccaggagggaggctgtatcctgcaaagccacaggggtggagctgcccaagaccatgggaacccagctcttgcatcagtgtgacctggatgtgagacatgtagtcaaaggagatcattttggagctttaagatttgactgccctgctggattttggacttgcatggggtctgtagcccctttgttttga

SEQ ID NO: 705 - DNA, 1919 bp, Homo sapiens
  SIMILAR (174)..(725): 1001254mologous to Homo sapiens ferredoxin,accession number M34788,Smith-Waterman Score=939.
acgcggaacctcggcgcggtgcttccagcagggtctctccgccactccagccccgcgcccctcgccgcggccctcgggcgtctgcgccgcagctgccgcccccgcctctttggagtctctcgcggcctcaaagcgcggcctgcgtcgcttccggcagttcccgaccgcgggcgatggctgccgctgggggcgcccggctgctgcgcgccgcttctgctgtcctcggcggcccggccggccggtggctgcaccacgctgggtcccgcgctggatccagcggcctgctgaggaaccgggggccgggcgggagcgcggaggcgagccggtcgctgagcgtgtcggcgcgggcccggagcagctcagaagataaaataacagtccactttataaaccgtgatggtgaaacattaacaaccaaaggaaaagttggtgattctctgctagatgttgtggttgaaaataatctagatattgatggctttggtgcatgtgagggaaccctggcttgttcaacctgtcacctcatctttgaagatcacatatatgagaagttagatgcaatcactgatgaggagaatgacatgctcgatctggcatatggactaacagacagatcacggttgggctgccaaatctgtttgacaaaatctatggacaatatgactgttcgagtgcctgaaacagtggctgatgccagacaatccattgatgtgggcaagacctcctgaactagaacaaatagggaatattttcatggaaaatttacctatttttataattattatttcttaaagtgattaaattgagaacatggatgagtggacttcatattatgactagctttactattttaattcaccttgcataactactgaattttgtcattcttgaaagtatgcaatttttattttggttatattacaaaaatgtcaatcaaatattaaaaaatagttaatgtgatagaaaaaccttacatatttttttcttatgtttgtttagcgactttagcaaaatgttttcatataatctcatctgtttacctagaagataggttaaggaaatatattattattcctgtttgatgtgggtgaaggcagagatctaacctggcttgtttagggccataccactaattagaaaatctgtgctagaacctgtgtcttattcctataagctatgtgttcagactgaaactggagaaattatgactattttatttatagtagtagttaaatctgaatgtgtatggattaaaaatatttaattgctgagtaaactgcttaacttcaaagatagttattgaccttataaataaatatttcaaaattttgattcggaagactaagtctggagctagacattataatgctatcaaagaagtttgatctctgttttgactaaactagaggaaaaatgattggatgtgtttattcttttctaagcagaatggtttaactttgtactctttgaaaaataatgctgatttataaatctctgcctataacagaatggaaaccttatgaattgtttgtgtttctctgtcctgagctcggtacccctggagaagggaatgagcaggctgacacgttgcacagccccaggtggcgccattctctcacgcaaggatggggctgcagggtgagcagcgtgggctgcagtgtgtcagtcccaggagtgagggagtggcaagcaccacagattaccacgtatgtgtggaagacattcgtactcttatctttactataaataaattcataaaagttaacaaaggggtacacagtatggtctttggaaatataataaaacatcaactaacttggactaattgtgaggaagagcagaacaaattagtagaaagaggttataagacaattgagttagcttcatgtgtattattgcagcttgatcatttatataaa

SEQ ID NO: 706 - DNA, 378 bp, Homo sapiens
  SIMILAR (2)..(214): 901254mologous to Homo sapiens CDS2 protein,accession number Y16521,Smith-Waterman Score=329.
  misc_feature (1)...(378): n = a,t,c or g
tggccatggaggcatcatggatcgctttgtttgccagtatctgatggccacctttgtcgagggggacatcgccagttttatcagaggccctagcccaagcaaactgattcagcagatcctgactttacggccagatcagcagatccacatcttcaacacgctgcggtctcatctgatcgacaaagggatgctgacatccaccacagaggacgagtaggggccacccagggccaggagaacaggaacagaactgagcaggggcaggtctccaaggcaagcccagctggtgtgacttacacaatgacgaggcttcaactcactgtcnnnnnnnnnnnnnnnggagggacttttttgtcgggggcaaaaaaaaacagggaa

SEQ ID NO: 707 - DNA, 3051 bp, Homo sapiens
  SIMILAR (2793)..(1468): 871254mologous to Homo sapiens CDS2 protein,accession number Y16521,Smith-Waterman Score=1982.
ggctgactgtgcactttcagggaggcagtgaggctaatttacaaacaaaaacaccacaaaccagcactagaccaaggtgcagaagcaaatcattacaccctcgttggcaatgaaaacatccacggcacggaatagtttgatatatttgggtgccaagttctctctcccgcactccatcacttgttggcctgacaaagaactaatctgtcttcccaaagtcaatctcacccctgaaattagggaggggaaaaaaaatcacagtttaagcaaacaacaacaacaaaaggtcccccagtacaatacaaactacatttaaactggtcacattatataaaaagtgtgcatttaatcttcaaaatagtcaaggctctaatcaggttaggttttccatagttttaagcaggactttgtggttttagtgaagaagtcatggtgcaattgaaatcactgtaagaaataagtgacttttaaaacaaacacagacacacacactcctcttaagagtaatatatacacaacacagcagctacatgggtgttcaggcaaagggtgcatgaacgagaagccctctgctccctgcccgatgagaaaagtccctaaaaaggattcagcagcagctagtctacagcacaaacatggatgggcattgtccctgaaaacacacagttaggtggacctacaggagacattggagcctagacatgtgggaaagggctcagttacagtacattctactggcatacacttgaaatattacagtgtgtttttttctccagactattataaataatttttccgtgctttctgaaaaaaaataaaaactgaaactttcaagtctgcgatgaaggtgaaccccatcttataaagcagagcttacttacattctgcaggattttggtgtggatgcatagaaggcttacctggttagtaagcctccattcctccgacctacagaaggcaacccttctgcagctccaagcagggatttctagaaaagaccaggtgtacaaaacatctaagctgtgccctcccaccacaggtggggaagtcccctgatttggtcagacacagatgaatgtctgtgtctgactgagcccagaaacagttcaattgatgggggctggaaccaccaagaaaacactcctgacctgggcaacactgtcttccagattattaatacttttgttttaaaaaaatccaaatggttttacaacccgtgacttctttccaactcaaagctgtagtttacttacaacacaaattctaaacacatagactgtatatacagattttttgaacccacaaataaaaaataccctccaaaaaaaaaaaaaaaaagacagtgagttgaagcctcgtcattgtctaagtcacaccagctgggcttgccttggagacctgcccctgctcagttctgttcctgttctcctggccctgggtggcccctactcgtcctttgggggggaaggtcaccatccttttgtcgatcagatgaaaccgcagcgtgttgaaaatgtggagctgctgatctggccgtaaagtcaggaactgctgaatcagtttgcttgggttagggcctttgataaaactggcgatgtatacattgacaaaggtgggccatcagatactgggcagtcaaagcgatccatgatgcctccatggccaggaatgggtattggcaaagtctttgattttaaaggctcgtttgaatccacttgcgaagaatccttccaaagggcccaatgagcgacgcaaaggtggagaggagcgatgctgtgaatctggaagggggtacatccggaccgttttcccagccaatgactgactggatcaccccagggatttttgtactcctgcaggcgcaaacaggtccgagggctcacagtccacagtgaagctgttggtgtcattgttgtactccacagggcagacaaagcatctgtacccggacatcacataggacagcagaaggccaaacaccacagtagcaaagaagcccccaatgaagccttcccaggtcttcttcggggacagcttgatgagtggggtccgaccaaagaaaaagccaaacatataggccatgatgtcattacagatcacacaagatatggggacaatgaaccagatcattccttcaaataggttgtggataacaagatgtgactgtgttacaacaatcagcaatgtcacatgggtccagccaaacatgtagaactgcagtcgataatgcttcttgaccagactcagtacaaacatgcagaatcctattagatagagagtaaaggaaatgaaccggtggtatttactgagaatccgcaaaggctcttctctctggaccagggtgaagaagtaatccgtcactgtctcaccatagaagaaatagtttacacacaggagaaagtaccagctgagcgtcctgaaccagggcagatcatatgagtggtagacgttgtagccaatagtgattatctcatggaaacacttaatctgaacgcacatcacgattatcatcaaaaccattggtcccaggtaaatgatgatgaagaaaaatgcaatcatggccaaagtcaggatgcctctcacccaccagttcttccatcttgaagacaagttggaaagggccctattgaggacctccggggtatcatctgcagagactggcaggggtgcggattctgcgcggctctcactgtccgatgcagtctctccatctacctttgcttctgactctgactccttgtcctcgggtggcgcaaccggctcatgggccaccctctgcctcagctctgtcatcctgggaaaatcggcccgacgtcgccgcgagctagcagcgaagccgccggagcaggcagctcggcgcgggcacgcgcggactcccacggccggccccgccccgcccgggaggcgcgcggctctgagcggctcacagttcccttagcagcccagcagccagccctggagctcggccccacccagtgccgtcaccgccctttcacccgggccgagcggggttcagccttccctagccccgacccgagagctccctctccc

SEQ ID NO: 708 - DNA, 546 bp, Homo sapiens
  SIMILAR (2)..(310): 1001254mologous to Homo sapiens GM2-activator protein,accession number X61094,Smith-Waterman Score=557.
gaaggaccctgcggtgatcagaagcctgactctggagcctgaccccatcgtcgttcctggaaatgtgaccctcagtgtcgtgggcagcaccagtgtccccctgagttctcctctgaaggtggatttagttttggagaaggaggtggctggcctctggatcaagatcccatgcacagactacattggcagctgtacctttgaacacttctgtgatgtgcttgacatgttaattcctactggggagccctgcccagagcccctgcgtacctatgggcttccttgccactgtcccttcaaagaagtaagtacttagggaggagagagcgttacccctgtggctaaagagatggggtttggagagaagggtctttgcattctccttctgcagatctgcatgtctctggatttgtaagccagtgtgacctatcaggaatcacttatcttccgggagcctcagttatccatctacgaaatgggagacttgaacttagatgtgatcttcagggccctttatccataataatccatgctctacagtgctaaaaa

SEQ ID NO: 709 - DNA, 825 bp, Homo sapiens
  SIMILAR (1)..(480): 431254mologous to Escherichia coli O157:H7 anaerobic dicarboxylate transport,accession number AE005646,Smith-Waterman Score=211.
atgctggttatcattgcggtggtggcggcatcgggaccttgcaagcttcgggcggtcttgatgtcatgctgcaaattgccgagagctgctgcgccgcaacccgaaatatgtctcaattgtcgcgccgtttgtacctgtacactgaccattctttgcggtacgggtcatgtggtttacaccatctgccgatcatctacgacgtcgccattaagaacaacatccgtccggaagtccgatggcggcaagttctatcggtgcacagatggggattatcgccagccggtgtcggttgcggtcgtgtctctggttgcgatgctgggtaatgtcactttgatggtcgccatcttgagttcctcgatctgctggcaatcaccattcatcgacgttaatcggtatcctggcgatcggtatcttcagctggttccgggtaaagatctggataaagacgaagagttccagaaattcatctccgtacggaaaaccgttgtaccagtcagtcaagctgatgtacctatcggcatcttcttcacctatgccctccagttccacgtcccagctgaatcatcatcccgtttgccatctcccaagtgtcagagagctgggcactgttgtagacctgtctgtccgctcagccttgttaatgatggcaggttagtgttggttaatactgagtgtcaacttgatcggatcaaagtattgatcctgggtgtgtctgtgaggatgttggcaaaggagattcctttgagtcaggggctgcgcaacggcaccccttataacccgattgtaacacagaatcggacaaacgcacaaagcaggaaagattga

SEQ ID NO: 710 - DNA, 468 bp, Homo sapiens
  SIMILAR (88)..(258): 441254mologous to Homo sapiens GM2-activator protein,accession number X61094,Smith-Waterman Score=115.
atgagggacaaagggtctcaggaaaggttgcaacttgacccaggtcaaaagctagttgttagcatggacaaggctggtggatttagtttggagaaggaggtggctggcctctggatcaagatcccatgcacagacacattggcagctgtacctttgaacacttctgtgatgtgcttgacatgttattcctactggggagccctgcccagagcccctgcgtacctatgggcttcttgccactgtcccttcaaagaaatttgcccaattaatactagggttagacagaccaaggctgagcggacagacaggtctacaaacagtgcccagctctctgacacttgggagatggcaaacgggatgatgatctcagctgggacgtggaactggagggcataggtgaagaagatgccgatagagtacatcagcttgactgactggtacaacctgcagcacatgaattggatgtga

SEQ ID NO: 711 - DNA, 2471 bp, Homo sapiens
  SIMILAR (93)..(671): 1001254mologous to Homo sapiens G-M2 activator protein,accession number M76477,Smith-Waterman Score=1017.
tttctttgcgtaaccaatactggaaggcatttaaaggcacctctgccgccacagaccttgcagttaactccgccctgacccacccttccgccatgcagtccctgatgcaggctcccctcctgatcgccctgggcttgcttctcgcggcccctgcgcaagcccacctgaaaaagccatcccagctcagtagcttttcctgggataactgtgatgaagggaaggaccctgcggtgatcagaagcctgactctggagcctgaccccatcgtcgttcctggaaatgtgaccctcagtgtcgtgggcagcaccagtgtccccctgagttctcctctgaaggtggatttagttttggagaaggaggtggctggcctctggatcaagatcccatgcacagactacattggcagctgtacctttgaacacttctgtgatgtgcttgacatgttaattcctactggggagccctgcccagagcccctgcgtacctatgggcttccttgccactgtcccttcaaagaaggaacctactcactgcccaagagcgaattcgttgtgcctgacctggagctgcccagttggctcaccaccgggaactaccgcatagagagcgtcctgagcagcagtgggaagcgtctgggctgcatcaagatcgctgcctctctaaagggcatataacatggcatctgccacagcagaatggagcggtgtgaggaaggtcccttttcctctgttttgtgtttgccaaggccaaactcccactctctgcccccctttaatcccctttctacagtgagtccactaccctcactgaaaatcattttgtaccacttacattttaggctggggcaagcagccctgacctaagggagaatgagttggacagttcttgatagcccagggcatctgctgggctgaccacgttactcatccccgttaacattctctctaaagagcctcgttcatttccaaagcagttaaggaatgggaaccagagtgttttaggacctgaagaatctttatgactctctctctttcactctttttttttttttgtcactaagttaaaagcgaagtgagagtattaacgtttttgttctcctccggccccctgttacaatgaaggggcaaaagtatttgctcttagtctattcctcccttaacttctgtgactaatttttatttcctttctagatttgcccaattaatactagggtgcagtgtatcctggagaggtagggtgtgtgggggaggaatcccttgggggagatattaggagtgctctgttgtttacaaactcacggtacccgcagggcctagcaagagacttaaatgactgataagaaccgtgagaaacatgttgcttccaggcttgatttcgatttttcgctttttttttttttgagacagaatctcactttgtcaccaggctggagtgcagtggtgcaatctcacctcactgcaacctccgcctcctgggttcaagcaattctcctgcctcagcctcccaagtagcttggactacaggccctgccaccacgcccggctaatttgtgtatttttagtagagatggggtttcaccatgttggccaggatggtctcgatctcttgacctcgtgatctgtccaccttggccttgcaaagcgctggattacaggcatgagccactacacccagccgatttttcctttttgattaaagatgctattacaatgtaaatatttcttacacagaaagtcacagcacatgtgcccattgatacaaggctgctgaggcctggtctccagttggaaatataattaagggtggcaaggactggagtcagttggagagtgcatagccagtctgtgaagacaactgccagatactggcaatactccagcctggtgacagagtgagactctgtctcaaaaaaaaagtttcaatgtttactcctagagaagccaaaaatccagatttgtatatgaaatcttaccattttaaaagattggcagctaattatttttttaaaaagctgtgcagtgtgatgtgtcccaaacggactggctcatgggtggccacgtcacaacctctgatctcagaccgtgcatgccttgtcctcttaagacaactcctgtggcaccgtttctccctccacagggccaaagccatagtgtccggtcccaaggacaaggctcttccagtgctaggagaggtatgagcagcctctcacctgtgagctgtggggatcacaaggctgcctgcctcagtcttggagtcctgttgggtgaatgaggcagatgggaaagagcctcaccagcagctgcttttggagcaggggtccaaggaagagagggtggcctcgacatcaaactgcctggatttttctaccaccctgttacatcataacaacttctgaaacacacaccagccctgagttctgggctcatttgaagcctggaatagcaataaatctttttaacttgcggacagtt

SEQ ID NO: 712 - DNA, 687 bp, Homo sapiens
  SIMILAR (238)..(318): 661254mologous to Homo sapiens dJ382I10.4.2 (CMP-sialic acid transporter (isoform 2)),accession number AL049697,Smith-Waterman Score=98.
atggtgctggcatctgctcagcttctggggaggcctcaggaaacttacaatcatggtggaaggcaaagggagagctggcacttcacatggccagagcaggaggaagagagtggtgagaaggtgctacacacttttaaacaaccacatctcatgagaacgaactcacgtcatgagaacagcactgagtggaatggtgttaaaccattcacgagaaaccacctccatgatccaatcaccacccaccaggctccacctccaacactggggtttacaattcaacatgagatttggatagggacacagatccaaacaatatcaggctcacctgcccacccagtaaggttgtcgaggcgggaggctgccttccggagcccctactcctcaacagagcccctctgctctcccagtgagtctgacagtgaccgagggacgtcgggggcgggaactcagcatctccagaagctctcccaagagctggacgaagctattatggcggaagagagtgatgacatgaccgtctctctcattcaccacggaggaagtgccctgcagttctgttctgcaggaaacaagacctgtctgaccaccgaggcttcatacccaaggatgtctgtgcttccaatgagcttcctggaggaaccccccaggagtcatcagtacccctgggccatgctaacaaggacctga

SEQ ID NO: 713 - DNA, 687 bp, Homo sapiens
  SIMILAR (21)..(251): 381254mologous to Homo sapiens putative transcription factor,accession number AJ009770,Smith-Waterman Score=168.
acgcgtccgctcaccggctgctgcagcattatcagttgcacagtgcagcagtgaacgggctctctttccacccgtcgggaaactacctgatcacagcctccagtgactcaaccctgaagatcctggacctgatggagggccggctgctctacacactccacgggcatcagggaccagccaccactgttgccttttcaagaacgggggagtattttgcttctggaggctctgatgaacaagtgatggtttggaagagtaactttgatattgttgatcatggagaagtcacgaaagtgccgaggcccccagccacactggccagctccatggggaatctgccagaagtggacttccctgtccccccaggcagaggcaggagtgtggagtctgtgcagagccagccccaggagcccgtgagtgtgccccagacactgactagcacgctggagcacattgtgggccagctggatgtcctcactcagacagtctccattctggagcagcggttgacactgacagaagacaagctgaagcagtgtctggagaaccagcagctaatcatgcagagagcaacaccatgatcaggggagcaggaatcaggagctcggtggatttgcaggtggcaggccagggatttgtaccatgggacttgggtaaataaaggggactgaactctgtgggactccc

SEQ ID NO: 714 - DNA, 868 bp, Homo sapiens
  SIMILAR (830)..(534): 341254mologous to Platichthys flesus nuclear matrix protein 200,accession number AJ291835,Smith-Waterman Score=158.
  misc_feature (1)...(868): n = a,t,c or g
cctctcattcgggtctgaagcatcatttgtgtgtgagcccggcccactggggacctctggctgccaggtggagagcctcctggtgcagatagcaaggtggagggcagaactgcaaaaatccagggctccagtatggatgtgattcccacagagttcagtcccctttatttacccaagtcccatggtacaaatccctggcctgccacctgcaaatccaccgagctcctgattcctgctcccctgatcatggtgttgctctctgcatgattagctgctggttctccagacactgcttcagcttgtcttctgtcagtgtcaaccgctgctccagaatggagactgtcagattccccatggagctggccagtgtggctgggggcctcggcactttcgtgacttctccatgatcaacaatatcaaagttactcttccaaaccatcacttgttcatcagagcctccagaagcaaaatactcccccgttcttgaaaaggcaacagtggtggctggtccactgatgcccgtggagtgtgtagagcagccggccctccatcaggtccaggatcttcanggttgagtcactggaggctgtgatcangtagtttcccgacgggtggaaagagagcccgttcactgctgcactgtgcaactgataatgctgcagcagccggtgagtccgcacgtcccacaccttcactgtgttgtccatgccggcagcggcaatgcacgtcccactgggggtgaagtccacataagtgacaaagccgccatgctcacaatacgagtggacacattcccggctgcttttgtccacagcttaacagttcttgtcatacttggcgaacacatgagcccgcccgcgggggaaaa

SEQ ID NO: 715 - DNA, 3019 bp, Homo sapiens
  SIMILAR (1543)..(2508): 1001254mologous to Homo sapiens protein-tyrosine- phosphatase,accession number X93921,Smith-Waterman Score=1693.
atggcaaagcatgaggagaagagacgccaaataccatacgagtgggacacagttgacaccgtccatcactgccactctgccctcaaggtgaaaatcaccagctctccactgggcattaccaatgggccaaacccaaggctgaagaccccagcaaacaattgttacaagacgattcttgtggcctctgtgggctctcctgtggagaggaaggtgcctagccagatccctggcatcccccatgctgtgcccagccccagtacatcccatgtaaaccggagacgccccacagaactggaacaacagggtctgcagggggattacatgaatgagtacaagggagtcaggggtctcttattagcgttcctgcacttcaatcccagagacaaggacttggctggggcccaggctattcaccagcaggtcacctctgggctcaaagttcctcctctgtgtggcatagggggcaggaatgaatttcccccaggagccagagatgggccacctgacagtctccattctggagcagcggttgacactgacagaagacaagctgaagcagtgtctggagaaccagcagctaatcatgcagagagcaacaccatgatcaggggagcaggaatcaggagctcggtggatttgcagggtctgctctcaacaccatcctccccctgcactgtcgatgggaagaagctgcgggctcagggtgctctggcagctgctgggacctgccgcacttttcccacgtggccctgccggtgtgtggacgagcctggcaggcctgctggtccatgctggcaggctgctgaggaaaccacacgtgctaaggcagcggtggcaggccaggaggtcctggtgccctggggcatggctccacttcctgtgagcattgccgtcctggaacagggcctcttcccattgcctgccacgtcccggcgcctggtgagacatcttagccccagcagctgggccagggtggtttctgatcccaccggggcagctggacctgtgtgtgaaaagcagatcccagggccacttgagcaggcccaaggctttccatctgaaaaatgggaagggaagtccagggaagagaatatggtacgtagaacagccaccaggcaacagagttccacatcctccctggaggacacagtgaaggcccggttccatgggctgttagcggaggttatgcaaaacaaactggtgctattgtcaccaggatttgggaaatgccaggatgaacaaaggatgacctccgtgtcagcagatggggtgcccagcgcgggcgcacatgtcgacttcgggggcggcggcggctgggggcacccgggcggggtccgagcccggtgcggggtcggggtccggcgcaggcaccggggcgggcgcggcgacgggggcaggggccatgccctgcaagagcgccgagtggctgcaggaggagctggaggcgcgcggcggcgcgtccttgctgctgctcgactgccgggccggcacgagctcttcgagtcgtcgcacatcgagacggccatcaacctggccatcccgggcctcatgttgcgccgcctgcgcaagggcaacctgcccatccgctccatcatccccaaccacgccgacaaggagcgcttcgccacgcgctgcaaggcggccaccgtgctgctctacgacgaggccacggccgagtggcagcccgagcccggcgctcccgcctccgtgctcggcctgctcctacagaagctgcgcgacgacggctgccaggcctactacctccaaggtggtttcaacaagtttcaaacagagtactctgagcactgcgagaccaacgtggacagctcttcctcgccgagcagctcgccacccacctcagtgctgggcctggggggcctgcgcatcagctctgactgctccgacggcgagtcggaccgagagctgcccagcagtgccaccgagtcagacggcagccctgtgccatccagccaaccagccttccctgtccagatcctgccctacctctacctcggctgcgccaaggactccaccaacctggacgtgctcggcaagtatggcatcaagtatatcctcaatgtcacacccaacctacccaacgccttcgagcacggcggcgagttcacctacaagcagatccccatctctgaccactggagccagaacctctcccagttcttccctgaggccatcagcttcattgacgaagcccgctccaagaagtgtggtgtcctggtgcactgcctggcaggcatcagccgctcagtgacggtcactgtggcctatctgatgcagaagatgaacctgtcactcaacgacgcctacgactttgtcaagaggaaaaagtccaacatctcgcccaacttcaacttcatggggcagctgctggactttgagcggacgctggggctaagcagcccgtgcgacaaccacgcgtcgagtgagcagctctacttttccacgcccaccaaccacaacctgttcccactcaatacgctggagtccacgtgaggcctgggtgcacggggggcatggcaccagggccctgctcggctctccacagggctaggtgggagagcccaagcccgccacctctggcctgaggaacccccagatgttcacctgttgcccagaggcccagggttgatcggtgtcggagacgcccctcaccatccttgggggcagggcccagcaggcaaggtctcccactgcagggcttgctggagaggcctcggctcttggacacgtggctttgggcgtccaccagggcctcatcctgtccaggacgctcctttctgctgacagcccagccagtttggctgttttttaaagacacatccacggacctgagtttactttttacttttggcaggtaaatccaagctccctggagcacaaagagtgtttgagctcttcttgatttttctttttttttttttttttttaacaaaaagtgttattttcaggctacatgcaacagtggattgtataacccagtatttcatccctttcctgatcc

SEQ ID NO: 716 - DNA, 410 bp, Homo sapiens
  SIMILAR (20)..(112): 471254mologous to Homo sapiens PRO1434, a nel homologue,accession number Y96732,Smith-Waterman Score=70.
  misc_feature (1)...(410): n = a,t,c or g
gataattaattacacaaacccttcacagactgctctggtgcctggtggtgctagctcctcccacctcagcacctgctgcatctggagcagcccaagcctcaggatggacaagaggaaacccacagctcagcttcaggcttcttatgtttctgaaaacagcttggatattttaatgcacgttgcattaaacctcactgaaacctgnnnnnnnnnnnnnnnnnnnnnnnnnnnnnnnnnnnnnnnnnnnnnnnnnnnnnnnnnnnnnnnnnnnnnnnnnnnnnnnnnnnnnnnnnnnnnnnnnnnnnnnnnnnnnnnnnnnnnnccttnnnnnnnnnnnnntttcccccnnnnnnnnnnnnnaaggannnnnnnnnnnngagggggaaaaaaaaatgcgcccgggggcggcg

SEQ ID NO: 717 - DNA, 935 bp, Homo sapiens
  misc_feature (1)...(935): n = a,t,c or g
gctgcaggcgcctgcgcagtgtagccggcgtcagctggaccagggtcatcctgaagggttggactccgcccgcgatggtgacccggttccctgggccccacgccttnccgggagcttggtcaaagaactggggtcccgacggccctacacaatggggcgctgtgggcggctcgcggggcctnggtgtgggcccacccgattggccggctgatccctggactgggtacccttacatcaatggcaaagttttaagaaggataattaaattacacaaaccctttcacagactgctctggtgcctgggtggtgctagctcctcccaacctcagcaccctgctgcatcttggagcaacccaaagcctcaaggaatggacaagaaggaaacccacaagctcagcttcaaggcttcttatgttttctggaaaacagcttgggatatttttaattgcacgtttgcatttaaaccctcactggaaacctgctccgtgccccggatgttgatcatgctggtggcttggttactgtgactgtagctggagtggcacaggtgacccaggcgtcctttcagcttccagaatgttgcaaagtttaggagagtgttccaatggcttgacaagaaactgcctatttgaaatggctcataagtagtatctgcagtgtgttcatccgttgctgccttaacaagtcacccacacgtagtggctttaaagcaacgaacattcactctcttcacagtctgtgttcagtcggggatttggggagtgatgtatctggggtggttgtgggcccagagtctctcattgaggtttgcagtttaaggacattcagccaagggccatttcgtnttgagggaaggttcaactggggggtgggagccactttccaagccagttgccttcaagttggcngttcggtgacaccncaagttttccctt

SEQ ID NO: 718 - DNA, 263 bp, Homo sapiens
  SIMILAR (91)..(261): 821254mologous to Homo sapiens Human mammastatin amino acid sequence,accession number Y23756,Smith-Waterman Score=236.
gtgccaatgctggcccagctctccgtgttccggtgtgggtcgacaagtgcccccaatgatttatggtacaacttcattgaactgccctacctcggttggcctcggatagccggtcccccgcctgtccccgccggcgggccgcccccccctccacgcgccccgcgcgcgcgggagggcgcgtgccccgccgcgcgccgggaccggggtccggtgcggagtgcccttcgtcctgggaaacggggcgcggccggaaaggcggccgc

SEQ ID NO: 719 - DNA, 1725 bp, Homo sapiens
  SIMILAR (387)..(476): 661254mologous to Mus musculus protease-nexin 1,accession number X70296,Smith-Waterman Score=106.
atggcctcgcaggccaggtcgtccttggtggaaggaaccatgaactggcatctccccctcttcctcttggcctctgtgacgctgccttccatctgctcccacttcaatcctctgtctctcgaggaactaggctccaacacggggatccaggttttcaatcagattgtgaagtcgaggcctcatgacaacatcgtgatctctccccatgggattgcgtcggtcctggggatgcttcagctggggggcggacggcaggaccaagaagcagctcgccatggtgatgagatacggcgtaaatggagttggtaaaatattaaagaagatcaacaaggccatcgtctccaagaaggataaagacattgtgacagtggctaacgccgtgtttgttaagaatgcctcctgaattcgaagtgccttttggtacaaggaaccaagatgtgttccagtgtgaggtccggaatgtgaactttgaggattccagcctctgcctgtgattccatcattgcatgggttaaaaatgaaaccagggatatgattgacaatctgctgtccccagatcttattgatggtgtgctcaccagactggtcctcgtcaacgcagtgtatttcaagggtctgtggaaatcacggttccaacccgagaacacaaagaaacgcactttcgtggcagccgacgggaaatcctatcaagtgccaatgctggcccagctctccgtgttccggtgtgactgtccgtcattttctgcctgtttcctcactctgacctgcaggagtggcccagctcgagctgctgtgtccaaactcacagggcccagggcttttacagataaagaaactaagacttggagtcaaggaacttgccaaagtctcagagctagtgtgctacaagtgcaggatttgaatacaggtcttataaccccagatctcgtggctttggcacgtgtcctctataaaaggatgcagtacttgagtgaccaggtagaaagacagaaaaggtgttattttatctcccagctcctcaaggcaccaaataaagggtcgacaagtgcccccaatgatttatggtacaacttcattgaactgccctaccacggggaaagcatcagcatgctgattgcactgccgactgagagctccactccgctgtctgccatcatcccacacatcagcaccaagaccatagacagctggatgagcatcatggtgcccaagagggtgcaggtgatcctgcccaagttcacagctgtagcacaaacagatttgaaggagccgctgaaagttcttggcattactgacatgtttgattcatcaaaggcaaattttgcaaaaataacaaggtcagaaaacctccatgtttctcatatcttgcaaaaagcaaaaattgaagtcagtgaagatggaaccaaagcttcagcagcaacaagcttattaaatggaaacaagcctggcagacgaggaatggccaagacccatgaggctaaagaagtttgctttccaagtcagatgcctacacctgctgcaattctcattgcaagatcatcgcctccctggtttatagtagacagaccttttctgtttttcatccgacataatcctacaggtcatgagatgggtacttccgattctgccttggtcactgtggaggaagagcgtaggtaccgacccaaatactctgaaagctctgacttagctggcctttcactctgtcctaaaaaggagaggtga

SEQ ID NO: 720 - DNA, 1825 bp, Homo sapiens
  SIMILAR (656)..(1423): 521254mologous to Homo sapiens Protease Nexin-1 type beta,accession number R74558,Smith-Waterman Score=468.
  misc_feature (1)...(1825): n = a,t,c or g
ctgcccgggctgcgcggcgtctgcaggcgccaccgctgcctctttccggctgtgaccctcctcgccgccgccgcttggctgcgtcctccgactccccgcgccgccgagaccaggctcccgctccggttgcggccgcaccgccctccgcggccgccccctggggatccagcgagcgcggatcgtccttggtggcaaggaaccatgaactggacatctccccctcttcctcttggcctctgtgaacgctgccttccatctgctcccacttcaatccttctgtctctccgaggaactaggctccaacacggggatccaggttttcaatccagattgtgaagtccgaggcctcatgaccaacatcgtgatctctccccatgggatttgcgtcgggtcctgggggatgcttcagcttgggggccggacggcaggaccaagaaggcagctcgccaatggtgatgaagatacgggcgtaaatgggagttgggtaaaatatttaaagaaggatcaacaagggccattcgtcttccaagaaggaattaaaggacattgtgacagtgggctaacggccgtgttttgttaaagaatgcctctggaaatttgaagttgccttttggtaaccagggaccaaagatgtgttccaagtgtgaggtccgggaatgtgaactttgaggatcccagcctcttgccttgtgattcccatcaatgcatgggttcaaaaatgaaaacccagggatatgattgaacaaatctgctgtccccagatcttattgatgggtgttgctcaccagactggtcctcgtcaacgcagtgtactttcaagggtcctgttggaaatccacggtcccaccccaagaacacaaagaaacgcacctctcgtggcagcccgacgggaaaatcctatcaaggtgccaatgctggccccagctctccgtggtttcggtgtgggtcgacaagtgcccccaatgatttatggtacaacttcattgaactgcccttaccacggggaaagcatcagcatgctgattgcactgccgactgagagcttcgactccgctggtctgccatcatcccacacatcagcaccaagaccatagacagctggatgagcatcatggtgcccaagagggtgcaggtgatcctgcccaagttcacagctgtagcacaaacagatttgaaggagccgcttgaaagttcttggcattactgacatgtttgattcatcaaaggcaaatttttgcaaaaataacaacagggtcagaaaacctccatgtttctcatatcttggcaaaaagcaaaaattgaagtcagtgaagaatgaacccaaagcttcagcaggcaacaactggcaattctcattggcaagatcatcgccttccctgggtttatagtagacagaacctttttctggttttccatccgacattaatccctacagggtggctgtgttatttcatggggggcaggttaaacaaaccctggaagagtataccaaaagaaaccattgcaaagcaacgacttacttttgctacgaagaaagactcctttcctggcatctttcatagttctgttaaatattttttgtacatcgcttctttttccaaaactaagttcttagggaacagactcgatgcaagtgtttccggttctgggagggtattggaggggaaaaaacaagcaggatggctggaacactgtactgaggaatgaataggaaaggcttccagatgtcttaaaaggattctttaaaacttactggaactgtttacctagggtttaacaaccctgtttgagtatttgctgtttgttccngtttcagggatttttg

SEQ ID NO: 721 - DNA, 510 bp, Homo sapiens
  SIMILAR (1)..(180): 1001254mologous to Homo sapiens Human ovarian tumor EST fragment encoded protein 57,accession number Y76561,Smith-Waterman Score=307.
tcggacggagagcgcgaggactcggcggctgagcgcgcccgacagcagctagaggcgctgctcaacaagactatgcgcattcgcatgacagatggacggacactggtcggctgcttcctctgcactgaccgtgactgcaatgtcatcctgggctcggcgcaggagttcctcaagccgtcgggtcagtgcccggggaatgcacacccgcctggtaatgtggcggaaccttacgcaaggcatttccccttaagggcctggctgcaacccttgttttctggggctcgttttcgtggctcagaggggcgggactgattctggcctactttcctgatgctctgatccttctttccagattccttctctgccggggagccccgtgtgctgggcctggccatggtacccggacaccacatcgtttccattgaggtgcagagggagagtctgaccgggcctccgtatctctgaccacgatggcgcttacctttcagacttcattaaacttatgaccga

SEQ ID NO: 722 - DNA, 644 bp, Homo sapiens
  SIMILAR (582)..(529): 501254mologous to Homo sapiens Human HUPF-I mutant protein fragment 33,accession number Y21385,Smith-Waterman Score=40.
  misc_feature (1)...(644): n = a,t,c or g
cagtactttcacccactcatgttttgcaaggaagacttttctgaagctcccggaccgccgcggggccacgggccggagccccggattcgcactccgtattagccacggctgggccgcgcgtatatttgccttccctccatgatctccaacactatccgataaagtagaagcaactggaggtacccgtgaaaagagaaaggaactggaacttgagaaaaaagccagaggattcggacggaagagcgcgaggaacttcggcggctgagcgcgcccgacagcaagctagaggcgctgctcaacaagactaatgcgcattcgcattgacagatggacggacactggtcggctgcttcctctgcacttgacccgtgactgcaatgtcatcctggggctcggcnccaggagttcctcaaagccgtcgggtcagtgcccggggaatgcacacccgcctgattccttctctgccggggacgccccgtgtgcttgggcctggccatggtgaccccgcacaccaccattgttctccattgaaggtgcagaggaagaagtttgacccgggcctccggtatttcttgaccacgatggcggcttacctttatagactctcattaaaacttatgaccgaaaacaaaaaaaaaaaaaaa

SEQ ID NO: 723 - DNA, 2533 bp, Homo sapiens
  SIMILAR (160)..(2328): 1001254mologous to Homo sapiens DNA binding protein RFX2,accession number X76091,Smith-Waterman Score=3750.
gggagccggaggaggagcggccgccgccgccaccgccgccgccatagagactgtagccgtggagactgttacttaccaacggggaccaacacgcagcagccgctgccgccgccgcgggagccgctgcccgaactcccggcccgaactccagacctgagcatgcagaattccgagggtggagcggattcgccagcgtccgtggctctgcgtccctcggcggcagccccgcctgtgccagcctccccgcagagggtgttggtccaggcagccagctccaatcccaaagggtcccagatgcagccgatctccctccccagagttcagcaggtaccccagcaggtgcagccggtgcagcacgtgtatcctgcccaggtgcagtacgtggaagggggagacgccgtctacaccaatggagccatacgaacagcctacacctacaaccccgagcctcagatgtacgcccccagcagcacggcttcttacttcgaggccccaggcggtgcccaggtgaccgtggcagcctcgtccccgccagcggtcccctcccacagcatggtgggcatcaccatggatgtcggggggagccccatcgtctccagcgcgggagcctatctcatccacggggggatggacagcaccagacactccctggcccacacctcccgctcatcgcccgccacgcttgaaatggcgattgaaaacctccaaaaaagcgaaggaatcacatcacacaaaagcggtttactcaacagccatctccagtggctgttggataattatgaaacagcggaaggtgtgagtctccccagaagttctctttacaaccactaccttcggcactgccaggagcacaagctagacccagtgaacgccgcctccttcgggaaactgatccgttctgtgtttatggggctgagaacgcggcggctgggcaccaggggcaactcgaagtaccattactatgggattcgtctgaagccggactcaccactgaaccggctgcaggaggacacgcagtacatggccatgcggcagcagcccatgcaccagaagcccaggtaccggccagcccagaagacggacagcctcggggacagcggctcccacagcggcctgcacagcactccggaacagaccatggccgtgcagagccagcaccaccagcagtacatagatgtctcccacgtcttccccgagttcccagcgcccgacctgggcagcttcctgctgcaggacggcgtcacactgcacgacgtcaaggccctgcagctggtgtacagacggcactgcgaggcaactgtagatgtggtgatgaacctccagttccactacatcgagaagctgtggctctccttctggaactctaaggcctcctccagcgacggccccacctctcttcctgccagtgacgaagaccccgagggcgccgtcctgcccaaggacaagcttatctccctgtgtcagtgcgaccccatcctcaggtggatgaggagctgcgaccacatcctctaccaggcgctggtggagattctcatccccgacgtgctgaggccggtccccagtaccttgacacaggccatccgtaactttgccaagagcttggaaggctggttgacaaatgccatgagtgacttcccacaacaggtcatccagaccaaggtgggcgtcgtcagtgccttcgcccagacgctgcggcgctacacgtccctcaaccacctggcgcaggcggcccgggcggtgctgcagaacacgtcccagatcaaccagatgctcagcgacctcaaccgcgtggactttgccaacgtgcaggagcaggcctcgtgggtgtgccagtgcgaggagagtgtggtgcagcggctggagcaggatttcaagctgaccctgcagcagcagagctccctggaccagtgggccagctggctggacagtgtggtcacccaggtcctgaagcagcatgccggcagccccagcttccccaaggccgcccggcagttcttgctgaaatggtccttttacagctccatggtgatccgggacctgaccctgcgcagcgctgccagcttcggctccttccacctcatccgcctgctctacgacgagtacatgttctacctggtggagcaccgcgtcgcggaggccaccggagagacgccgatcgctgtgatgggagagttcaacgatctcgcctctctgtcgctgacgctgctcgacaaagatgacatgggcgatgagcagcgtggcagcgaggcgggcccagacgcccgcagcctgggtgagcccctggtaaagcgggagcgcagtgaccccaaccactccctgcagggcatctagcagccccggccggcgcctcctcgaggttccaaaagatgccgcctggtcactctgggaacctggatttcaccggctccaccaaattagtgcctcttagatgatgtgatgtttactttgactcaagcgggggctcccggggtcagtgttcaagaaggaaagcagttgttgaagctacagaagcccaggccagggctcccactgg

SEQ ID NO: 724 - DNA, 939 bp, Homo sapiens
  SIMILAR (70)..(324): 1001254mologous to Homo sapiens RFX2_HUMAN,accession number AC005784,Smith-Waterman Score=424.
atgaagtctggcctggggcccgggttccatgctcccctgagggtccccagcctctgtccgcttgtccccagctccatggtgatccgggacctgaccctgcgcagcgctgccagcttcggctccttccacctcatccgcctgctctacgacgagtacatgttctacctggtggagcaccgcgtcgcggaggccaccggagagacgccgatcgctgtgatgggagagttcaacgatctcgcctctctgtcgctgacgctgctcgacaaagatgacatgggcgatgagcagcgtggcagcgaggcgggcccagacgcccgcagcctggctcgaaaaagaacaagccacagaaacgggctcgctcgtgccaggacacagcagtgtctttcaaaaaatcaaaaccagaagttttatcagcagcaggaaggatgtgggactctgtccaagttcaccgtcaccatcaagccactggctgtggaaggagtttgtccaacagggtcagtgtcacagccacaacttcagaaagcagccatcccgcgtgtcgtccaaacagcagtgcctgcgtcccgctccacggagtcttccagaacacctccctctgaactaatcccggagcaccccacccccagcgagtcccacctggacctcttcaaagtcaaaactcttctctcgggacaaacaaatattcgggactttcgaagccctgaacttgagacaccaagtttgtctccatggaaacacgtagccgctgcagttggacagctgcgtgctggagttctgtccccaaaccaactgcagagaagaaagacgagcctcggccccaggacgcgatttctaacgaaatgcaatagttttctctttttggaaaaatgtttataccaatagttttgtgcgctaattgttattagaacgtttcttatgaatgtgtacattgcagtaaaa

SEQ ID NO: 725 - DNA, 1179 bp, Homo sapiens
  SIMILAR (164)..(769): 361254mologous to Homo sapiens DNA binding protein RFX2,accession number X76091,Smith-Waterman Score=161.
atggccctggactcctgcagcctgttagggtaccttgacacaggcatccgtaactttgccaagagcttggaaggctggttgacaaatgccatgatgacttcccacaacaggtcatccagaccaaggtgggcgtcgtcagtgccttcgcccagacgctgcggcgtacacgtccctcaaccacctggcgcaggcggcccgggcggtgctgcagacacgtcccagatcaaccagatgctcagcgacctcaaccgcgtggactttccaacgtgcaggagcaggcctcgtgggtgtgccagtgcgaggagagtgtggtcagcggctggagcaggatttcaagctgaccctgcagcagcagagctcccggaccagtgggccagctggctggacagtgtggtcacccaggtggtctctgaactgagcgcgcaggccggccccacctgtccgtcacgtgggcccagggttcggcagcccgtcagcccccgcctccatggtgatccgggacctgaccctgcgcgcgctgccagcttcggctccttccacctcatccgcctgctctacgacgatacatgttctacctggtggagcaccgcgtcgcggaggccaccggagagagccgatcgctgtgatgggagagttcaacgatctgcctctctgtcgctgacgctgctcgacaaagatgacatgggcgatgagcgcgtggcagcgaggcgggcccagacgcccgcagcctggctcgaaaaagaacaagccacagaaacgggctcgctcgtgccaggcacagcagtgtctttcaaaaaatcaaaaccagaagttttatcagcagcagaaggatgtgggactctgtccaagttcaccgtcaccatcaagccactggtgtggaaggagtttgtccaacaggactctgaaccctgcgttgaaggaactgctttcggggggttgcaatcagtctccaaacaggtaaccctcagcacccaggaattttctagccagtctcagaaggggattctcaacctcgtgaagccctcccgaggtgacagccccagttttcaaggtggggctccatacggcttggcaacagcagcagcaggctgggagcgaggtgcaactagactccctacctccacttccacgacctggctcatggaagacaccagaacccagcagatgcggagcttaccg

SEQ ID NO: 726 - DNA, 840 bp, Homo sapiens
  SIMILAR (682)..(834): 981254mologous to Homo sapiens Polypeptide identified by the signal sequence trap method,accession number Y02377,Smith-Waterman Score=255.
atggctgtgacacgacgctctggtctggaaaagagcttcctttcctgcaaaagtttgtttttgagcacctatgacgtgtcacccctgtctaggctcaagaaccgagaaggtgcaggcaatgggccagatattgaagaatgtcgcaatataatcgtgcagtttggtgttcgggaggtcacagctgcccaggttgcaagggttttgggaatgatggctcgaactcattcaggattaacagatggcattccattacagagtatttctgctccgggcagtgggatctggagtgatgggaaagataaaagtgatggagcacaggcacacacatggaatgtagaagtcttgattgacgttcttaaagaactgaatccaagtttgaatttcaaggaagtaacttatgaactggaccatcctggatttcaaattcgtgacagtaaaggacttcataatgtggtttatggcattcagaggggtttgggtatggaagtgttcccagtagacctcatatatagaccttggaaacatgctgaaggccagggacagtctccctcaattcgccaacttatcatgcatgcaatggcagaatggtacatgagaggggagcagtatgatcaggccaaattgtctcgaatacttgatgtggcccaggacttgaagattgtaatcttagaaattttaaggagtgtttctcaggagctatcagaaactatcctcaccatggtagccaattgcagtaatgttatgaataaggccagacaaccaccacctggagttatgccaaaaggacgtcctcctagtgctagcagcttagatgccatttctcctgttcaggtcaaatag

SEQ ID NO: 727 - DNA, 665 bp, Homo sapiens
  misc_feature (1)...(665): n = a,t,c or g
ggcacgagcagttacctcctgattaattccctgcttcttgtggtgctttccacagatcactgcctgcatagcaaacagaatgatttcctnnnnnnnnnnnnttgagactgtattggtcccttgcttaaagccctccaacagcttcccattgcaataaaaataaatgtcaccttcttatttggcctataaggcctgacgtggtttggctcctgcctctgtaaactcatcatctaccccttgtccccaggttttcatgctccagccacaggggctaccttcctgtcccgcgaatgtacccaggatatactacctcagacttttgctctggaacattcgttctcatttttgcatggctaaccctttctgannnnnnnnnnnnnnnnnnnnnnnnnnnnnnnnnntggttttttatatttttaaggagattttattatggagaattagcatatgcaaatatggagannnnnnnnnnnnnnnnnnnnnnnnnnnnnnnnnnnnnnnnnnnnnnnnnnnnnnnnnnnnnnnnnnnnnnnnnnngccagaggaactgatggtgtgaatcccagtctgaaggcaagggaagatgaaatgagatttcccagctcaagtggtgagacaagaaacagagaaggggggacaaattcctctttcttccatgttttgct

SEQ ID NO: 728 - DNA, 1308 bp, Homo sapiens
  SIMILAR (525)..(1013): 271254mologous to Crypthecodinium cohnii Dinap1-interacting protein 1,accession number AF255444,Smith-Waterman Score=110.
atgagaacgaatgttccagagcaaaagtctgaggtagtatatactgggtacattcgcgggacaggaagaaagcatgtccttgggtttattagagagcctccaagtccctttgtagagggtgtaaaggggaaagcacaggtgtccttgtcagatagtagtaagaatctcagctctaaggaagagcgtcactcctatctactcacatcaattccacatccaaggagaagcagttctattcgagctcaaaggaaaatgtgcatattcaagaaatataattataccaaggcagctggacttggaggttctagtataatgccagcagctggaacaatgtatctaacaacttcaactggatatccttatacttaccataatggtgttgcttattttcatactccagaggtaacttcggtcccaccgccttggccttcacgttctgtatgtagctcccctgtgatggtagctcagcccatttatcagcaacctgcatatcactaccaggccagcaagttgcggcactgggggaaatggccgcggcgacaacttcctcgagttctctcgggtcatcgtgaacttgggcaccgaaacgaggatccaccccctccccaccaaagtgcgggagggaaaagaaggctagccagcgagaaattttgccccacaaatccgccagcagcagtggcgggaagcctcaacggcagcgaccccgccgctggcctcgtctctcagaccttccggtcctcgctgaccagtcggggagtggaggcgtcgaccgccctggcaactcctcgccttgggcggctgggtcgagttcggccgcaggagcgtcaaagacgctgcctagcccaatttcggcgggaaagcggtttacctgctcggacttcgctggatagcgagcgtttggggccttcacctcgcccctccaagccctcagggacaggctccacgctgctccttctccccgctatcccgcgccctggggccctgatcgccgtactcaccggcccggactcggtttccatcttcctctctgctcttcagagacgcggggtagggaaaagaagcctaaagtttgaaaccaccttcacgccaaggcagcagcgctgcttgtcctgcctgggactctcgccccctggcggcgagggtggctgtggcagctgcagggaagcaggctcggaccccggccctgaacctgccacctggcggaaagtttacgaatttgtgttgggccgcattcaaatgcggcccatgggccaccagttggacaagcttgaagaacaaggtcaaacctctgttctcaaagcattttaa

SEQ ID NO: 729 - DNA, 291 bp, Homo sapiens
  SIMILAR (114)..(212): 361254mologous to Homo sapiens SIB 121 intestinal mucin,accession number R12603,Smith-Waterman Score=66.
atgggcactgctatgttacacaagagaaagcgccgccacattctatatgccaatttgatgacctttcgtagcaccggcccctctgagtatgaaatcctgagcatgtgtgaccggcagggttccctggggcagacgccagcttcagcacagcagtggggacgtggatcacgatccccagatttcctgcagattcgaatgaaccaagatcaccaaaataaaaggaaaccaggcaccacctgtgaggatttggaggaaataacaaatgcagacttttggcaatatgacggttaa

SEQ ID NO: 730 - DNA, 702 bp, Homo sapiens
  SIMILAR (163)..(375): 401254mologous to Homo sapiens Gag protein,accession number AF164612,Smith-Waterman Score=182.
atgggtcacacggagtataaaaattatacttatctcttctatattaaactccggttaaaacagaaaaaggttcaagtgcccatgggaaatatggtcactctattcagggcagtggtaaaattctgtccttggtctcctgaaaaaggaaccttagatgtagacctgttgaaacagggaagggtccgagtaaccatggaaaatatggtcactctattcagggcagtggaaaaatactgtccttggtttcctgaaaaaggaaccgtatatgtaaaagtatgggatcatgttggttcaacattctgggagctggtcccggcaaggaattatgttatcgtcactgtttggggtggttgggccttggtgcgtgccgtcttggtggtgtgccgatcccgtgaccccctgcagttgtcacagttttctgccttttcctcagtttctctgccttttcctcagccttcctctcccatacagcctttgttatctgctcagcctctcccttcgcctactcctcccccacctaacaatactaaaaattcaatgtctaactctgcctggtgggcagaggaggcccgtctgcaggctcagctaaatcggactaatggcattctaactactcaggctcagctcacaggctccgatagtttctctgatacttatgcccaattaggctttgatgctcttaccacaaaacaagtaacaaag

SEQ ID NO: 731 - DNA, 705 bp, Homo sapiens; identical to SEQ ID NO: 110
  SIMILAR (660)..(698): 611254mologous to Human endogenous retrovirus K pol/env,accession number X92887,Smith-Waterman Score=45.

SEQ ID NO: 732 - DNA, 2747 bp, Homo sapiens; identical to SEQ ID NO: 111
  SIMILAR (2)..(922): 651254mologous to Homo sapiens Gag-Pro-Pol-Env protein,accession number AF164611,Smith-Waterman Score=1074.

SEQ ID NO: 733 - DNA, 1992 bp, Homo sapiens
  SIMILAR (1)..(396): 841254mologous to Homo sapiens putative p150,accession number U93564,Smith-Waterman Score=586.
  misc_feature (1)...(1992): n = a,t,c or g
atgggcaaagacttcatgtctaaaacaccaaaagcaatggcaacaaaaggcaaaattgacaaatgggatctaattaaacggaagagcttctgcacagcaaaagaaactatcatcagagtgaacaggcaacctacagaatgggagaaaatttttgcaatctactcatctgacaaagggctaatatccagaatctacaaagaacttaaacaaatttacaagaaaaaagcaaacaaccccatcaaaaagtgggcaaaggatatgaacagacacttctcaaaagaggacatttatgtggccaaaagacatatgaaaaaatgctcatcatcactggtcattagagaaatgcaaatcaaaaccacactgagccattatctggatattgtggaagtaaacattgctcaccagatctctctacgttcagaagcattttttcatgcaatgacctctcaacacgagttgcaggactacctcaggaaaacttcccaggctgtaaaaatgcttcgagataaaattgcacagattgataaagtaataaaaagttgtgaagaccataaagcccgaaacaataaattcctgttagagaaaactgtgtgcagatgctgtgagacaatcaaggaaatcatgaaagagattgtggatgtgacaagggtgaggaatgaaggatttcaagataagaatcttggagaaattcaacagctaataggtaccacaacagaggaattaacagaagatgacttgacggagatgagtgttctcaaaccaatgccagacaatgaggaaaaagagatagaagcagcagtgccagaaaacaagatgacattagacaatctggcagcagagcatttgggatcacagctttgtgaattagaaaaactgatagataaaatgatgattgcagaattttctacttattctcacagtgacttaaatagaccactggaagatgactgtcaagttttagaagagtgtgtgattaataaagtttcacaaacagaagaaatagacacagatgttgttgtgaagcttgcagatcagatgagaatgttgaattttccccagtggtttgatctgctcaaggatattttctctaagtttacaattttcctacagagagtgaagatgggaccatctagttcccggaaaataagctcagggctcccactgactctccattatgatgaattgtataattatttcattatattttacaatgtaataacagtagaaataaagtgcataataaaggttcatcccaaaactatctccccgcaaaccccttggtctatggaaaaattgttttccatgaaaccagtccctggtgccaaaaagattgaggactgctgtgctatcttttcaagttttgtgcacgtgggaacccgattccctttggtaggtgcggagaaatgtcatcggttcggtccacagaaatgcttgttcgactccctgacaactggggtcactggccctttacctcaaggtttggtgagcctggtgttaggtagggcatccacctctgctaaaggaatcaccattcatactggtctcattaattctgattcagttgacgagattaaactaatcgtgtctgccaagcttcctgtttccattccggccgtttcctttcacactgatttaccggctacacaaaattattcttattgggcttatgtgccttttcctccacttattcgaccactcacctggatggacgctcctgcagaaatctacactaatgatagacctagggctctaccatcggcaggtggcaaagccagcccagcttctgtccttctcttcaagacagcaagtgcccccaagtcctcatnggcaggtccagaaatgctgtccaagagccaaggcctggaatcagggaccccaagagcccactcggtgtttgaacccactatggccaagggggttcttcctgagcaacggctggtgttgtcgcatacccagttgatgtataaggtggttcttgagaaaatcctttag

SEQ ID NO: 734 - DNA, 1389 bp, Homo sapiens
  SIMILAR (766)..(987): 461254mologous to Human endogenous retrovirus K envelope protein,accession number AF027651,Smith-Waterman Score=159.
atgtcatcggttcggtccacagaaatgcttgttcgactccctgacaactgggaaccatatgtaaaagtatgggatcgtgttggtgcaacattccaggagctgttcccggcagggaaatgtgttcctgtcactttttggggtgattgggccttggtacatgtcgtcctaatgacataccaatcccgtgaccccctacagttaacacaattttctgaatgtgaggaccctccacctcttctccaactttcctctcccgcatggacttcgttatctgatcagcctctcccttcagctactcctcccccacctaacgatgctgaaaattcaatgtctaactctggtgactttggcttaacgttaccccctgctgaccttgtttcttttcacgaagagccagtacttataagctcccgcggccacgactcagacagcccgggaccatatacgctaattcttctctcttcaaacctccggagtcacctaatggctccaggaccaaactacaatttacctataattcttcaggccctaccccatccacttcagcccctcactctcctgtcatttccattcctcaaccggtcactttgccatccactcagcctgcctctctgtacccttcttcacacatgcacaccacatttacaatttcgtatctggtggtcacaagaggcccatctgcaggctcagctaaatcggactaatagtattctaattactcaggctcagctcacaggctccgatagtttctctgatacttatgcccaattaaactttgatgctcttaccacagaacaagtaacaaagccaaattacaagatgccattgaaaaatctgtctgatgagcatgctcaagtttcctttcacactgatttaccggctacacaaaattattcttattgggcttatgtgccttttcctccacttattcgaccactcacctggatggacgctcctgcagaaatctacactaatgatatgtgctggaccagtcaaagaatcctgcgtcaaaatcgagagaacaagccttcatcaccatggcacatttatataaaaagaaagggagagatgttgcaggaagtcagggaccctgaacggagggaccggctgaagccatggcagaagaacataaattgtgaagatttcatggacaatttgcagaggagcctcaccctgtggccaccaccaccaaaggcccatagggagtactgccaggctactgtcaatgttcacaagatacaagggctcttcagtcagcttgtggtgaaggctgccaggcctgggactcacccttcagtaagctcccctctggtccagggcaggtccagaaatgctgtccaagagccaaggcctggaatcagggaccccaagagcccactcggtgtttga

SEQ ID NO: 735 - DNA, 1017 bp, Homo sapiens
  SIMILAR (972)..(1010): 611254mologous to Homo sapiens Gag-Pro-Pol-Env protein,accession number AF164611,Smith-Waterman Score=45.
gctcgacgtgggtgctaacatgaccggatgatttttcttgtatttttagtagagacagggttacaccgtgttagccaggatggtctccatctcgcaacctggtgatccgcccgtctcagcctcccaaagtgctgggattataggcatgagccgccatgcctggcccggactaatggcattctaattactcaggctcagctcacaggctctgatagtttgtctgatacttatgcccaattaggctttgatgctcttaccatgtaacaagtaaccaaggtgtgtatgagagcttgggataaattatgtgccccaggccaagctcctgtttcttttactactgttaaacaaggtcacactgaattataaccggattttttagcctaattacaagatgctgttgaaaaatttgtctctgatgagagtgctcaaggtttggtgggcctggtgttaggtggggcatccacctctgctaaaggaatcaccattcatactggtctcattaattctgattccactgatgagattaaattaatcgtgtctgccaaggttcctgtttccgttccggccatttcctctcacactgatttacctgctccacaaaattattcttattgggcttatgtgccttttcctccacttattcgacctctcacctggctggatgctcctgcagaaatctacactaatgacagtgtgtggattcctggagctacagatgactgttgccctgctaaaccaggagaagaaggccctgcatttaatgttactatgggttacagatacccccctctgtgcctcagacatgcacctggttgtatccatctagaaacccaaatctgggctgcttatcttccggagagatcagctacagaggaaccgggacatttggtctccagcatctccctttctcctttaagaaaaatgaaagggggagtaatgggagataccccacactttcaatataaacctggggaaaaccatgccctaaaaattttgaggccccatctaaaactttaa

SEQ ID NO: 736 - DNA, 326 bp, Homo sapiens
  SIMILAR (151)..(5): 301254mologous to Hepatitis B virus S,accession number AJ003026,Smith-Waterman Score=61.
  misc_feature (1)...(326): n = a,t,c or g
ttcgcatgactgggctgctaaaggcactggatcctaggctaggaggagaaagggtgctgtgaactggagttgccagagatccagaagagggacagctgcctggagatgagaccattctgagctccgcttcttcttctatggaatgtggataatcacttctacttcatgatcacaaggtnnnnnnnnnnnnnnnnnnnnnnnnnnnnnnnnnnnnnnnnnnnnnnnnnnnnnnnnnnnnccctcaaaagtagggaagctgacagtgcagccttcagtctgtggccgaaggcctgagagcccctggaaaatgactggtgtaagtgcaa

SEQ ID NO: 737 - DNA, 1483 bp, Homo sapiens
  SIMILAR (350)..(237): 651254mologous to Homo sapiens Human secreted protein, SEQ ID NO: 6812,accession number G02731,Smith-Waterman Score=125.
ctacatgtctccagcatccaggttatgctgatgcaagaggtgggttcccatggccttgggcagctccacccctgtggctttgcagggtacaggtcccctcctagctgctttcatgggctgttgtttggtgcctgtggcttttccaggcacatagtgcaagctgttggtggatctaccattctgtgttctggaggatggtggccctcttctcatatctctactaggcagtgccctagtggggactctgtgtgggggttcgaacttcacattttccttccacactgccctagcagaggttctccatgagggctctgcccctgcagcaaacttctgcctagacatccaggcatttttatacatcctctgaaatctaggtagaggttcccaaacctcagtttgtgacttctgtatacccataggctcaacaccacatgggagatgccaaggcttatggcttgcaccctctgaagccatggcctgaaatgtatcttggccccttttaaccatggctggtgtgaagcagctaggatgcagggcaccatgtcctgagactgcatagagcaggaagcccctaggcccggcccaggaaacaacttttccctctatagcctctgggccctcaatgtgagtgtgcaccatccaactggctgccagctcagctacaacaaagtaggcagaagaaagtgagatgagctggcttgctgagtcttctggctttcttctttgtcccgtgctggatgcttcctgcccttggtcatcagactccaggttcttcagcttctggactcttggacttacaccagtggttttccaggggctctcaggtcttcggccacacactgaaggctgcactgtcagcttccctccttttgaggctttgggactccgactgagccactactggcttccttgctcctcaccttgcagatggcctatcatgggacttcaccttgtgaccgtcccaagaagctttaaacctaggcagcaaaaacagcaaggcagcaaagatgacaataatgaggagataaaaggtaatggagaccaccctcaggattatttcctgccctctactggagctcaggaggattccttatcaaccagagaagcttttcccaagtcgcattcagagaaacatcacgtctgcctcttgtgtgggatggtgacagcaggggctgctgaaacatctaccaaccaatatccatatccaaacatccaatatccaaacaaccaatatccaatatcccaggaagacttggcagatcagttcgtgagggccaagggttcactgatggtgctgccaaaaacctccttgttgctcctcaaacataccaagcatgcgcaggccttaggctttgctaggctctctgactggaatgctcagaacccttcctccagagagcagaacaccccacttccttccttcagttggattctagccaaagccactacatcagagacaccagccctgactacactggtgtag

SEQ ID NO: 738 - DNA, 411 bp, Homo sapiens
  SIMILAR (353)..(306): 561254mologous to Homo sapiens NPAP60L,accession number AL389951,Smith-Waterman Score=49.
tacagctcaaccccaggttctgagaggttcaaatagtatgttctggcaaaagggattcaggtaggtgaaattgctaaataaaagcatgctgatggtttgagtagttctccctgaccttgtgtgtgctttataagatcctttagtagtctctactctcgatgtacactggtggggacctcctcccagccagagagtggctccttgccagaccctcacactcatctgtgtcctatgttctggactcaggattgtgtgccagcttcagaggatgctctccatagccgtagaggtggacaggacccccacctgcagctccaataaaattgccgagatgatgtttgggtttgtgctggacattcctgagaggagccagaggtgagtcttgattttgttggggagagcagttattta

SEQ ID NO: 739 - DNA, 582 bp, Homo sapiens
  SIMILAR (74)..(247): 341254mologous to Homo sapiens Fragment of human secreted protein encoded by gene 92,accession number Y41589,Smith-Waterman Score=65.
aggagacaggcctgactttacccagaatgatgtacagaaccgtgacatgcctatggatatctcagctctgtcctctccaaactgctctcccagcccacagtctgaaactcccttagagaaagttccttggctctctgtcatggaaaccccagccagaaaagaaatatcactgtcagagcctgccaaacctgggtctgcccacgtacaatcacgaacaccacaaggtgggttggacaacagaccatgcctgcatagactgaagtacttcttacgtcctccggctcatcacctcttctttcagacgctaataccggatcaagacacaagagagaacaagggtcaaaaattacaacccatccctcatcgaagactaagaatggtaaccaataccattgaagagaattttcctctggggactgtgcacttcttgatggactttgtgtcaccccagcattacccaccaagagaaatcgtggctcacatcatccagaaaatcttgctcagtggctctgagactgtggatgtcctaaaggaggcctacatgcttctcatgaaaattcaacggctacatccagccaatgc

SEQ ID NO: 740 - DNA, 810 bp, Homo sapiens
  SIMILAR (395)..(300): 311254mologous to Homo sapiens Human secreted protein encoded by gene 86 clone HSXAH81,accession number Y41393,Smith-Waterman Score=45.
acaaactctgcctgggcgagtccttttcctgcgttatgtcgttcagaccctagaagatgactttcagcagaccctgaggaggcaacggcagcacctgcagcaatccattgcaaacatggtgctttcctgtgacaagcagccccacaatgtcagggatgttatcaagtggctggtcaaagcagtaactgaagatggattgactcagcccccaaatgggaaatcaaacgtcttcaggaacaggaatcttgaaagccagcagtagccacccttcttccccagcccaacctggacaaagaacaccaatcagcttgattgttgttgccagcttcagaggatgctctccatagccgtagaggtggacaggacccccacctgcagctccaataaaattgccgagatgatgtttgggtttgtgctgggacattcctgaggaggagccagagctattacttgttaaaattctgccaaactacaatgcctaacagaataatgctggcccagcactttgaggtgataggaaacacctatggaactgataaaattaaacttaataatgaactccagaacaagggtcaaaaattagaacccatccctcatcgaagactaagaatggtaacaaataccattgaagagaattttcctctggggactgtgcagtttttgatggactttgtgtcaccccagcattacccaccaagagaaatcgtggctcacatcatccagaaaatcttgctcagtggctctgagactgtggatgtcctaaaggaggcctacatgcttctcatgaaaattcaacagtatgaaccgtaa

SEQ ID NO: 741 - DNA, 458 bp, Homo sapiens
  SIMILAR (458)..(396): 761254mologous to Homo sapiens Human secreted protein sequence encoded by gene 19 SEQ ID NO:142,accession number Y91469,Smith-Waterman Score=88.
gtgaaaggagtttttggcagcagagctcctgcagtgccacgctctgtgctagggtggctggggacaaaggcaagtcaaccaggactccttgggaagcgttgatccacagggcaaaggccacacgggccatcagccgccgccacctgatgcgaagaaaggcagctgagaaaaggctgcctgctggcaaagcagccccagaaccagccagccggtggcgcccagggctgcgagaactttctccaaggcctgactggaacactgagggtacagaggtgaaggtcccacagcctggtgtgcagatggtgacaattcatgatcaaagggtgcgggcgaggactgtgaagcggttgatacgacttctagctcggtacctgattatccatttgcaaatttcaaaagacaatgagataccacttcacatccacgagtatggctataatcaaaaagacaaacaataa

SEQ ID NO: 742 - DNA, 676 bp, Homo sapiens
  SIMILAR (622)..(545): 421254mologous to Homo sapiens Human secreted protein encoded by gene 24 clone HSKXE91,accession number W75080,Smith-Waterman Score=73.
cattcacccgttggttccttttctgataaggatgtggcattcaaacaaggcacctcccaagtaccagagagaaggctcaggcatttgtttccccctaagctcctggagttcagaactcaagctttcggcacctctccgagctggacaccagagggcggtatacccacacttactgcttccatccagtagagggccagaagaaaggggaatccaagttctggataaatggtgtcaaattggcatgtcaggaccggcgcctaactgccccctgatgtgaggagctgcagactgcaggacaaagggttcagtaaagacttcattcaaaatttgtaacatggaaatcaaatgtgaacaacagaccccaaaacccatctgttcttgccagagccaagacggactccatggccagctgccagaattgtcctgggttgttctatacacactaggggagggagccacgtttccttctaacaaaaggccattatgcaaagggctgcctaatgaaatcgtccttttgatgtattctctttaactagagtaatgtaataaaatgataatgataatcttctggtttatgattattctgaattaacaccaaaaaatagaaataaaaaaaaaaaaagccaactcctggcatcaaagtaggctgacattacaagttgcttatatgctgctc

SEQ ID NO: 743 - DNA, 1641 bp, Homo sapiens
  SIMILAR (555)..(716): 311254mologous to Baboon endogenous virus strain M7 gag-pol precursor polyprotein,accession number D10032,Smith-Waterman Score= 60.
atggggaaccgaaaaatcccccacaagtattcactggaaagactagtgggtctatttgagaaagcagatgaaaccgtgaaggaatttgcccgatccaagggagcctgccgaggggggtcccgtatataccatatattccgcaaggggaaccccgcggggttcgggaaaataccccggtcgattaagattccagaagaaaaaagcccattaaaggggggcgcccccatgagagaaaagggccatagaaggaaccatatccagcttcttctttcactaccgccaatactcgctcaggcaccatcgttgactcttacttcagtgctggtgatagagtgctcccttcaggaagtagcagaaactgaaggcatgagaaagtacaccaacccagacccagtcagcccagaaagaaccactgttttaaaccttcgattcatctcccaatccacccctgatatttggtgcaagcttcagaagcttgatgacggccctcaaaccccacaacgagaccttcttaatttagccttcaaagtctttaacaattgtgatgaggaagtaaaaggcaaaaacaggcagagtttcaaatgtttgcctccaccgttagaggccctgcaggtccctgaggccgcaactccacaaagaagcctcctagcaatccacctccacctggtgcctgtttcaagtgcagcaatgaaggccactggtccaaacaatgcccaaacccagaaagttgccatcatttattgcagcggccaccaaaccccggacaatcctatatcagctggaaatgctttagcagatcaggtagccaaacaagtagccctacaacccgtgcaaggccagtttctgtccctgtcgttattctctcctctttactcctcagaagaaaaggaggacttccaggcccagaaccttcaaaggcaaggaccatggcccagtcccaagacacaaggccacttggcgccagcagggtgcatcagcaagagagcagaagcaggaagagagctggccggaagacacgcacccctgaagatcgagaaagaggccatccagcccattcttctggggaaaaaaaataaagtcttgtatggagcaccagttgggtctcaagaactggttttattcttgagtaagagcagccgttctggcctgagaatgtacctggcagattcactacagggattgtatttggtgcaggacctcagctgctgtgctttgcaatctgtagctgcccttacattcaggccacaccttttgcagctgctccttaccaataattcctgcagcatgaatgctaaggaaaacctactgctgggagacttggagaccctttgtcagatgactttgactcaaggacctggtggccctgctgaacctttagactacatggaaattgagggcttcctctcaaccctctttcttctttttaacttgctgtcagccttgcatcatggtctgatgtctgatgaatctctcagccttcctcatctcagaaatactaacaaccatcagagacgactaggaacacctcctgatgatgcacacaaacaagacaacctagaagagatggataagtttcttgacacatacaccttcctgagactgaaccaggaagaaattgattccctgactaatgaccaataa

SEQ ID NO: 744 - DNA, 483 bp, Homo sapiens
  SIMILAR (13)..(147): 461254mologous to Homo sapiens C-terminal variant of hINADL including 2 amino acid exchanges and an insertion of 58 amino acids in frame,accession number AJ224748,Smith-Waterman Score=102.
atgtacccgtttgagtggtccacttctcagtccaactctgatcttggtgtgcagggcagcagtaaagagatctggagtctgggaagttcaagagcatggcaccaacatctggcaagggctttcattctgcatcatctcatggaggaaaataaaaaggcaatacaaaacaggaagaggaggctcagccgaaggctgagtgccatgagtccagcagcagctgggaattctggtggtcaaacaaggggactttctggccccacaagcatggacagttttggtcttcccagcttcaagccccaactctttggggactttaccaacgaaccacagctgacatatgttttgctctgtttctctagtacaaatcaatgctggagtagtgtaggcttcccaaaagagccactggaggagaatggaaagaatggagacacagaagccagcactggctttgaatccttgctctgtctcttacaagatatgtga

SEQ ID NO: 745 - DNA, 1518 bp, Homo sapiens
  SIMILAR (595)..(1515): 941254mologous to Rattus sp. p34 protein,accession number D13623,Smith-Waterman Score=1485.
atgcggatcctgagagcgatcccaggtaagcaattgccccggtggaacgccttgccagagcagcatgtggcaggcccccatggaggatcaacgcagtggctgaacaccaggaaggaactggcacttggagtccagacatctgaaacttgggccttagaactgatgacccagtacgttaacaactggaactgggtctacgacaacataatagatcaggatgaaagcgaattgactgggttgttaggaaatactcaagaactcagcccagctctagaactcacctctgagcatgaaggcaatgttgggcacgctggtaaaggaccactagaatccagcagctcggacccctttctttgtgctcgggaaaaggggtgcaggactgctacatcgcccatctcagtggtcgcggaaggtgacgtggacacggaagtggtcgtcgtcgcggcaccggtgggagctaggcgcgaggctcggagtgcggccagcgggcggaggcggtctcgcatcggcggcgacggagggctcaggcgtcgtcgtttggctcctttcacccgccggaaccccggagccggggcccgctcagccggcgttaccatgaccaaggccggtagcaagggcgggaacctccgcgacaagctggacggcaacgaactggacctgagcctcagcgacctgaatgaggtcccggtgaaggagctggctgcccttccaaaggccaccatcctggatctgtcttgtaataaactgactactctaccgtcggatttctgtggcctcacacacctggtgaagctagacctgagtaagaacaagctgcagcagctgccagcagactttggccgtctggtcaacctccagcacctggatctcctcaacaacaagctggtcaccttgcctgtcagctttgctcagctcaagaacctgaagtggttggacctgaaggataaccccctggatcctgtcctggccaaggtggcaggtgactgcttggatgagaagcagtgtaagcagtgtgcaaacaaggtgttacagcacatgaaggccgtgcaggcagatcaggagcgggagaggcagcggcggctggaagtagaacgtgaggcagagaagaagcgtgaggctaagcagcgagctaaggaagctcaggagcgggaactgcggaagcgggagaaggcggaagagaaggagcgccggagaaaggagtatgatgccctcaaagcagccaagcgggagcaggagaagaaacctaagaaggaagcaaatcaggccccgaaatctaagtctggctcccgtccccgcaagccaccaccccggaagcacactcgttcctgggctgtgctgaagctgctgctgctgctgctgctatttggtgtggcgggagggctggttgcttgtcgggtgacagagctgcagcagcagcccctctgcaccagcgtgaacaccatctatgacaatgcggtccagggtctacgccgccatgagatcctccagtgggtcctccagaccgactctcagcagtga

SEQ ID NO: 746 - DNA, 369 bp, Homo sapiens
  SIMILAR (11)..(130): 451254mologous to Sus scrofa pol protein,accession number AF038601,Smith-Waterman Score=81.
atgcatctagctcctgtacgtggacgaccttctgctggaacactccacggcagtcgggtgcgcaaaagggatggatgccctgctctgggacctggtgcacaagaagaaagcggagatctgcagacagcagggactgatatcactgttgatagtgcagagaaaccctccataattaagttttctgtaaaagccttcatgttttctgagcagaatgtacgaggtgtgccatcccaaaaccagctgctaccctgtccttttaatagttgtgagcccttaaaagaaacaggaattgctcactcggggagctcagttgttggagacgtgagtcttgccgaagctcctggtcgaataaagcccttccttctttaa

SEQ ID NO: 747 - DNA, 779 bp, Homo sapiens
  SIMILAR (20)..(70): 761254mologous to Homo sapiens Human secreted protein, SEQ ID NO: 4518,accession number G00437,Smith-Waterman Score=72.
ttgacaatggtgacttgctctgtcacccaggctggggtgcagtggcccgatcatggctcactgcagcctcaagcagtcctcccccttcagcctccaaactgtttggattataggcaagagctacttactacacctggccatggatcttcttgtgtccaactttgagacccaaatttactgcagtgccttaaaatgttttaaagaaagttaatacacatgtgcctggatgtggttactcacgccctgtaaccctgtagcaggacaagccgcagacaaatcccctcagacaccgagttaaagaaggaagggctttatttggctgggagctttggccaagactcacgtctccaaaaactgagctccccgagtgagcaattcctgacctttttaagggctcacaactctaagggggtccgcatgagagggtcgtgatcgatggagcaaacaggggggtacgtgactcggggctgcctgcaccggttattagaatggaacaggacaggacagggattttcacagtgcttttcttgtacaatgtctgtaaatctatagataacataaccgattaggtcatgggtcaatctttaactaccaggcccagggatgtggggccaggctgtctgcttggggatttcatttctgccttttagattttacttctttctttggaggcagaaattgggcataagacagtatgaagggttgtctcctcccttaaaatcacgaactggtggtatagtgaggagctattccttccaaaatcttttaaaaacattact

SEQ ID NO: 748 - DNA, 967 bp, Homo sapiens
  SIMILAR (616)..(723): 411254mologous to Homo sapiens Amino acid sequence of a fragment of human collagen type 1 protein,accession number Y84546,Smith-Waterman Score=68.
ttttttccagacaaaataccacgctcacaccacacgcacaccacaaaacaaagaacaggtaaaaagggcacacacacacttttgcagtttacaccaaaccaaaatcacgaaattcaaaatccgagtaccaaaaaattcaagccaagtcaaaaccaaaaccaaagtatccagcaattcaagtcaagtcaaaaccagaacaagagtgcccgtgcaggcatgctgtggggtgatcaggccacgtttccactcagatggagtggggcaagttcccaagaccagtcctgtcaagcaattcaaaccaagtcaaaaccaaaaccaaagtgcctgtacaggcacgccgtgggtgatcaggccacgcttccactcaaacggagtggggcaagttccaaagactagtcttaccaagtcaagccaagtcaaaaccagaacaaagatgtcaatacaggcacaccgtgggtgatcaggccatgcttccactcacatggagtggggcaagttccaaagactagtcttaccaagtttcagatgtccagactccaagtgccagttccttcccggtgttcagccactgcattgatcctccacgggggcctgccacacactgctctggcgaggcgttctactggggcaattgcctacccaggagcgctctcaggatccgcatcgctcaagctggccggagtcccccgcagggatgctccacagggcaggcctaagccgcctaacaggctgcctcaactgtccgttaatcacctcgcttcccagtcagggaaccaagaaatgtagcaggacgagccgtagacaaaacccctcagacaccgagttaaagaaggaagggctttattcagccgggagcttcggcaagactcacgtctccaaaaaccgagctccccgacatctggacgtcaatccagtcctacttctgttgaatgccgcagagtacactttaaaccgttgggacctttaa

SEQ ID NO: 749 - DNA, 768 bp, Homo sapiens
  SIMILAR (634)..(756): 361254mologous to Arabidopsis thaliana F28K19.18,accession number AC009243,Smith-Waterman Score=68.
atgagcttccacaagtccctgtgccaccagcagcttcctggtcccaatgtcaagaagcacaagacacggcatgttctcgtgggaggtggcaccctcactgaagttagccagagctgccacacgtcccgcagtgctcaggaacagtcctctcactctctccacgcggcccatgtgagccgccagcagggacccatgtcagaggtcactggagagccccatggatgcctgcgggctggcaagccaggaatccagttcgaactgccaatggtgagccggtggataaccaggttggcagcccctttcagctgtctgcactggggcaggactgcttatgtcacagagaaggcagagacaagtgaatatgacacaggggatcttcctgtttgcttggaagttaatttccacttcaggcacatgcacacgaagacggatcaagccgctaccccaaaccggcagcaaatgactattcttttgttactgaccatcaggagttcaactttgctccactttgggaagtggaacaaatgctctggtgaagacagggagcacaggacatatttacctggaggggatatcaaagagcagcctcaagacttgcaaaacaaagtcgtcccaatgaattatctgtgcctacagccgcacttggcaccttcggctaagccagcgtctgacaagcagttgttcccacggcagccacccctgccttccatcttagggactcacccagaaaattctccaacctgctccacgactacaaaactcttctaa

SEQ ID NO: 750 - DNA, 531 bp, Homo sapiens
aaaatcataatcataaaagtcacagcacctagaatcactcccacaaagcatgctcaccccaaaccagatgccgatgaccaactgggtccacgctttatagagatagcctatggtaaaaaggaatttgagaggaggagatggaagattgagagcagagtgcaagaatgggaagagggcttcgtgccctgtgcacgtttgccacctagtgaccaaactgaggacacgcagatgagagacggagaagtaacaggaagttttgacaaacttcgacacttggaatcagggcttaaggatgatagccgcaagcttatcagcttctgcagtgttgctactgactgtgtagacctgggaatatcagaaattgctgaaattgtttcttaccaaccaagagaggccacacctgtcagcgaagctggcagtgggctaggatggctgtgcccaactatcttcactaagagttgccttatttttgaagacgtggaattagctatggaaagcaaaattcctctggctgtgcctttggtgccttga

SEQ ID NO: 751 - DNA, 1014 bp, Homo sapiens
  SIMILAR (16)..(219): 821254mologous to Homo sapiens putative p150,accession number U93563,Smith-Waterman Score=278.
atgataaagcggattctcactaccaatcccacagaaatacaaactaccatcaacgaatactataagcacctctacacaaatgaactagaaaatctagaaatggataaattcctagacacatacaccctcccaagactaaaccaggaagaagttgaatccctgaatagaacaattacaggctctgaaattgaggcaataatagcctaccaaccaaccaaattccaggaccagatggattcacagccgaattctaccacagtaagcaaagccattcataaggccagccaaaactcaagagaaacagactccacttgtggacgggaagagcagcatgtaggcacagggatggaaagactgactggccatcatactgggaaactatctatcacacaatttgatttgctaaacacaaagggtgcaactgctggcatcgccctgcggcttgacggtagaacatcccctttcttcttccttcctttacaggctttgctgtgtagtgtgctgactacagatctctatggcctaggagctgatgctcctggaataaaccctacaagatcctttgagatgagcttcattaatactttacctctcttcttcttaatcctaatcaaatgggtggggctttccataccccccgatgaaaccatactagacattgttgaagtaaaagatttaagacaaaccctgccatttgaaaaaggataccgagatgccaaaaaatctgctgggaatgggagaaaatattttgttggcaccctaaacaaaaacaactgttacacttttttcaccagaaacttgctcagtctcaggtatatctctatcaacagcatgaaaacggaccaatacactaaattggtaccagtagagtggggtgttgctgaaaacatacctgaaaatatggaagcaattttggacctgagaacagacagatgttggtacagtctggggggctcagaagacaagaaaatgggaaagtttggaacttcctggagacctattgaatggcattga

SEQ ID NO: 752 - DNA, 752 bp, Homo sapiens
  SIMILAR (290)..(418): 411254mologous to Streptomyces griseus preproprotease,accession number A10158,Smith-Waterman Score=63.
agttttcctaactatttactaccagaaatggtcaataacttactttgtggttagcaaatcaaattgtgtgatagatagtttcccagtatgatggccagtcagtctttccatccctgtgcctacatgctgctcttcccgtccacaagtggagtctgtttctcttgagttttggctggccttatgaatgggctttgcttactgaaagtgcagcagaagaaatttagtatatgtccaaggcctagggcttttaagagactggcagctttcccttttatcccttttttggaagcctagcccaccatggctggcaaagaagcctcagcctggattacctgaaagatagagaggccatgttggagagagactccttgagggatgagagattatccttgggatgttcccagccttaagctccccagctgaatgtgggtgtatccctcagctacacccacagaaaacagaggaactactcagtcgatcccaatcaaccccacagactcactagaaataacaaattattgttttaagcccacgaggttttgggggagggttgttaaacagtaatagataagtgagacagattgcttgttatttatggtcaaatggtgattatctctggtgagattacgaggtgatgttttttttaagttatgcctatctgtagtttcctttttttcctaaaattgatttgaattattagtgtattaacagaataaagaatgaactttaaaacccaaaaaaaaaaaaaaaaa

SEQ ID NO: 753 - DNA, 333 bp, Homo sapiens
  SIMILAR (22)..(51): 601254mologous to Oryza sativa zhb0005.1,accession number AL117265,Smith-Waterman Score=35.
atgttgacccgactcagagaaaccccgcccttgccgccaccgcccacccataacgtcctcctcgaccctccctcgaccatccctcgccccgcggccctcaccgaaaaggggagggcggtggaagagagaggagtcaagggagcgcacgcgaagccccgcccctgccgtgacgtctggagacgcgacgcgtcgcctcgcaatgcaaatcgggaaaaggggcacctgttctctgggaagtcgtccgctgtgaacgatgaacgcctttccttccaccagctgctggttaccccggagacaagctctgtccgcggagaggagtgggacaactcctaa

SEQ ID NO: 754 - DNA, 177 bp, Homo sapiens
  SIMILAR (3)..(92): 961254mologous to Homo sapiens Human secreted protein, SEQ ID NO: 7346,accession number G03265,Smith-Waterman Score=152.
ctcggattgggaaaatgaaacggaggaagcaagatgaagggcagagggaaggctcctgcatggctgaggatgatgctgtggacatcgagcatgagaacaacaaccgctttgaggagtatgagtggtgtggacagaagcggatacgggccaccactctcctggaaggtggcttccgag

SEQ ID NO: 755 - DNA, 555 bp, Homo sapiens
  SIMILAR (82)..(315): 541254mologous to Cloning vector pZC320 SopA,accession number U26464,Smith-Waterman Score=187.
atggagactgctatacgggaagaactggagcttgggggtatcaaggaggcaccaaacccagcacagagcaaagaaggcttcctcagaaggttcgagcctgatgtacgtattttgcttaccaaatacagcaatagtaatggctctcagtccccgtggatggaggagcaaattcgggatgcgctggggaacatggttctaaaaatgttgtacgtgaaacggatgaagttggtaaaggaaattcgttctggtggccaactggaaaaaaacaaaggtgctttttccaatgggtacgatattgccaacaaggttatgaacgggcacagtttccaacccttccaaaaattccgggaaattttggctgctagggggaaatttcgggaaatattccgtttcaacccccatgtaaaaagggaaggctcctgcatggctgaggatgatgctgtggacatcgagcatgagaacaacaaccgctttgaggagtatgagtggtgtggacagaagcggatacgggccaccactctcctggaaggtggcttccgaggtacaagcagctga

SEQ ID NO: 756 - DNA, 808 bp, Homo sapiens
  SIMILAR (341)..(391): 1001254mologous to Homo sapiens Human secreted protein, SEQ ID NO: 7346,accession number G03265,Smith-Waterman Score=91.
caccttccttccccgctcccttcccccgacactagctgctgactgcccctgaatctgtgggctcttggggtctccatgtggtctcagcagcttcttcccttctgaccactgctctctccttttgctttcactctcactcattccctccttgggctccagcggaaaactattgggaagaggcccaggtctttgacctctaaattggtttgcttcaaaggagccctagagctgagggcccacttggcacaccacagctggggctagagctgtgccttcgttgcagactgtggggagcaggtggggatggcctgggcccagcatgatcctgctctgctcttcacagagggaaggctcctgcatggctgaggatgatgctgtggacatcgagcatgagaacaacaaccgctttgaggagtatgagtggtgtggacagaagcggatacgggccaccactctcctggaaggtggcttccgaggtacaagcagctgacacgtagacattggcactctggtgccaggcctctgctgggtatccatctgctggaagccaagaggccgaggctggtggctggtcatccatccgttccaccacgtggggactgctgctggtggggctcctttgtgaccgtgctgcctgcctgtgatgtgcatattaaaatggatgtatttgggtggggaaatggaattgtgaggctgcaagctaggagtgacgaaggggggctctcagcttcgggtgatgcattgaaggtgacagccaagccgcgttagcacctgcataaaatattaaagggacggttatgcatttatc

SEQ ID NO: 757 - DNA, 1093 bp, Homo sapiens
  SIMILAR (76)..(117): 1001254mologous to Homo sapiens Human secreted protein, SEQ ID NO: 7346,accession number G03265,Smith-Waterman Score=69.
atggggcggaaggagccccgcaccgggaggggtcgtggagtggggtggaaggacttggcagccgctaaagattggacctttctgcgagtacgagccaaccggcagacccgactgaatgatctgttttactactcagggaaaaggaatggtaggatgccatggctcctccaggaatctccccaccccatgccctggagggactcaggaatagctcacagccagcctggaccagaggttggaggcttgggtatttcgccagagccaagattggagggcagaatcaccgaagattcagctgtgaccacgtttgaggctctgaaggctcgggtcagagaacttgaacggcagctatctcgtggggaccgttacaaatgcctcatctgcatggtgagtagaaaagaacctaggggtgcccttggtcaggcttccacgccctctgggggagttggagagggactcgtactcgatgcccctaacgtccatccagtgttggcacgtgcactgcgaggagtgctggctgcggaccctgaaatgatggaacaggttcgggtgggcacaataagggctgccttctcagggttccctgagccttctgacctggctgccaaagctcggatttgggaaaatgaaacggaggaagcaagatgaagggcaggtatgtcccctgtgcaaccgccccctggcaagattcggagcaggagatgagtaggcatgtggagcattgcctttctaagagggaaggctcctgcatggctgaggatgatgctgtggacatcgagcatgagaacaacaaccgcttttgagggagtatgagtggtgttggacagaaagcggatacgggccaccactctcctgggaaggtggcttccgagaccggttagagggagtgataacgccagctgaagaagctgcccagcagacttcagagagaaggaggcagaggcaggatgagcaggcgagtggcgaggcccatttaaactgcgctgtgcgtgctgacagaacagagattgctgtcgttgttagatatgaaagaagtgaagaattgcagataagttcctgtatccgatcacccccatccctcctcccagagtag

SEQ ID NO: 758 - DNA, 984 bp, Homo sapiens
  SIMILAR (909)..(733): 371254mologous to Homo sapiens paraneoplastic antigen,accession number L02867,Smith-Waterman Score=91.
atgcttcgtattgaccaggaccccaggtgttcctttgagaagggggcctttgcttcacttttcccaaaaggtgctgtggccttttgcagaagtgctgcttggcgtccgcagcaccagggccagtccatagcaagcaccgactgtgctgacaatgaaccagaagtgctgcttggcgtcctcggcaccaaggccagtctacagcgagcactgactgtgctgacaatgaaccaggtgcctgctctgtctgctaccacggccctgcaagagagccgtgatcagatgaaaaacatggaggctataaggggacccatgtctccggccagcagcaaggccaccccctcactgtacacacacagcaggcaagggaggggagtgatgtattcttttattgaagcaagtatgtccagtcacaccaaaactgacgtcctgcattatggtacagcttcatactcagagttcatctcaaataccaaaacatcaaatcagggagctttgggaattgggacctggcccatcctcacccaggcttccccattgatcaaggctcctgcggaaactgggaatgcagagagggacaaggatgcggagttcctgcgagggagacggtccacgtggattgaccgtgtgctttctgaaggacagctgtcctgcgccatggaaaatgaaaatgtaaactttggacagcccgtactcaaaggctcacttccagaagtgtgcggacgcgacctcccagccaccagccctcctatggagcctcgcagcccaggctcctgagggcaggcgcccaggtggagtgggactcaccgcagcccaaaccacagagcaggaagaccagaccccagtaccctttaaggcactaaccccgacgtcagagacactggctggaaaggcgtccgagcaggcagggctcacgttggttttggctgggttttttaaaatatttttttcataagatgttaataatcaaaagtagaaaataaaaat

SEQ ID NO: 759 - DNA, 552 bp, Homo sapiens
  SIMILAR (389)..(526): 401254mologous to Mus sp. alpha 1 (XII) collagen {triple- helical domain COL2},accession number S48406,Smith-Waterman Score= 71.
ttttttttttttttgggagtgatgtattcttttattgaagcaagtatgtccagtcacaccaaaactgacgtcctgcattatggtacagcttcatactcagagttcatctcaaataccaaaacatcaaatcagggtatgtatcaaattgggaaaataaagtagcagacagacactgtttcaagtaggtactagaactgatcacccgtgaagtgcacgtggatgtgtacagaaaccgttctaaggctgtattccaaatatatattctcaagttttaagcctttctcatctcaaagacataaacaaagcaatatgtactatcaatatacaatctgtactagctagaacctcagaaagtgcaaacacactgtgacaatacagtggaactattcctgctccacccaggaccagaggcatgggcagcgggcccagggctgcctcctccccaggcccagcctttcccaatgtcttcaggctcttccaggagctttgggaattgggacctggcccatcctcacccaggcttccccattgatcaaggctcctgcggaaact

SEQ ID NO: 760 - DNA, 759 bp, Homo sapiens
  SIMILAR (382)..(489): 511254mologous to Aeropyrum pernix 103aa long hypothetical protein,accession number AP000060,Smith-Waterman Score=72.
atgcgccccacggcccgccctggttccgcctccctggaagaggggtggcgttgtctcggtaaccggagtaaacggaggcctccggcagacgctgtgaagagaggagccgcggcggtcagtaccttcgagcgtccagttgtaaatgccaatgtctcagtgccattgatgttcagagaggaagtggctgaattcccacaggaagagttgcccgttaaactgtctcaggtgccagaccctccagataacatgaatctggccaagaattttccagcacatatttttgagccagctgtgttgttaacaccacccaggcagaagagcaacttaaaattctctcctcttcaggacgcgtctgccggaggcctccgtttactccggttaccgagacaacgccacccctcttccagggaggcggaaccagggcgggccgtggggcgcatgcgcggccggcgtccagctctccgggaacccggtttcagagaaaatccattgatggaagctttgggtccaatgatgagtagtctagcctgcagttggaaagcaaagctagtgaaaaccaattctatagttcaagaggtcccaagccctaggccgtggactggtactgatccgtggcctgttaggagctgggctgcacagcaggagatgagtggcagatcagtggcagcattagattctcataggaccgcaaaccctattgtgaactgtgcatgcgagggatctgggttgcgtgctccttatgagaatctaatgccataa

SEQ ID NO: 761 - DNA, 1671 bp, Homo sapiens
  SIMILAR (591)..(472): 351254mologous to Homo sapiens SEQ ID NO 359 from WO9922243,accession number Y19641,Smith-Waterman Score=72.
atgaaaaactatgctgctgatgctgtcagcttcccagaatcctctcccaagttaattcaattgcttctagttcaaactccccaggagaaaacatgtggttggtgtggccagtatccactcctactgggcagagcccttgtaccaggttttccacaggcctttgacctttggatcaagcatccagctttggcccaatcagttgaggcctgggtgatgggatcacatggcagcatgtacctgatgcaaggacaccagtcatatcggattaagggccaaccctgctccagtattacagtggggtcacctttgtgggagagttcagccaccaacagctgggcagccacagaaaccatgacttatcaggacaggagcagaataatgaattacccacttgcaaattccaagggaagtttgaaagcctggattttttccaggtctcttgaggttgagaagtccaagatcaaggcactgaatctggtgagggccttcttgctgagtcatcccacggcagaaggtggaagggcaggagcacacacgagagagagagaaagagacgacaaacttggaaactacatttccctgatcttgccaacagtattcagcccggactccaccaatgagaggcacttgcatgagatttggttgggaagaaaaggagaagccattgttttcttgaggcagcagcagatggctgacatggaattttgcctaaaacttttgggtgttctcctgaaaatactccaactggctctacaggcagctgagagcaatggcagtggcttccttgtgattcctgcactaccagatttcctgaaagagaggatgcagcaacaaggcaccagcttggaagcagagatcaaacccttatcagatgccaaacctgcttatgccttgatctgggacttcccagcctccagaaccatgagaaataaatttctattgtttgtgaattacccggtctatggtctgcaggaaaagggggaagagtctttacaggtggcactgtgtggagagagccacccaacaggaatggtggccttcatcaaggaatgcagccagcccggggaaccctcacctcaaggaagcaaggcgaatcgatacttcaccctttccttcctccttccctctcacgtcctgccagtattctccattggccaagcccagcccagaatccagaaaaccagggaatctgctgacactgcccatccagtgtgtcctcaaacaaaagatggccatgtcagaataccacaaaggcttgtggactgtgccgctgctgatgttggaagaagacgtttctttggcaagcaaggaggatttgagcagacgaacgacttagccagaaccgggatagtgtgtgcatggcagaaacaacggagagattctcgggatgtgactatgggcctacagcatttgtcatcagtcactagtacacttcgtagaagacctgccttagcacaaatgctgctggaaccgtctgaggcttgcaatttgggcagttttcttgtgatatctcatatggttgtggacaatggctgctggggtttggggctggaggcatctgaagtaacagtcgatgctggctgtcaaccaggagcacagctgggctgtcaactagaacgcctacatatggactctccgtgtagcttggactgtgcacaggctggtggctag

SEQ ID NO: 762 - DNA, 504 bp, Homo sapiens
  SIMILAR (380)..(174): 341254mologous to Paramecium bursaria Chlorella virus 1 a281R,accession number U42580,Smith-Waterman Score=66.
atgcttcctagcaacacagtttcccaccccctcatgaataatcagggctggctacatactctgttgggaagaaggctcaaaaatgaatcctctcaagcagacccgctttggtttccacccctctattctgagaacccaagctcaacccatgtgttctgccttcaggtagaaaatgtcagaatcatagggaagactaagctgaaaaaagaatttggagttccaaaggaattctgtgccacctgccgtccggcaattccctttgccagggaaggcacagaagcctttgcaggcgaggctgcagagagaagaaaacgcacgggagacagtcctgattccaaggggttacaattggttggggaggcaaggcagccacaaagaaagcacagcatgtttgggccagtgttaccagatggtgctgtgcagctccaggctcttagtgtcctgaccgaagaattggacgagatacacacagatagcaaagcagcaaaagtgtatgacgcatag

SEQ ID NO: 763 - DNA, 1727 bp, Homo sapiens
  SIMILAR (656)..(868): 501254mologous to Drosophila melanogaster CG13139 gene product,accession number AE003628,Smith-Waterman Score=185.
gaacccgcctgtcagccagcctttcgagctaattagctcagcatacaacaaagataagtgagcctgggaagagggccccctgaggggtctttagattctgggaaatgtctgattggcagatgttaaaagggattccttggtaatccagtgcatcaatgagctgcagaaattcagcccaggactgcaagaattcaggcatgaggacactctgtacaggaggctcacacagggcagacccaagatgggacagaaccttgggaatctcttgaggacacatcatttgcccaagtctttgccttcacagagattcccggctcttagtctttcaaagacttgaacgttgtgtcaatgttacaggaattttgggaaagcaagcagcagcagaaggctgcattcccaagtgaaggtgtggtggtctatgagtcactgccagctcctgggcctccctttgtgagttacgtgaccctcccagggggaaagctgttttggcaactttcagtggtcagccctggctttggccactgggtgggaaacacaggaggaagtggagcggacacggatgagaggcagcgaaggggaaagaaaggcagccattgaggaagaggctctccaacccacttgtgcctgcaggtccattattgagcatcctaagtgctgcttaagtagagccgaggccaggcgggatgcagctaaagtggccctgatcaactccctcttcaatgagctgccctctcgcaggatcaccaaggaattcattatggaaagtgttcaggaagcagtagcctccaccagcggcaccttagatgatgcagatgaccccagcaccagtgttggggcctatcactacatgctggagtcaaacatgggggaagactatgctggagtttcaggagctgatgaccattttccaactattgcactggaatggaagcctaaaagcccttcgtgaaacaaagtgttcccgacaggaagtcatctcctactattctcagtattctctagatgaaaagatgcgcagccacatggccctggactggatcatgaaggagcgggactcaccaggaattgtctctcaagagctacgaatggccctgaggcagttggaggaagccaggaaagcaggacaagaactacggttttacaaagaaaagaaagaaatattgagcttagccctgactcagatctgcagtgaccctgacacttcctcacccagtgatgatcagctgagccttacggccctgtgtggctatcactagcaaggccaagccccgggtaccctcagtgatggcagaggccagattaacattgggaacctcagtgccagaggtccctcagaggctcccagcatctcctagtacctacctgaaggctctccctaaccctctcccacacattcccatttacagagtatgagagtcgtaggacccttacaagacccaacaagcccactcgatgcatttttctatcacattctcaatagttccagctcaggatgaaaggatagacacaaaattgtttgaaaaacattttcccaggcctggctccaacctaaagcctgactgtcacgtgccttgcttgattttatatatattgtttcaagaatagtccaatatagcattccccaaatgaacagcagccagaattaggtgaagtagcatgatagcagtgtttaaaaatacttaggattaaataaataatatggattgttttaaaaaataaaaaaaaaa

SEQ ID NO: 764 - DNA, 414 bp, Homo sapiens
  SIMILAR (13)..(390): 281254mologous to Homo sapiens Human cytoskeleton associated protein 3 (CYSKP-3),accession number Y91948,Smith-Waterman Score= 90.
tcctctcttccttcccctgctggccaaacttcatactgtccaccaggggagactgccccccgactcggctgtccctcactaacgcggtggtccccgacctagggtcgcagatgcacttcccgaggcacatgcgggcgcaacaaggtaactgcgctccaggcgtggaaccccagtcctgagcgatgtgaaaccaaccccaagcgggctgtgctcacagtttgggaaaaggtaatgtctctgatccccccatatccacccctcccccaacccttgaggacagattcgggtaccgcaaaaccgccaggcacagaagggaggagagctgggacggacaggctactcccggtgaggggatcacctccacgttcccgctccaagcggcttggagctggtatgaaatacaactcctggccc

SEQ ID NO: 765 - DNA, 510 bp, Homo sapiens
tattccgagtatagccaccactgacttctgaccctggacaccgccaagtggggcaacgtttcgctcttacagcagcttcccgctccaagcggctggtagctgctagtaattcagacttctggcctcggaggaagagtgccagggaagaaagagactaagaaatcctcaaacgcccctagaacaagacccgggaagaagtgcccaagtgggcgcggccgtcggcgaggtcagtttagcctgtactggaccgtggaaccctgagcgctgaggctgtggggtcgcgggattctactgggcctcgccagcttccacagtctgctgcggtctgtggaatggggaaggataaaatacagactttggtttattttaaaaaatggtattctgcctgaactaccaggtccatggtttgcttttggcgcttgcagaagcaccaggacgatctttccaaaaatttctgcagtagtttaactaaccaatgaaataaatgaaggttaaaaaaccaaaacagaa

SEQ ID NO: 766 - DNA, 1128 bp, Homo sapiens
  SIMILAR (919)..(1125): 641254mologous to Homo sapiens PRO2221,accession number AF116695,Smith-Waterman Score=214.
atggaggatgaagaggaggtggagaatcagaaggtagtgcgggcgttgttagagaaggaggaggaagaggaggaggaggaggagggatgggaggggctccctcagcccgaaccctgcgtctctgttcacattggaacaccccctcacctcatctcagcttgcttttaccgaggaacagacggctgcgtgtgggggctggtccctacccagatcagtacaggatcttcagctggcagacgagatccagcaaatggaattcacgaagaaactcatgtgcgtttggaaaaaaagttcaagctgacacctgtgcctgccctggagctagatcaggttctggcgactgctccaacctggaacgccggctcagtagcgcccaagccgaaggcgaaggggaagaggaacgaagtgtgggatggggggcggcccctcattcggggttcagactggggcgggcttccagggatgccccctccgaccccgtcaccagcggaggactcatctgccgcggggctgccggaagctctcactcccgccagccccctgggtgctattgatgcggaccttggagtgcggcttggagaagtcttgggaatcaaacggcatgaacttagattcctgttacacaacttttcaatgagggaggaggatatcgaatacctcactcagtcttcgggaatggagccttcaaaaacacttttcccatccttggagttgctctgtaagaaggactttcggagtgaaactccacagtgcggttcaaagacacgcttaggatgccccgggatggagagaggactgagcttggactggaattcctggaacagacgagggcttgtgagcttgtcccaggcactgaggacagcatactcttcccgacaagggcatctgggtcgagagaaggtggagcgggtcttcggcaaaggcgaaaccctggagaacgctgccccaccccaccctgattgcagcttctcaccagcaatggaacaaagctggatggagaatgactttgatgagctgacagaagtaggcttcagaacatgggtaataacaaacttctccgagctaaaggaagatgttcgaacccatcacaaggaagcaaaaaaccttgaaaagagattagatgaatga

SEQ ID NO: 767 - DNA, 1284 bp, Homo sapiens
  SIMILAR (445)..(1224): 231254mologous to Mus musculus plenty-of-prolines-101; POP101; SH3-philo-protein,accession number AF062655,Smith-Waterman Score=117.
cctgaacaggaaccattagagaagaaggcgacccctctaataacccctataataacagggcccggctgctgggcattgtcaacagggaaataactcggtcgctgcttttctggcgaagacgtgccatagcctgggatagtagcctggggtcacagggccacaccgaaagccctcatctctctctaccttctctctgcagaaaaagcgtgaggctgctcctcattgacacccacttagaagttggttgatgaagactgcagtgagcactctcagcaagggtaaaactggcacatttgggcctgaaatggggtcctcggggcctgggtaggctcaagtatggcccttggtaaatttccagcttacagagaaaaagaaggagcgttcactttgttttctgctgggcagggtgaaaaagggggcagctacgtggccaaggggagacgccccccgactcggctgtccctcactaacgcggtggtccccgacctaggtcgcagatgcacttcccgaggcacatgcgggcgcaacaaggtaactgcgtccaggcgtggaaccccagtcctgagcgatgtgaaaccaaccccaagcggctgtgctcacagtttgggaaaaggacagattcgggtaccgcaaaaccgccagcacagaagggaggagagctgggacggacaggctactcccggggaggggtcacctccacgttcccgctccaagcggctggtagctgctagtaattcagcttctggcctcggaggaagagtgccagggaagaaagagactaagaaatctcaaacgcccgtagaacaagacccgggagaagtgcccaagtgggcgcggcgtcggcgaggcgaaagcagcaccggggcgggttatgggccgcgtccacgtgttaggccacgccgcaggcactccaaggtccgcatcaatagcacccagggggctggcgggagtgagagctccggcagccccgcggcagatgagtcctccgctggtgacggggtcggaggggcatccctggaagcccgccccagtctggaggagaaaggggcgtccaagcttcctgataaagctctgggacttcgaaactgcggctatttttttttttcgcagtcccaaattattagggagcaacccttggagcattccctgcagatccaatccctacctgaacccccaatgaggggccgccccccatcccacactcgttcctcttccccttcgccttcggcttgggcgctactgagccggcgtccaggttggagcagtcgccagaacctgatctag

SEQ ID NO: 768 - DNA, 282 bp, Homo sapiens
  SIMILAR (53)..(157): 401254mologous to Mycobacterium intracellulare tryptophan synthase alpha subunit,accession number AF057042,Smith-Waterman Score=69.
gtgcccacaccaccactgctccatatgggaaagcaggacagccagagggctgtgcgacatcaggcaagtcactgcccctatctctattcccaagctatcatcagaaatgattgtagaagcgaccccacctaccgtccatgctgctgtgaggatgaaacgagaggaattaagaaaaagttgatgactgatcttctgaaggaatgcatgcagagaagtaagaacaacaaggactgtgcaaagattgggctgatgtgcacagtcaaacagcaggcaacgggatag

SEQ ID NO: 769 - DNA, 65 bp, Homo sapiens
gtaatgacagtagtgggaaacacatcaaacatgctgatatctatgagaggtaatgatgcttaaga

SEQ ID NO: 770 - DNA, 1041 bp, Homo sapiens
  SIMILAR (88)..(204): 381254mologous to Homo sapiens Human HUPF-I mutant protein fragment 49,accession number Y21401,Smith-Waterman Score=72.
  misc_feature (1)...(1041): n = a,t,c or g
atcctcaaggnacctctgggaaaaaaacaaactgcattttgcaaagttttccccattttcccccggaaaatgttatgcctcctaatcaaacctggtgcctcaagctgccagggaaagtgtttgtggtgtcccaagcaagtggctgctgccccagagagagaaactacttgcacctcccattcactcaatccccatcccacatcttttccccagggtaccccaggctcataaactccagcagatctccacccaggcatgctggggtctatgttataaaaggcagcatgtggtagaaaggggctaaaatgagagttagcaggcttcagttgagtccatctctgccacttccaagtcgggtaactgggtaagctagttgacgctaaaaccctggcaacataatgcagggtgcaggtgaagaacaaatgcaatggagctcaacaaagggctttgtgagctcgagagcatcaattcgatgtcaccccctccctgactagcatgtgggctccccaggttggagcccctttccctctcccctgcatgtccatcgcaggcttcaatgtgtctggcaggcagaaaacaactgctgcacacggagggccttatcagacacaggacagggaccacagtattagcactcaagtgctcatagcctttcccccaccaagcccatccattctgtgcactgttggccccaggggagacaaggtaattttctcccttcctggtcatcttggggcccagaccaccagctggagaaatgatgcagagagagcagatgctcctgcctatcaagatgtcactgagctcacactgccagagcctgagcttcctgagagcagctggagaaacacctacccctgtggccagaccctgagccctcacgctcaaagctccctgaggatagctggggagctgggggagcactgctctctcctgagtttagacccttccagtatggacttctgtggacctgcattcctccctgacgctcctgactgcttacacagtaccttcctgtttgtgactttcttcaaagcctga

SEQ ID NO: 771 - DNA, 477 bp, Homo sapiens
  SIMILAR (200)..(277): 421254mologous to Visna virus envelope polyprotein,accession number U35864,Smith-Waterman Score=62.
ctggagtgttctttctacttgcttcagactatctgcttgctcacctctccactatgtacacgtaacttactgtgagcgcccaggcagtctggctactacagataagcaccccagcccgggagcactagacgctgaacgcagccgcctgaccagaatgcagacaccagggcagataccattctgaagctgtggactcttccctttctggggaaatcagtgagttgatattttctatgttgccacagggagctctttctggcaaaggaaacggaaagaaaacgcaggatctcctcaccaaagcacagaatggggaaaaacaccaaagcctgggcagttgggcagttaggtacaaatctaccaagtgagcagacttaactaaaagggattgtgatgatctactccaacaatttcatttttaaaattaggaaacgaggccgggcatgatgacttacatctgtactcccgacactttgggag

SEQ ID NO: 772 - DNA, 669 bp, Homo sapiens
  SIMILAR (4)..(138): 341254mologous to Drosophila melanogaster CG8838 gene product,accession number AE003580,Smith-Waterman Score=56.
atggagcccttccaccctctgcccagcttccaagcccaggccctgagacccacactgctgtttgtttcggcacctgcaagcagcttgttcacaagcatccagactacagagcaagaggagtttcagaagggccctccacaaggagctctttctggcaaaggaaacggaaagaaaacgcaggatctcctcaccaaagcacagaatggggaaaaacaccaaagcctgggcagttgggcagttaggtacaaatctaccaactgttggcaaatagggtaccaaagcttgaaactcttccagattagttcaagtgggcttacaaagaagttcaagtggacctgcagagtagtgggtcttatctccaagcccgagctgacctttccttccccatttaccaaagatctcacagctgcttctaaccaggcaatagctctctccacaccgtgctttgaaaaaggaacaaaacagttcctttttcaggtcaacccagttttaactccagtcccctcaggtttcttcccggagcggctgttcccgggcgcgcggtggtgttggtggggcagagctgaagtcgctttagaggctcagtcggcgctggggtctgtcaccgaacacgttggttttcgctccctcttccgcttttcctgcctctccaacccggtatcagtttga

SEQ ID NO: 773 - DNA, 463 bp, Homo sapiens
  SIMILAR (330)..(175): 321254mologous to Mus musculus msg3,accession number X71631,Smith-Waterman Score=70.
gggctgggtctatgtaatgtatactgataagcagcacagagtggagcacataggatagcatagatgccatttttctcacagatagtttgccgacctcttcctagagttacgtttttcttgttcctgagacaataatgtggctgtaagtactaatagagacagtggcatttgtgggttgcttatgatctgccagcccctgcgttaagtgttctctgtgtctgtttcagatgggtccgctgtgtgcagaggctccatgggatgtgttgtcttcatagtagcaggtcgctggaccatgggtccgcaaggtgggattttgggactgttgtctgggaatatgtttctttgcatcctgcagagtcatgtgctgttcctgggggcttggatggatgtagggggaagcaaggtgaaaagtggtattcccgtggttccacatttctgtcccgctgtgggggctgtccctcac

SEQ ID NO: 774 - DNA, 824 bp, Homo sapiens
  SIMILAR (238)..(393): 331254mologous to Homo sapiens Human secreted protein, SEQ ID NO: 6029,accession number G01948,Smith-Waterman Score=71.
gtactgagtacagtggtgaatcaaagacagatgcctttggacccttgcagaaagaagtccaaactaagcacagtcccctcatcgtagtaacagctcctatcatggaaaattggccattcctacagattaataatgaatcagtgaccaaggaacatcttcagaacaaacagaaaagcaaagcaatccttcgccgtccctcgccgtccttcgccatcgcacgccaccgcaccccatctctcgaaatctgcagacatcttgatttttcccacgctgtctgtcaggtctccgccgccactcgacgccagggcgccgggccttgtgggctgtgctgcacctcggacggcttcgcaccagccagcgccctctctctcctgcagcactctgatctgcaccccctgaggggcttccactgtccgcggggtgagaatgcccctgggattgtcattgtgatgtcagcgaccaaagccagagatgggtccgctgtgtgcagaggctccatgggatgtgttgtcttcatagtagcaggtcgctggaccatgggtccgcaaggcaccatcagtaatgtcgaacaaatggagaaagttgcagagggaggaatctacacatgtcccaggggccatggtgaaaaggtgcagttaatctccccacttgaagttaaaaccaccttggctggagttggggcaaaaatcacgctgaaatacgtgctgtcatggccggagatggccatcaagatgtctcctagctcatccaggcaggtctgctctcaggttccactgggagaatgtaacagtgttctggagcttgatcatctcccatcctggtga

SEQ ID NO: 775 - DNA, 465 bp, Homo sapiens
  SIMILAR (308)..(198): 511254mologous to Homo sapiens MHC class I HLA-J antigen,accession number M80470,Smith-Waterman Score=89.
atgccttctcctgaagatgaggatctattacctgggcctggagaggaggagaatcctcttttcaccagggccacactctccccagtgatattagaaatgaaactctgggactatctttactaccatcacccccagcctacaaaggacaataccctgacacttcttagtgatgcaggtccctctcaccatcaagttcctgaggctctggtggaagcccagttcatcttgatcctctcctcactagcccaggtctccccaaggtcagggctcatagagcagcaggagttgggttccgggacgcgggatccggcttctctgggaatcttggattccaggaaggatcctggagatctcccactttatgaagcccaatctccactcactgtgatggcgtctttagaccccactggaaaccagatacgacgccctcatcggccctggggaaaaaacaagagcaaagtatga

SEQ ID NO: 776 - DNA, 801 bp, Homo sapiens
  SIMILAR (800)..(417): 291254mologous to Homo sapiens MyokL protein myokLp,accession number W30839,Smith-Waterman Score=95.
cctcagcgtcctgctatccggctgcccgccgcgctccttggtagtgtccgtgggcgcgcaggctttgaagaacctcctcgtggcgggaccccgagcgcaggagaggtgtcaaagagctggcgcgtctccagagccccgggaggaaggctgtaacggcagccccatcgtagacagggacattcgcatcccgagccctggatctctgaaaaccagcccagaatttggaagctggaaggaactttagatcgtccattctgagtgtctctcttcgctggcgttttcccactgaggttatgtaaacatgaagaggagcctgacaagtgtcaagggaaaaaacgacagctaaccacagggtcaggccatgggcaagatatctcagtgttctccgctctcataggtcaggtcacgacccccaggagacctggaggactgaatgctgctgcccccaaggaggaggctgccgtctttatcccaggagggagagcaggtgaagtccccaggggaggaagcacctagccccattcctgctgagcaggaggtggcaggtaccccagactgggaggtaaggacagcccggggcttcgactgaacgtctccagcgtgggtccaactgagcagccatgggtgctgcagggggctgcttccaccctgcttctcagtgactgcccccaagggggccctggccacccttctgactgactcggtgccaggggacagaccaacgtccctctcgtgctgacagccgggccgcaccctggcatgagggcatttacagaaatgctggcggaactgctgccaggg

SEQ ID NO: 777 - DNA, 402 bp, Homo sapiens
  SIMILAR (290)..(397): 381254mologous to Homo sapiens Human secreted protein, SEQ ID NO: 5392,accession number G01311,Smith-Waterman Score=62.
ccaaaaagtagcagaaaatatgtgagcatggatctcagccattttgcgggttggctgcaactgggacttaacctgccataaccttagatcagcctgccacacccaaggagggcctgcccccagacccagactcaagtttagacacagcctaaacgtgtacctctaaatctgcacaaactcagctgcccagatactggatttccttatctcttccgggaaatgcaagatgaaattgccctcctgttgggtattttcctgatcctttattctgaaaaagtggtcatccttttccccacaggccctgtgacctccctcctgtcttgcagctcctcctggcaccagtccccagggctctcctgttggtagttcctgcttttcttcttggaaattcctcgtggaccg

SEQ ID NO: 778 - DNA, 664 bp, Homo sapiens
  SIMILAR (327)..(404): 301254mologous to Homo sapiens Human secreted protein, SEQ ID NO: 6776,accession number G02695,Smith-Waterman Score=40.
  misc_feature (1)...(664): n = a,t,c or g
gtgagttgtccattgtctggcatctgtgaagataagcnnnnnnnnnnnnnnnnnnnnnnnnnnnnnnnnnnnnnnnnnnnnnnnnnnnnnnnnnnnnnnnnnnnnnnnnnnnnnaagaagaaaagcaggaactaccaacaggagagccctggggactggtgccaggaggagctgcaagacaggagggaggtcacagggcctggggagtcactgctcatggagcggggcttctctggcttcatgactcacacatccaagcagctctgcctgtggggagcttccgtctgcaggcgcagcaactcagccgtgagaagcgcgccacctttccaccatggcagtttccaccgagacgtctatccacggcatcgcctgtccaccctacccctccctgctctcgacggcagaggactcgctgttccgagtggcagctttagaatcacgcagtaaccgcaggaagtagagagcacagcacagtcatcattttcctggagtggggtccgaaatacagagtccggccgctggctcgctgctgtctgccatgaagccgctcaaccaaggtggtaagtttcctcaagagaaatggacacaaagccatcgagtcagcatcacctgtgtgcctagtaacaattactaggctggccccagacctagaaactagtgtatc

SEQ ID NO: 779 - DNA, 489 bp, Homo sapiens
  SIMILAR (311)..(442): 1001254mologous to Homo sapiens Extended human secreted protein sequence, SEQ ID NO. 180,accession number Y35931,Smith- Waterman Score=225.
  misc_feature (1)...(489): n = a,t,c or g
aggagtgcccagggtgtcncncaaacgaccgctttcggaattgcgtcgaggnttcgcggcgctcgccgcactggttgttcagcaccttcggtccggttgaggttgtcaagtcggaccaaacaggttgtttctctgcagtttccaacatggcagggaggtttaatagacatggataagaagtccactcacagaaatcctgaagatgccagggctggcaaatatgaaggtaaacacaaacgaaagaaaagaagaaagcaaaaccaaaaccagcaccgatcccgacatagatcagtgacgtctttttcttcagatgatcctatgtttccttcttcctcatcatcgtcttcaggaagccagacagattcaagtattgaagatgctgccaagggaaaaattaagaagaagagaagagagaaaacaaataaatgggaaaaaagaaagagggactgaaactgggctgacccttttgatttccaagctcagcgtntt

SEQ ID NO: 780 - DNA, 1173 bp, Homo sapiens
  SIMILAR (143)..(220): 881254mologous to Homo sapiens Extended human secreted protein sequence, SEQ ID NO. 442,accession number Y36057,Smith- Waterman Score=116.
atggataagaagtccactcacagaaatcctgaagatgccagggctggcaaatatgaaggtaaacacaaacgaaagaaaagaagaaagcaaaaccaaaaccagcaccgatcccgacatagatcagtgacgtctttttcttcagatgatcctatgtttccttcttcctcatcatcgtcttcaggaagccagacagattcaagtattgaagtgcatgagggaacccgattccctttggtaggtgcggtgaaacatcaatcggcttggtccacagataagcgtgttcaactccccgacgagtggttgtttggcaagcagaaagaagttaagatgccttcaatttatcttccaggaaaagagctaaggacactggtgaaaggaaccctggagaacctgccgctgccttctggcaatttccagcagccagcatggggtcttacacagggagagtctggaatttggccagggcccagggatcggaacaccacctcgatggcctccagagccttcaagacctctttccagaacttaatcggacccactgaagagccttctgggggagcagctggcactggggacagaaatagcaccagcagaaatcttgtttctgccaaagcctccagtcctggccagagttgcgggaagagccctgctgagatggtgctggagacgcttatgatggagctgacggggcagatgcgagaggctgagaggcagcagcgggagcgcagcaatgcggtcagaaaggtctgcaccggtgtggactacagctggctggccagcacaccccggtccacctatgacctcagccccattgagcggttgcagctggaagatgtctgcgttaagatccacccatcctattgtgggcctgctatcctcaggttccggcagctgctggcggagcaggagcccgaggtgcaggaggtgtcccagctcttccgctcggtgctgcaggaggtcctggagaggatgaagcaggaagaggaggcccacaagctgacgcgccagtggagcctgcggccccgcggcagcctggccaccttcaagacccgcgcgcgcatctcgcccttcgccagcgacatcaggaccatctccgaggacgtggagcgggacacaccgccgccactgcggtcctggagcatgcccgaattccgggcgcccaaagccgactga

SEQ ID NO: 781 - DNA, 714 bp, Homo sapiens
  SIMILAR (443)..(228): 581254mologous to Homo sapiens Extended human secreted protein sequence, SEQ ID NO. 442,accession number Y36057,Smith- Waterman Score=198.
  misc_feature (1)...(714): n = a,t,c or g
tttttttttttttttttaatttccaaactctttattatgtggtttacagagcatctgaagattggtttcatgagtctgaacttagtgtgaaagatgttcaaattcaaatccccaagccagcgcatcaatgtttttgtaggcttcacagtgctgggctccgcatccttctttggccgccttacaccaaaacgctgagtttggaaatcaaaagggtcagcccagtttcagtccctcttggaaaggtgacatatgngggggttgtttcctcctttttttccttctcttttctttggggggtttcatattttggcctttcttttttcccatttatttgttttctctcttctcttcttcttaatttttccctttggcagcatcttcaatacttgaatctgtctggcttcctgaagacgatgatgaggaagaaggaaacataggatcatctgaagaaaaagacgtcactgatctatgtcgggatcggtgctggttttggttttgctttcttcttttctttcgtttgtgtttaccttcatatttgccagccctggcatcttcaggatttctgtgagtggacttcttatccatgtctattaaacctccctgccatgttggaaactgcagagaaacaacctgtttggtccgacttgacaacctcaaccggaccgaaggtgctgaacaaccagtgcggcgagcgccgcgaaacgnacgcgtagg

SEQ ID NO: 782 - DNA, 516 bp, Homo sapiens
  SIMILAR (305)..(228): 731254mologous to Homo sapiens Extended human secreted protein sequence, SEQ ID NO. 442,accession number Y36057,Smith- Waterman Score=94.
tttttttttttttttttaatttccaaactctttattatgtggtttacagagcatctgaagattggtttcatgagtctgaacttagtgtgaaagatgttcaaattcaaatccccaagccagcgcatcaatgtttttgtaggcttcacagtgctgggctccgcatccttctttggccgccttacaccaaaacgctgagtttggaaatcaaaagggtcagcccagtttcagtccctcttggaaaggtgacatatgtggttgtttcctcctttttttccttctctttttcttggtgtttcatattttgtccactcgtcggggagttgaacacgcttatctgtggaccaagccgattgatgtttcaccgcacctaccaaagggaatcgggttccctcatgcacttaggaaaaaagaaagaccacgtgggcgccagatatcgggggacctgccccgataatcatgtaggttcttttctattttcctaagcgtcggctggcttgagaaataaagggacagagt

SEQ ID NO: 783 - DNA, 738 bp, Homo sapiens
  SIMILAR (562)..(738): 731254mologous to Homo sapiens Human secreted protein, SEQ ID NO: 6962,accession number G02881,Smith-Waterman Score=219.
atacacaagagtatgttcccttaatgaacactttggaaatgtcttgacaccctgtactgttttgcctgtgaaattgtattctgatgccaggaatgttctatcaggcataattgattcttatgaaaacttaaaagaatttaaaggtgacctcattaaagtacttgtgtggatacttgttcaatactgctccaaaaggcctggcatgaaagagaatgttcacaacactgaaaataaagggaaagcacctctaatgttgcctgcttttgaacactttgccacctcccaaatccccagaagacatagacagtttaaattcagaaacttttaatgactggtctgatgataatatttttgatgatgagccaactattcaaaaaagtaattagaaggaaaaacattcagttggaaagatttgccagggtacaaattttgtttattccaggatcagtaggattcacagaggggttggtgattcattctacaggcactgttcctgaaaacgatctttacaaagcagttctattaggataccctgctgttgacaaaggaaaacaagaggacatgccatatattcctctcatggagttcagttgttcacattctcacttagtatgcttacccgcagagtggaggactagctgtatgcccagttccaaaatgaaggagatgagctcgtttttccagaagactggtaccaatttgttctaaggcaggtgaatgtttcattcaaaagagaaa

SEQ ID NO: 784 - DNA, 837 bp, Homo sapiens
  SIMILAR (214)..(348): 851254mologous to Homo sapiens unnamed protein product,accession number AK022861,Smith-Waterman Score=196.
  misc_feature (1)...(837): n = a,t,c or g
atgaaagagaatgttcacaacactgaaaataaagggaaagcacctctaatgttgcctgctttgaacactttgccacctcccaaatccccagaagacatagacagtttaaattcagaaacttttaatgactggtctgatgataatatttttgatgatgagccaactatcaaaaaagtaatagaagaaaaacatcagttgaaagatttgccanggtatactctgaaactaatgattgataaagcaagtttaggtccaatagaagactttagagaactgattaagtaccttgaagaatatgaacgtgactggtacattggtttgctgcctctcaaaaaagaagccatcattgtttctaacagtctaagtataagtgagtgtcccagaattgaatttttacagcaaaagcacaaagatgagaagaaaatctctcttaagcatgagctcttcagacatggcatcctcctcattacaaaagttttccttggccagagtgttcaggcccatgaaaaagaatccatcagtcaatccaactatccaatggttaattcagtgttcattcctcggaaatatttactaaattctgtcatgggacaaagaaactgtgattgcagtgttcggcagtgcaagtggtttgtctttgatcatgaccttgttttgccggaatatgttgttgaatttgagtatattacaatgagtctgaatctacatggaaacagcttgagtaaattgagagatctctccaagttaacaggacttcgaaaactaaacattagctttaatgaatttacctgtttagatgatgtataccacttggcccaagcccttttaagtaagtag

SEQ ID NO: 785 - DNA, 710 bp, Homo sapiens
  SIMILAR (366)..(428): 1001254mologous to Homo sapiens 45kDa splicing factor; SPF 45,accession number AF083384,Smith-Waterman Score=107.
gtgtttaaagaacatggttggtgcgggagaggtggatgaagacttggaagttgaaaccaaggaagaatgtgaaaaatatggcaaagttggaaaatgtgtgatatttgaaattcctggtgcccctgatgatgaagcagtacggatatttttagaatttgagagagttgaatcagcaattaaaggttagtggtacagctaaatattaaagaataaaaaagttgaatttacagccttaatctttacaagtaaagcgtactgtttaattaaagttaaacctttatcttataggatacctgcattattctgtcttttgtttgcctttcagcggttgttgactttgaatgggaggtattttggtggacggggtggtaaaagcatgtttctacaatttggacaaattcagggtcttggatttggcagaacaagtttgattttaagaactagagcacgagtcatctccggtgatccttaaatgaactgcaggctgagaaaagaaggaaaaaggtcacagcctccatggctgttggcatacccagactcttggaaggacttctaagatatatgttgattgatcccttttttattttgtggttttttaatatagtataaaaatccttttaaaaaaacaacaatctgtgtgcctctctggttgtttctcttttttattattactcctgagttgatgacattttttgttagatttcatggta

SEQ ID NO: 786 - DNA, 2081 bp, Homo sapiens
  SIMILAR (1404)..(724): 361254mologous to Homo sapiens 45kDa splicing factor; SPF 45,accession number AF083384,Smith-Waterman Score=219.
aagactatgcttgaatctctgaaaacaaatgctagattcatgatttctatacccacatactccataaatccatcacaaaccctacagtctgatttagcctacggcaaatgattcatccaataggccatggtatggttccaccaattcttccaatcttattcaggttgtaaagacgtttttctacgactggagtcactaagaatttctctgttagagaaagcatcattttcacctttggcacactgccaagatgatactttactacagaatttatgaaactacaatttagtaacttgcaggctttattaaaaaaaaaaaaaaaacaaagaataatttaatataaccccatgtcccaaaactttctagttttttttttttttttttttagtgcaagaaatgctgcatcattgaagcacttgagaattaccatgaaatctaacaaaaaatgtcatcaactcaggagtaataataaaaaaagagaaacaaccagagaggcacacagattgtctgttttttctaaaaggattcttatactatattaaaaaaccacaaaataaaaaaagggatcaatcaacatatatcttagaagtccttccaagagtcttgggtatgcaaacagccatggaggctgtggacctttttccttcttttctacagcctgcagttcatttaagggatcaccggagatgactcggtgctcctagttcttaaaatcaaacttggttcctggccaaatccaagaccctgaatttggcccaaatttgtagaaacattgctttttaccacccggtgcaccaaaaatacctcccatttcaaggcaacaaccgctttaattgctgagttcaactcttctcaaatttctaaaaaatatcccgtactggcttccatcatcagggggcacccaggaatttcaaataatcacacattttccaactttggccatattttttcacattcttccctgggtttcaacttccacagtcttcatccacctctcccgcaccaaccatgttccttagtaagaccactttagtaggacacttaagtatttcagtcaggcggatttgaatctgacttcttggatgcatctttctctgtggcgtcgcccacgatgatcttgccgccacgcttgtatcgtcttctccactgacaaggcagtgctcaggccctgctcatgcttccccaagaccctgggccctcccggaagcccgtactttctgcatgatcttgtgcgccaccgtgccccccatgttagcgaggaaggagttgcttaggtccgggttggagatctcgggtctgtcttgttcctcggtacactgggggaggaatggctgcttttggaagactgtgatcgaggtcttgagtcctcttcataaggaaaatctcggggtaactctttgtctttctctaccagagaagtgggtggggcaatggcagctccgcccatacttcttttcctcctctcttcgctcataatcttcatcttcatcagaatctggatctggtctccttgcaaacccacttgcttcatgtctgtctttacgcctttttttccctttcttctatttccttttgtctttccagctcccgctgtctctgtcgttcctctctttggcgcttcacttcctttctaataatcattaggaaacataaggtcatattcgtcagataagggaatcagaacttcccctgcagaaaacccactgggaacaggatccttcagcccagctgctaccatgcggtggaagtgtccacaatttgccggtcatctgaggagccacctcgcttcaggtcaatgactggggcgaggactgtactttgtttcgtcctttggctctttgccctgagtgagagctgccttcttcacctgaagctgagactgcagaagtttgaagtttttggaccagccttctgtttttgagtcactggtctccactcttaggtcatcgtacagggacatcttttcttcagtttaatgccggcccgcccggccgactctgcccatgagccgcgccggcggcagagcggagccgggcggctctccgcgtaaacccgccagcggcaagaggcctcgaaggcgc

SEQ ID NO: 787 - DNA, 379 bp, Homo sapiens
  SIMILAR (378)..(238): 551254mologous to Gallus gallus virion-associated nuclear- shuttling protein,accession number AY012156,Smith-Waterman Score= 117.
agatgatgtgcctttgtggcagaaccaagcctcagtataaacaaagaagagggtcctcagccacgctccctcgttgcctgttgtctctctctgttagtgtgtacttctacggatggactttctttactgaggataaactgggtgctcccgttgcttctgcacagctccagggcctgttggtacccatggatcttgcaggtggaaaaccaagccgcagttacagggtgggcaatacatctgttttaattgcttttctagtttttctttctccatctgacaagcttttatctgggaattcagcctgttcaactgggattgggaagtttcattaatttgctgtagctcctctttctcttgattaagtctctctcgatccgat

SEQ ID NO: 788 - DNA, 1138 bp, Homo sapiens
  SIMILAR (7)..(591): 411254mologous to Gallus gallus virion-associated nuclear- shuttling protein,accession number AY012156,Smith-Waterman Score= 351.
gagttatatgaaagaaaggtagcagagctgaagacgaaactggacgccgcggaaagattcctcagcacgcgggagaaggatccgcatcagaggcagagaaaggacgacaggcagagagaggacgacaggcagcgcgacctgacccgggaccggctgcagcgggaggagaaggaaaaggaacgcctaaatgaagaattacatgaattgaaagaagagaataaacttttaaagggaaaaaatactcttgcgaacaaggaaaaggaacattacgaatgtgaaataaaacgcctcaataaggctcttcaggatgccttgaatatcaagtgttcattttccgaggactgtttgaggaagtctcgagtggaattctgccatgaggagatgagaacagaaatggaagttctgaagcagcaggtgcaaatatacgaagaagacttcaaaaaggaacgatcggatcgagagagacttaatcaagagaaagaggagctacagcaaattaatgaaacttcccaatcccagttgaacaggctgaattcccagataaaagcttgtcagatggagaaagaaaaactagaaaagcaattaaaacagatgtattgcccaccctgtaactgcggcttggttttccacctgcaagatccatgggtaccaacaggccctggagctgtgcagaagcaacgggagcacccaccagactatcagtggtatgctcttgaccagcttccgccagatgtacaacacaaggcaaatgatggtgtcttgctccacctccagtctgttgccaggctggtctcgaactcctggcctcaagtgatcctcctgcctctggctcccaaagtgctgaaatttcaggtttatcctcagtaaagaaagtccatccgtagaagtacacactaacagagagagacaacaggcaacgagggagcgtggctgaggaccctcttctttgtttatactgaggcttgtttctgccacaaaggcacatcatctaccctgttatttgtgcctggtcatgttttcctttggtatgaatacaggaaaaggcttctgacagctaagatcctgatcaaattggaggagccagttattatacaaccaaatacaacttccagtttccttgaaaaaaaaaaaaaaaaaa

SEQ ID NO: 789 - DNA, 2406 bp, Homo sapiens
  SIMILAR (2406)..(2287): 1001254mologous to Homo sapiens Human orphan G protein- coupled receptor hRUP4,accession number Y71309,Smith-Waterman Score =203.
atgaagatgcaagtaactcggttcctggtcattaaagatagtgtggcttcctgcttgcactctcctttgccctctgttacatcgctcactctggggaaagctggctgccacctcgtgagcagcagtccatgtagtgagaaactgagtgctcctgctcacatcccttgttgcgattataggtatgaaccaccatgcctgacatgtgttggttacttctatggtcaactgatgctccatccagcaggaccttctgaggagccttatgtaatgaatgtcagaattgtccctctagaagatccaagggggaagcatttccagcagccccatccttcatttgtcaagtatgctctatcagtgttaactcttcagtacttccaggttacacgtggatgtgccaaggtggcagccatagagacaactacctttgaagaaagagttttattactcacagttcccaagtggaggggcatgccatgccatacaaggccacacacagggaagcaccagcttcgatcagaaggcagaaacaatgagcagaaagtatgggcaaagggcttttattgtggttttggggggaaaggaaaagtcgaggcaagacacacgcagaaaactatgagagtgtcagacatagaagccaccatcacccttagcccaggacctggaggaggtgcactgagggaattatcagagggcgctctcctctttaggggtgtgaaaaacagtaactctgtttgtttggctctagtagccccttctaacttggttttcatggggtttatgtggtccagaatagaggcagctcctcttccaaacaccaggtggtgtctgccacatggctactcaggtcctgcgaactctggtggctgctactacatcactacagggatgtcctgctggctctcagatctctatccaagacatgatggtgtccatgttggactccaaggcaaggacctggagcatgacattccagtggacctagggtccaggcccacctctgtggacccagtttccaggtctgccccagggccccagggccccaaggctccagtggactcagggtccaggaccactccagcaaaccctggtgctggaccatcccctgtagacccaagctcccggccagcccctgtggcttcaggctttagactcatcatgatagaccaaaacaccaagctaattccagtgccaggttggcccctgcgactcaggctcaagatctacctcagcagtaggtcagcctctttggactcaggctccaggtttgcccctgtggacacaaattttatacctgtccccacagaccgaggccatagccatgcccctgaagacccagttgacaggctaacctcagtggacccaacaaaggaaaaaaactggatggagaatgagtttgacaagttgacagaagtaggcttcagaaggtcggtaataacaaacttctctgagctaaaggagcatgttctaacccatcgcaaggaagctaaaaaccttgaaaaaagaggtgtggaatgtgatgtggagacattagcaccaaaagctagaacctggagatccaaggccaaggccaagaaaggcgtgatgaaatacgaaaagatgtttccagtggcccttcaagggcaggacaatgaaggagatccaattcaagaaaatgtggactccgagagctggaaaaaatgtaagtttgccatagcttctgaagtcagacccaacaaacaagaacctggggaaggcttcagagtttatgctgaaaacatctctgagttgataattcaatatacagaccctccatggcagtacattccatttctgtggcttaaatttgaagcagtttcaaagccagttaatataatagaagggtgtagtgtgagtgtggagaggagtgtctggatgttaggtgagagggtggatgtggtcgtaggtggaagagtgtattgtggtggtgatgacattgtggtgttgtatgggtgtgagtttgggtcgatgtgtgtggtgtatggtggtgggagagaaaccagttacaacacagatatgaagggaaagttgggcaggggttggggagagtctcagaaaggaaaagagaacacaaacgggagatgtgagacatggggagcttatgcctcagagcttgaggctgctttagagtacaaagggcttgtctgctcatgcctcattttattctggcagcaactccgtgaagtggagggggcatcacctccagtttacacaggaaaacatgaaggcttaaaaaggcgacgttacttgccagtcatacaacaaggcagcaagttcataaccaattttactgtacagaataagcatcaccataagaggcaggaggaagaggatgacaaggatgaaggtggtgtagatcttctggtgcacagggctggtccactcttctaa

SEQ ID NO: 790 - DNA, 759 bp, Homo sapiens
  SIMILAR (175)..(252): 1001254mologous to Homo sapiens unnamed protein product,accession number AK024815,Smith-Waterman Score=150.
atgaggaagatgcaaaagcggaaacccctgataaaaccatcagatttcaggagacgtatttactaccacaagagcagtatgggggaaaccacccccatcattcatattatctcccactgggtagctcccataacacatgggaattatgggagtacaattcaagataagatttggataaaagcttgtcagatggagaaagaaaaactagaaaagcaattaaaacagatgtattgcccaccctgtaactgcggcttggttttccacctgcaagatccatgggtaccaacaggccctggagctgtgcagaagcaacgggagcacccatgttgcgattataggtatgaaccaccatgcctgacatgtgttggttacttctatggtcaactgatgctccatccagcaggaccttctgaggagccttatgtaatgaatgtcagaattgtccctctagaagatccaagggggaagcatttccagcagccccatccttcatttgtcaagtatgctctatcagtgttaactcttcagtacttccaggttacacgtggatgtgaaagcatggagctggacaaaaaaatccaggatctgattgagagaaatgcgtctcctcatccaaaacggttcaccccagaggccatgccaactcacagaaatctatgttctctgaagccacttcctgttactaaagaaattcttcagcagaagaatttgctggcactttccactttaaagtgtccaggcagctgtgactacaagaag

SEQ ID NO: 791 - DNA, 351 bp, Homo sapiens
  SIMILAR (214)..(288): 841254mologous to Homo sapiens unnamed protein product,accession number AK027104,Smith-Waterman Score=103.
atgagcacccatgacatggtctctgctgaacaaagcaaaaggattgatttagagaaagatggcctattgaatgtggattcttccatgttgctggcctggaaactgataaacagaagcccacaaatgaaagcctctcagaataccatcatccgctgtcacaatgcaattaccgaacagaatgatagcaagatagaggctcccgcaaatggaatgataaaagttgctatttctgcagatgtcaaagaagttctgttaactgatgggaatgaaaaggccatcagaagtatccttattcagatagaaaacgggtttgttgtgctcattcctttttcctggctgagtaacaattga

SEQ ID NO: 792 - DNA, 508 bp, Homo sapiens
  SIMILAR (398)..(475): 571254mologous to Homo sapiens Human signal peptide containing protein HSPP-132 SEQ ID NO:132,accession number Y87355,Smith-Waterman Score=75.
cgttacgccccacaattcccgggtcgacgatttcgttggggacaaccagaaagtttcaagcgacaggctcgcgcccggctggagaggaggacgcgggcggcccggagcggcccggggacgtggtgaacgtggtgttcgtagaccgctcaggccagcggatcccagtgagtggcagagtcggggacaatgttcttcacctggcccagcgccacggtgtggacctggaaggggcctgtgaagcctccctggcctgctccacctgccatgtgtatgtgagtgaagaccacctggatctcctgcctcctcccgaggagagggaagacgacatgctagacatggcccccctcctccaggagaaactcgcggctgggctgccagattgtgctgacaccggagcttggaaggaagcggaattcacccttgcccaagatcaccaggaactttctacgtggatggccatgtccccaagccccactgacatgaacacctggaccattccacattgcca

SEQ ID NO: 793 - DNA, 2966 bp, Homo sapiens
  SIMILAR (34)..(462): 971254mologous to Homo sapiens 22-FEB-1993 Inter-cellular adhesion molecule cellular DNA,accession number Q67439_cd1,Smith- Waterman Score=728.
ggaattcctcagagttgcaacctcagcctcgctatggctcccagcagcccccggcccgcgctgcccgcactcctggtcctgctcggggctctgttgccaggacctggcaatgcccagacatctgtgtccccctcaaaagtcatcctgccccggggaggctccgtgctggtgacatgcagcacctcctgtgaccagcccaagttgttgggcatagagaccccgttgcctaaaaaggagttgctcctgcctgggaacaaccggaaggtgtatgaactgagcaatgtgcaagaagatagccaaccaatgtgctattcaaactgccctgatgggcagtcaacagctaaaaccttcctcaccgtgtactggactccagaacgggtggaactggcacccctcccctcttggcagccagtgggcaagaaccttaccctacgctgccaggtggtagggtggggcaccccgggccaacctcaccgtggtgctgctccgtggggagaaggagctgaaacgggagccagctgtgggggagcccgctgaggtcacgaccacggtgctggtgaggagagatcaccatggagccaatttctcgtgccgcactgaactggacctgcggccccaagggctggagctgtttgagaacacctcggccccctaccagctccagacctttgtcctgccagcgactcccccacaacttgtcagcccccgggtcctagaggtggacacgcaggggaccgtggtctgttccctggacgggctgttcccagtctcggaggcccaggtccacctggcactgggggaccagaggttgaaccccacagtcacctatggcaacgactccttctcggccaaggcctcagtcagtgtgaccgcagaggacgagggcacccagcggctgacgtgtgcagtaatactggggaaccagagccaggagacactgcagacagtgaccatctacagctttccggcgcccaacgtgattctgacgaagccagaggtctcagaagggaccgaggtgacagtgaagtgtgaggcccaccctagagccaaggtgacgctgaatggggttccagcccagccactgggcccgagggcccagctcctgctgaaggccaccccagaggacaacgggcgcagcttctcctgctctgcaaccctggaggtggccggccagcttatacacaagaaccagacccgggagcttcgtgtcctgtatggcccccgactggacgagagggattgtccgggaaactggacgtggccagaaaattcccagcagactccaatgtgccaggcttgggggaacccattgcccgagctcaagtgtctaaaggatggcactttcccactgcccatcggggaatcagtgactgtcactcgagatcttgagggcacctacctctgtcgggccaggagcactcaaggggaggtcacccgcgaggtgaccgtgaatgtgctctccccccggtatgagattgtcatcatcactgtggtagcagccgcagtcataatgggcactgcaggcctcagcacgtacctctataaccgccagcggaagatcaagaaatacagactacaacaggcccaaaaagggacccccatgaaaccgaacacacaagccacgcctccctgaacctatcccgggacagggcctcttcctcggccttcccatattggtggcagtggtgccacactgaacagagtggaagacatatgccatgcagctacacctaccggccctgggacgccggaggacagggcattgtcctcagtcagatacaacagcatttggggccatggtacctgcacacctaaaacactaggccacgcatctgatctgtagtcacatgactaagccaagaggaaggagcaagactcaagacatgattgatggatgttaaagtctagcctgatgagaggggaagtggtgggggagacatagccccaccatgaggacatacaactgggaaatactgaaacttgctgcctattgggtatgctgaggccccacagacttacagaagaagtggccctccatagacatgtgtagcatcaaaacacaaaggcccacacttcctgacggatgccagcttgggcactgctgtctactgaccccaacccttgatgatatgtatttattcatttgttattttaccagctatttattgagtgtcttttatgtaggctaaatgaacataggtctctggcctcacggagctcccagtccatgtcacattcaaggtcaccaggtacagttgtacaggttgtacactgcaggagagtgcctggcaaaaagatcaaatggggctgggacttctcattggccaacctgcctttccccagaaggagtgatttttctatcggcacaaaagcactatatggactggtaatggttcacaggttcagagattacccagtgaggccttattcctcccttccccccaaaactgacacctttgttagccacctccccacccacatacatttctgccagtgttcacaatgacactcagcggtcatgtctggacatgagtgcccagggaatatgcccaagctatgccttgtcctcttgtcctgtttgcatttcactgggagcttgcactattgcagctccagtttcctgcagtgatcagggtcctgcaagcagtggggaagggggccaaggtattggaggactccctcccagctttggaagcctcatccgcgtgtgtgtgtgtgtgtgtatgtgtagacaagctctcgctctgtcacccaggctggagtgcagtggtgcaatcatggttcactgcagtcttgaccttttgggctcaagtgatcctcccacctcagcctcctgagtagctgggaccataggctcacaacaccacacctggcaaatttgattttttttttttttttcagagacggggtctcgcaacattgcccagacttcctttgtgttagttaataaagctttctcaactgcc

SEQ ID NO: 794 - DNA, 994 bp, Homo sapiens
  SIMILAR (583)..(530): 941254mologous to Homo sapiens Human signal peptide containing protein HSPP-132 SEQ ID NO:132,accession number Y87355,Smith-Waterman Score=86.
atgcaagcatttgagtctactgtgctccaagctgcagatacagtgaatacggcagacacgctctggtcaaaagcagtcctccaaaactccaatgcctacagtgaagcaatctggtgtaaagaaatgtggaacccaggagttgcaacctcagcctcgctatggccccagcagcccccggcccgcgctgcccgcactcctggtcctgctcggggtctgttcccaggaggaactgcctgggaagtgtcgagatggatcccaactttctcatcatcgccccagcgctgggggaaggggcccaggctacagagaagcttcccagatgctgatcttggcaggcatcaggaactgcggcagcctcatctcctccatgggctcagggcccactttcagctcagtgacgggaaaggccccggaaacagctgaacccctgccggggcaccgagagagtggacctgggttcgagggggtgactctgaagtttcagataaagccggactccagctgcagatcatccccacgtacaggtccaccccgggcgctgggccaggtgaagaacattgtccccgactctgccactcactggatccgctggcctgagcggtctacgaacaccacgttcaccctggggacagtggaagtgcgaatgccgaactggatgatgggctcagggcccggccggggcgagcctggaaaacacggttcggtgagcggctgcgccgagccccgcccgccggcatctgacggattaacgctgcccgccccgggcgccccaggaaggcccttcctctgtcagaatggccaccatggtaccatccgtgttgtggcccaggcctgctggactctgctggtctgctgtctgctgaccccagaccccactgggcggccagaaacgcactttgcccacctgctgccctcgcccgagcccagcccagaaggcagctattgggccagcactcccagggcctcggcggccactacgcggactcctacctaa

SEQ ID NO: 795 - DNA, 1761 bp, Homo sapiens
  SIMILAR (69)..(1679): 1001254mologous to Homo sapiens ICAM-3,accession number S50015,Smith-Waterman Score=2801.
cttcgggcacctcaggaaggcaccttcctctgtcagaatgactaccatggtaccatccgtgttgtgggcccagggcctgctggactctgctggtctgctgtctgctgaccccaggtgtccaggggcaggagttccttttgcgggtggagccccagaaccctgtgctctctgctggagggtccctgtttgtgaactgcagtactgattgtcccagctttgagaaaatcgccttggagacgtccctatcaaaggagctggtggccagtggcatgggctgggcagccttcaatctcagcaacgtgactggcaacagtcggatcctctgctcagtgtactgcaatggctcccagataacaggctcctctaacatcaccgtgtacgggctcccggagcgtgtggagctggcacccctgcctccttggcagccggtgggccagaacttcaccctgcgctgccaagtggagggtgggtcgccccggaccagcctcacggtggtgctgcttcgctgggaggaggagctgagccggcagcccgcagtggaggagccagcggaggtcactgccactgtgctggccagcagagacgaccacggagcccctttctcatgccgcacagaactggacatgcagccccaggggctgggactgttcgtgaacacctcagccccccgccagctccgaacctttgtcctgcccgtgacccccccgcgcctcgtggccccccggttcttggaggtggaaacgtcgtggccggtggactgcaccctagacgggctttttccagcctcagaggcccaggtctacctggcgctgggggaccagatgctgaatgcgacagtcatgaaccacggggacacgctaacggccacagccacagccacggcgcgcgcggatcaggagggtgcccgggagatcgtctgcaacgtgaccctagggggcgagagacgggaggcccgggagaacttgacggtctttagcttcctaggacccattgtgaacctcagcgagcccaccgcccatgaggggtccacagtgaccgtgagttgcatggctggggctcgagtccaggtcacgctggacggagttccggccgcggccccggggcagccagctcaacttcagctaaatgctaccgagagtgacgacggacgcagcttcttctgcagtgccactctcgaggtggacggcgagttcttgcacaggaacagtagcgtccagctgcgagtcctgtatggtcccaaaattgaccgagccacatgcccccagcacttgaaatggaaagataaaacgagacacgtgctgcagtgccaagccaggggcaacccgtaccccgagctgcggtgtttgaaggaaggctccagccgggaggtgccggtggggatcccgttcttcgtcaacgtaacacataatggtacttatcagtgccaagcgtccagctcacgaggcaaatacaccctggtcgtggtgatggacattgaggctgggagctcccactttgtccccgtcttcgtggcggtgttactgaccctgggcgtggtgactatcgtactggccttaatgtacgtcttcagggagcaccaacggagcggcagttaccatgttagggaggagagcacctatctgcccctcacgtctatgcagccgacagaagcaatgggggaagaaccgtccagagctgagtgacgctgggatccgggatcaaagttggcgggggcttggctgtgccctcagattccgcaccaataaagccttcaaactccct

SEQ ID NO: 796 - DNA, 587 bp, Homo sapiens
agtggctcacgcctgtaatcccagtactttgggaagccgaggcaggtggatcacctgaggtgaggagtttgagaccagcctggccaacatggtgaaaccccgtctttactaaagctacaaaaattagctgggcgtggtgccaggcgcttgtggtcccggctgctcaggaggctgaggcgggagaattgcttgggcctgggaggtggaggttgcagtgagccaagatcgctccattgcactccagcctgggtgacagtgaaactcccatctcaaaaataaaagaataaaagtatgtctgtcatccagctcctatgtctgttatccagctccaagtacagcttgtgtatatcaacattttcaaaaacctttaaactaccaaatgaaatccagatgtttttccatggttgagaagtgtcttgtgttcatgttgcctgtgaccgttgaaatgaagtagtatgtgtaatagcaggggctagagctttaggcccagctgttactccaaaatcacacagggcagtttctccctgaacaacccaaagtggaaaagggatccaaggcttttgctatttttctcttaaactcgtgcc

SEQ ID NO: 797 - DNA, 1007 bp, Homo sapiens
  SIMILAR (346)..(651): 751254mologous to Homo sapiens unnamed protein product,accession number AK001860,Smith-Waterman Score=353.
atgttagcctcagccataagcaacttatactttcgtcaaaagtatctttacgcgttcagtattgttcccatgaagctaatggatgcagcagaactggtaaaacagcctccggatgtcactgaaaacccttacagaaaatctgggcaggaagcatccataggaaagcaaattcttgcccctgtgtgctaccttgccctggccaaaggaggcttatctgatgaccatgtcctcatcctgcctattggacactaccagtcagtggtggagctttcagcagaggtggtagaagaggtggagaagtataaggccactctgagacggttctttaagagtcgagggaaatgctgctctactactgatgacattaaagatgccttcattacccaggcacaggagcagcagatagagctgttggaaatcccagagcactctgacatcaagcagattgcacagccaggagcagcatatttttatgttgaacttgacacaggagaaaagctttttcacaggatttaaaagaaatgttcctttgcagtttggaagggaggtcctggccagtaaagccatcccttaatgttcctgataagtcctgactggaggcagtgtcagatcagcaaggaagacgaggagacgcctgggcttcgccgctttccggaaagactttgagccctatgactttactctggatgactaaaacaaagggaagaactttttatgaactccacaggaagtagtaaagcttttttttttttttttaattaaaagaattttttttgagacggagtctcgctctgtcacccaagcaggattgcagtgagccaagatcgctccattgcaacccaacctgggttgaacagtgaaactccatctcaaaaataaaagaataaaagtatgtctgtcatccagctcctatgtctgttatccagctccaagtacagcttgtgtatatcaacattttcaaaaacctttaaactaccaaatgaaatccagatgtttttccatggtta

SEQ ID NO: 798 - DNA, 358 bp, Homo sapiens
  SIMILAR (131)..(12): 451254mologous to Macaca fascicularis hypothetical protein,accession number AB047615,Smith-Waterman Score=59.
  misc_feature (1)...(358): n = a,t,c or g
ttttgggggcaggaggtggatctcataaagtacattgtcaaaggtgaggagaattacaaagaaccttcttaagggtgggggagatgataaagaaccttcttaagagtggggcagattacaaagtacattgatcagttagggtggggcagaaacaaatgacaannnnnnnnnnnnnnnnnnnnnnnctgnnnnnnnnnnnnnnnnnnnnnnnnnnnnnnnnnnnnnnnnnnnnnnnnnnnnnnnnnnnnnnnnnnnnnnnnnnnnnnnnnnnnnnnnnnnnnnnnnnnttcctgtcttcttatgttaataagaaaaataaaacaaaatagtggtaaagtgttggggtggcgaaaatttt

SEQ ID NO: 799 - DNA, 405 bp, Homo sapiens
  SIMILAR (3)..(74): 791254mologous to Homo sapiens Human secreted protein, SEQ ID NO: 7340,accession number G03259,Smith-Waterman Score=102.
tgtgtgagcaacgtggctgtttatttcacctgggtgcaggtgggctgagtccgaaaagagagtcagccgagttttatgagttctatataattttgaataatagtcttttgtcagatacatgttttacaagtattttctccaagtctgtggcttgtcttctccttctcttgatctctggggtatctacatttttctcatcacaacaactttattcatgtcagtaaattcatctttacaagtttctctggctgcatatctagagccttttgagccgtgtcagattcccacagtcagctcttttctcgataactctttatattcagtttgaatttcattccaggattatcagtttttgttcctttgctgcactttcatctttgttggggagttccctcttttgattca

SEQ ID NO: 800 - DNA, 492 bp, Homo sapiens
  SIMILAR (490)..(404): 721254mologous to Homo sapiens HHLA3 protein,accession number AF126163,Smith-Waterman Score=114.
atgctcatgaagattaggatggtacaagtgatgatctcaagcacgtctgcagagggcttcatggttggtgcaaacataattgccattacctttaatggcaaaaactgcaattatgtttgcagcaacctaataactgatgttgaagtccacaccaattgtgtgtgcaaggcagtgctgattcaaagttctagagctcttcctaccccatcctccttccgagccactctcacagtatcagaaagacgttgctgcctacacctgcgccctcctcctttatccttcagaggcaaggcccgtaataaatctcttgcacatctagtcccatttggagggctgcttctcagaccgcctgaactgacacgctcccctgaccctcctcctcaccctcatccttctactccccctgcttttccaaggttacttcaggccatctgggcgtatacgtgcaagtcacaggggatgcgatggcttggcttgggctcagaggcctga

SEQ ID NO: 801 - DNA, 516 bp, Homo sapiens
  SIMILAR (437)..(192): 321254mologous to Caenorhabditis elegans coded for by C. elegans cDNA yk180a7.5; coded for by C. elegans cDNA yk183b7.5; coded for by C. elegans cDNA CEMSA08F; coded for by C. elegans cDNA yk183b7.3,accession number U80438,Smith-Waterman Score=83.
atggtatggagagataatgggcgatgtttctcagggctgcttcaagcgggattcggggtggcatgggaacctagagtggaagagattaaactgaaggaagattctgtgaacgaacactcaggcaatcgaagaaatgttcagattatgagtggctatttccaaagccctgtacatggatttcaaagagctatgccagtgctttcggtaggaagtgaactgaccatcggagaatggggtgatatcaccttcatcacagaaggacgtccagctgctcacgttggcctagagcctcctgcggccagcactgttctgggttctctgcgtgaaccatggtgtggtggtggggacacagaccctgaggacaagcagctgggtctcaacgccagctctgctactcttagtgacgtagccttgggcaagctccttaaacgtttgtgcctttatttcctcatctatgaaatgggaatgaaaatagcacttaccctggaaggttgtgttgaggagcaagtgacttaa

SEQ ID NO: 802 - DNA, 624 bp, Homo sapiens
  SIMILAR (127)..(186): 801254mologous to Human endogenous retrovirus Method: conceptual translation supplied by author; putative hybrid protein similar to HERV-H protease and HERV-E integrase,accession number U34991,Smith-Waterman Score=80.
atgagttggaagccatttcttgaagtgctcagggaagtgtcacaaggacagccccgagcttatgcagatgaggaaaatgaagttagaatacgtgtccaaatccacaggctgaagactgacactgctcgatcacctcggaagcctacgagaccatcacagatgctatgggtaactctcacagtggagggttcccacgccacccctaatcccactcgaagcagccctgagaaacatcgcccattatttctccataccacccccgaaaatttttaccgtcccaacgctttaccactatttcattttatttttcttattaatataagaagacaggaacgtcaggcctctgagcccaagctaagccatcatatcccctgtgacctgcacaaatggtattgtccagaccccaagacagacatgcctgctcaagggatgccaagcctgactttgaacagcattgacagccaatccctgccacaggcaggaaattctgtggaggagcagcttgtcagcagtttgaaaacccatggagacaccagaaatggaagattgcagtgtcctctggagagtgaaaagggaagcaccccattcctgatgtcagcaggaagccctgcagggccatcctga

SEQ ID NO: 803 - DNA, 1973 bp, Homo sapiens
  SIMILAR (1134)..(1108): 881254mologous to Homo sapiens calbindin D28K,accession number S46006,Smith-Waterman Score=40.
gtgtgagcaacgtggctgtttatttcacctgggtgcaggcaggctgagtccgaaaaagagagtcagcaaagggagatggggtggggccgttttataggattagggaaggtaatggaaaattacagtcaaagggggtttgttctctggtgtctggaatgagactggggcctaataaaaaggagcgtctatacaggagcttaaatgggatgtaccttgtagcattctgaggacaggcctgatttctgagaagggaaagtggtaaaagtattgtccagtcctttttaagctggtggctgagcttggtgaggtgtgtttttaaaagaccctttagtccgttctacttttctggatttgaaattggtgagatgtttcttgggctggttggtctgaggacctgaggtcgtaggtggatctttctcatggagcaaagagcaggaggacaggggattgatctcccaagggaggtccccccaatccgagtcatggtaccaaatttcatacgcgtccgtgtgaagagaccaccaaacaggctttgtgtgaggaacacggctgtttatttcacctgggtgcaggcgggctgagtccgaaaagagagtcagcgaagggaagataagggtggggccgttttataggatttgggtaggtaaaggaaaattacagtcaaagggggtttgttctctggcaggcaggagtggggggtcgcaaggtgctcagtgggggtgctttttgagccaggatgagccaggtaaaggactttcacaaggtaacctcatcacttaaagcaaggacccggccatttacacttcttttgtggtggaatgtcatcagttaaggtggggcagggcatattcacttcttttgtgaattcttcagttacttcaggccatctgggcatatacgtgcaagtcacaggggatgcgatggcttggcttggggctcagaggcctgacatttcctgccttcttatattaataagaaaaataaaacaaaatagtgttgaagtgttggggccgcgaaaatttttgggcggtggtatggagagagaatgggtgatgtttctcagggctgcttcaagcgggattaggggcagcgtgggaaccaatttcaaatccgagtcacggcaccaaatttcatgtgcgtctgtgtgaagagaccaccaaacaggctttgtgtgagcaataaagctgtttatttcacctgggtgcaggtgggctgagtccgaaaagagagtcagtgaagggagataggggtggggctgttttataggatttgggtaggtaatggaaaattacagtcaaagggggttgttctctggtgggcaggggtggggggtcacaaggtgctcagtgggggagcttctgagccaggagaaggaaattcgcagggttaatcactcagttaaggtggggcaggaacaaatcacaatagtggaatgtcatcagttaaggcggggcagggctttttcacttcttttgtggatcttcagttacttcaggccatctggatgtatacatgcaagtcacaggggatgcgatggcttggcttgggctcagaggcccttcttctctgaagcaggtcgtaaaacctaagaaagattttctgaccttcccctgaagcaggtcatagacacttatgtgagaggtaccctccttatatctggaggacagtagcatccttatctcatgcgccagccgaagcagggcgaggcattgcctcacttgggaagcgcaaggggtcagggagttccctttccgagtcaaagaaaggggtgacggacagcaccgggaaaatcgggtcactcccacccgaatattgcgcttttcggaccggcttaaaaaacggcgcaccacaagattatatcccgcacctggctcagagggtcctacgcccacgaagtctcgctgattgctagcacagcagtctgagatcaaactgcaaggcggcagcgaggctgggggaggggcgcccgccat

SEQ ID NO: 804 - DNA, 404 bp, Homo sapiens
  SIMILAR (308)..(282): 881254mologous to Homo sapiens calbindin D28K,accession number S46006,Smith-Waterman Score=40.
  misc_feature (1)...(404): n = a,t,c or g
tctagggggcttccgaggcaatcgggcagcatcggtcttcagccgctaagccgagtaaatctgggaaggagtcagtcagagagccttgggccagagttccaggggctctgggagtggctgccaggtgagttgaacagtggggtcccgatttaaaattggtgagatgttccttgggctggttggtctgaggaccagaggtcgtaagtagatctttctcacggagcaaagagcaggaggacaggggattgatctcccaagggaggtccccacccccccacgcccctgatccgagtcacggcaccaaatttcgggaccaaatttcactcacannnnnnnnnnnnnnnnnnnnnnnnnnnnnnnnnnnnnnnnnnnnnnnnnnnnnnnnnnnnnnnnnnnnnnnnnnn

SEQ ID NO: 805 - DNA, 410 bp, Homo sapiens
  SIMILAR (202)..(122): 661254mologous to Homo sapiens Human secreted protein, SEQ ID NO: 7134,accession number G03053,Smith-Waterman Score=83.
  misc_feature (1)...(410): n = a,t,c or g
tagttngaaaattacagtcaaagggggttgttctctggctggctggggtgggggtcacaaggtgctcagtgggggagcttttgagtcaggatgagccaggagaaggaatttcacaaggtaatgtcaccagttaaggcaggaactggccattttcacttcttttgtgattctttacttgcttcaggccatctggatgtatatatgcaggcttgggctcagagatctgacattcctgtcttcttatattgataagaaaaataaaataaaatagtgttgaagtgttggggcagcaataacttttggggggtggtatggagatataatgggcgatgtttctcagggctgcttcaagcgggattaggggaggcgtgggaacctagagtgggagagattaagctgaaggaagattt

SEQ ID NO: 806 - DNA, 1059 bp, Homo sapiens
  SIMILAR (328)..(459): 881254mologous to Homo sapiens calbindin D28K,accession number S46006,Smith-Waterman Score=211.
atgtggaaaggccccaaaggattagacatgtatggaaagagctcagtgagccctaagacatcagatatactggggagagacactctcctgctggccttgaaggtgcaaacagtggtgttgcaaactgcctgtggagagggccatgtggcaggaaactgtgggaggcctctagaaactgaaggcagtctccagctgacagctactaagaagctaagggactcagtcctgcaaccaaaaagtcctgaattctgccaacaatttacaagagcttggaataggacccaagttccagatgagactgaagccccagctggcacctatgcagcccaatcgggggacctcccttgggagatcaatcccctgtcctcctgttctttgctccatgagaaagatccacctacggcctcaggtcctcagaccgaccagcccaaggaacatctcaccaattttaaatcgggtttcagaggtgtcagaccacgcagggacgcctgccttggtccttcacccttagcggcaagtcccgcttttctggggaaggggcaagtaccccaaccccttctctctgtgtctctaccccttctccgcctttctggggggcaagaaacacccaaccccttctccttcaccctgagtggcaagtccgcttttctagaggagcaagtaccccaacctcgtatctctgtgccccagtcccttatttccacgccccgacctcttatctctgtggcccaatcccttatttctgcaccccaacctcttatatctctgtgccccaatcccttatttccatgccccgacctcttatctctgcaccccaaccccttatttccacgacccaacccctttcccgcttttctggaaggagcttgctacaagtgccagaaatctggccaccaggccaaggaatgcctgcagcccgggattcctcctaagctgcgtcccatctgtgcgggaccccactggaaatcggactgtccaactcacctggcagccactcccagagcccctggaactctggcccaaggctctctgactgcttcccagatcttcttggcttag

SEQ ID NO: 807 - DNA, 453 bp, Homo sapiens; identical to SEQ ID NO: 440
  SIMILAR (152)..(238): 601254mologous to Homo sapiens Human secreted protein, SEQ ID NO: 5576,accession number G01495,Smith-Waterman Score=70.
  misc_feature (1)...(453): n = a,t,c or g

SEQ ID NO: 808 - DNA, 408 bp, Homo sapiens
  SIMILAR (372)..(271): 581254mologous to Homo sapiens reverse transcriptase homolog= pol {retroviral element},accession number S61070,Smith-Waterman Score=96.
tggggggtgatatggagagagaatgggcgatgtttctcagggctgcttcgagcgggattaggggcggcgtgggaacctagagtgggagagattaaaattttagtttcctgacttgggacatgttgaataaagctaatttgccagtcctgggtgggggcaaatcctcgagcttgatgtgtaaggaagggagggggcctgaataatccctgaggaatagtagaacagcagatggaacactgagaaattatttccttgaggatagatttccacgatggaaaggaaatgagaggttctgagaggcaggctagtggcttgtactatagcatagcctgcctttgctggtgtgtggcgattaggcctggtggaaccaccatcaataaatcaagcgtgatcggggtgaggaacagg

SEQ ID NO: 809 - DNA, 357 bp, Homo sapiens; identical to SEQ ID NO: 443
  SIMILAR (148)..(279): 481254mologous to Human T-cell lymphotropic virus type 1 Gag,accession number S74562,Smith-Waterman Score=143.

SEQ ID NO: 810 - DNA, 909 bp, Homo sapiens
  SIMILAR (353)..(391): 761254mologous to Homo sapiens calbindin D28K,accession number S46006,Smith-Waterman Score=45.
atggcatcatctgctcagcttctggggagctctcaggaaacttacaatcatagcaaaaggcaaagagggggtgagatgtctcacatggctggagctaggaggaagagagagagaggagagatgctacacacttttaaacaaccagatctcatgaggtggtcttcagtatgtcggaagaacaaagagaaggttggaaattccaggaaaagaagaaatgttagatattgtttctccagaaagttcaatggcactagtaaagttttcgagagctggcaagtggtggtggtgggtgaaataaacagccatgttgctcacacaaagcctgttcggtggtctcttcacacagacgcgcatgaaatttggtgccgtgactcagatcggcggacctcccttgggagatcaatcccctgtcctcctgttctttgctccatgagaaagatccacctacaagctcaggtcctcagaccgaccagcccaaggaacatctcaccaattttaaatcggagaaaaaggagacacgttttatccgtggacccaaaactccggcaccggtcatggactagggaaggcagccttcccttggtgtttaacctttgcagggatgcctctctgattattcacccaggtttcagaggtgtcagaccacgcagggacacctgccttggtccttcacccttagcagcaagtcccacttttctgggggaaggggcaagagcttgctacaagtgccagaaatctggccaccaggccaaggaatgcctgcagcccaggattcctcctaagctgtgtcccatctgtgcgggaccccgctggaaatcggactgtccaactcacctggcagccactcccaaagcccctggaactctggcccaaggttctctgactccttcccagatcttcttggcttag

SEQ ID NO: 811 - DNA, 516 bp, Homo sapiens
  SIMILAR (453)..(169): 301254mologous to Mycoplasma hyorhinis VlpE prolipoprotein,accession number U35016,Smith-Waterman Score=100.
tcagtaggggagcttttgagccaagatgagccaggtagaaggaagttcacgagacgatgtcatcagtgaaggtaagaacaggcccttttcacgagaccttgtgctcggaaactcatcactaaacgcaggaaccggccatctaaatttgtacgtcgcacagtcacacaggcgactatcagtgcgcatagggttgggctcagaggcctcacaatcctggcttctgatattagtcggaagactcagatcccaccctggcagagtgttgggacggtgaaaatgtttgggggtggtatggagagataatgggcgatgtttctcagggctgctttgagcaggattaggggtggcatgggaacctgtggtttcttgggctttgggtgttgattggctggagaatggggaagctacatcaggaataagaggcttttgttctctttccgtggctgtactaggtatcaggaacttgtaaccatctggcggtcccgtaggattgcttatcttgcagaaaagttgcat

SEQ ID NO: 812 - DNA, 714 bp, Homo sapiens
  SIMILAR (136)..(249): 811254mologous to Homo sapiens Human secreted protein, SEQ ID NO: 5576,accession number G01495,Smith-Waterman Score=157.
atggggaaatggggtgaatgtcagctggatcagagagatacagtcatgaggatgaggtgtggtatccagaataatgtgggaggccggattgaagtccaggccaagaacaatggtaattgtgggactcaacaaagagcttccgaggcaattgggcggtgtcagtcttcagctgctaagccgagaagatctgggaaggagtcagagagctttgggccagagttccaggggctctgggagtggttgccagacctgttggttactgggatgacctgcacagtgttctctatggtcctcgattctgaatctgctgtggttgtgcagttcctagctcacctggtgcctgctgtgctcatttcctcctcggtccatgacttggctcttctggctgcatttggcttgcagccagcccgaagctccatctcagcctgcagctggactgagcatgccacaagtggcttccatgtcagacactggcgtctagacaaagggaacatggtggtgcccaaaaactcagagatgccagcaatcatggagacacaaagggtgttacagctcttgcttggggaatcccaagggcagcagggaaggatgcaggcaatacagagggtcaagaatgctaagtcgttagggggaacatgcagaaaggaggagccaatgatagccttaggccaaatcagtgaagcaccaccaatggggactgtgtgccgtatgtga

SEQ ID NO: 813 - DNA, 678 bp, Homo sapiens
  SIMILAR (103)..(216): 811254mologous to Homo sapiens Human secreted protein, SEQ ID NO: 5576,accession number G01495,Smith-Waterman Score=150.
atgggggctgtctgtgaagctttgcggcagtacagcccagaaggggacggacttaccctccactgtgagagttacccgaagctcggcatccgtgatggtctgggggcttccgaggcgatccggcagcgtcagtcttcagccgctaagctgagaagatctgggaaggagtcagagagccttgggccagagttccaggggctctgggagtggctgccagtcagagttactcttgctgctgctgctgctgctgctgctgctgctgctgctgctacggtggtggcggcggcggtggtggcggtggctgccgaggcctcatggttgtcagctccatgcctcctgaacttcactccactgaaatctggttggtggccttcaccatggttacatgggtctagagccaagcacatgcacgatcagagaacaaaccatgcatgggctcgctacaggaatagcattcattcattcattcacttactcactctccccatcacgtatcattccatgagcatcgactctgtgccagttgaaaaacaaattgggggctccattgcctatggaataaaccaaacaaagaagaaggaatgggcttatgtgcgaggtattgagtttcctgtaactaatttggaaactttaccagacacggtgaagaaacccttcaagggtcaggccacttgttga

SEQ ID NO: 814 - DNA, 675 bp, Homo sapiens
  SIMILAR (64)..(219): 731254mologous to Homo sapiens Human secreted protein, SEQ ID NO: 5576,accession number G01495,Smith-Waterman Score=180.
atgggggctgtctgtgaagccttgcggcagtacagcccgggtaatgtgctgagcctaatgggtgtcaggggggcttccgaggcgatcgggcagcgtcagtcttcagccgctaagccaagaagatctgggaaggagtcagagagccttgggccagagttccagggactctgggagtggctgccagactcaggagcccagctggcttcacccactggatcctgcatgggggctgcaggtggagctgcctgccagtcccacgccgtgtgcacgcactcctcagcccttggctggtcgatgggactgggcgccgtggagcagggggcggcgctcatgggggaggctcgggccgcacaggagcccatggagtgggtgggaggctcaggcatgacaggctgcaggtcccgagccgtgccccacgggaaggcagctaaggccgggcgagaaatcgagcacagcgccagtgggctggcactgctgggggacccagtacaccctctgcagccactggcccgggtgctaagccactcactgcccaggccggcagggccagccggttgctccgagtgtggggcccgccaagcccacgcctacccggaactccagctggcccgcaagcgcggcgcacagccctggttcctgctggcacctctccctccacacctccctgcaagctga

SEQ ID NO: 815 - DNA, 1046 bp, Homo sapiens
  SIMILAR (581)..(697): 791254mologous to Homo sapiens Human secreted protein, SEQ ID NO: 5576,accession number G01495,Smith-Waterman Score=151.
tcctgtttctgttggagaaagccatgctctatgggttgaatgtgacatacctggctcttttctgcattccctcatacaaagatgcatacttcacccaggttaatcaaatcaatgtaccttattctccgaaattaggaactttaaatagattgttcttatttatagttgccaaaaaagactatttttcagtgaactggcagtataatgtggacttgggaccttcagcagccatctttcccattatgtgcaaggtatttgagaagaaagcaaaaaaaataaaacgaaatagtggtaaagtgtcgggacagcgaaaattttgggggatggtatggagagataatgggcgatgcttctcagggctgcttcgagtgggattaggggcgtcgtgggaacctagagtgggagagattaagctgaaggaagattttgtggccggtctgctatcggactatatagaggtgggaaggccaaaccgaagaattatgtctgacagaagggaagaaatgaccgcggtgaccttctcagaccctgtgggaaagacctctacctatccagtgaaagtgtctacccagactaagagggggcttccgaggcgattgggcaggatcagtcttcagccactaagccgagaagatctgggaaggagtcagagagccttgggccacagttccaggggctctgagagtggctgccagataaaacgcgtctccgttctctaccagaaaaggaaaggaactgaaattaagagaagggagagattgaagggtgacgccaagattgaaaggagaaagtggttgagggatagtgagagaggccaacagtctttcagtgaatatcacaaaaggaatgcacaggtgattaaacaccaagtttcacacacatatgatcctgagctcttctggctccaggtccccttggccctgagtgactgtcttcccactctgaggccccaggaatctcagcacatattacacattcctccagcaaaatcagtccactggcagaaatgcattgctgataatcttgagtctaagattgttagttaa

SEQ ID NO: 816 - DNA, 970 bp, Homo sapiens
  SIMILAR (970)..(860): 831254mologous to Homo sapiens Human secreted protein, SEQ ID NO: 5576,accession number G01495,Smith-Waterman Score=154.
atggaggagaaggaggagaggaaaaggagaaggaagaggaagaggaggagggaagagggaagagatggggaaagaaaaagaatggagaagcaaaaggagaaccaggatcctaaagatccacctacgacctcaggtcctcagaccgaccagcccaagaaacatctcaccaatttcaaatccgagacaaaggagacacgttttatccgtggacccaaaactccggcgccagtcacggactgggaaggcagccttcccttggtgtttaatcattccagggacacctctctgattattcacccaggcttcagaggtgtcagaccacgcagggacgcctgccttggtccttcacccttagcggcaagtcccacttttctggggaaggggccagctgctcctcgccagaccgagctaggtcccaattcttcctcagcctccgctcctccaccctataatccttttatcgcctcccctcctcacacctggtccggcttacagtttccttccatgactagccctccccctcctgcccagcaatttactcttaaaaaggtggctggagctaaaggcatagtcaaggatttaattaacctcaccttcaaggtgtacaataatagaaaaaagttgcagttccttgcctccactgtgagacaaaccccagccacatctccagcacacaagaacttccaaacgcctgaactgcagcagccaggtgttcctccagaacctcctccccgaggagcttgctacaagttccagaaatctggccaccgggccaaggaatgcctgcagcccaggattcctcctaagccacatcccatctgtgtgggaccccactggaaatcggactgtccaactcacctggcagccactcccagagcccctggaactctggcccaaggctctctgactccttcccagatcttcttggcttagcagctgaagagtgacactgcccgatcgcctcggaagc

SEQ ID NO: 817 - DNA, 363 bp, Homo sapiens
  SIMILAR (40)..(150): 781254mologous to Homo sapiens Human secreted protein, SEQ ID NO: 5576,accession number G01495,Smith-Waterman Score=142.
atgggggctgtctgtgaagcttgcagcagtacagcccaggcttctgaggcaatccggcagtatcagtcttcagctgctaagctgagaagatctgggaaggagtcagagagccttgggccagagttccaggggctctggaagtggctgccagggtccagtgaagaaaaagatatccagttatcgggtggtaaagagcagaggagagttctggactttcctgaggatgagaacagctgcatggctgaaatgcagcagcccagagcaaagagggtgctccctggggggtcacagctggtgaagactgaaaatccagatcctaaaattcaaccagacctatcataccagcaggccaccacgaaatga

SEQ ID NO: 818 - DNA, 1655 bp, Homo sapiens
  SIMILAR (162)..(275): 811254mologous to Homo sapiens Human secreted protein, SEQ ID NO: 5576,accession number G01495,Smith-Waterman Score=151.
cttctgaaggtgaagcaaaaggcagcattaccttgaccgtctgtactgcgctttatctcaaacttactttattccacaaaactggtgtctttggtcccctgcgatttccagtagttaataccctcaatccatcaccctttcatgatgggaccagagagctgggggcttccgaggcgattgggcagtgtcagtcttcagccgctaagctgagaagatctgggaaggagtcagagagccttgggccagagttccaggggctctggaagtggctaccaggatctagccagtgctttgcacgtgagagcttggaggagaagctgagcctgtgcttccgcccctcggatccgggcgccgagcccccgaggacggccgtgcggcccatcacggagcgcagcctcctgcagggggacgaatattgctgtgctttaggtcaaggggtccccaacccctggtccacagaccggtactggaactgggccacactacaggagataggaccatctagttgcaggaaaacaagctcagggctcccattgattctacgttatggccatgtcagagaccttcatggcagctcctcccatcacaggcctggaggcccaaaaaggaacaagtggtttcgtgagctgggcctagggtctgcctgctgtatgcggcctagggacttggtgccctgtgtaccagctgctccagctgtggctgaaaggggcgagagtacagctcaggctgtggcttcagagggtgcaagccccaagccttggcagcttccaggaggtgttgggcccgtgggtgctcagaaatcaagaattgaggtttgggaacctttgcctatatttcgcaggatgtatggaaaagcctgtatgtccaggcagaagtttgctgcaggggcagggttttcctggtatgttcctgtggcagttgttggagcaaaagttcacgatgtgaacctccatatgctgtcctttccatccaagtggaagctgcacacatgcatgaaatttggtgccgtgactcagatcgtgacctcccttgggaggtcctcctgttctttgctccttgagaaagatccacctatggtcctcagaccgaccagcccaagaaacatctcaccaatttcaaatctgacaaaggagacacgttttatccgtggacccaaaactccggcgccggtcacggactgggaaggcagccttcccttggtgtttaatcattgcagggacgcctctctgattattcacccaggttttagaggtgtcagaccacgcagggacgcctgccttagtccttcacccttagcgaatttaattaacctcaccttcaaggtgtacaataatagaaaaaagttgcaattccttgccttcactgtgagacaaacctcagccatgtctccagcacacaagaacttccaaacgcctgaacctcagcggccaggcattcctccagaacctcctcccccaggagcttgctacaagtgccagaaatccggccaccaggccaaggaatgcctgcagcccaggattcctcctaagccacgtcccatctgtgcgggaccccactggaaattggactgtccaactcacctggcatccactcccagagcccctggaactctggcccaaggctctctgactgcttcccagatcttcttggcttag

SEQ ID NO: 819 - DNA, 537 bp, Homo sapiens
  SIMILAR (104)..(226): 701254mologous to Homo sapiens Human secreted protein, SEQ ID NO: 5210,accession number G01129,Smith-Waterman Score=155.
atggacacatatagaggaacaacagacactggggcctacctgaagacacgcatgaaatttggtgccgtgactcagatcgggggacctcccttgggagatcaacccctgtcctcctgttctttgctccgtgaaaaagatccacctacaacctcaggtcctcagacccaccagcccaaggaacatctcaccaattttaaatccggagcttgctacaagtgccagaaatctggccaccaggccaaggaatgcctgcagcccaggattcctcctaagccgcgtcccatctgtgcgggaccccactggaaatcggacttttcaactcacctggcagccacttccacagcccctggaactctggcacaaggctctctgattgactccttcccagatcttcttggcttagcggctgaagactgatgctgccggatcgcctcggaagcctgggctgtactgcctcaaggcttcacagacagccgccattacttcagtcaagcccaaatttcttcctcatctgttacctatcttggcgtaattctc

SEQ ID NO: 820 - DNA, 1711 bp, Homo sapiens
  SIMILAR (1438)..(1692): 741254mologous to Homo sapiens neutral protease large subunit,accession number M27826,Smith-Waterman Score=294.
tgctctgagtatgaggactcctccccagctccagtaccagccacagatctcagctcaacactctcgagctctgtaccacaaccccaggatacagggaccagccagcagcttcatcccctggacccttggcatgagctgcttcgtgcccaggagctccaaggtgccaccaaccacaagggctacagccatgcagagcatgagcatgcaggcctaggtgtccagggtgggaatggggctctggctttttcgaacagtgggcacaggcatgctgttcccaccatcagctcaggcactggcaggaggaggactccaagttcttcggcttttggactcttgaacttacaccagtggtttgtcagtggctttcaagccttcagcgacagactgaaggctgcattgtcagcttccctacttttgaggtttggggactcagactggcttcctagctcttcagcttgcaaatgtcttatgctgggacttcactttgtgattgtaggtaacatctgtgctacactcaaggagaaatactcctcaatgctccatttagatgtgaccatgaagaaaaatggggagaaaagaacaaggctccaaaaaagaaagaagggaatgcctccacatccggcttatgaggacctaaacatagctgccatcactctccctgccaatgttgtccttcatcagccaagtggcttcagaacttcagggcagctggaccccgtttggtggtctcttgacacggacgcgcatgaaatttggtgccaagacccgggacttggatcaggggacttcccttgggagatcactcccctgtcctcctactctttgctccatgagaaagatccacctacgacctcaggtcctcagaccgaccagcccaagaaacatctcaccaatttcaaatccaagacaaaggagacaggttttatccatggacccaaaactccggcaccggtcacggactgggaaggcagccttcccttggtgtttaatcattgcagggacacctctctgattattcacccatgtttcaagggtgtcagaccacgcagggatgcctgccttggtccttcacccttagcggcaagtcccgcttttctggagaaggggcaagatttaattaacctcgccttcaaggtgtacaataatagaaaaaagttgcaattccttgcctccactgtgagacaaaccgcagccacatctccagcacacaagaacttccaaatgcctgaaccgcagcggccaggcgttcctccagaacctcctcccacaggagcttgctacatgtgccggaaatctggccactgggccaaggaatgcccgcagcccgggattcctcctaagccgcgtcccatctgtgtaggaccccaccgaaaatcggactgttcaacttacctggcagccactcccagagcccctggaactctggcccaaggctctctgactgactccttcacagatcttctcggcttagcggctgaagactgatgctgcccgatcgcctcggaagccctatagaccatcacggatgctgagctttaggtaactctcacagtggaaggtaagcccgtccccttcttaatcaatatggaggctacccactccacattaccttcttttcaagggcctgtttcccttgcctctgtaactgttgtgggtattgatagccaggcttctaaacctcttaaaactccccaacgaattccaccacact

SEQ ID NO: 821 - DNA, 411 bp, Homo sapiens; identical to SEQ ID NO: 447
  SIMILAR (109)..(222): 861254mologous to Homo sapiens Human secreted protein, SEQ ID NO: 5576,accession number G01495,Smith-Waterman Score=172.

SEQ ID NO: 822 - DNA, 879 bp, Homo sapiens
  SIMILAR (688)..(356): 341254mologous to Bovine leukemia virus gag polyprotein,accession number M10987,Smith-Waterman Score=144.
gggcccaggacaaggccatctttgtttccgtgttgttcctccctgaggcctctgcaaggaaagccaagtccgaagtcaaaagacgccacttttcttccactctctctctgcagaagccttcatcctctcattcactcaacaggtatttatggagctccagggtaccaggctgtgggccaggggcttccactgtgagagttacctaaagctcggcatccgtgatggtcttgtagggggcttccgaggcgatcgggcagcatcagccttcagccgctaagccgagaagatctgggaaggagtcagtcagagagccttgggccagagttccaggggctctgggagtggctgccaggtgagttggacagtccgatttccagtggggtcccgcacagatgggacgcagcttaggaggaatcccgggctgcaggcattccttggcctggtggccagatttctggcacttgtagcaagctccttccagaaaagcgggaaaggggttgggtcgtggaaataaggggttggggtgcagagataagaggtcggggcatggaaataagggattggggcacagagatataagaggttggggtgcagaaataagggattgggccacagagataagaggtcggggcgtggaaataagggactggggcacagagatacgaggttggggtacttgctcctctagaaaagcggacttgccactcagggtgaaggagaaggggttgggtgtttcttgccccccagaaaggcggagaaggggtagagacacagagagaaggggttggggtacttgccccttccccagaaaagcgggacttgccgctaagggtgaaggaccaaggcaggcgtccctgcgtggtctgacacctctgaaac

SEQ ID NO: 823 - DNA, 1039 bp, Homo sapiens
  SIMILAR (581)..(357): 881254mologous to HERV-H/env62 envelope protein,accession number AJ289709,Smith-Waterman Score=338.
tacattgaatcagttagggtggggccaggaaaacaaatccacaatggtggaatgtccatcaagttaaaggctgtttttaccttccttttgtggatcttcaagttacttccaggcccatctggatgtacacgtgcaaagtcacaggggatgcgatggccctggccctgggctcagaggcctgacattcctgtcatcttatattaataagaaaaataaaacaaaatagtgttgaagtgttggggcagcaaaaattttgggggggcgggtggtatggagacataatggacgatgtttctcagggctgctttgaacgggattaggggcggcgtgggaacctagagtgggagaggttaagttgaaggaagattttgtggtaaggggtgatattgtggggttgttagaagaaacatttgtcatatagaatgattggtgatggcctggatacagttttgtatgaattgagaaactaaacagaagttagaaggtctgaataaaagaaggagaaaaccaggtattaaaggactaacaattgggaggacccaggacatccaattagagagtgcccaaggaggttcagcatagccctgccagtaaagattatttatttactttaagagggagttaagagtggtgggcggtttggggatagcaccaggagatatcagctgtgatggcttggagaaacagtgtaaaccggcaggggaaacaagagcaggggcttccgaggcgatcgggcagtgtcagtcttcagctgctaagccgagaagatctgggaaggagtcagtcagagagccttgggccagagttccaggggctctggaagtggctgccagatgaatcctctgtctggccggccccaggttgtctgcttctttactgcacacatgttgacaaagaaaagggaagaaggagcctccatgttgaacatgccttgcttccagtgaaaggaagagatgatccaagcaaatttaggaccaatagcagactcttcacactgcctggggatagagggaccaccctgggctcctcttactcctgg

SEQ ID NO: 824 - DNA, 394 bp, Homo sapiens
  SIMILAR (211)..(393): 1001254mologous to Homo sapiens dJ852M4.2 (Novel protein similar to Drosophila CG17883),accession number AL121747,Smith- Waterman Score=312.
atggcaggaaagctacaaggccgtgagagctcaggccacccatttccctttgtgcgcctcagtctcgtcatctattcccagagattcatggggatagttaccaccttttttgctgaagagggaatgagacacagtgagaaagacacccatcatggtggaattctccagtatgaaccagccagggttgtaggcgttggggcagcagggtactttaacgccaaaaggaaaaagaaagtggcagagatacaccaggctctgaacagtgatcccactgatgtggctgcccttagacgcatggctatcagtgaaggagggctcctgactgatgagatcagacgaaaagtgtggcccaagctcctcaatgtcaatgccaatgacccacctcctatatcag

SEQ ID NO: 825 - DNA, 6092 bp, Homo sapiens
  SIMILAR (6092)..(6069): 1001254mologous to Homo sapiens Polypeptide identified by the signal sequence trap method,accession number Y02377,Smith-Waterman Score=44.
gggtgatgtgttttaggattgagaacacagactttgggaatcactgctaatttgttacttaaagcatgttacagctgttttgttctcagttttaaccaagcccagtggacatacggtagtaataagtaagtcttgttgtgtttcagcatttaataatagactttggaggtagacccctggtttaaatctaagtctagtttgaggaagtcacttaacctttattgaaaagactctggatttaataagctgtgtaactggcactcgatagttacccaaagttcagtctagatggcacaaaccacctctcagggaataaaccctaagacatcactcaaggaggacttcaattatttaattttgaactgttttgtcctctctggccataaaacttgacagtcatgaaaggtaaggcaaattttaagtgggttaagtttttaaatacgtatctactcattttctttaaaaaaaaaaaaaaatacctgggggaaaaggatattaaaacctgggtattttaaactcagccttaaccagataaacctgctccagcatttgtccagtgttgaaataaataggaagaaaaatacaatttccttaaacatgccagcttagtagtaggaatgacctatcaatcaatcaatcaaatcaatcattcagcaagaagttagttggtggttccccatggccccaaggtctgcagggctggattgtccacttttcctcctcaccaccagcacttgcctgctgctactgaggaagggcacagtgggactcatgtgtgtgtcatgactttaatggttagctacagtatgcatacacatacaagaagtaggggagctgaagcccaggaaaaggctacaaaatacaacacagggaccaatacatttgcaaaacattcaaaatccttataaaaggggctgtattggtcctttcaactttgtcattattcagcttagcctgtatggccattcattcagtggggtaatgggggagaacaattaattaatgagatttggttccctttcctatattcccactgtttttaaagtttaaggagaggattgggggggtgagggtagggggtggggcttttaggcctggtctggttttcccctttatataaaggagctgacccccatctcaggcggctgaggtgtataatccccaaaagaaataagatggtacaaatgcagtcagctttggaatacgtttgggtagagacaaaatggaaactcatgggattcccaatagtggagcccttcccatgttcctgggacatatccaattctagcacatccacatttttaataacttaggtgattttcaaggtcccctgtccacattaaaaaaataagttaccataatattcaaactgggctttttggctattcttttggggacaccaggggattgtcagaaggacatgggagctatgccctcagacaagtgcatgggaatcagctgcctcttcattacaaggtaccagtttatgtacttgccttggacacagcttgcacaaagccaagaagttccagacaaaggttttctctttcatgtatttacacaagttcaaaatgatattcacagcatcttctaaattttggccaagagtcaaaaaaatggcatttaaaccttgggaacgtgcccacattaggccaggagggctgatccccaccagttagttgggccagattacccacaaaaccaaagggcctggggaaagttcaggaaggagctgaaaggattctccagtcagttttatgaactcggtgcaagtgagacctccaagactgaacacgtacaacagagatgcaagtttccgtcctaactgggcacctgtccccttcccattacttgctggggcctgcctcctgtcccccatgccagcaactgtgccgacccgactggaaataacttttccgatttctgggggggcacagtgtaacaaatttcatgggttccagaaacttaaaacggctgggtttttaatcagctccaatgaagggtaaataaagaagacccccaagggatgtgggcctatttaacaatcaaccggttcccaagagaaactcctgtgatctgttccttggaatggccttcccgaattggccctcctgccaaaaaggtaacagcatgggtgcaactggaagtagtgagtgtggctatttggggtacccggagctgatttgcaaattgccattcaaaaaaggagatagcgacccctcagtgtccaagtccacagcccaaattctggaagatatccatgtgtgcctgaagtgagtgaatggtgcctcattgaaaggtgtgcctgccccttgttgtggatgtgccgcaatggccttgagtccccgacattagaccacccagtgcattgatgagcttggaggttgtaaccgaatcccccggttccatggaatacctgtaagggttcgccgcagatcagacaggaaagtgaactggtgaaccgagttttaagataggaatccaaatcctttttgaactgaaggtggcattactcccagtgaaattggtgagaatccggggagcaatgttaatttcactcaacatgtccacctttagattaggagtgaatgggtcggggagcctcatgtttcttggaaaggacactcaggatcaaatttcttaactggatacaattaggtgggatcacatcacagaacccataatggtaatcacaaaaggaactctgggaaatcatgcaaaagaaccagcaggcacttcttaaagtgccccttgtagaggatttgcataggttttggtgagttccacatttctaaggaaaggcgcttaaataatttggaattaaatcaatcaggtagctgtgcataccataggccacccaccttctgcttgtggcggtatgtgcccagcattcttgcaataaatatccggatgggaaatcagttcaagccaggcatatacaaagccagggagctttggtagggcctcaagatgtggaagtgtattgcagaaagctgtaagtgtctggaaattaatggtttccaacacatgctcaggtgcattcacttccaagagaagcataataaaaattcgatggtagggaagttgctgaaattcactctgacgaacatcatgatcctgaaggagaactcccactactataccaaggaccttgttcagcagattaatctttgtgacagtgttggtggcctcccctgagtgtttcacgagcagtgcaatgagtcgaacaaaggcatccaggttgtgatagcacttggctcggatcatggtgggattggcagcaggattgtgctgctgctcagcctgagcacggtaactgatttcaacacacatttcagtacacagacgaaagaaccttgttatgagatcatcggtcttcagtattccttgctggtgcatctgtccaacaaatgcagagaaagctttggtactgtcgcggccagctgctgctgaatggtagagattcacccattccctcagaagatactctgccttctccctcaggcctggagggtcatcatactctgaggcttgagagatcccagaatgcatcataaagtttgggcctccatgagcacgatcaaatcattgcttcatagttggatccgcactacttccaatcaagctggggcaatccttctggagcattgcctctggaatgagcattaatcctcatgagggtttcaatggtgtggaacagatctgcctcagtaacatgagcaacactcctttcatccaccagcaggatttttactaactgcatagcaaatgccacagccatgtagtttaagccattctccattgactgcgctaggtgaagatcatactgctgcatattaaccaaatgattgcgaattagcagctccacagcctccacattatatttatattcatctcgacattcaattaggcaccttgtgatctgtttgttgcaccatggagacccatatgcccggccatcctgcagagcttttaggaccaagaggtggcattccctgtagcgcagcagaaggtcagcatcagcaccacttgtggcatctagtaagccctctacagccttttggagcaatccaagagcagctatggcatcccgagagtttcgagataaaactacaacctccaagagacttcgaagagcctgagcttgagggttcatggccaaagttggtgggatggcatgtagatgttgctccagttctgtaatacacttatcataaatctgagctacatcatctgttgcccaagcttgcttcatgggctgggctaaaaatcccgtgggctgacttaagtcatttgtaggtaagaagccaggaacattgcgtgcaaactcttcgtaaacagccaactgctttgggtccacaccaccaactttcagcctgatttgctctggcatccgttcagcttgatatgttaaaacaacaggatcacagtatctgcgtccttcttgcctagcatgttttctcagctcaaattcagttgctaatctcttgtccatctcagggcctgctttttctactgcagtcttctgaataaaacagcaagccaactcacaattgtcctgagctaattgagcagctgcctgatccatcatttctctttgttgtggggaagcagtacgaagggctgagggcaaaactgtttttttaaagttggtagatatgctcatgagcaaaggttccctggcatgtaatcatagccattccaagctgtcaagttacgcatcatgtgataagcttgctattcgcattcgagattcctccgaatccagggcaaaatccttcctgactatttgctcacaagtagtcatggcaatcttaattgatcgatccaccacaggatggaccagctcctggacagcccgttcaattgcctgacgcacacactgcttcaactgtggatgggcctgaaacaagggaattgttggatttagagtaatgtgtggtgccaagcccgcaagggaatagacattgatgtcgtggtagctgtactgtggctgtggtggaaccgtggctgtacaagtggtgttggtagctggtgtagtagaagttgttgtggttgtgatgggagggagttcttctggctgcttgacatctttctttggagcagagagttgctcatctaaattcttcaggcgatctttatcctttaggaggtttccaggttttagctcattgatgtctaatgcaaggttcttgcagagaacctcgatttcaaacttcaagtttaactttaagtcatgctcctgatgtagctcagctaatacattcataattgccattgtccaagggtttggtggcctaaaaaccacactacgaatgctagattctaagactttggcaacaaagggcactacatagagcaattcttgttgtcctttaacataagcctctagcagcaatgatttcacatccaagtcagtgtgtaagatgggtttgtttttagctaatgtgatcattcctagccaatgtcccaagttcttcagcaaagaacgatctgagaaattggctgcagctttatcagaggtcaggagcactttaatgtttctgtaggtctcattcagaaccatcttgttaaattcaggattcttcagcgtgtcaaggaagtttgaatacaggctatgaaagtttggctcaatactgactctcttcataaccagatactgtgaaacccaaggcataaattcttctttcaccgtttcctttagctcttcaaccttttgtgtcatatttgactgtgagagattattgaaaataaaagcaattttctcctggatattttctgggggctccacaattctctcagtttgatctgtggccacaagcaacgtatctatatttgtagtattaatagaaggtggcacatctttcttaaagctgactccagttggcctggtgaccgtaaccgttttagcaacagtggtagttgttgaggtggttaccatagtgctaacttgaccagcaagaggagcttttgctggaacctgggcctgagcctgggcctgagccagtgcaatacttccaggggttgtgatagagccttgcattttcacaggaggatctctagactgcttgtccatactcaatatactcctg

SEQ ID NO: 826 - DNA, 333 bp, Homo sapiens
  SIMILAR (185)..(283): 391254mologous to Homo sapiens Human secreted protein encoded by gene 73 clone HCUFZ62,accession number Y02722,Smith-Waterman Score=63.
atggctttgagcatccctcttcttggcatgtttctgagttgcctctccctcctggcacaggcttgggctcagcaggacccatttgatgtcaatgaaggaagaggcattccagaagccttcctggcatttttagatcccctgcagctgcctggggatccaggttactacttcttctcccttatacaggccagggagctggagagcagagaggcagagctaagacgccgtgacaccttctacaaggagcagctggagcgtattgagaggaagtttagaactgacagtaaaaacctgtttcggggaaagttggataagctgctgcatcatccttga

SEQ ID NO: 827 - DNA, 831 bp, Homo sapiens
  SIMILAR (374)..(174): 351254mologous to Drosophila melanogaster CG3557 gene product,accession number AE003583,Smith-Waterman Score=84.
atggagagtcaaggagatgacttctaccttgccaaaggccttgggaagaaagacagcatcaaggtctcacacaacactccagggaggcagctgctgcccagtgctgtggacagcaaagcttcagtgcaggaaattaagattccccctgcctccccctcccccatcctcatcagcttggccatggcagggctgggggatcagagggggttgccagttgctgcgagacaaatatccctagcacattacctagttggcaaaggaatgcaactgggaggttctggaatagcacagtgtggaactgcactggacttttcctgttctgaagaggactttgctttcctccgggatgtaaagcatttggcaggcaaaggacaaaacttacctcagactccgaaatcacaggcttctggtctaaagattcaagctgagaaacaagaaagcaatttgtttgattcaggcccttgcaaattaccccccaataatttacttggtctcagctttggctggcttggatgttatgaggattccaagaatttttttacttttccattagagggctctgcactctcctttcaaggaaaaaggctctatgtgccagcccacttctttccagaaatggggaaagggaggaggagaacctgtggaaaagaggacaacggatttccggaagaaattccaagccaggggctaaccgtggacctgagcacagcagagccacacggacgtctcagaaaacggttctgtggaagcacaagacacgtggcagtgagagtcctgagaagtccaggaaaagatgcagcttccaacccattcctaaatatcaccaattaa

SEQ ID NO: 828 - DNA, 2514 bp, Homo sapiens
  SIMILAR (1771)..(2061): 971254mologous to Homo sapiens TGF-beta receptor interacting protein 1,accession number U36764,Smith-Waterman Score=505.
atggagccagaactgctggttcggaaggtgtctgcattgcaggccctggggcggggctttttggtccgacgccagttccagagcgtgcgagctgagtatgaggcgattgtacgaaaggtcgagggcgacctgggcacgcttcagtggaccgagggccgcattcccaggccgcgattcctcccagagaaggcaaaatcccatcagacctggaaagcaggagacagggtagcaaatccagagcaggggctgtggaaccacttcccatgtgaagagtctgagggagaggccacctgggaggagatggtgctgaagaagtcaggagagagctcagcaaatcaaggaagcctctgcagagatcacagctcctggcttcagatgaagcagaacaggaaacccagccaagagaagaccagagacacgacaaggatggagaatccagacagaggcttcgttccagggaaggaatgctcctttgagcagctggagcacgttcgggagatgcaggagaagctagcccggctgcacttcagcctggatgtgtgtggggaggaggaggacgatgaagaggaagaggatggggtcactgaggggctgccagaggagcagaagaagacaatggctgaccgtaacctggaccagctgcttagcaatgtgggttcatgtctgggtgctttggttcctgggggcatgaggggtggagaaggtgagggaactaaacctgtgcaagatgggagaccggggtgggaggaaggactggtccaaagcgccacgatccttgacgggcacagccagaagctgcacctggccgagaacgccgagcctgaggagcagtccgctgcgtggcctcaaacactaagcagaacagttccaagccaggacccacctgtcgatgccaagaagccgatcctactgcagggccatgagcggtccattacgcagattaagtataaccgcgaaggagacctcctctttactgtggccaaggacccttctgggcccctggttattgaaaaagttcggaattactctttacccttgtggagtgttctgagtgttggaagtacccaggaagaagccctgagcaggtgccctcaggagcagtgcccatggctccccacatcagccaagaggcccaaccccaggaagccactcctgcccggggatggggaaggcctgatgcccagccagcgcccaatggatgacaaaaagaagaaacggagtcccaagccctgcctggcccagccagcccaggccccaggcacactacggagggtccctgtgcctaccagccacagcggctccttggccctaggacttcctcatctgccatcccccaagcagcgggccaagttcaagagggcgtcccctgcaggagagcttcatgcgcctggtggaggcctgtggggactcggagcaaagcatggacaactggctgagtcggctggacggctgccgctgactgtaacatgtaaagcaggcactgagcaccacttgcctggcagtccagggcatggagagctttttgactccacaactcttgaacatcagaagactttccggacagaacgtcctgtcaactcagctgccctctcccccaactatgaccatgtggtcctgggcggtggtcaggaagccatggatgtaaccacaacctccaccaggattggcaagtttgaggccaggcgcaaggcattacaggatgcagtcaatgccctctgtgccacctcaccaccaggaagtcagaggtgtccaccaccaataacaaggaatggaaagcagctggcccttctcaagaccaattcggctgtccggacctgcggttttgactttgggggcaacatcatcatgttctccacggacaagcagatgggctaccagtgctttgtgagcttttttgacctgcgggatccgagccagattgacaacaatgagccctacatgaagatcccttgcaatgactctaaaatcaccagtgctgtttggggacccctgggggagtgcatcatcgctggccatgagagtggagagctcaaccagtatagtgccaaggcagtgggtgaagaggacgaggaggatgaggagggggagagcctggactctgtgaaggcactgacagccaagctgcagctgcagactcggcggccctcatatctggagtggacagcccaggtccagagccaggcctggcgcagggcccaagccaaacctggaccagggggacctggggacatctgtggtttcgactcaatggactccgcccttgagtggctccgacgggagctgcgggagatgcaggcgcaggacaggcagctggcagggcagctgctgcggctgcgggcccagctgcaccgactgaagatggaccaagcctgtcacctgcaccaggagctgctggatgaggccgagctggagctggagctggagcccggggccggcctagccctggccccgctgctgcggcacctgggcctcacgcgcatgaacatcagcgcccggcgcttcaccctctgctga

SEQ ID NO: 829 - DNA, 463 bp, Homo sapiens
  SIMILAR (218)..(325): 331254mologous to Homo sapiens myotubularin related protein 3,accession number U58034,Smith-Waterman Score=51.
ggtggaattcggagagcactgagcacaggggctgccacagtggccggctcagacatggcagagatcagcagagaatgggcaatcaggctcccctgagatgagcagcagcgcagaggaggtgcccctctcttactacaccaacttcagagggcgtcccctgcaggagagcttcatgcgcctggtggaggcctgtggggactcggagcaaagcatggacaactggctgagtcggctggacggctgccgctgactgtaacatgtaaagcaggcactgagcaccacctgcctggcagtccagggcatggagaggcacagacagcaccctgcttgtgacttcactggcccaactcatcctggaccccttgagcaagaccatggctggattccaggaactggtggagtggaagtggatccaggaaaatgccgtgtgaagggaggactcaaatgcactcccttgggtctg

SEQ ID NO: 830 - DNA, 5284 bp, Homo sapiens
  SIMILAR (502)..(2004): 561254mologous to Homo sapiens Human low density lipoprotein binding protein LBP-3,accession number W49042,Smith-Waterman Score= 1263.
atgcgcatgcgcgggcgtgcctcgcggcttgagggcgcgcggggcgtgggtggctgcgcgcgcggggggcgcacgtggggcctgaggggcgggggcggtgccgggagtcccgccacgtcagtctccggccctgagccaatcccgcgcccggcctgccgcgagggggccggttgtgccgggaagtggctccagggagaagaggcctcttccctcacccgctgtgggagctgcgccccgaaagcctgccccggcacgtcgggctctcctgacccgccaagaccagagagccgttggcgccctccgcccgggcctgccggtccgtttattttaagaagctttgtgcgcctgctgtggggatttctgatccaggctgcgaagaatttcgaagtctggaaaatagcaactgtgtttgtttctaaaggatcttctcctgacccagcatcgctcatcacaatgaagaaccaagacaaaaagaacggggctgccaaacaatccaatccaaaaagcagcccaggacaaccggaagcaggacccgagggagcccaggagcggcccagccaggcggctcctgcagtagaagcagaaggtcccggcagcagccaggctcctcggaagccggagggggctcaagccagaacggctcagtctggggcccttcgtgatgtctctgaggagctgagccgccaactggaagacatactgagcacatactgtgtggacaataaccaggggggccccggcgaggatggggcacagggtgagccggctgaacccgaagatgcagagaagtcccggacctatgtggcaaggaatggggagcctgaaccaactccagtagtcaatggagagaaggaaccctccaagggggatccaaacacagaagagatccggcagagtgacgaggtcggagaccgagaccatcgaaggccacaggagaagaaaaaagccaagggtttgggtgagcagagggcggctctttgtgaagctgggaaggagatcacgttgctgatgcagacattgaatactctgagtaccccagaggagaagctggctgctctgtgcaagaagtatgctgaactgctggaggagcaccggaattcacagaagcagatgaagctcctacagaaaaagcagagccagctggtgcaagagaaggaccacctgcgcggtgagcacagcaaggccgtcctggcccgcagcaagcttgagagcctatgccgtgagctgcagcggcacaaccgctccctcaagctgggggacccttgtgaggtagcagtggatgatggctctcgggctgacttctttgcccaggaagaaggtgtgcagcgggcccgggaggaggaggagaagcgcaaggaggtgacctcgcacttccaggtgacactgaatgacattcagctgcagatggaacagcacaatgagcgcaactccaagctgcgccaagagaacatggagctggctgagaggctcaagaagctgattgagcagtatgagctgcgcgaggagcatatcgacaaagtcttcaaacacaaggacctacaacagcagctggtggatgccaagctccagcaggcccaggagatgctaaaggaggcagaagagcggcaccagcgggagaaggattttctcctgaaagaggcagtagagtcccagaggatgtgtgagctgatgaagcagcaagagacccacctgaagcaacagcttgccctatacacagagaagtttgaggagttccagaacacactttccaaaagcagcgaggtattcaccacattcaagcaggagatggaaaagatgactaagaagatcaagaagctggagaaagaaaccaccatgtaccggtcccggtgggagagcagcaacaaggccctgcttgagatggctgaggagaaaacagtccgggataaagaactggagggcctgcaggtaaaaatccaacggctggagaagctgtgccgggcactgcagacagagcgcaatgacctgaacaagaggtctgggcccctggttattgaaaaagttcggaattactctttacccttgtggagtgttctgagtgttggaagtacccaggaagaagccctgagcaggtgccctcaggagcagtgcccatggctccccacatcagccaagaggcccaaccccaggaagccactcctgcccggggatggggaaggcctgaggcccagccagcgcccaatggatgacaaaaagaagaaacggagtcccaagccctgcctggcccagccagcccaggccccaggcacactacggagggtccctgtgcctaccagccacagcggctccttggccctaggacttcctcatctgccatcccccaagcagcgggccaagttcaagagagtaggcaaagagaagtgccgcccagtcctggctggaggtggaagcggctctgcaggcacgcccctgcagcactccttcctgaccgaggtgactgatgtctatgagatggaggggggactcctgaacctgctcaatgatttccactctggccggctgcaggccttcgggaaggaatgctcctttgagcagctggagcacgttcgggagatgcaggagaagctagcccggctgcacttcagcctggatgtgtgtggggaggaggaggacgatgaagaggaagaggatggggtcactgaggggctgccagaggagcagaagaagacaatggctgaccgtaacctggaccagctgcttagcaatgcgcgcgggcgggcctggcagttggcgcccatggagccagagctgctggttcggaaggtgtctgcattgcaggcctgcgtccggggcttcttggtccgacgccagttccagagcctgcgagctgagtatgaggcgattgtacgagaggtcgagggcgacctgggcacgcttcagtggaccgagggccgcattcccaggccgcgattcctcccagagaaggcaaaatcccatcagacctggaaagcaggagacagggtagcaaatccagagcaggggctgtggaaccacttcccatgtgaagagtctgagggagaggccacctgggaggagatggtgctgaagaagtcaggagagagctcagcaaatcaaggaagcctctgcagagatcacagctcctggcttcagatgaagcagaacaggaaacccagccaagagaagaccagagacacgacaaggatggagaatccagaagccacagatcaaagactgccccacagccaacctcagcttcaagagcttcagtaccaccgcagccacttggccatggaattgctgtggctgcaacaggccatcaatagccgtaaggagtacctacttcttaaacaaacactgagatccccagaggcgggcccgatcagagaggaaccccgcgtgttcctagaacatggggaacaggcctgtgagagggaccagtcacaaccaagcgcaccactggaggaccagtcctacagagacaggaccactggagagctagaacaggaggatgactcctgtcacagggtcaaatcaccccacagatccccaggaagtttggccactacacaaaaaaacattgctggggctaagtgcagagaaccatgctacagcaagtctggaccaccgtcgtctataccatcaaacagccaggccttgggggacaggctcaccaaagggccagacgatggaagacagacctttggagggacctgcctgctgcagatgaaaatcctggaggaccagacccccagaggtttaaaacctaggaaccattgtcccaggaagtccaggacacagctgtctgcactctatgaggactcaaatattaaggagatgtctcccagaaaactagaccacaaagagcctgactgccgaacagtcaggacacaagagttgggcctctcagaggaccacatcatctgggatggtggcagtccagcagccaagagggtagtggtgtaccggaatggggacccattcttcccaggctcccagctggtggtgactcaacgccgcttccccaccatggaggccttcctctgcgaggtgacatcagctgtgcaggccccactggctgtgcgtgccctctacacaccttgtcatggccaccctgtcaccaacctggcagacttgaagaacagagggcagtatgtggccgctggatttgaacgattccacaagctccatgtgttcaggaatggggacctggtaagtcccccatttagtctgaagctgtcccaggctgccagccaggactgggaaactgtgttgaagctcctgactgagaaggtcaagttgcagagtggggctgtgtgcaaactctgcaccctagaggggctcccactgtcagcagggaaggagctggtaactggccattactatgtggctgtcggagaggatgagttcaaggaccttccctatctggagctgctggtgcccagcccctccctgcccaggggctgctggtatgcccaaggccacagggcccaggtaacccagccctctccaaaggaaccagaccgaattaagccatctgctttctatgccagaccccagcagaccattcagccaagaagcaagctccccacactctcattcccatcaggagttataggagtatatggagctccccaccgaaggaaggagacagcgggggccctggaagtagcagatgatgaagacactcagacagaggagcccttggatcagactgtccaggggaagggaactctgatggccacaaggaagcaaaacagctgcagaggaaagggcaggatgggaaaaggccgtgtcctcacccactctggggagatgggttctgggaaggaactaacacaggtggcctcaaacactaagcagaacagttccaagccaggacccacctgtcgatgccaaggtgaggtaatagagaagggatccacactggttgaggagaaagggcatcagaagccgatcctactgcagggccatgagcggtccattacgcagattaagtataaccgcgaaggagacctcctctttactgtggccaaggaccctaggacaagggctcgggtgaacttcgtcatatttcttaacaactcttcaggggacaccaagcatgtcctcactggctcagctgacaacagctgtcgtctctgggactgtgaaacaggaaagcagctggcccttctcaagaccaattcggctgtccggacctgcggttttgactttgggggcaacatcatcatgttctccacggacaagcagatgggctaccagtgctttgtgagcttttttgacctgcgggatccgagccagattg

SEQ ID NO: 831 - DNA, 531 bp, Homo sapiens
  SIMILAR (16)..(189): 461254mologous to Homo sapiens bA176J5.1 (RU2 (a new antigen recognised by cytolytic T lymphocytes)),accession number AL139388,Smith-Waterman Score=121.
atgagcagcagcgcagaggaggtgcccctctcttactacaccaacttcaggctgtgcaccctagaggggctcccactgtcagcagggaaggagctggtaactggccattactatgtggctgtcggagaggatgagttcaaggaccttccctatctggagctgctggtgcccagcccctccctgcccaggggctgctgcgactttgactattttcgtcgctggacgtggacttggaataaggagatgcaaagactgaggcccaaaccagggcatacggctcgcgtctgcgggcgcgccttcgggatccgccgttcgcacttagcgtgctcgctggcttgtcgatccgcatgccggataacgtggatggctgtcgctatggctgccgcacggagtgctgtttcaggctatgctttctcgctgatgctaacggatagggttgcgcaggagagcttcatgcgcctggtggaggcctgtggggactcggagcaaagcatggacaactggctgagtcggctggacggctgccgctga

SEQ ID NO: 832 - DNA, 543 bp, Homo sapiens
  SIMILAR (447)..(500): 401254mologous to Homo sapiens Human gene 77-encoded protein fragment, SEQ ID NO:452,accession number Y86535,Smith-Waterman Score=43.
  misc_feature (1)...(543): n = a,t,c or g
cttnttttatgtnnnnannnnnnnagggagnaggcgngtcnntnnnttatggtgtactgtattccgtgtcgnnggaaccattccgatctgcgccggagctgcgatgctagagcactcttgccacccccaccccacggacgtgttgcagtgatatcagaattttgcgatggacagattcctggtgaaaggggctcaagggggccttttgaggaagcaggaggagcaagagccaactggagaagagccagctgtgttgggaggagacaaagaaagcacaaggaagaggcccaggagagaggccccaaggaatggaggccactcagcaggccctagctggcggcacattcgggctgagggcctggactgcagttacacagtcctgtttggcaaagctgaggcagatgagattttccaagagttggagaaagaagtagaatattttacaggagcactggccagagtccaggtattcgggaagtggcacagtgtgcccaggaagcaggcaacgtatggcgacgctgggctgacctacacattntcagg

SEQ ID NO: 833 - DNA, 481 bp, Homo sapiens
  SIMILAR (2)..(151): 341254mologous to Xylella fastidiosa DNA repair system specific for alkylated DNA,accession number AE003963,Smith-Waterman Score=91.
cagagtccaggtattcgggaagtggcacagtgtgcccaggaagcaggcaacgtatggcgacgctgggctgacctacacattttcaggcctcacgctgtctccaaagccctggatcccagttctagagcgcatccgggatcacgtctctggggtataaagatggctgtgaccacatcggggagcaccgagatgatgaaagagaactggcccctgggaaccccaattgcctctgtctccttcggtgcctgcagagactttgtcttccggcataaggattcccgtgggaaaagcccctccaggagggtggcggtggtcaggctgccgctggcccacgggagcttactaatgatgaaccacccgaccaacacgcactggtaccacagtcttcccgtgagaaagaaggttctggctccacgggtgaatctgacttttcgtaaaattttgcttactaaaaaataaaaacatttttaacaaaaaaaaa

SEQ ID NO: 834 - DNA, 441 bp, Homo sapiens
  SIMILAR (189)..(410): 441254mologous to Xylella fastidiosa DNA repair system specific for alkylated DNA,accession number AE003963,Smith-Waterman Score=133.
ggcacgagggtttacccgtgtttaacctctttgcgtctcgcttctgaatcgtatccacttgagcatcactagactgatctattttaacactggtggggggcagcgaggatggacagattcctggtgaaaggggctcaagggggccttttgaggaagcaggaggagcaagagccaactggagaagagccagctctgtctccttcggtgcctgcagagactttgtcttccggcataaggattcccgtgggaaaagcccctccaggagggtggcggtggtcaggctgccgctggcccacgggagcttactaatgatgaaccacccgaccaacacgcactggtaccacagtcttcccgtgagaaagaaggttctggctccacgggtgaatctgacttttcgtaaaattttgcttactaaaaaataaaaacatttttaacagttaa

SEQ ID NO: 835 - DNA, 1262 bp, Homo sapiens
  SIMILAR (1058)..(978): 881254mologous to Mus musculus uracil-DNA glycosylase,accession number X99018,Smith-Waterman Score=116.
tctcgtgcggcggaattccgtctttcccaccacgaggccaccagggtgactgcgggattccgatctgcgccggagctgcgatgctagagcactcttgccacccccaccccacggacgtgttgcagtgatatcagaattttgcgtgcggtttacccgtgtttaacctctttgcgtctcgcttctgaatcgtatccacttgagcatcactagactgatctattttaacactggtggggggcagcgaggtcagttatgggtccttcctccttaaaggggtggacagttgactttgggcaaacctcttcgcctctgtgggcaacagtttccccttctgcaaaatgagggtttggattgtagtttctaagtttagctgtggcgtgcgaattcccaggaggtagttctttaaaaattcaagtgctcaggcgtggagtgcagacctctgggtttttgcaagctagccagctgattctgatgcacaggtggacgtgggagaccctggatcagattgtccctagggtcccttccggctttaacatcttctgtttcctttctaggacatggttttaaactttaaaatgaaaatgtgaaactaggaatgttgctgtgagaccccttggacaaacagatttttgcactggggatagaacttgagcaatttctgtcttgggcctcgccactgacgtcccttctttcctgtggggacaggatggacagatttcctgggtggaaaggggcttcaagggggccttttgaggaagcaggaggagcaagagccaactggagaagagccagctgtgttgggaggagacaaagaaagcacaaggaagaggcccaggagagaggccccagggaatggaggccactcagcaggccctagctggcggcacattcgggctgagggcctggactgcagttacacagtcctgtttggcaaagctgaggcagatgagattttccaagagttggagaaagaagtagaatattttacagcctcgctccttatgagagttggcttgatgggcacgaaccgtgaggacagcgttgagaaggagaacacctatacacatgagagaaacaggttaaatgtaggctcaggcaaatcagcccaatacccagcaacaggagctaaatccatgatgaaaccaatgcttgatgggatccagtgtagcaagctgtgcttccctgctgcagccggcataatggcagcagccactaccatcaacaatggagtcggggctgggcgtggtggcttatgcctgtaa

SEQ ID NO: 836 - DNA, 1069 bp, Homo sapiens
  SIMILAR (556)..(251): 331254mologous to Xylella fastidiosa DNA repair system specific for alkylated DNA,accession number AE003963,Smith-Waterman Score=93.
tttttttttttttttttttaactgttaaaaaggtttttattttttagtaagcaaaattttaccgaaaagtcagattcacccgtggaagccaaaaaccttctttcctcaagggaaaaaatgtggtaaccaatgcgtgttggtcggggtggttccatcaattaattaagctccccgtggggccaacggcaaccctgacccaccgccaccctcctggaggggcttttccccacgggaaatcccttatgcccggaaagacaaagtctctgcaggcacctgaaagagacagaggcaatggggcttcccaggggccagttcctctttcatcatcctcggtgctccccgatgtgggtcacagccatctttatacctgttgatgagcacaaagttgaaggtctgtccagtcaccccagagaccgtgatcccggatgcgctctagactggggatccagggctttggaaccagcgtgaggcctgaaaatgtgtaggtcagcccagcgtcgccatacgttgcctgcttcctgggcacactgtgccacttcccgaatacctggactctggccagtgctcctgtaaaatattctacttctttctccaactcttggaaaatctcatctgcctcagctttgccaaacaggactgtgtaactgcagtccaggccctcagcccgaatgtgccgccagctagggcctgctgagtggcctccattccctggggcctctctcctgggcctcttccttgtgctttctttgtctcctcccaacacagctggctcttctccagttggctcttgctcctcctgcttcctcaaaaggcccccttgagcccctttcaccaggaatctgtccatcctcgctgccccccaccagtgttaaaatagatcagtctagtgatgctcaagtggatacgattcagaagcgagacgcaaagaggttaaacacgggtaaaccgcacgcaaaattctgatatcactgcaacacgtccgtggggtgggggcggcaagagtgctctagcatcgcagctccggcgcagatcggaatcccgcagtcaccctggtggcctcgctcgtgcc

SEQ ID NO: 837 - DNA, 846 bp, Homo sapiens
  SIMILAR (274)..(360): 461254mologous to Salmo salar aldolase A,accession number U18402,Smith-Waterman Score=66.
tttttttttcatgcttagaaaaaatttattacaatgtaagaaagtctgaatagcatgaatttattataatgatttaacacttctagcactcgagttaaaaatgcccttccataaataacrtvcccctggaaaacatagcaaatttacacagtttaccatttcccaatgttatataaatccaacaagcttaaatcacctgcagctgagagaagaacagaggaaaccagagctgtgaagttcatsccatcccaatgggcagcaatggaggagtgagagccagtctccccctcctccagctccctcatctcagcatgggactggccaatctcagcactcaaagaatggggagaagaacagggtggggcagtacctggaagaatcaaggagggcaaacaccacagtcttacagctgcagaacaggtgaagggcacgggcctagggcatcctggaagacgvbcaggccatgggccattgtttgtgtgctggtgccaaggaggtgtcagttaaggctgctcagctgtggcctgcaaggaagaagggagggagaggccagctctgatgtcctggtcagatcttgaacagggcctgtcctctggccaaccacgtcttctactttcttacaaatgccaacgctgctttctactcctgggccttctggatcctccgtgttccaaggacctccctcttggaactccgtctggctccactggacaccctcctcaccctactttcatggacactgtggcctcatcattcttgctttcatctgggctagtttccagatctaggtcagcattccaggcaccaaacctcaggtgatccacccgcctcagactcacaaagtgt

SEQ ID NO: 838 - DNA, 387 bp, Homo sapiens
  SIMILAR (241)..(11): 391254mologous to Homo sapiens dJ534B8.3 (novel protein similar to an aspartic protease),accession number AL121905,Smith- Waterman Score=100.
tgcagtgcaggcggcccatggcgcgcgccccagccccgcaggttccaccgccgccgccgccctgctcagcttcctcctccgctgccgctgccaccgctgccggcctctccgcgcatccacaaccgcactttcgccacggccgtcgcagcgcactcctcccccggccgccctgggctgtccggagccggggagccctcgcagggccgcggacacgcgcggccgccgggctccggggagggagatcccacagtgtcatcaccaggatattgacattgatacagtcaagacgcagaacatttccatggcagcaacgatctcccatgttgcccaatggcattttaacagaagggacaagtgctagatcctctaacaaaaactagaagaaaa

SEQ ID NO: 839 - DNA, 409 bp, Homo sapiens
  SIMILAR (409)..(302): 1001254mologous to Homo sapiens Unknown (protein for IMAGE:3343149),accession number BC000628,Smith-Waterman Score=175.
caatgtgacttctatggcaagagcttcttgctcgtcaaccttcttcttcaatcccagccattccgttcccaccctttccctttttcaaaacggctcttcaactgtgggggctccaacctgccagtggctttctaacactccttgtgccatctttcaggagaggaaaggcagtggaacagctactccacagctggcaatgactgtttttatagaagacatgatttgtggtgagcgtcaccagcccctgattgcagagaacacaaaaaaggtgaagaggctcaagtgggaattcagactcacctatatacacattttcggtttgatttcctttcttaaccaccaactttagttgtaaaaatatacttcccactttctccaattcgctgctcccagatgtcactccaaattt

SEQ ID NO: 840 - DNA, 1176 bp, Homo sapiens
  SIMILAR (696)..(917): 321254mologous to Rattus norvegicus WASP interacting protein,accession number AJ303456,Smith-Waterman Score=75.
atgggagatcgttgctgccatggaaatgttctgcgtcttgactgtatcaatgtcaatatcctggtgatgacactgtgggatctgtgcatcgagggaaaccggtcaaagccctcgcactattttgaggaaactttggtcactcagcgggagagctggcaggaaacctcgcgtctgccggtgccggcgccgcccctgcccctccccggagcccggcggccgcgcgtgtccgcggccctgcgagggctccccggctccggacagcccagggcggccgggggaggagcgcgctgcgacggccgtggcgaaagtgcggttgtggatgcgcggagaggccggcagcggtggcagcggcagcggaggaggaagctgagcagggcggcggcggcggtggaacctgcggggctggggcgcgcgccatgggcccgcctgcactgcactgaggacccggtgccggaggccgtgggcggcgacatgcagcatctgaaccagctgggcgcgcaggtggaaagatttctggctcagctctctgaatttgccaccaccaatcagatcagtcttggctccctcagaagcatcgtgaaaagcctccttctggttccaaatggctccctgggtgactctgatgtgcacccttgtcagtattccctgaagctcttctgtggctgtcatcaacgcagctctaggccaccttcagcccacctgggcatctcactgggcagccaatctcacctgctccgaagccctccaggcagcagccagagtcagcttcaaagacaagtgccagactgcagctgccacatgaagagagcccagaaagctcctctgagaatgctggacctcaggacaggggcccatgctctgcacccggccctcagcagccagatcctagaggcccagtccaagctgtgggccaagggagcggggcgggctgaggcctgctttgtgtcggcagggtctggggaattgggagcactggcgggagcccatggtccggggccgaaccagcccccttctgtttccctgaagaaggggctgagagtgccccacagggccatgatgctttcatggtgggccagtgcatggcagccagcccatgtggaggcctggagacaggtggtccacggcttctgtggccatttttcaggagagaagaggaagcaaggacagctttgctga

SEQ ID NO: 841 - DNA, 1654 bp, Homo sapiens
  SIMILAR (1528)..(1620): 401254mologous to Homo sapiens immunoglobulin gamma heavy chain,accession number X04646,Smith-Waterman Score=66.
acacaaagcatttcacatgttatgctttttcctgtggcttttaacctgagtttccccggaattgctcttacaaattccaactttggaacagacccaatttcactggagacccaggatcgtcacaaaaccaggaagataatttttaaagacaagagcaagcactagctctctgcaaggtacacgactctttaatccatgcagaaagacaactggatccagaccttttcttcagaacctttttattcatcatctaaccaacagaggtggttggctcgaactcaaactaaaatggcctcaaaaggcccacctcgttacgacatgacagggcaaaaccagaagtagggacagagtttagcctcagttctctgcagagaagaccaaagcaggtatttacacacaaggtgcctcatttaaaaactgaattggcattgttccacccagccacagcacccagagtgtgcaaaaatccgtgggggctctgtatatgtgtcatttcagacaatcccgccgatccctcagccataaaccaagctcttgctttttggggagggaggggtgatcagcatggttatcttgaaatggatggcacccatttgtttacttctgggaacttttgaagggggagggtgacaactttattttctccccctgaaatctgaagatgcagtggccttgtcaagagtatctaaaaatgtggtccctggaagaacaggtgggtgggtggttgcccctaacagagagttttaccaggggtaatttgtgttgggcttcttttcagtactttaatcctgctgttttttcagaaaccctttgcacctggggccccatggagccagcagggccccatggagcattcccacaggcctgtgagtgaagtgcctctcagagcagtcaacccagggaagggaggagggcagggaacggggccaggggagatgcagggacaagaaatcagcagaaacacctccatgctggttctgactcgctccatctcgtgcaggaagctgtagaactgaggcaaggttaattctatatacacattttcggtttgatttcctttcttaaccaccaactttagttgtaaaaaatcataacttccccaactttctaccaaattcgctgctccccagatgtccactcccaaatttcccactcccatatcctatgagctggttaatcatccagagtcgtggccctatggcccagcgagcaaggggtgggagcattctgcttccacttttcagaaaagtaagtggctttctcctcactaagacccagagttatgaaatccgcctggacctgcttggctgtgagactcttcttcaaagcaccatttggaaccagaaggaggcttttcacgatgcttctgagggagccaagactgatctgattggtggtggcaaattcagagagctgagccagaaatctttccacctcttttggctcagttaggaagtggaaaagcacctctgtcagggctgagaactgctgcgcgcccagcataattaagctgctgcatgtcgccgcccacggcctccggcaccgggtcctcagtgcagtgcaggcgcgcccatggcgcgcgccccagccccgcaggttccaccgccgccgccgccctgctcagcttcctcctccgctgccgctgccaccgccc

SEQ ID NO: 842 - DNA, 253 bp, Homo sapiens
  SIMILAR (37)..(210): 251254mologous to Homo sapiens myelin protein zero-like protein MPZL1b,accession number AF092424,Smith-Waterman Score=61.
gttacctggtgtatttcacaaggcccatgacgatgcatcgggcggtgcctcccacagagcctactccgagctttttgtgggaaaaacaagaaagagcgtatcctctatttatactgcacaagcaaccagaagcttgggccagttaatgctgaaagaactttcaatccggaagcacccagggggagagaaaatgctctcccgaatggcaattcaggcctatgacagcaaagagctgagttcaatttctacttga

SEQ ID NO: 843 - DNA, 1866 bp, Homo sapiens
  SIMILAR (526)..(1419): 941254mologous to Homo sapiens Human RNA-associated protein- 17 (RNAAP-17),accession number Y70236,Smith-Waterman Score=1501.
ggagacgtacgaggaggaccgggagtacgagagccaggccaagcgtctcaagaccgaggagggggagatcgactactcggccgaggaaggcgagaaccgccgggaagcgacgccccggggcggggcgatggcggcggcggcggcgcgagcttctctcagccggtaacaaagcgcggcccccctgtccgctgtgcctggctgctccccgggaagcagggcctcggactctgtgaatctgtggtggaagcagacctcgtggaagcgctggaaaaatttgggacaatatgctatgtgatgatgatgccatttaaacgacaggctctagtggaatttgaaaacatagatagtgccaaagaatgtgtgacatttgctgcagatgaacccgtgtacattgctggtcaacaggcttttttcaactattctacaagcaaaaggatcactcggccaggaaatactgatgatccatcaggaggcaacaaagttcttctgctctcaattcagaatccgctttatccaattacagtgccaactcgtctaaatgttattaggaatgacaatgacagttgggactacactaaaccatatttgggaagacgagatagaggaaagggtcgccagagacaagccattttgggagaacacccttcttcgtttagacatgatggctatggatcccatggtccattattgcctttaccaagtcgttacagaatgggctctcgagatacacctgaacttgttgcttatccattaccacaggcttcttcctcttacatgcatggaggaaatccctctggttcagttgtaatggttagtggattacatcaactaaaaatgaattgttcaagagtcttcaacctgttctgcttatatggaaatattgagaaggtaaaatttatgaagaccattcctggtacagcactggtagaaatgggtgatgagtatgctgtagaaagagctgtcacacaccttaataatgtcaaattatttgggaaaagacttaatgtttgcgtgtctaaacaacattcagttgttccaagtcaaatatttgagctggaggatggtaccagcagctacaaagattttgcaatgagcaaaaataatcgctttacaagtgctggccaagcatctaagaatataatccagccaccctcctgtgttttgcattattataatgttccattgtgtgtcacagaagagaccttcacaaagttgtgtaatgaccatgaagttcttacattcatcaaatataaagtgtttgatgcaaaaccttcagccaaaacactttctgggctattagaatgggagtgcaaaactgatgcagtagaagcccttacggcactgaatcactatcagataagagtgccgagaaggcatgctttctgtgtaggtcattgcacaaggagactgggtcacttatttctgggaggatgtggtgcaggtccatggaggggaagatcaacagctcaagctcagagagaaatatgtaccctgaaattcgagatgcctcgtgctaattcccatggagactggtgtcaggagattaccttttcaaagcgctggaagattaacgagaatttcagatgccgtagcaatttgaagggaaaaaattgtggcctccacagtgccagcttgcctgccatgagggagacatatttgagagtccttcagctccctgtgggctgtacatccaagcaagaaagtccagatcttgcatctgagttggcaactgaaggaagagaccttgaatcagcacagcagtcagaattctgcttgagggcagctttgctgaaactaaaaggaacaactttatctagaacagtctctctgcacattcgctttcccctgtggcagttgcgatgttag

SEQ ID NO: 844 - DNA, 1711 bp, Homo sapiens
  SIMILAR (1)..(42): 711254mologous to Homo sapiens Human RNA-associated protein- 17 (RNAAP-17),accession number Y70236,Smith-Waterman Score=58.
  misc_feature (1)...(1711): n = a,t,c or g
aaaatgaantgtcaaagagtcttcacctgtttctgcttatatgaaatattgagaaggtanatttatgaagaccattcctggtacagcactggtagaaatgggtgatgagtatgctgtagaaagagctgtcacacaccttaataatggccaaataattgggaaaagaactaatggttggggggctaaaccaccattagttggtcccagtccaaaaattgaaccggagggaagggacccagcaggtacaaaaaatttggcaatggaagcaaaaaaaaatccgctttacaagtgctggccaagcatctaagaatataatccagccaccctcctgtgtttggccatttattataatgttcccattgtgtgtcacagaagagaccttccacaaagttgtgtaatgacccatgaagttccttacattcatcaaatataaagtgtttgatgcaaaaccttcagccaaaacactttctgggctattagaatgggagtgcaaaactgatgcagtagaagcccttacggcactgaatcactatcagataagagtgccgaatggttccaactccctatacatgtgaagctttgcttttctacatcatcccatttataagaagagaagagcatgttagaatttatgttcacctttattacaatttcaaagctacacttcattaaaaaaaaatctaaaatggttgatctcatgttgccttgcttactttaagatcctgttctgtaataaacatattttgccttgagtaaatttgttgtaagcttaaatattgaattgttttcattttaagatagaatatcataatgtagactatctacagcttcattgtagattatacagatatatgatttctaaccttattactggaatttttcttccacagtaaaaatatatttgcattcttaatgctaattatctgcaagtattttttccattgtgtaagagattgaatgccaggtgaaagtattgcattttaatatagaattccctattatatgtttagatgtttaagtatgttgcagttactcatattaaacataacttgtatatttattattttaatgaagtttgagaataacgttacatatgttgaattttaagtactacagatttaactgattttatatttctgaaaggctaacagacatggatacacgtgtacagtatgcattcaaacttatttaaattggtgtatttttttttaagtcacgtggccatttgtattgacatgcctctgtttctagtccagtttggagattttataaagttataacaatgagttaatgtgttcattttcatttgttgcatgtgacttaaatacagctagtatttggcattgagattttaatagaggttataattaacagttcctcttatagataataatctgggatccatgggtgggcttcagagaatctgtgtaccccctaaaattgtatgtagaattttggatatttacatttttattttttaactcttggatccatcagtaatatgtatttttctatatggtacaagatttaaggatctaattttatttttattccaaacagatagctatttgtctcaataccatttattaaacattctttctcccactggatctgttttttttttttttttaagataatagattttatacataggcaagtaagatttaaggaccaaacatggtattaagagactatagcacgattgttacca

SEQ ID NO: 845 - DNA, 2112 bp, Homo sapiens
  SIMILAR (772)..(1665): 941254mologous to Homo sapiens Human RNA-associated protein- 17 (RNAAP-17),accession number Y70236,Smith-Waterman Score=1501.
atgaaagaagccccctccaccaaaaaccatgattctgaggcctcaccagccatgtggaactccgccagtctcctggccgcgcagtccccgcggacggccgggcgcgatgtaccctcgcagaagaggcgctgcggcggcgaggactggccggcgcgatccgagtgcgcgcgccccaccgccacccccacccgcctgccagccggtccctccggccgccgccatgtcctcctcctcttcctcccccagggagacgtacgaggaggaccgggagtacgagagccaggccaagcgtctcaagaccgaggagggggagatcgactactcggccgaggaaggcgagaaccgccgggaagcgacgccccggggcggggcgatggcggcggcggcggcgcgagcttctctcagccggtaacaaagcgcggcccccctgtccgctgtgcctggctgctccccgggaagcagggcctcggactctgtgaatctgtggtggaagcagacctcgtggaagcgctggaaaaatttgggacaatatgctatgtgatgatgatgccatttaaacgacaggctctagtggaatttgaaaacatagatagtgccaaagaatgtgtgacatttgctgcagatgaacccgtgtacattgctggtcaacaggcttttttcaactattctacaagcaaaaggatcactcggccaggaaatactgatgatccatcaggaggcaacaaagttcttctgctctcaattcagaatccgctttatccaattacagtgccaactcgtctaaatgttattaggaatgacaatgacagttgggactacactaaaccatatttgggaagacgagatagaggaaagggtcgccagagacaagccattttgggagaacacccttcttcgtttagacatgatggctatggatcccatggtccattattgcctttaccaagtcgttacagaatgggctctcgagatacacctgaacttgttgcttatccattaccacaggcttcttcctcttacatgcatggaggaaatccctctggttcagttgtaatggttagtggattacatcaactaaaaatgaattgttcaagagtcttcaacctgttctgcttatatggaaatattgagaaggtaaaatttatgaagaccattcctggtacagcactggtagaaatgggtgatgagtatgctgtagaaagagctgtcacacaccttaataatgtcaaattatttgggaaaagacttaatgtttgcgtgtctaaacaacattcagttgttccaagtcaaatatttgagctggaggatggtaccagcagctacaaagattttgcaatgagcaaaaataatcgctttacaagtgctggccaagcatctaagaatataatccagccaccctcctgtgttttgcattattataatgttccattgtgtgtcacagaagagaccttcacaaagttgtgtaatgaccatgaagttcttacattcatcaaatataaagtgtttgatgcaaaaccttcagccaaaacactttctgggctattagaatgggagtgcaaaactgatgcagtagaagcccttacggcactgaatcactatcagataagagtgccgagaaggcatgctttctgtgtaggtcattgcacaaggagactgggtcacttatttctgggaggatgtggtgcaggtccatggaggggaagatcaacagctcaagctcagagagaaatatgtaccctgaaattcgagatgcctcgtgctaattcccatggagactggtgtcaggagattaccttttcaaagcgctggaagattaacgagaatttcagatgccgtagcaatttgaagggaaaaaattgtggcctccacagtgccagcttgcctgccatgagggagacatatttgagagtccttcagctccctgtgggctgtacatccaagcaagaaagtccagatcttgcatctgagttggcaactgaaggaagagaccttgaatcagcacagcagtcagaattctgcttgagggcagctttgctgaaactaaaaggaacaactttatctagaacagtctctctgcacattcgctttcccctgtggcagttgcgatgttag

SEQ ID NO: 846 - DNA, 1711 bp, Homo sapiens; identical to SEQ ID NO: 844
  SIMILAR (1)..(42): 711254mologous to Homo sapiens Human RNA-associated protein- 17 (RNAAP-17),accession number Y70236,Smith-Waterman Score=58.
  misc_feature (1)...(1711): n = a,t,c or g

SEQ ID NO: 847 - DNA, 907 bp, Homo sapiens
  SIMILAR (1)..(144): 1001254mologous to Homo sapiens DHHC1 protein,accession number AF247703,Smith-Waterman Score=279.
cactgtccctgggtcaacaactgtgtaggcgagaacaaccagaagtacttcgtcctgtttacaatgtacatagctctcatttccttgcacgccctcatcatggtgggattccacttcctgcattgctttgaagaagattggacaaagtgcagctccttctctccacccacccacagtgattctccttatcctgctgtgctttgagggcctgctcttcctcattttcacatccattgatgtttgggacccccagttgcactcccatctgcacagatgagacgggaatagaacaattgaaaaagggaatgagagaagatgggctaaaaaaacaaaatggattgaacattgaaagccgtttttggccaccccttctctctaggctgggccagcccctttgccacgccagaccaagggaaggcagacccgtaccagtatgtggtctgaaggaccccggaccggcatggccactcagacacaagtccacaccacaggcactaccgtcccatccgttctcatgaatgttttaaatcgaaaaagcaaaacaactactcttaaaacttttttttatgtctcaagtaaaatggctgagcattgcagagaaaaaaaaaagtccccacattttattttttaaaaaccatcctttcgatttcttttggtgaccgaagctgctctcttttccttttaaaatcacttctctggcctctggtttctctctgctgtctgtctggcatgactaatgtagagggcgctgtctcgcgctgtgcccattctactaactgagtgagacatgacgctgtgcgtggatggaatagtctggacacctggtgggggatgcatgggaaagccaggagggccctgacctcccactgcccaggaggcagtggcgggctccccgatgggacataaa

SEQ ID NO: 848 - DNA, 1836 bp, Homo sapiens
  SIMILAR (225)..(1328): 401254mologous to Homo sapiens OXA1L,accession number AJ001981,Smith-Waterman Score=415.
  misc_feature (1)...(1836): n = a,t,c or g
atggtaacgtggctttacagatttttacccacttcaaatatggccgccaagctccgttctcttttaccgcctgatctacggctacaattctggcttcatgcccgcctccaaaagtgcttcctctcgaggggttgtggttcttactgcgcaggcgcaaaagcaagtcctcttccgggcaaaatggcgatgggactaagggtgcggacgccgggagcttctgcgcattgctacagtccgggcagcgggtccacagcgggggcggggacctcgcaatggcttgggaaaccgctgaccacacggctcctattcccagtagccccgtgctgctgtcgcccacactacctcttccttgcggcttccggcccccggaagcctcagtacctctgctatctcttttgcagaagtccaggttcaggcccctcctgttgttgctgcaactccctcacccacaagcaagtacctgaaggtggcttcttggagagactgcagaatgtagtccaaactgctgcagagcaaagctttcgctgaaactggggctgggggtcatacaccccagtgggaacttgatccaagaatttacttgggaatttaatgcatgttgatcttggggcctaccttgggtgggggggccattgctggcatgtaacagtctttggccgcttgcctgatttttcctctcatcgtgaaggggccagcgagaggcagccaggatccacaatcacttgccagagatccagaagttttccagtcgaatcagagaggccaagttagcaggagaccatattgagtattacaaggcttcctcgggagatggcactttaccaagaaaaaacatggtattaaactcctataaaccctcctcattctcccctgtgactcaaggccccaatcttcatctccttccttcaatgcctttgagagagatggccaaccttcctgtgcccaagcctgcaagacaggtgggcctctggtggttccagggatctnacgggtatccgatcccatctaccatattacccactgggcagtcactgcttacaatgtggggctgttcttgagctagggtgctgaggacaggtgttgcaaagttctggacctttcagtggatgagaaatgtcatcaagaatgatgccccctgataaccttgcccccaaaaccatggcatttccccaagggcagtgttttatgtactgggctctccctccaaatttgtttttcccctggtcccaagttatccttttctcggaattccagccagtacgcaacttgtactttaaatccccccagcgttgttgtacatgaccctggaccaaattaccctcccacggggaaggcttccctagagagctttcaaaaaaaggctggaaaaatgctgaaaatgacgcgtccagctgcggagagccgtgaaccaacgcatgcgggaatccagttggagcttagccagcccaggggtcctttacggacagaccttttaccccacaaccctctccttacaacctggaaaggataaccctcccaaatatccctagcagccagcagcagcaaaccaaagttcaaagtatccctggggcacgacacacttggctgacttatggttctgtgcgcatttctggcaaggaattctggtctctttcagagactcatcctcaaaacaacgacttgacgactgtgtccttgccccacgtcctaggaactgtgggcacacagaagatgttcattttaaaaacggatttcatgaaacactcttgtacttatgtttataagagagcactggggtagccaagtgatcttcccattcacagagttagtaaacctctgtactacaaaaaaaaaaaa

SEQ ID NO: 849 - DNA, 373 bp, Homo sapiens
  SIMILAR (2)..(232): 961254mologous to Homo sapiens unnamed protein product,accession number AK000537,Smith-Waterman Score=391.
  misc_feature (1)...(373): n = a,t,c or g
cccacgcgtccggtctgtggactttgaagctgtggcaatcacagtgaaagagctagttcgatatacactcagtataaatccaaataaccattcttggttaattatccaggcagatatttactttgcaacgaatcagtattcagcagctcttcactattacctccaggcaggagctgtgtgttctgacttctttaacaaggctgtgccccctgatgtttatacagaccaggtggccattttatgtcagttcctcagagaaattgactacaaaacagcgtttaaatctctgcaagaacaaaacagtcatgatgctatggactcctactacgactacatatgggatgttaccattttggaatacttgacttatctn

SEQ ID NO: 850 - DNA, 777 bp, Homo sapiens
  SIMILAR (8)..(775): 801254mologous to Homo sapiens unnamed protein product,accession number AK001403,Smith-Waterman Score=960.
gcacgagagtgtgtccagtcagcacaaacgaggaaatgatggcagagttagtttaataaaacagagggaatctacgttaggtatcatgtatcggagtgaactgctttcttttatcaaaaaattacgagaaccactcgttttgactattattttatcactctttgtgaaacttcacaatgttcgggaggacattgtgaatgatattacagctgaacacatttctatttggccatcttccattcccaacctccagtctgtggactttgaagctgtggcaatcacagtgaaagagctagttcgatatacactcagtataaatccaaataaccattcttggttaattatccaggcagatatttactttgcaacgaatcagtattcagcagctcttcactattacctccaggcaggagctgtgttgttctgacttctttaacaaggctgtgccccctgatgtttatacagaccaggtaataaaacgaatgataaaaatgttgttctttgctgaattgccacacacaggtggctaattttatgtcagttcctcagaggaaattgacctacaaaacagcggtttaaaatctctggcaaggaccaaaacagtccatgatggctatgggactcctactacgactacatatgggatgttaccattttggaatacttgacttatcttcatcataaaagaggagaaacagataaaagacaaattgcaatcaaagccatcggccagacagagttgaatgcaagcaatccagaagaagtgttacagctggc

SEQ ID NO: 851 - DNA, 1153 bp, Homo sapiens
  SIMILAR (370)..(591): 1001254mologous to Homo sapiens unnamed protein product,accession number AK000537,Smith-Waterman Score=387.
atggtgtgctatgatttgggcgcagcatacttccagcaaggctccacaaattcagctgtctatgaaaatgccagggaaaaattttttagaaccaaagaactaattgcagagataggttcattatctcttcattgtaccatagatgagaagcggttagctggctattgtcaagcatgtgatgttcttgtaccttcttctgatagtacatctcaacagttgactccatatagtcaagtccatatttgtttgagatctggcaactatcaggaggtaatacagattttcattgaagacaacttaaccttgagtttacctgtccagttccgacagtcagtcctaagagaactctttaagaaagctcaacagggcctccagtctgtggactttgaagctgtggcaatcacagtgaaagagctagttcgatatacactcagtataaatccaaataaccattcttggttaattatccaggcagatatttactttgcaacgaatcagtattcagcagctcttcactattacctccaggcaggagctgtgtgttctgacttctttaacaaggctgtgccccctgatgtttatacagaccagaggaaatcagtcagagtggatggctcagcaaaacccatcacaactgcggaaaaaggaagtgactggctagagcaccaacactgtgaagaacagctgtggcagagaaagtgccacggccccaccccatcaccagattcagtagaaaggcccttggaatttcctacaaggttcagttctgaacagctccaccttcaaatcagtatagaatcctcccagtgactctgtgagggaggtaaatgtccctgctccccgttggtgggggaaacagaggccagagtggttaaagattttgcctgaagttaaaacaaaaaatgaaaagtcacttggactgcagggaagaatacttacaatacaaggcaattaaaaaaaaaaaaagaaaaaagttgagccaacctgtcactcttcactcagatgccatgaaagacatcatcaccagacagtccccacactcttgccacttggcaggacaggctccatgacagaggatttttcactctgtggaaatataaagcctatctcttttcccatgggcagagagaaatatgaagtcacttgagtgcct

SEQ ID NO: 852 - DNA, 562 bp, Homo sapiens
  SIMILAR (188)..(433): 971254mologous to Homo sapiens HSPC326,accession number AF161444,Smith-Waterman Score=428.
gcccctggctctcctcagctgtagtcagcattgctagctgcccacaactcacgccagagggtgaagatgctggtctcagagaaccagagcttggcaggccccctcatacacctcttggagaggtagatgctggtcaactatgcaccattacctgtgagcagagcttactcctctgccattctctctccaggccctcagcatcctcatgctccctcacaacatcccgtccagcctgagcctgctcaccagcatggtggatgacatgtggcattacgctggggaccagtccactgattttaactggtacacccgccgagccatgctggctgccatctacaacacaacagagctggtgatgatgcaggactcctctccagactttgaggacacttggcgcttcctggaaaaccgggttaatgatgcaatgaacctgagacaagtgcctgctggacagaggtgtgattccagggcccgtgtcacatgacaccagcatgcattgcaggattattagtgtattttgagtctgtaaaaataataaatatgtttgaagtaaaaaaaaaaa

SEQ ID NO: 853 - DNA, 483 bp, Homo sapiens
  SIMILAR (329)..(123): 431254mologous to Homo sapiens HSPC326,accession number AF161444,Smith-Waterman Score=99.
tttagggaaaggctggcctgaggaagaaccagccaggcccttgggaaggccctcaggactgtcagctgaggccaaaagggagcaagaccagctgtgaacctgaaggaaaaataggtatgccttcctaaagagggttccccaatggctagtccccacctaacctgcttggcagtgtggcccatgttccattgcatcattaacccggttttcccaggaagccccaagtgtcctcaaagtctggagaggactcctacatcatcaccagcttctgttgtgttgtagatggcatccagcatggctcggcgggtgtaccagttaatctgtaaagaaacccacactcccgctgtggtctggtgcaattctgaggcagttcctaccacaaggccatgggaactccctgggttccctcttgactacttcttgactgtcacagatacatctggccctctggacaacaccctcgtgccaagcatggcgtaaaga

SEQ ID NO: 854 - DNA, 904 bp, Homo sapiens
  SIMILAR (335)..(255): 961254mologous to Homo sapiens HSPC326,accession number AF161444,Smith-Waterman Score=149.
ctgcttggcagtgtggcccatgttattgcatcattaacccggttttccaggaagcgccaagtgtcctcaaagttggagaggagtcctgcatcatcaccagctctgttgtgttgtagatggcaccagcatggctcggcgggtgtaccagttaaaatcatggactggtccccagcgtaatgccacatgtcatccaccatgctggtgagaggctcaggctggacgggatgttgtgagggagcatgaggatgctgagggcgggcaggcatcgcagctgcaggagcctccagcccgcccggccaagcgcaccagataccgccgccgacgccattttggaagcggcacgtcgcccacggcgacgcgaccggtagctacgggaccacggccccgttcctcgatgggaacgcagccacggccgccccgctgaaagccccggctggtttattcctgagaagtcggtgtgaggggccagggccggccctaacctccctggggtcctgactgggaatttctgccgttccccggctgcctcgtcccttgcgcagccggccctactctgaggccccggggacaccacgctgaggagaaacggctccgagcttgggatcggggagacctggttctgagacccggtcctaccagtagccaatcgttgtgaccttgggcctcagtccccgtgacgttttggtccctgggggttcctggcagcaaagcacgaaagccttggagtcggggggtacctgagctcacgattgtaatttcgaacctgcaacttgtccgaaccccagcgtgttgagttgatataattaagtatccagatcggaaggatgcttgtactagaacagacagctaggcctttgtccagaaggattgattgagtgggttgggtgtggtccaggaatctcat

SEQ ID NO: 855 - DNA, 1625 bp, Homo sapiens
  SIMILAR (3)..(83): 1001254mologous to Homo sapiens HSPC326,accession number AF161444,Smith-Waterman Score=158.
tccaaaatggcggcggcggcggtatctggtgcgcttggccgggcgggctggaggctcctgcagctgcgatgcctgcccgtggcccgttgccgacaagccctggtgccgcgcgccttccatgcttcagctgtggggctaaggtcttcagatgagcagaagcagcaccctcccaactcattttctcaccagcattctgagacacagggggcagaaaaacctgatccagagtcttctcattcaccccccaagtatacagaccagggcggcgaggaggaggaggactatgaaagtgaggagcagttgcagcaccgcatcctgacggcagcccttgagtttgtgcccgcccacgggtggacagcaaaggcgattgcagaacgagcccagtctctgggtctctccagtgcaggagtgatgattgctcgggaaggatggcagtgagctaatactgcattttgtgacccagtgcaatacccggctcacacgtgtgctagaagaggagcagaagctggtacagttgggccaggcggagaagaggaagacagaccagttcctgagggatgcagtggaaaccagactgagaatgctgatcccatacattgagcactggccccgggccctcagcatcctcatgctccctcacaacatcccgtccagcctgagcctgctcaccagcatggtggatgacatgtggcattacgctggggaccagtccactgattttaactggtacacccgccgagccatgctggctgccatctacaacacaacagagctggtgatgatgcaggactcctctccagactttgaggacacttggcgcttcctggaaaaccgggttaatgatgcaatgaacatgggccacactgccaagcaggtaaagtccacaggagaggcactggtgcaaggactcatgggtgcagcagtgacgctcaagaacttgacaggtctaaaccagcgtcggtgagaggaaggggtataagctacaatgcctagaagagaatgagccggacagattgaaagagctttgaaaagtattagggtgcccttccacataacctggtgttcaccagaaacaccacttaaggactcctgagtcactaccacagccaccctgggaaccacaagggcatttgatgctaccgttctggtcagggattgggctgcttcttcagttcctaataccagaaccaagcctcctgatgcctttcttgactgcaactgtgtgattgaaaaatgagatgttcatccaagcagtcaagccacagaaacccagcatgtccctgtcacaatctcatgggcaccttgatcatgtcttaaccttcccttaaccttggggctcccaagccagagtcaaggtctgacgccacctcaaggtgacagctcatctccagcacagcacaggcgtgtgcacacagaggtgttccttgaagccccctccctctcaggtgtcctgagatgctgctcctgggagccccctcagaaaactgcctcacctgagacaagtgcctgctggacagaggtgtgattccaggcctggtgtcacatgacaccagcatgcattgcaggattattagtgtattttgagtctgtaaaaataataaatatgtttgaagtagtttcccatt

SEQ ID NO: 856 - DNA, 375 bp, Homo sapiens
  SIMILAR (175)..(342): 1001254mologous to Plasmid F Protein D,accession number M12987,Smith-Waterman Score=294.
ggcggtattcgggccaccttgtaccatgcggagaccatcaagaatgtgcgcacagccacggaaagctttgcttctgaccccatcctctaccggcccgttgctgtggctctagacactaaaggacctgagatccgaactgggctcatcaagggcgtatttattcgcgataagctcatggagcggcgtaaccgtcgcacaggaaggacagagaaagcgcggatctgggaagtgacggacagaacggtcaggacctggattggggaggcggttgccgccgctgctgctgacggtgtgacgttctctgttccggtcacaccacatacgttccgccattcctatgcgaatgcacattgctgtatgccggtataccgctga

SEQ ID NO: 857 - DNA, 447 bp, Homo sapiens
  SIMILAR (20)..(445): 981254mologous to Homo sapiens M2-type pyruvate kinase,accession number M23725,Smith-Waterman Score=698.
attacgccaagcttggcacgaggggcttatttctctccaggtgaagcagaaaggtgccgacttcctggtgacggaggtggaaaatggtggctccttgggcagcaagaagggtgtgaaccttcctggggctgctgtggacttgcctgctgtgtcggagaaggacatccaggatctgaagtttggggtcgagcaggatgttgatatggtgtttgcgtcattcatccgcaaggcatctgatgtccatgaagttaggaaggtcctgggagagaagggaaagaacatcaagattatcagcaaaatcgagaatcatgagggggttcggaggtttgatgaaatcctggaggccagtgatgggatcatggtggctcgaggtgatctaggcattgagattcctgcagagaaagtcttccttgctcacaagatgatgattggacggtgcaaccgagg

SEQ ID NO: 858 - DNA, 653 bp, Homo sapiens
  SIMILAR (2)..(643): 991254mologous to Homo sapiens cytosolic thyroid hormone- binding protein (EC 2.7.1.40),accession number M26252,Smith- Waterman Score=1099.
ggaccgagctgggaagcctgtcatctgtgctactcagatgctggagagcatgatcaagaagccccgccccactcgggctgaaggcagtgatgtggccaatgcagtcctggatggagccgactgcatcatgctgtctggagaaacagccaaaggggactatcctctggaggctgtgcgcatgcagcacctgattgcccgtgaggcagaggctgccatctaccacttgcaattatttgaggaactccgccgcctggcgcccattaccagcgaccccacagaagccaccgccgtgggtgccgtggaggcctccttcaagtgctgcagtggggccataatcgtcctcaccaagtctggcaggtctgctcaccaggtggccagataccgcccacgtgcccccatcattgctgtgacccggaatccccagacagctcgtcaggcccacctgtaccgtggcatcttccctgtgttgtgcaaggacccagtccaggaggcctgggctgaggacgtggacctccgggtgaactttgccatgaatgttggcaaggcccgaggcttcttcaagaagggagatgtggtcattgtgctgaccggatggcgccctggctccggcttcaccaacaccatgcgtgttgttcctgtgccgtgatggaccc

SEQ ID NO: 859 - DNA, 2292 bp, Homo sapiens
  SIMILAR (1132)..(1851): 751254mologous to Homo sapiens pyruvate kinase, muscle,accession number BC000481,Smith-Waterman Score=868.
atgaggaaaaatcagatggcccatgaggctccttccccggtgccctactcgccccctaaaacaggtgtcgctgtgtcccttgaagcggcctttggcccgctggggcatcgcagctgcagcgtttgcacgggcaccgcagacccggctggtgggcaaatcgagagtgatagggaacttcagaccacatattttaacatgcttaccattgaagaggatgaattcagccaaatttacgaagctagagttcaaagaggtgaagagcttgccttgaagttcaaggccatacagcccaaagtggcagaatcagacctgcacccatgtccatctgcacaaagctggtgcttctaccctgtacaacacagtgtgtttccagtgggctgtgactctccggtggtggaacaagccttgtcaattgctgtctgccacatccagtctgacctggttgcctgggcattctcccaccccatgggcagcagctgctcttgctgccagggctccaggatttttagtcagcgacagctaatgagcaaaggagcaatgattagagaatcagttcttcttaagatcccaagatttgttctaactattgtgggggtaattccaggctgcatttcaaacagtgttggcacagaaattcttaaagtcgtagcccaagtcggtcagcactggaggacctcagaagccatgttgaagccccatagtgaagccagggctgccttcattcagacccagcagctgcacgcagccatggctgacacattcttggagcacatgtgctgcctggacactgactcgccacccatcacagcctggagcactggcatcatctgtactatgggcccagcttctccattgctagagatgctgaagaaaacgattaagtctggaattaatgtggctcatctgaactctcatggagcccatgagtaccatacagagaccatcaagaacgtgcgcacagccacggaaagctttgcttctgactccatcctctaccagcccattgctgtggctccagacactaaaggacctgagatcccaactgggcccgtcaagggcagcggcactgcagaggtggagctgaagaagggagccactctcaagttcacgctggataatacctacatggaaaaggtgaagcagaaggatgctcactttctggtgacagaggtggaaaatggtggctccttgggcagcaagaagagtgtgaaccttcctggggctgccgtggacctgtctgccatgttggagaaggacatccaggacctgaagtttgggggcgagcaagatgtcgatatgatgttttcatcattcatctgcaagacatctgatgtccatgaagttaggaaggtcttgggagagaaaggaaagaacagcaagataaccagcaaaattgagaatcatgatgggggttggaggtttgatgaaatcctggaggccagcgatgggattatggtagctcgtggtgatccaccacaagccgtcgagatgagattcctgcagggaagctgggaagcctgtcatcttgccactcagatgctagaggatgtgatcaagaagctccaccccacttgggctgagggcagtggtgtggccaatgcagttctggtggaagctgactgcatcatgctgtctggagaaacagccaaagggaactatcctctggaggctgtgcacatgcagcacctgattgcctgtgaggcagaggccaccatctaccacttgcaattatttgaggagttctgccacctggcacccattaccagtgaccccgcagaagctactgccatgggcactgtggaggcctccttcaagtgctgcagtggggccataatcgtcctcaccaagtctgcaggtgtgcccaccaggccagcaatgcttatagagctcactctgggctgtagtgtggcactggtgggctggaacaccagggaagaagatttatgcctcgctgaaacgtggctgtttttagagcctgctgtggcgggagagcccggagcctggctgcccatcatgtggccccacccaagcaagagaagaaggaggaatgcagaacagaggcccccagagtgtatggcaagagggtggcagcttcctttcttctgtgtactctgtttagttgctttagaaaatggaagcccagaggactcccaaccctgtcctggggtcaggaaacagccactgtcctgcagcaaacacttcaccctccaccttccattttcccccactactgcagccgcctctgagcctgtggctatagagcctatctctatgtcaataaacaacagctga

SEQ ID NO: 860 - DNA, 2385 bp, Homo sapiens
  SIMILAR (1722)..(1886): 491254mologous to Homo sapiens Human secreted protein, SEQ ID NO: 5210,accession number G01129,Smith-Waterman Score=123.
atgggcacttattaccagaaacaccagacagccagagatctgctggccctggggggcaatcctttcctttctttgcttggtaaagggtgggtccagttgatgaagacggtctggtcctctcttccaggcaaagagaggacggagattgggctggggccaggtatctgggagctgggtctgctctcctgggtggagctttcccaggccagtggtgcagaccaatggggactgaagttggagatcctggtaagacagctccagggatacccaaaggaaaaaaccaagctaatggaggcagccagaaaacaggacacaccgcagaacaaaagatggatcaccaagtggaaaaatgaagcagaggagatcggaggagggctccacagttttacaagtaaagaagataattatactctagttgttgacatgaactgcttggatgttcagggttgtggtgatgacgtgaacaacagacttcttcactctgcaagttacccaacagcaagctgggtggatgaagccatgccaacagcatctggcaggagccagcaccaagcacaccttacacagcttcgacagagctgcacggagaacacatatgcttgctccctctgtctctcatacaaagtaccttatagtgtgagctccagacacacagacactgccatcctgcctacaaagaaaggaatgcagacacagccaacgtcagcattcggggtgggaccacagtggaacgcatacatcctttcacagctgccaaggccttctgggaagtccaatgcctgcccccacatctctcagagccaaacatcttcttctgcactttccacaagttacaattatgtatttacctgtgtgcttactgccctaacctcctacttatggactgatgtttatgtccctccaaagttcacatgcactgctgttaggatcaaagtgaccatccatgatgcacagagcacgtaccagggtaaagttccagctgggacgcaggcatcagcaattgtagaatttgggttctcccttcctcagatccctgactgtccttggtcattcaagaaagattcactgtccctaggccaagagtcaggagcaaaacaggaacaccaagggtatggtctgaggatgttgtcagcagggagcaacgaccaagcaggacactgggagctgctgtcccgtctgcaggcgggactccatgaaggcccctgtctgcccttccagcctttgccacaaaccctcgaacgctggctgcacactggaatcacttggggagcttttaaaagatacggaggcctgggtctgactcccgcccaggacctcagaaagggcctgccccgcgcgaatccccagtcgctgggacttacttggccaccaggtttacagacttcgcagccgctgagagctagagaagagcccggagagcgccatggtccggggacgccggggccgggaagcgccgtggcccgggaggacgctgctcccgcagtagcgcgagggaggggcaggaccggggcggctgcctcgcgggcccggaacgggaactggctgcgactacagccgcagccgcgcccctctgttggcgcgcccaagagcctgccggctgctgggagaggccgccgaagggcgggggcggtcaaggcagggtcccacggtgctgccattcgcccgggtgaaataaacagctttattgctcacgcaaagccttttggtggtctcttcacacggacacgtgtgacatttggtgccgaagacccgggacaggaggactccttcaggagaccagtcccctgtcctcaccctcactctgtgaggagatccacctatgacctcgggtcctcagaccaaacagcccaaggaacatctcaccaatttcaaatcggatcttctcggactgacgctgcccgatcgcctcagaagcctcctggaccatcacagatgctttgggtaactcttacagtggaggcatggccttttaaatcctataaactctccttacaattcccccattttacctgtccaaaaaccggacaagccttacaggaagctggagtcattcactgcaagggccatcaaaaggcatcagatcccatcactcagggcaatgcttatgctgataagggaactaaaaagtggaagaaggaggcagaagagggagaaccagagagatggcagcctgagaaggacttgcctgagaaggactcggccgacattgctggctttgaagatggagaaatgagactgagccaaggaatgcaggtggcctctggtgctgcaaaagacaaggaaatggattctcccacagaccctccagaaggaatgcagacctgccaacactatgattttagtccagtgagacccattttggaatgctggcctccagaaccctaa

SEQ ID NO: 861 - DNA, 852 bp, Homo sapiens
  SIMILAR (248)..(301): 441254mologous to Homo sapiens p40,accession number U93566,Smith-Waterman Score=45.
ctgtttggtggtctcttcacacggacgcacgtgacatttggtgccgaagactcgggacaggaggactccttcaggagaccggtcctctgtcctcaccctcactctgtgaggagatccccctacgaccttgggtcctcagaccaaccagcccaaggaacatctcatgaatttcaaattggactcatgctcaaggaccatcaaagaatcaggtcagcccctatagacccaggcttcaggctggctcctaaggacacaggctccaggcccaccctcaaagacccaagctctgagcccaaccacacacacccaatcaacagactaggcactggggagacctgcaatccagaactgccaacaggcataaacaacaacaacaaaaacaaaaacaaatttaaccttgccttctctggcctatgttctagtaaaaagcccaacagagacctagtggagagccccaactcctgttctacagccaagagatgccctgccagcgaggaggaatctagagaggcactgtggtcacagccgcttgctgcgctgtgcaagggtgcaaactggacagagaatgagtttgacaaattgacagaagtaggcttcagaaagtgggtaataacaaactcctctgagcaaaaggaggatgttctaacccaatgcaaggaagctaagaaccttcacaaaaggttacagaaactgttaactagaataaccagtttagagaagaacataaatgaactgatgatggagctgaaaaacacagtacgagaacttcgtgaaggatacagaagtatcaatagccgaattgatgaagtggaagaaaggatatcagagattgaagtcagcttaatgaaataa

SEQ ID NO: 862 - DNA, 408 bp, Homo sapiens
  SIMILAR (55)..(354): 621254mologous to Homo sapiens arsenite related gene 1,accession number AF269167,Smith-Waterman Score=301.
atgctgccaactaaaaggctgtgggtcagaaaagtttggattgaacaaggtcctaagcaggctaaaggaaggcttgccaaacacagtttacctgggaaaaacgtgtgtgaggactggctcactgtcagacactcatgtaactgctgcgttttgagttcaggtaaaagttatgaacaagaaaaatatacccttcaaagagaagttgaactcaagagtcgaatgttagaaagtttgagctgcgaatgtgaagctattaaacaacaacaaaaaatgcacctggagaaattggaagaacaactaagcagaagccatggacaggaagtgaatgaactaaaaactaagagttccagagttaaccacagtaaacagctcaatgtgctgccttgcaaagatgcatttcatacatag

SEQ ID NO: 863 - DNA, 664 bp, Homo sapiens
  SIMILAR (218)..(664): 671254mologous to Homo sapiens arsenite related gene 1,accession number AF269167,Smith-Waterman Score=460.
ccgcgcggcttgggcggacgtctcgtgagacgtgggacttctcgcgggaactgcattcaaatatcccaggcgcttactcgagagctagctgagcgaagtgggccggcgactgtggagttagcgtcctcaatgtggacgccctgagctcccattaggagccagctggctgcggcagcaggggactagcgtgagagttggctaaaaaaaagaaaagaacatggaggcagatataatcacaaatcttcgatgcaggctcaaagaggctgaagaagagcgactaaaagctgcggagcatggtttacaactagtagagagtcaaaatgaattacagaatcgattggataaatgtcgtaatgaaatgatgaccatgactgagagttatgaacaagagaaatatacccttcatagagaagttgaactcatgagtcgtatgttagaaagtttgagctgccgaatgtgaggctgttatacgtacaacaaaaaatgcacctggagaaattggaagaacaactaagcagaagccatggacaggaagtgaatgaactaaaaactaagatagaaaaacttgaaagtggaatttagatgaagccaggctttagttgaaaagcagctgaagcaccaagtagatcatcagaaggaactcctctcttgtaaatcagaggaa

SEQ ID NO: 864 - DNA, 588 bp, Homo sapiens
  SIMILAR (174)..(377): 371254mologous to Homo sapiens p8 protein,accession number AF216972,Smith-Waterman Score=80.
atgttttgctccaagacagctgggcctaagcccttcagttcgaatcctcatccaagactgaaagctcctacatcttcctgtcactttagccacaagctgcaccgtctggaaatgcccactgctactagggacacaggcgaggccggacagtgccggaggacccggggtgcctctctccacgtgcgcggcctcacaggacaagcggcacctccagtccaccctcgctccagccctcccgtactatacccccggcatcctctgccccgaagcagggagatgccgggagccctccctaccaggctgtaccggagaaaaacaaacctggagccacaccgcgcacatgcgcagaaagcccaaagcggctcccgcgaccggggccaaaaagtttcttatgaattacatctccctgatgatttggctgtcctcaacatttcctcgtttggcagaattcaggtgtggaatttctccagacacggtcggttcctgtggcccgctgccgcggcggcaccacctccacttgcgctgtggctccacttgcttggttctggtccactggacgctcaccctgagaaaacacgctggacatga

SEQ ID NO: 865 - DNA, 723 bp, Homo sapiens
  SIMILAR (407)..(303): 401254mologous to Human herpesvirus 4 epitope Cl3 (57 AA),accession number X07816,Smith-Waterman Score=50.
atggagggtgctgtcctccacttggctgctaagctcttccctccgcatgatgccttcacaactccccaagaagcggtgctgtctgctccttcggccttgccctcttctgcccccacatctgaatgggcacaaagctcccagcctgtgggggtctggaaaggacacaaatcgagcctctgctcctcccacccgtgctctagatctctactgctttgctccaagacagctgggcctaagccctttggttcgaatcctcattcaagacagaaagctcctacatcttcctgtcacttgagccatgagctggaccctctgaaaatgcccactggtgctaatggggacacaggcgaggctggacagtgccggagggcctggggtgcctccctccgcgtgcgcggcctcacaggtcagtggaaacaagaaattccccaatccacagccacgatgacttcaaaatacttcccgaagacatcaggcaatgaagctgcgacctgcgaggacacagcaagccgagtgacgctggccagaggctggctttctcatgaattacatccccctgatgatttggccgtcctcaacacttcctcatttggcagaattcacgagtggaatttctccagacgaggtcggttcctgtggccccgcgacgctgccgcagcaccacctacacttgcgccagtgtggagagcttcacttgctcctttctggtccattggacgctaa

SEQ ID NO: 866 - DNA, 842 bp, Homo sapiens
  SIMILAR (178)..(38): 461254mologous to Santalum album proline rich protein,accession number AF020261,Smith-Waterman Score=75.
tcgtctcgcaattaccgggtcgacgatttcgtgcctggtagggagggctcccggcatctccctgcttcggggcagaggatgccgggggtagagtacgggagggctggagcgagggtggactggaggtgctttcttttcctggaggtgggagagagggagcggctttgccgcctggcctgcgtcctaatcctgtcctggttcttctgctcccgaagggaacgtaggtcccgcgcctgtgataagtaaggttggattttctctttcctgaggtgaaggatgcccggaggcctcggcaggaccgcgcggaaacgggccttctgcccaaaagaggctgcttctctccttattctttcccctcagaatctcgctgtctccttccaaccacctgtggtcggcatccccgcgttgtcactgcgacgcataggcgaacgaggtggtgggaagcacccgcggggcggggagggaccctgcgggcgcggactccacaccaagcctctgctcagcgtcaccccgcttgctgtgtcctcgcaggtcgcagcttcatggcctgatgccttcaggaagtattttgaaagtcatcgtggctgtggattgggggatttcttgtttccactgacctgtgaggccgcgcacgtggagggaggcaccccgggtcctccggcactgtccggcctcgcctgtgtccctagtagcagtgggcatttccagacggtgcagcttgtggctaaagtgacaggaagatgtaggagctttcagtcttggatgaggattcgaactgaagggcttaggcccagctgtcttggagcaaaacatctgttgtgggatgtggcggcagaggaggg

SEQ ID NO: 867 - DNA, 803 bp, Homo sapiens
  SIMILAR (641)..(462): 351254mologous to Homo sapiens Secreted protein encoded by gene 153 clone HNHFQ63,accession number W88686,Smith-Waterman Score =74.
atggcttattgctgtttattggtgtttggggactgcagagaagactcattggccggagttgaatccacagcaaagggttggcatcatctggaggtgacttcactcacatgtctgcagaggacatggggcttggcttcaggacctataggagacctcccagttaccctgggattccaggtagcagagcactctcaggacattcagagctttgacttggtgatcaagggcaccatagaatctcgctgtctccttccaaccacctgtggtcggcatccccgcgttgtcactgcgacgcagaggcgagcgaggtcgcagcttcatggcctgatgccttcaggaagtattttgaagtcatcgtggctgtggattgggggatttcttgtttccactgaccttagcagtgggcatttccagacggtgcagcttgtggctaaagtgacaggaagatgtaggagctttcagtcttggatgaggattcgaactgaagggcttaggcccagctgtcttggagcaaaacatctgttgtggggtgagaagggaaaggagggatgtggcggcagaggagggcaaggccgaaggagcagacagcaccgcttcttggggagttgtgaaggcatcatgcggagggccgagcttagcagccaagtggaggacagcaccctccatgcctggattcgttactcgctcgttctcgatgttgagctgctggcatattgcagcacaactagagatgtacggatgcccccatcttgatcttacagaatcagaggtgcatccgcaagaaagagtcaagaacagacact

SEQ ID NO: 868 - DNA, 507 bp, Homo sapiens
  SIMILAR (124)..(282): 1001254mologous to Homo sapiens A-kinase anchoring protein 18 gamma,accession number AF152929,Smith-Waterman Score=269.
atggtgaccaacaaccttccagatagcaatgggtcaatcaactcaagttctcagactgctccaaactccttgaccgtgctttaccaacctttgcatgccccacattttgcaggtggagcatatggtattgatgctcttttggaattgaaaccattcatagaagaactcctccagggaaaacatttgactttgccctttcaagggattggtacttttggaaatcaggttggatttgtgaagctggcagaaggagatcatgtaaactcacttttggagatagcaggcctattcttggtcactctctccctgtcctggaagatgttttatgaagcaaagaacataccagcacaggctcgtaccaccacccttaatgaggagcttggccaggtcaaacatgagttctctgacaaaacagggaccctgactcagaacattatggttttcaacagtgactgggtacatgaggccagcatgctcatcttgcaggaggttagaatagacaagtga

SEQ ID NO: 869 - DNA, 494 bp, Homo sapiens
  SIMILAR (64)..(162): 961254mologous to Homo sapiens A-kinase anchoring protein 18 gamma,accession number AF152929,Smith-Waterman Score=156.
atgcatcattcctctccctgtttcagaggagcaggtgctgagagaggaagggagatggtggaccagattataaaaggaattaagatcctgcagaatgcaataatacaacaagatgagcgactggccaaagcaatggtcagtgatggttcctttcatattacccgtgctggtgatgcaattattaaatgaagatgaagtaaacattggtattgatgctcttttggaattgaaaccattcatagaagaactcctccagggaaaacatttgactttgccctttcaagggattggtacttttggaaatcaggttggatttgtgaagctggcagaaggagatcatgtaaactcacttttgggagatagcaggtactggactcaacagagtcttttctgccatagatcttctgaaaatgcctgagtgttccttctgcttagaccttttcattcttaggatctcaaatgtcaccacttcagagagtccctgcccactgtga

SEQ ID NO: 870 - DNA, 563 bp, Homo sapiens
agtggtggaacattttggctcgttttcacaattcagtcattatcctttctgctttcctcctggaagcattaaggttgaagttttcttctaaagatcaaagttttgatttgttatattagttcggatttgtttgatttttgtttgtgttcggtttcaagagctgatttgtaacttttctccccccccacacacacgccttttgacccctgaattatttaaaagtccattgttggagtggcaaacatcctccgagactcaaagggcaaggccatgggcgctttattccggctgctgctccaggaacgtgggaaagcagcggagttttattctaggggaaggaaacaaaggcggccgagtgccagctgcacgtttggtgggatttggtcatcaggggtggacatgctgcccaatggagctgtcggcagtttgacccagcttggtccgtcgcgtcctgttctaggaatccgattattcaaagaaggaatttagagggactgcagaaaatgttacaggtcttaacaccattttgcatttccgcaaacgaacaagaagttaatccctgg

SEQ ID NO: 871 - DNA, 3331 bp, Homo sapiens
  SIMILAR (918)..(3254): 1001254mologous to Homo sapiens zinc finger 41,accession number X60155,Smith-Waterman Score=4349.
ttaacttcttgttcgtttgcggaaatgcaaaatggtgttaagacctgtaacattttctgcagtccctctaaattccttctttgaataatcgattcctagaacaggacgcgacggaccaagctgggtcaaactgccgacagctccattgggcagcatgtccacccctgatgaccaaatcccaccaaacgtgcagctggcactcggccgcctttgtttccttcccctagaataaaactccgctgctttcccacgttcctggagcagcagccggaataaagcgcccatggccttgccctttgagtctcggaggatgtttgccactccaacaatggaagaggttaaactctcgctgctggcgacttccgcttcctggcctaaatctgacacgcacgactccccccgcggcaactgcacaggttcggtgacagccgagacgccgagtgtttcccgcagccggccggggtccaggtcggaaatgtagccagtggggccgccaggtgggcggcgcggtgtaagggcacccaccaggtgtaattgtgggcgagcggccgcttcggagctgacactaagcatgtgcagatcaagtccagaagcgccggggttcctcgaagcagttttcaggacttaaggctctgggacatccagcacagtgagcggcccctgggcaccaccagaaaacatttgtgggtgaacgtggagtgatgaccatgtggacactgtctttccagggtttcttggagcctctgcagagtctgggggccaggcttcttagtggaaactgcaggatcttccttctgacccctgcttgcctcgccccagcagctccggttgagtccacagatgccagctcagcttccagcttggggaagagtggggttgtcagcaggagagcctgagggctgaggcccagcgtgaacatggcagctaatggggactctcccccatggtccccggccctggctgcagagggacgtggcagctcatgtgaggcttcagtgtcatttgaggacgtgactgtggacttcagcaaggaggagtggcagcacttggaccctgcccagagacgcctgtactgggatgtgacactagagaactacagccacctgctctcagtggggtaccaaattcccaagtcagaggctgccttcaagttggagcaaggagaggggccatggatgctggagggggaagccccacatcagagctgttcaggtgaggctattgggaaaatgcagcaacagggaattcctggaggaattttcttccactgtgagagatttgatcaacccataggagaagattcattatgttctattttagaagaactgtggcaagataatgaccagctagagcaacgtcaggaaaaccagaataaccttttaagtcatgtgaaagtattgattaaggagaggggctatgaacataaaaacattgaaaaaataattcatgtgactaccaagcttgttccttcaattaaaagactccataactgtgacacaattttgaagcatactttaaactcacataatcataatagaaacagtgcaacaaagaaccttggcaagatttttggaaatggtaacaatttcccccatagcccttcctctactaagaatgagaatgctaaaacaggagcaaattcctgtgaacatgaccactatgaaaaacatctcagccacaaacaagctcccacccaccatcagaaaattcatcctgaggagaagctttatgtgtgtactgaatgtgtaatgggcttcactcagaagtcacatctgtttgagcatcagagaattcatgctggagaaaagtcccgtgaatgtgacaaaagcaacaaagtcttcccccagaaaccccaggttgatgtacatccaagtgtttatacaggagaaaaaccctatctgtgtactcaatgtgggaaagtctttaccctcaaatcaaacctcattacacatcaaaaaattcataccgggcagaaaccctacaaatgcagtgaatgtggaaaagcctttttccagagatcagacctctttagacatctgagaattcatacaggagaaaaaccttatgaatgcagtgaatgtggaaaaggcttctcccagaactcagacctcagtatacatcagaaaactcataccggagagaaacactatgaatgcaatgaatgtgggaaggctttcacaagaaaatcagcactcaggatgcatcagagaatccacacgggagagaaaccttatgtatgcgctgactgtgggaaggccttcatccagaaatcacatttcaacacacatcagagaattcatactggagaaaagccgtatgaatgcagtgactgtgggaaatccttcactaagaagtcacaactccatgtgcatcaaagaattcacaccggagagaaaccctatatatgtacagaatgtggaaaggtcttcactcacaggacaaacctcaccacacatcagaaaactcatactggggaaaaaccctatatgtgtgctgaatgtggaaaggcttttactgaccagtcaaatctcattaaacaccagaaaactcacactggagagaaaccctataagtgcaatggctgtggaaaagccttcatatggaagtcgcgcctcaaaatacatcagaaatctcatattggagagagacactatgaatgcaaggactgcgggaaagccttcatccagaaatcaacactaagcgtgcatcagagaatccatacaggagagaaaccgtacgtttgtcctgaatgcgggaaggcctttatccagaaatcgcacttcattgcgcatcatagaatccatactggagagaagccttatgaatgcagcgactgtgggaaatgcttcactaagaagtcacaactccgtgtgcatcagaaaatccacacaggtgagaagcccaatatatgtgctgaatgtggaaaggccttcactgaccgatcaaatctcataacacatcagaaaatccacactagggagaaaccctatgaatgtggtgactgcgggaaaaccttcacctggaagtcacgcctcaatatacatcagaagtctcatactggagaaagacactatgaatgtagtaaatgtgggaaagctttcatccagaaagccacactaagtatgcatcagataattcatacaggaaagaaaccttatgcttgtacagaatgtcagaaggcctttactgacagatcgaatctcattaaacaccagaaaatgcatagtggagaaaaacgctataaagccagtgactgagaaagtcttcacctggaaatcacaactgggtatgcatcaggtatctaatagcagggaggaggaaggcctgttgc

SEQ ID NO: 872 - DNA, 631 bp, Homo sapiens
  SIMILAR (319)..(600): 1001254mologous to Homo sapiens Protein sequence encoded by clone p199-7 (PL mutet.rsT4),accession number P93369,Smith-Waterman Score=542.
ttgggttgcgccctttcgggtgtgtgcatctctctttgcgctcctgtcgggtcccggtggccgtttcccgttgctgtcttctcgtttgctcgccgcgccctcgcctcgtcctggtcgtgtccgccttcttccgtctgtggtggcgtcggagctataccaccagtcctatgactgcatctgcgtcatgtttgcctccattccggatttcaaagaattttatacagaatccgacgtgaacaacgagggcttggaatgccttcggctcctgaacgagatatcgctgactttgatgattcaggcaccgtgtatgaaatctaacaatgcgctcatcgtcatcctcggcaccgtcaccctggatgctgtaggcataggcttggttatgccggtactgccgggcctcttgcgggatatcgtccattccgacagcatcgccagtcactatggcgtgctgctagcgctatatgcgttgatgcaatttctatgcgcacccgttctcggagcactgtccgaccgctttggccgccgcccagtcctgctcgcttcgctacttggagccactatcgactacgcgatcatggcgaccacacccgtcctgtggatctacccactagtcaattcaccatcttgttga

SEQ ID NO: 873 - DNA, 503 bp, Homo sapiens
  SIMILAR (477)..(259): 761254mologous to Homo sapiens methionine synthase reductase,accession number AF121214,Smith-Waterman Score=266.
aaatgtgtagcagctctgacttcacaaggtctgtcctcgaggatgcaggtgatgccaccgggagtgcgccacttatctcctcttgtcctctgcttgacctaaaatgctttctgagggctggccagagtccagcaatccacggctcaaccacaagttctaaacctacacagtcatctgcatgtccagtgtcatagaaatgccgggctccaagctcttgaagtcgtttatcaattatcttccccccattgcaaaagtaggtgtattttgaatcaccgagaccttatcggattcactaatacagtgaagatctgcagaaaatccatgtaccacagcttgctcacatatttcttctgcgatggcctttgcctgtccctgctgtgtagcatatagtaacagaaacctcctcatcacttcaaggcatgtaacagtgaaaccacgccgcgccagccgggcacgaacctgcacaacgcgacttccaccaaccttgcgccagcgcgacgaaa

SEQ ID NO: 874 - DNA, 3259 bp, Homo sapiens
  SIMILAR (80)..(2173): 1001254mologous to Homo sapiens methionine synthase reductase,accession number AF025794,Smith-Waterman Score=3624.
caaggttggtggaagtcgcgttgtgcaggttcgtgcccggctggcgcggcgtggtttcactgttacatgccttgaagtgatgaggaggtttctgttactatatgctacacagcagggacaggcaaaggccatcgcagaagaaatgtgtgagcaagctgtggtacatggattttctgcagatcttcactgtattagtgaatccgataagtatgacctaaaaaccgaaacagctcctcttgttgttgtggtttctaccacgggcaccggagacccacccgacacagcccgcaagtttgttaaggaaatacagaaccaaacactgccggttgatttctttgctcacctgcggtatgggttactgggtctcggtgattcagaatacacctacttttgcaatggggggaagataattgataaacgacttcaagagcttggagcccggcatttctatgacactggacatgcagatgactgtgtaggtttagaacttgtggttgagccgtggattgctggactctggccagccctcagaaagcattttaggtcaagcagaggacaagaggagataagtggcgcactcccggtggcatcacctgcatccttgaggacagaccttgtgaagtcagagctgctacacattgaatctcaagtcgagcttctgagattcgatgattcaggaagaaaggattctgaggttttgaagcaaaatgcagtgaacagcaaccaatccaatgttgtaattgaagactttgagtcctcacttacccgttcggtacccccactctcacaagcctctctgaatattcctggtttacccccagaatatttacaggtacatctgcaggagtctcttggccaggaggaaagccaagtatctgtgacttcagcagatccagtttttcaagtgccaatttcaaaggcagttcaacttactacgaatgatgccataaaaaccactctgctggtagaattggacatttcaaatacagacttttcctatcagcctggagatgccttcagcgtgatctgccctaacagtgattctgaggtacaaagcctactccaaagactgcagcttgaagataaaagagagcactgcgtccttttgaaaataaaggcagacacaaagaagaaaggagctaccttaccccagcatatacctgcgggatgttctctccagttcatttttacctggtgtcttgaaatccgagcaattcctaaaaaggcatttttgcgagcccttgtggactataccagtgacagtgctgaaaagcgcaggctacaggagctgtgcagtaaacaaggggcagccgattatagccgctttgtacgagatgcctgtgcctgcttgttggatctcctcctcgctttcccttcttgccagccaccactcagtctcctgctcgaacatcttcctaaacttcaacccagaccatattcgtgtgcaagctcaagtttatttcacccaggaaagctccattttgtcttcaacattgtggaatttctgtctactgccacaacagaggttctgcggaagggagtatgtacaggctggctggccttgttggttgcttcagttcttcagccaaacatacatgcatcccatgaagacagcgggaaagccctggctcctaagatatccatctctcctcgaacaacaaattctttccacttaccagatgacccctcaatccccatcataatggtgggtccaggaaccggcatagccccgtttattgggttcctacaacatagagagaaactccaagaacaacacccagatggaaattttggagcaatgtggttgttttttggctgcaggcataaggatagggattatctattcagaaaagagctcagacatttccttaagcatgggatcttaactcatctaaaggtttccttctcaagagatgctcctgttggggaggaggaagccccagcaaagtatgtacaagacaacatccagcttcatggccagcaggtggcgagaatcctcctccaggagaacggccatatttatgtgtgtggagatgcaaagaatatggccaaggatgtacatgatgcccttgtgcaaataataagcaaagaggttggagttgaaaaactagaagcaatgaaaaccctggccactttaaaagaagaaaaacgctaccttcaggatatttggtcataaaaccagaaattaaagaaagaggattaagcttttttgactgaaagtactaaaagtcagctttactagtgccaaacctttaaattttcaaaagaaaattttctttcaacatttcttgaaggacatggagtggagattggatcatttaacaatataacaaaacttcctgatttgattttacgtatcttctatctacgcccttcctgtgcctgtgactctccccaaattgccctgttgccttgagctcttctgagctaaaggcagccttcagtccctatcagcgcctcctttacttcccagagaacttcacagagactctgtccttccatgcaaaggcttcctgaaataggggagactgactgagtagctcattcttgtgacttacagtgccaacatttaaaaaagtatgaaaatgatttatttttatatgatgtatacccataaagaatgctcatattaatgtacttaaattacacatgtagagcatatctgttatatgtttatgtaactatcaaatggttatttgttactaaagctatatttctgataaaaaatattttaggataattgcctacagagggatttatttttatgatgctgggaaatatgaaatgtattttaaaatttcactctgggcatatggatttatctatcaccattacttttttttaagtcacaatttcagaattttgggacatttgcattcaatttacaggtaccagtacgtacatattttaatagaaagatacaacctttttattttcactccttttatttctgctgcttggcacatttttgagttttcccacattatttgtctccatgataccactcaagcagtgtgctggacctaaaatactgactttagttagtatccttggatttttagattccccagtgtctaattccctgttataatttgcacaaacaaaacaaaatgttatgataatctttctccactgttctaatatatattgtatttttatttgatagcttgggatttaaaacatctctgttgaaggcttttgatccttttgagaaataaagatctgaaagaaatggcataatcttaaaaaaaaaaaaaaa

SEQ ID NO: 875 - DNA, 1835 bp, Homo sapiens
  SIMILAR (539)..(586): 1001254mologous to Homo sapiens adenylyl cyclase,accession number AF070583,Smith-Waterman Score=84.
atgggggctgcttccctgcagaacactgccctgaggatgaacgacttcctgggaccaaaactgacaggtagtctcctagtgatcagctcttgcttttctcccaagcaggagctataccaccagtcctatgactgcgtctgcgtcatgtttgcctccattccggatttcagagaattttatactgaatccgacgtgaacaaggagggcttggaatgcctcggctcctgaacgagatcatcgctgactttgatgatgtagtctctacaccagccctcaaacatgcatgtgcttttgtgcagaccacctgggtcctatccacatcctctccagctaccaccttagtagcagcttttctctaccttgctgtcaccttgaatggtgcttatgtctacagtctccatctatcttctcacccgtcccttctgatcactgagagttgggctttctcttcactttccgtaaaggaaagtgacccaggagcccgagcggagtacatgcacattggcaccatggtggagtttgcttttgccctggtaggaagctggatgccatcaacaagcactccttcaacgacttcaaattgcgagggcgaatgttctcttggagatgccgttagccaccagaagtcacagtggtgccactgcaagtgtgactgtgcggaggacttcagctggcctgtgtggctggggaaggctctggagaactcgttttcagacgacaggctgtcacggaagctgaagggcgcatttgggttaccgagagacgagcctcgtcctgcagaccctcggatacacgtgcacctgtcgaggataatcaacgtgaaaggaaagggggacctgaagacgtactttgtaaacaagaaatgtcaaggtccctttcccagagcaacgtggcatcctgaagagtcccttcattttggcaagaagactgtattttcaggaagagcaacttccagtcctgcaagcttcatcatggttctcaaggttgggcagtccaagatcaaggcgctggcagatttggttctggctgtccagccccgcccctcggaacccaccctggtagtgaagccctgcccccagggtccctgcccgaaggaagcttacagtctggagaagacacagaaagacgcgaagaagccaaatgacttgccgaggctccagggcagcgcttccaatagaaacatgatgagagccacgtgtgtcgtttcttatttgactccaaacgcggggcgggagcacgactcagggcggcgcaatgtgttggcccaggtccccttcggagctttctattggtcctgggtaccgagcagggcgctgcgtcagtgcgcgctggcgcaaggttggtggaagtcgcgttggcaggttcgtgcccggctggcgcggcgtgggcgctttccaggcctagggaaaccgcactcgggacgcggggaactggggaacatgccgggttggggcggcgcgctccggggacccgggacgttccgagcgcccacccggcgggacgcggccgtgagttctgccgcggccgtgagctctgcccaccgcctccgcgccgcttccggggctgcggggcccgggcctccgctgagagtcgtgggaaggtggtgccggattgtgggcagtagcagggatgaggggttgattgatcctgggaagccctcaggattgtgtttcatgggaagtgatagaaattttagctgtacagggacggcaaaggccatcgcagaagaaatatgtgagcaagctgtggtacatggatttctgcagatcttcactgtattagtgaatccgataaggttagagccgtacagtggattttaccgttttgtgctttga

SEQ ID NO: 876 - DNA, 277 bp, Homo sapiens
  SIMILAR (257)..(9): 511254mologous to Homo sapiens putative p150,accession number U93569,Smith-Waterman Score=232.
atgtccctctttgtctttttaactgttgttgctttaaagtctttttgtctgatataagaatagctactcctgtgtccatttgcatggaatatctattcccacccctttaccttaagtttatgtgagtccttatgtgttgggtgagtctcttgaagacagcagatacttggttggtgaatttttattcattctgctattctgtatcttttaagtggcacatttaggccatttacattcaatgtgggtattgagatgtgaggtactatgctattcatca

SEQ ID NO: 877 - DNA, 741 bp, Homo sapiens
  SIMILAR (741)..(688): 1001254mologous to Homo sapiens A snake venom protease (SVPH- 3) polypeptide,accession number B07737,Smith-Waterman Score=92.
atggcagaatggataacaattcatcaaccaagtatccactgtcttcaagagactcaccaaacacataaggactcacataaacttaaggaagtagtagctaaatcagtacaaccctttgatcttggaggcctccgaagagacttggtgcagatttcagccactctagctccagccatggctaaaagggtcccagacatatgtcaggccactgctccagaggatgcaagctgtaagcctcagtggcttccacgtggtgttatgcctgcaggtgcacagagggcaatagctgaggactggggacctccacccagacttcagaggatgtatgaaaatgcctggatgtccaagcagaagtctgctgcaggggaacacaaaagaagcccagaaaaaggtttcaagatcccataccctgccactgtgaatgagagacagtttcttgatgctgattttcctccaggcccccatcacagcctggtttcaattttggtttttactaaagcccttactccctctagtgggaagacggagctgtgcagcatccgtagcaagctttttgatggaggaactgtgttctttaatcagttagattctgaatttatcctcaggaatgagtatcgcagtgggggtctaccagctgagactctaggggccagggcagaggaaggagatgccagagcccacactcaccagtccatggcaggcactgagggctgccgtcccaactctggtgccctgctgtag

SEQ ID NO: 878 - DNA, 277 bp, Homo sapiens; identical to SEQ ID NO: 876
  SIMILAR (257)..(9): 511254mologous to Homo sapiens putative p150,accession number U93569,Smith-Waterman Score=232.

SEQ ID NO: 879 - DNA, 1281 bp, Homo sapiens
  SIMILAR (979)..(1065): 511254mologous to Homo sapiens putative p150,accession number U93570,Smith-Waterman Score=98.
atggcagcttttgctaaccactgcccctcaaggtgcaccgtgctcctcactgagccaccggactttgggtaccctacaggtggtgttgagtctggtccccagcagaatctcctgggagccagccataaatcttcccaaaatgagggtgtgcaatctcattgctctggaggcacgctgcttgcccttggagccgacctgtcattctgcatcctccaggctctgcctggagccagaaccaagcccagggagaggtggacaggagttggcagtcactgtgaaggaacacatttttatcatttaattaagagcctctcagaaaagcgagctctgtttcttcttgagctgagtctgagggaactgacccgcaaactcactgagctccacagagttgcacctgggggcccaaaaggggctgtcctggcctggtacaaagacccccggcagaagagctcaaatgtcctcaattctcccccagtacggggcacccaaaacatgcagctccattttaatgagcagctgctgtccttttttggctgctatgggtcagctttgcccaggatgcaacctctggggagcctgaatccagctggcagattagctcaaaagtgccaaattgcatcatccaaggctctggaagttatccatcctcaggcacaattcttcttcatctgtgaacctgggaaattcaagaaacaagttatctactcccaaaatacaaaggtgagatcggcatgggataacagtgaacctgggaaattcgagaaacaagttatctactcccaaaatacaaagacatgcttacgaattcgtgctcggtaccctccagtaattaaaaagaccatggtggggatagggcggaaagttatgttcaataaataccttttaaatgatttaaatgggcgcttccttctccagcgcacacacgtactcctgaactggacacctggcaaggccaaggaaaaaggaaaaactcttttaattgcagaatggataagaattcaccagtcaagtatctgctgtcttcaagagactcacctgacacataaggactcacataaacttaagcactgtgtttgctgtatcccagagggtttgatagattgtgtcactattattgttcagttcaatgaatttgttaatttccatcttgatttcattgctgactcaacggtcattcaaaagcaggccacttctgccccaccttctgagcagatgctgctaaaaagacaggatggacacttcgttctgaaggtgtttctcagcatacggcaagccctttga

SEQ ID NO: 880 - DNA, 1910 bp, Homo sapiens
  SIMILAR (1134)..(1907): 1001254mologous to Escherichia coli Putrescine transport protein,accession number D90708,Smith-Waterman Score=1344.
tcaaaaagctaaacggaggcccacagacaagctaagccttaaactctcgacaaagcgaaacgtgaattcgcggaaaaaaacaaagttagcaatccacaagccggttatgctcaaaaccccccagggctgaaaaagcccgccgtgagcaggaagctgcagagctcaagcgtaaagctgaagaagaagcgcgtcgtaaactcgaagaagaagcacgtcgcgttgctgaagaagcacgtcgtatggcggaagaaaacaaatggactgataacgcggaaccgactgaagattccagcgattatcacgtcactacttctcaacatgctcgccaggcagaagacgaaagcgatcgtgaagtcgaaggcggccgtggccgtggtcgtaacgcgaaagcagcgcgtccgaagaaaggcaacaaacacgctgaatcaaaagctgatcgtgaagaagcacgcgcagcagtacgtggcggtaaaggcggaaaacgtaaaggttcttcgctgcagcaaggcttccagaagcctgctcaggccgttaaccgtgacgttgtgatcggcgaaactatcaccgttggcgaactggcgaacaagatggcggttaaaggctctcaggtcatcaaagcgatgatgaaactgggcgcaatggcaaccatcaaccaggttatcgatcaggaaaccgcacagctggttgctgaagagatgggccataagttatcctgcgtcgtgaaaacgagctggaagaggcgcatgaatccgcaagaagccaactacgcctatttacgcggtgaagtggaactggttcgtctgccggatgcagaaggccgtatcgctgccgaaggtgcgcttccttatcctccgggtgtgctgtgtgttgttccgggtgaaatctggggtggtgctgttctgcgttacttcagcgctctggaagaagggatcaacctgctgccaggttttgcaccggagctgcagggtgtctatatcgaagaacatgatggtcttaaccatactgacgatggtcaacatgatgggctccggtatcatcatgctgccgacaaagcttgccgaagtcgggacaatctcaattatctcctggctggtgacagccgtaggctcaatggcactggcatgggcattcgcaaatgcggtatgttcagccgtaaatcaggcggtatgggcggttatgccgagtatgctttcggtaaatccggtaactttatggcgaactatacctacggcgtctcactgctgattgctaacgtcgcgattgctatttcggcggttggttacggcaccgaactgctcggcgcgagtttgtcgccagtgcagattggtcttgcgaccatcggggtgctgtggatttgtaccgtggctaactttggtggtgcgcgcattaccgggcaaatcagtagcattaccgtgtggggggtcattattccggtcgtcggtctgtgcattattggctggttctggtttagcccgacgctgtacgttgattcctggaatccgcatcatgcaccgttcttcagtgcggtaggttcttccatcgctatgacgctgtgggcttttcttggtctggagtctgcgtgtgcgaatactgatgtagtggaaaacccggaacgtaatgtgccaatcgcggtactcggcggtacgttaggtgcggcggtgatttatatcgtctccaccaacgtgattgccgggattgtgccaaatatggagctggcaaattcaacggcaccatttggtctggccttcgcgcagatgttcacgccggaagtgggtaaagtcattatggcgctgatggtgatgtcctgctgcggttcgctacttggctggcagttcaccattgcccaggtgtttaaatcttcatctgatgaaggctacttccctaaaattttctcccgtgtaaccaagtga

SEQ ID NO: 881 - DNA, 1449 bp, Homo sapiens
  SIMILAR (1165)..(1046): 921254mologous to Actinobacillus actinomycetemcomitans translation initiation factor IF2,accession number AJ289685,Smith- Waterman Score=175.
atgcccctgtacttcctcacctactcccggtaccctggacttatgtcccacctatataatggggacaaaaatggtcatttggggcaaggaaggaccttgcctgctgccactgaaggcagtgaggagagctgtggcgatgcaaaaacaaagtgtgcggcagtagaagagcaagctctgaacccccacactcttgctgtcagaatgacttaccgcaaactgcacacgactccccagcttgcaagaactcgttctggcttctgctcctggctcagcctcctgaagcccggaatcaaggcttctcctcccttgctcctcacccaagagatgtgtattgtcactgttagtctgatgtcccgacaattaaactgcaaagagaaaaggccagtcatgcagaaatccaacagcctggcctctgggatccgcccacctagcaatgggtccagtgagaaacccagttcccattatcctcaatactggattcacttgctcatcctagaagtcacagaagcacagcactggcatgcaagaggcccacaggaaatatctgtggcatcgacccgtgagccagaggagaagcacctggcctggaggggacagttgtccggctgctggcagccatgttatgaagggggccaaatcgggaaaggtgcagtgaccagcgaggccctcaaggaccccgacgtatgcacagatcggttgattgattgcagggaagaatctcggacctcgcctcggagctatcgcaggcaccaccatcccacatcccaccaccaccccggcatgctcagcggagccccgaggccagccagaccgacttcccgttgcacttgcaagctgcccgcaatacgtcatggcgaccaaacgccttttggggctacccggacgtgggccggctggggggcctgggagctcctaaacccgccacttccggaagactcctggcccgggattatgccaagaaaccagatggctactgggagagttcgttcttaacgcgatcggatcagcttctggtttatcgatcttgttcactgcaactatactccggttgctgcgcagctttcgcgtgctggattgcttcgatggtctgcggcatcacaccgtcgtcggcagcaacaaccaggactacgatgtccgttgcctgcgcaccacgagcacgcattgaattcgccaacggtgatagtttcgccggatcacaacgtccagttaacggcctcgagcagcttctggaagcttgctgacctgcaggcaacgttgggcatgaatacgattctatctcgttacaagcgcatctctagagctcctctgcagccgggccgcatgccctttccatcgatcaatcaagtccggggtgcaaacggtctggttggtgagatcgaggccatcatcactaatggaacgccggaggtgaacactacgcgtgcggcttccgatcggcaaagatgttga

SEQ ID NO: 882 - DNA, 717 bp, Homo sapiens
  SIMILAR (141)..(413): 641254mologous to Homo sapiens Human secreted protein, SEQ ID NO: 5911,accession number G01830,Smith-Waterman Score=258.
tctagatcgggggcggccgttcgcgatctaaaactagtcggacgcgtgggcggacgcgtgggtgcacttgcaagctgcccgcaatacgttatggcgaccaaacgccttttcggggctacccggacagtgggccgcatcggggggcctgggagctcctaaaccccgccacttccggaagactcctggcccgggattatgccaagaaaccagttatgaagggggccaaatcgggaaaaggtgcagtgaccagcgaggccctcaaggacccccgacgtatgcacagatcctgtccatgctcaccacatatgccatgggcgttcaacatttacaaggaagggcaggattgtaccccttgaaaaccgggatgctgagtaccctgaatggctgttcgagatgaacttgggtcccccaaagacccttggaaggaagcttggaccccgagaagcccgggagtacctggccggcggcttgcgggaaaacaagaacatcttggcgccacaacctggcttgagcaaagaacaaagaggttgtagcatgggaggggcccggcattcgctgacccccacgccgaagggcttgccgtttttcccggaggaccgtggacttttgtgagacaagaggcggctccccagcctgggtttccaatgtgacccccacaagtggggcttgaccaaggggccctggaaggccaattaaagagctttctgggtaaaaaaa

SEQ ID NO: 883 - DNA, 499 bp, Homo sapiens
  SIMILAR (420)..(349): 451254mologous to Human immunodeficiency virus type 1 tat,accession number Y16020,Smith-Waterman Score=66.
atgaacaaattggacaaaggtgtctgtcctcttgaaattaattgtccagcagggaaacctcactctttgtcttcctctcctactgcccttgatgcgaccctgccacactttactggctgttccttcttgctgatccaggagatcatgaatcagacagataaaaatcaacaagaaatcccatcataccttaatgatgaaccaccagaaggttcaatgaaagatcacccacagcagcagccaggcatgttgtcccgtgtgactgggggtatcttcagtgttacaaagggagctgttggtgccaccattggtggtgtggcttggattggtggaaagagtctggaagtgaccaaaacagctgttacaactgtgccttccatgggaatagggctggtgaaaagggggtgtctctgctgtggctggaggtgtttacagctgttgggtctgctgttgttaaacaaagtgcccttaacaggaaagaagaaagaccaaatctgactga

SEQ ID NO: 884 - DNA, 1308 bp, Homo sapiens
  SIMILAR (261)..(377): 891254mologous to Homo sapiens peptidylprolyl isomerase,accession number X52851,Smith-Waterman Score=191.
atgttcttcgacatcgccgtcgatggtgagcccttgaggtgtgtctcctttgagccttttgcagacaagtttccaaagacagcagaaaactttcatgctctgagcattggagagaaaggatttggttataagggttcctgctttcagataattattccagggtttatgtgtcagggtggtgacttcacacgccataatggcactggtagcaagtccatctacagggagaaatttgatgatgagaacttcatcctaataaaacaggtcctggcatcttgtccatggcaaaggctggatccaacacaaacagttcccagtttttcatctgcactgccaagactgagtggttggatggcaagcatatggtctttggcaaggaagatcccacttacaatactatgcttatttgacctgactcagacctcacctagcatgaactgcctttttcctggggagtttctcaaaaatactcagaggcatctgtttaacattgtagctgtcttgggggtaaaaacagttgggggaaccaacaagctaactgaaagcttaaaaggaaaaggctcaagctatcctcctgatagaggtggcaacaaatctgaagcagctgctgtaaggaagccagcagtggaggaggtgcaggcagggctgcgtgctccgtggagctgtcaggggctaggaacaggctcaagtgctggcagtggttgtggcaggtcaggcaggcaggtcctcagggccctgggtagcacttgtggtattggctgtggcagtaatgtcaacaggctggccctcaggcccctgggtggtatgcatgagtgccagcggaggtgccaatgggctagtcagcccagtctccaggctcctaggtggcatgcatgggtgggtgttggcaatggcagtgatgggtgggttgggcctgtccttaggtccccagaggtgcatgcaggcgctggcagcatgagtggacttggcagtcaggcaccgtgtatgaaatctaacaatgcgctcatcgtcatcctcggcaccgtcaccctggatgctgtaggcataggcttggttatgccggtactgccgggcctcttgcgggatatcgtccattccgacagcatcgccagtcactatggcgtgctgctagcgctatatgcgttgatgcaatttctatgcgcacccgttctcggagcactgtccgaccgctttggccgccgcccagtcctgctcgcttcgctacttggagccactatcgactacgcgatcatggcgaccacacccgtcctgtggatctacccactagtcaattcaccatcttgttga

SEQ ID NO: 885 - DNA, 594 bp, Homo sapiens
  SIMILAR (25)..(237): 831254mologous to Homo sapiens p10-binding protein BITE splice variant,accession number AF289495,Smith-Waterman Score=289.
atgtttccggtagcccctaaaccccaggattccagtcaaccatcagacagactcatgactgaaaaacagctagagcaaagccgagcagccaatcaagaacaacgagctaatgacttggaacaaattatggaaagtgtgaaatccaaaattggtgaattggaggatgaatcactaaatagggcttgccaccaacagaataaaataaaagatcttcaaaaggagcagaaaactttgcagactcatcaaaaccgggactcaacagcccctgcatctccacattcctggagccccactgacatcctcccaccaccacctagagggctgcagcattgcaatgccagctggacccagtgctatggccagttcctcagcactctagcccacaaggacaggcccaacccacccatcactgccattgccaacacccacccatgcatgccacctaggagcctggagactgggctgactagcccattggcacctccgctggcactcatgcataccacccaggggcctgagggccagcctgttgacattactgccacagccaataccacaagtgctacccagggccctgaggacctgcctgcctga

SEQ ID NO: 886 - DNA, 678 bp, Homo sapiens
  SIMILAR (23)..(301): 351254mologous to Homo sapiens Human secreted protein, SEQ ID NO: 8112,accession number G04031,Smith-Waterman Score=120.
atgccactgcagctggcctgggcaacagagcaagactctgttgaaagaaagaaagataaaagaaagaaagaaagagagagagagcacacgcacgagagagagaaagcagcgcaagcaacgagcacaagcagcagagagcaagagacaaagaacgccagcacgcaaccacagggcagcaaagcccagccaagcaagcaccgcagaagcaaggaaagacgcacgcaccgcccgggcccagcccccaaaggagaggaaagaagggaaaggaaaggaaaggaaaggaaaggaaaagaaaggaaaggagaagaaatgaggaaactattgggaaccagagcaaagctgttatggaagctatattactgtgtgagttgtgcaactcacaacaaagtagtcaggatcgatctcatgaaggagaaggatcgaacacctccaccccaatttagactgcgggtgctgccccatgacccccaccaaagcccatccgggaacaaatatgacatccaaacgaattatcacaaattcaaaacggtttcccatctggcaacaggccgcactatatggcccaccatcgtcaagctcttgccgagcgctcaaccctacgggcggccagtggctgaacgtgtccgcctcaaaatacaaacaattaatgaaatgaaaggtgtttcttcaaaaagataa

SEQ ID NO: 887 - DNA, 297 bp, Homo sapiens
  SIMILAR (19)..(297): 1001254mologous to Homo sapiens ribosomal protein S26,accession number X69654,Smith-Waterman Score=484.
ggtcgacgtgcctccaagatgacaaagaaaagaaggaacaatggtcgtgccaaaaagggccgcggccacgtgcagcctattcgctgcactaactgtgcccgatgcgtgcccaaggacaaggccattaagaaattcgtcattcgaaacatagtggaggccgcagcagtcagggacatttctgaagcgagcgtcttcgatgcctatgtgcttcccaagctgtatgtgaagctacattactgtgtgagttgtgcaattcacagcaaagtagtcaggaatcgatctcgtgaagcccgcaag

SEQ ID NO: 888 - DNA, 685 bp, Homo sapiens
  SIMILAR (597)..(121): 381254mologous to Homo sapiens ubiquitin,accession number X63237,Smith-Waterman Score=112.
gcgtcgactttttttttttttttttttgttagttcatgtcttttattaactcatacaggtaacttggtctttctggtttgttgaaaacagtaaagtcaggacaaccatttgccacaataaatgtctgtcaaaagtgacttggccataaaaacccccagcacccacattccatcagaaagggcactctcggacggaaggcggacttaattttgcccattcttcaatccaccttaataatatttccagggcaagcccagctttaaccttcttttctctttgtgctttattcttccttgggagggggtgtaaagacttcttcttcctttttcttagcaccacccacgaagtctcaacacgaagatggaagagtaggactcctttttgaataattgtaggtcagaccaaagtacgtcccatctttccaggctggcttggccagcaaaaggatcagtctctggctgattcagggagggaattcccttccttaatcctgggatcttggggccttttacattttctatcggtatccgagggggttccacctcgaggggtgatgggggctttccccgtaaggtgtttttcacgaaaaatcggcattttggggggcggctccacctgaggttgaggaaaaggaagagacaggttaggtcagggatcacaagagaagcgaccatagggtgctaac

SEQ ID NO: 889 - DNA, 414 bp, Homo sapiens
  SIMILAR (201)..(233): 901254mologous to Homo sapiens dJ475N16.3 (novel protein similar to RPL7A (60S ribosomal protein L7A)),accession number AL035587,Smith-Waterman Score=59.
atgggctgcggaatggatgtcgtgttagcaggcacaaaaaccacattcatctccttgtatatctccgtcagagctcccagaaaatctcctgaaaaagaggaaggcttattaagccttcagagctacccaggcaaagcaggtacttttggcaaagaggaacaaaggaaaggaaaagggctcaggtttaagggactggaatcctacatgattcctggcggcagaaacatgacaagtctgcagtctggccctcggtggtcctgcagatctggtgttgattttgcagggtgtttggaaaggaaattgtctgtcttcaacaacctagtcttgtctcctccagagaaaagttttgaatcctctgaggagcggtctgtcgccattgtggcctgtggtcagtgggtcagaccagagccctga

SEQ ID NO: 890 - DNA, 659 bp, Homo sapiens
  SIMILAR (4)..(654): 891254mologous to Homo sapiens dJ475N16.3 (novel protein similar to RPL7A (60S ribosomal protein L7A)),accession number AL035587,Smith-Waterman Score=953.
  misc_feature (1)...(659): n = a,t,c or g
gcacgagagcaaagaaaaatccctttggttccagaaaatctcctgaaaaagaggaaggcttatcaagccctcaaagccacccaggcaaagcaggcacttttggcaaagaaggagaagaaaggaaaagggctcaggtttaagcgactggaatcattcctacatgattcctggcggcagaaacgtgacaaggtgcgtctcaaacgactagaagtgaaacctcatgccttggaattgccagataaacattccttggcctttgttgtacgcatcgaaaggattgacggcgtgagtttactggtgcagagaaccattgcaagacttcgcctaaagaaaatttttagtggtgtctttgtaaaagtcaccccccagaatctaaaaatgctgcgtatagtggaaccttatgtgacctggggatttccaaatctgaagtctgtccgagaactcattttgaaacgtggacaagccaaggtcaagaataagaccatccctctgacagacaatacagtgattgaggagcacctggggaaagtttggcgtcatttgcttggaagacctcattcatgaaattgccttccagggnagcatttccaggagatctcatgggtcttgtgcccttntcaactcttaatggcccgtcttgctaccaaaaatagaggggg

SEQ ID NO: 891 - DNA, 1051 bp, Homo sapiens
  SIMILAR (822)..(655): 561254mologous to Homo sapiens BM-007,accession number AF208849,Smith-Waterman Score=115.
tccatttgttgcttgtactttggagtcttttttttttttttaagtgaagattgttttgatatcatcagcatctgctgcaaacttaaaccacttttgggactttcttttctcttttgtctctaccaaacttttagcatcattccctgattctaaatacattttccaccttctttttacatgtcttttacaaatttgagctttttttttaagttttaaaacttttataagttcagtgttgtcactgtatgtttacatattcattgatacaatttacatccgagatttttacttatccatttttgcaaagatatgtacacaaagataccatattcaataactggggaaacaagtgaaacttctgatctatacctttcagggttgggttcgatcatgacacttctgataaagggatccatcaacgtaccagtttcacctcttccagaaggacgtcgtcatgttaatcctaaagagtttactctggggttttattgccagaatacaaattcccctcaatcgcttcttccttgcaggtgttcttttttccataattttttttcttataggccagccttttctccttcaccccaaagggccacaaatgaaggtcggaggaaacctatagatggaccagctttcacaatccctcctccttgcccttttccctggtactgaccgtatgttagagatcctggctggccagccttcaagacaacttggaagcaagagggcccactcctattaaggatcactgaggtatgccccacatgtcaggtttctctcagatgtggtaagtctgggagtggaggaaacaactggtgtctggaatatgactaaaacgtccagtggacaatgcagaaataagagaggcatttttgacacagttttggtaggctgaagatgccaaaatattcagaggccataagattcctgaagctgctctcactgcaccggcaaaggcagaggcagctatctcgttatcctccaaatttgagctcttattaaagagttttctgcgtgctctgctatattttttcaaaaggtccctccacat

SEQ ID NO: 892 - DNA, 1338 bp, Homo sapiens
  SIMILAR (1100)..(1150): 761254mologous to Homo sapiens PRO1310,accession number AF116657,Smith-Waterman Score=71.
atgtatgggaaactttccttgaggggtttcgtgcctcttggtgcaggtgcggcagtaaacctggagaaaggccagtgggaaggtgagagtggagactgtggggagcagtttgaacttctgcctatccatgagacttggaaacaaaagaccctaagccccagagggttgatggaaaatggggtggaagaaagggagagcagggcagctcacatgagagcagttaagggacaaggccctgaaggcatcacagaggcatcagtgatgcttttttttcctcctccactccagtctgctccgcagaaccccatgtcctcagataaaatgccaccaaaaagtctgaaggcacctaccagccatcctgctgaagataacctggatttgcatcttctggatgggatagaagctgtgactaatactgagccatctagggcagcagcccccaacctttttgacaccaggaactggtttcgtggaagacaatttttccacggacttgggactaatcttatgctcaatatggaagataatcataactcatcactctggattataactgcttacatatgtctttcttatgagataatgcaccttgaaggtgccagtccaaataccagacacatgagaatgtggatagatcctcgagttctctccgaaccttccttccatgaagttatatactctatagaatcagtggtattcatcaaactcggtgctgcaggatcgtgtggggagggaggagagtgtaccgccagtgttcagaaagcagaaaatcctagaacctcctttcacgttgaccgaggttgtcttgcctccagaaataagagattctgctccatgctggcgggggcatttgagacatggagcacacacagagttctcaacaaagataagggcccttggctgacaggaacctccaaacgcgaagtggaagatggagtttacattcatacagcaagcactagaagatgcggtatactcacagtgccaggagtgccattccagaagatgtcccagaaacagagactaggcctgggtaaggccttgacaatggaaatgcaacagatgaaactaagcagggtccatgagcgaggagcacaggccaaggctcaagcaatcctcccatctcagcctctggagcaactgggaccacagatgagtgtaaggccattatcatggactttttccccagctgcagagtacagccagcagctggaagagattgacgggagatggcagaggaaagaggaaaagagaagtcagagcttaaagaatgcccgtatcaaaaaaagaaaagccttagggagacagaggaaaagacagcgtgaagggagaagttga

SEQ ID NO: 893 - DNA, 364 bp, Homo sapiens
  SIMILAR (231)..(326): 401254mologous to Vibrio cholerae Vps70,accession number AF093232,Smith-Waterman Score=61.
agtttcttcaagaaaaacttaactgatagtgtggccagtaccttataattaattttcttccccaatccttgcaagcatgaaaacaaacagtaaatttttcatttgttcatcagtttcgaacaactgtttagcagagatatgcttgattaatggatttaatttgttcctttcttctgtagtcggttttcatattacattggttatcagaggataggacaataacgtgggcattctcatcgcagtccactccatcagtgtcagtgctggcttctagctccgggtctacatctttaacctttgtcgtcctgcagaatctttcatcaatctgtgttacagtcacctgtgctttcttccagctcgtgcc

SEQ ID NO: 894 - DNA, 601 bp, Homo sapiens
  SIMILAR (70)..(378): 371254mologous to Homo sapiens placental protein 13-like protein,accession number AF267852,Smith-Waterman Score=108.
atgcacgtggccttctgtgcatgtgaaggttcctccccacacagcagcacctctgatgaagcacctgtgtgtcttttcatgtgtggcaatgtggatcccaagtggcttaactgcaaggacccacagctggaggtgaatttctacactgggatggatgagggactcagatattgctttccaattcccgactgcactttggtcatcctgcaatcatgaacagttgtgtgtttgggcatatgggagatatgaggagaaatgcttacttattttaccctttggaaggatgggcaaaccattttgaggctgtgcatcctatgtggcgttcacaagggaatacaagggtaatgggtaaatgggccaacggcattttacaacttttgccccatcggatttcccgcccagcatctgtgaagatgctgcaagtcttgagagatatctccctgaccagagtgcttatcagcgattgagggagatgatcagactcctcattgttgaggaatccctctttctacctgaccatgggattcccagagcctactaacagaataatccctcctcaccccttcccctacacttgatcattaaaacagcaccaaacctc

SEQ ID NO: 895 - DNA, 666 bp, Homo sapiens
  SIMILAR (187)..(14): 331254mologous to Plasmodium fragile Knob protein,accession number X97501,Smith-Waterman Score=70.
  misc_feature (1)...(666): n = a,t,c or g
gactgcaggctgnggctccgctccccggcgggagcccgcgcgtggttcccagcgaagtccccgcgcggctgggcccagcgtgagtattctccgcccgctgtcctccccctggaggcggcagcgcccgtttatttgagccgtgtgaagatgtgcctgcttcgccttccatcatgactgaagtttcctgaggcctccccagctatgctccctatacagcctgcagaacggtcggctgcctccaatcctgaggtcatcactcatcaagaggggataatcccagggacagcaggatctgcttcgttacttggatttaggagccagaaacccatcaggcaactaaacagtaacaatgacccgccattaaacacactgagagaagagcatgatgaagagtttgtacaagaagaagccaggagcacttgctgacaatgcttacagagacgcaggcttctatgagctctgcctgttgaactgcagtaaaaatagatctccttccccagagaggcttggatgtgggcacaatatcagttcagacgatggtcaatgcatgtacttaatagagtgaaaagactttggactgtgaagtcagattacctgggtctgaattgttattcttctacttctttgtagtatgctttcaccacattaaaaattgtctgagcctca

SEQ ID NO: 896 - DNA, 567 bp, Homo sapiens
  SIMILAR (142)..(372): 981254mologous to Rattus norvegicus BarH-class homeodomain transcription factor,accession number AB004056,Smith-Waterman Score =390.
ttcgggaaagaagccgcgccaggacctccggcgtggggccgagagctggctgggggccgcttcccagtggtgcccgcttcgtcctctggccgccggggcctggagaccttggcccgtttcggggtccgccgctttccccgtgggacaaaggaggaaggagaccgggagattacgagtagccgtgagagtccccctgtgagagccaagaagcctcgaaaagcaaggacagctttttccgaccaccagctcaatcaactggagcgtagctttgagcggcagaagtacctgagcgtgcaggatcgcatggacctggctgcagcgctcaacctcactgacacccaagtcaagacctggtaccagaaccgcaggtcggctgcctccaatcctgaggtcatcactcatcaagaggggataatcccagggacagcaggatctgcttcgttacttggatttaggagccagaaacccatcaggcaactaaacagtaacaatgacccgccattaaacacactgagagaagagcatgatgaagagtttgtacaagaagaagccaggagcacttgctga

SEQ ID NO: 897 - DNA, 525 bp, Homo sapiens
gctggctaaccctgaggtagatactcgggaaatgggtggaatagggaaagggactcagcccttccgcccttttccccagtcgaggcccgcgtcactgccctgtgggtgcagacgcctccagtgtcactcccctggatttcgcttgggcagaagaagagattgtaggccggaccccaacgccgaagccctgaggcttctaatgtgaggaaaaacacggaatgacaagtgtgggaaagagcaagcactaaattactgtcagaaaaataaacggagtagcacagtgctgctcggtgatttacgggggcaattagtcaccaccccacggcgctgctgaggacagcacggcagcagacaagtcaggcccatgaggaagaagaggctttgcactgctctccagacaacttttcaaacaacaagagaggatatttgagcacattaggttttgtgtcttcattctgggtacctactcttcatattattctaccaacttaatacataaacatatttttagcacaataaaaaaaa

SEQ ID NO: 898 - DNA, 701 bp, Homo sapiens
  SIMILAR (162)..(16): 371254mologous to Canis familiaris dopamine receptor D4,accession number AB044886,Smith-Waterman Score=71.
gaccatttgacgtctggtggaattcggtgctggggcgggcgcaggactgcaggctggggctccgctccccggcgggagcccgcgcgtggttcccagcgaagtccccgcgcggctgggcccagcgtgagtattctccgcccgctgtcctccccctggaggcggcagcgcccgtttatttgaggcttctaatgtgaggaaaaacacggaatgacaagtgtgggaaagagcaagcactaaattactgtcagaaaaataaacggagtagcacagtgctgctcggtgatttacgggggcaattagtcaccaccccacggcgctgctgaggacagcacggcagcagacaagtcaggcccatgaggaagaagaggctttgcactgctctccagacaacttttcaaacaacaagagaggatatttgagcacattaggttttgtgtcttcattctggccgtgtgaagatgtgcctgcttcgccttccatcatgactgaagtttcctgaggcctccccagctatgctccctatacagcctgcagaacggacggctgcctccaatcctgaggtcatcactcatcaagaggggataatcccagggacagcaggatctgcttcgttacttggatttaggagccagaaacccatcaggcaactaaacagtaacaatgacccgccattaaacacactgagagaagagcatgatgaa

SEQ ID NO: 899 - DNA, 1083 bp, Homo sapiens
  SIMILAR (1)..(852): 991254mologous to Homo sapiens G4,accession number AF129756,Smith-Waterman Score=1503.
atgttcctgcgacggcttggtggctggctacctcgcccttggggccgccggaaaccaatgaggcctgacccgccttacccagaacccagacgggtggacagctcctcggagaattcaggaagtgactgggatagtgccccagaaaccatggaagatgtggggcatcccaagactaaggactcgggggcattgagggtttctagggctgcttccgaaccaagcaaggaggagccccaagttgagcagctagggagcaaaagaatggattccctcaagtgggaccagcctatctctagcactcaagagtctgggagactggaggctggaggggccagtcccaaactcagatgggatcatgtggattcaggtggcaccaggagaccaggggtgtcccctgaagggggactgagcgtccctgggccaggagccccattggagaaacctggtaggcgtgagaagctgttgggctggctgcggggggaaccaggagctccctcccggtacttggggggcccagaagagtgtctgcagatctccaccaacctgaccctgcatcttctggagctgctggcctctgccctgctggccctgtgctcacgaccactgcgggcagccttggacacactgggcctgcgtggaccgctgggcctctggctacatggcctactgtccttcctggctgccctgcatgggctccatgctgttctgagcctacttactgcccaccctttgcacttcgcctgcctctttggtctcctgcaggccttggtgctggctgtcagcctccgggagcccaatggggatgaggcggccactgactgggagagtgaggggttggagagggaaggtgacatcacagctcttagccacatccctctggtgacatcacacgagcctctttcaccctgtaacaccagaagacttgctgccgccatcgcagcgttttcccgccttttcagtaacctgagtcgctacaggtgggagaacgccccgctgaccgaccgccacgagcctgcaaaaggagcgcgccggcgcgtgagcgaggtgcgcgcgcacgcgccccgccctcctagccgctgttga

SEQ ID NO: 900 - DNA, 1953 bp, Homo sapiens
  SIMILAR (787)..(1668): 991254mologous to Homo sapiens G4,accession number AF129756,Smith-Waterman Score=1548.
cccaaggccgcggccccgacgctgggcccgggagcggtccccgcgcacagcgcccggacgcgtaggtcccgaagtaggcccgcgctttgcttcgtaactggggatctctgaggacatcttagttctgaccttgtggaggccgcgtctctgctgcgtgttcgcgggccagtcgggccactttgtagaaatcatagccctctaaatcaagggacgaacgctgctggctggagtttgctggacactttcattccacctcctaacaaagagaattcctattccttgaggtcccttggggcagcagttaaagactacacgatccaggagcacctaggacctggggccaccttcctgcccgctttattggatggagcactgcctccccagtttctgggacaccttggggtgtggccttggtgagtgaaacttggggtgctgcctgctgggaaggaaatccggaaacgcagagaggactctctggtggtgacccaggccttgtcagatctgagattcttggaatctcagattgtgggggtgtggatggtgaatgaatttgggtatgcccccctttaccccagaactgaagaggaagcaaactacttgccacacttgaggctgcatgactattcagagaagggaggagccacttctgaattcagagtaggactgcatcaccaggcaaatacctgttctgagccagaaagactctggcttctgaggagatcctgagagtctgagtagtgccaggaagcagcctcagaatttgggggcccattacacaccccagccatgttcctgcgacggcttggtggctggctacctcgcccttggggccgccggaaaccaatgaggcctgacccgccttacccagaacccagacgggtggacagctcctcggagaattcaggaagtgactgggatagtgccccagaaaccatggaagatgtggggcatcccaagactaaggactcgggggcattgagggtttctagggctgcttccgaaccaagcaaggaggagccccaagttgagcagctagggagcaaaagaatggattccctcaagtgggaccagcctatctctagcactcaagagtctgggagactggaggctggaggggccagtcccaaactcagatgggatcatgtggattcaggtggcaccaggagaccaggggtgtcccctgaaggggactcgagcgtccctgggccaggagccccattggagaaacctggtaggcgtgagaagctgttgggctggctgcggggggaaccaggagctccctcccggtacttggggggcccagaagagtgtctgcagatctccaccaacctgaccctgcatcttctggagctgctggcctctgccctgctggccctgtgctcacgaccactgcgggcagccttggacacactgggcctgcgtggaccgctgggcctctggctacatggcctactgtccttcctggctgccctgcatgggctccatgctgttctgagcctacttactgcccaccctttgcacttcgcctgcctctttggtctcctgcaggccttggtgctggctgtcagcctccgggagcccaatggggatgaggcggccactgactgggagagtgaggggttggagagggaaggtgaggagcagaggggagacccgggaaaggggctgtgaccgtggggtgggggcaaagggtgaagagagtgtgggctttaggagaaaagtgtgaggcatgacccaaattgtaagcatagggacctcagggatggggaagaaacccgagtacgagggtgcagggccccccttcatacacaggagagaacagaactatttagggtggttgtgtttatggacagtgagggcactgctcttggacttcaccagctgttatttttgcttttacttttctcccaccttcagtttttttttttttttccacctccactttttaaaagc

SEQ ID NO: 901 - DNA, 473 bp, Homo sapiens
  SIMILAR (204)..(127): 1001254mologous to Homo sapiens Human low density lipoprotein binding protein LBP-3,accession number W49042,Smith-Waterman Score =134.
tttttttttttttttttaaggcaacagactctttatttaatgtggtttaaaatacatcaaaatcaagtccctggctgttgtgaatacccaaaggagacaaaaaagctgccagtgcagcttcaaacaagtctgcatcagcaacgtgatctccttccccaaacccttggcttttttcttctcctgtggccttcgatggtctcggtcattctgttgtcccagaaaactgcttggcacaaacactggctaataccctggcaagtttgcaacagcagaacattcagcatataagaatggctctacacagtacatagtagttatgtactggagtgggggtagaacaggacacagaaacaactgtctgcagccattttatggatttctggggcccagtcaatagttcaatttcatttcttacctgttagacaacagctatgggctcccacacaggaagaagtagaatccccaaggacagg

SEQ ID NO: 902 - DNA, 543 bp, Homo sapiens
  SIMILAR (389)..(493): 481254mologous to Homo sapiens myotubularin related protein 3,accession number U58034,Smith-Waterman Score=90.
gaattccacccaggccgcgaaacaagcccgcgtgactggcggaggcacagagaccaaggccgcttaacctggctggttgcactggtccctggagagcactgagcacaggggctgccacagtggccggctcagacatggcagagatcagcagagaatgggcaatcaggctcccctgagatgagcagcagcgcagaggaggtgcccctctcttactacaccaacttcagagggcgtcccctgcaggagagcttcatgcgcctggtggaggcctgtggggactcggagcaaagcatggacaactggctgagtcggctggacggctgccgctgactgtaacatgtaaagcaggcactgagcaccacctgcctggcagtccagggcatggagaggcacagacagcaccctgcttgtgacttcactggcccaactcatcctggaccccttgagcaagaccatggctggattccaggaactggtggagtggaagtggatccaggaaaatgccgtgtgaagggaggactcaaatgcactcccttgggtctg

SEQ ID NO: 903 - DNA, 695 bp, Homo sapiens
  SIMILAR (163)..(360): 371254mologous to Homo sapiens cN38E12.1 (like- glycosyltransferase (KIAA0609)),accession number Z68287,Smith- Waterman Score=85.
cctgatagcccttcgacctgatcacgccaagcttggcacgagggcactccagcctgtcgctgtgcagacctggcttagaggacccctaaggctgaggggtcacttccagaactgagtccggtccgcaggttctgctacgctccagccagcccctaactggtccccagaagcggcgctgctacagggaccaggagctgctgcgaactgcgctggcgggggctcgtccttgggcgcggggcttcatcatggacacgctctcggcccaggccgcgaaacaagcccgcgtgactggcggaggcacagagaccaaggccgcttaacctggctggttgcactggtccctggagagcacttgctccctggctgtacttggcaagggcttgagctggaaaagatgaccagactcccaccgcccagagggcgtcccctgcaggagagcttcatgcgcctggtggagggctgtggggactcggagcaaagcatggacaactggctgagtcggctggacggctgccgctgactgtaacatgtaaagcaggcactgagcaccacctgcctggcagtccagggcatggagaggtaaggccccattgacatagagaatagggtgagatgggcagggctctcaacccctggatgcaaaactgtgattcagtaagcaaatatagcctagaactgggtccattctattcctg

SEQ ID NO: 904 - DNA, 2626 bp, Homo sapiens
  SIMILAR (93)..(410): 321254mologous to Plasmodium falciparum similar to Plasmodium berghei heat shock related protein, encoded by GenBank Accession Number L04508, and Trypanosoma cruzi heat shock protein 70, Swiss- Prot Acces,accession number U16862,Smith-Waterman Score=91.
  misc_feature (1)...(2626): n = a,t,c or g
tttttttttttttttttttaaggcaacagactctttatttaatgtggtttaaaatacatcaaaatcaagtccctggctgttgtgaatacccaaaggagacaaaaaaagctgccagtgcagcttcaaacaagtctgagtggccgggctgggccataaggaaaaccagttacaagggacagaaggcagctcccttcccccagggaagggccaagaggagcaggtgcctgggctgtccctggggtagaccacctctgtgctcgtgcaatggcggaaaggctggggcagcagctgggagaatcagctcaagcaggccttggcccttcccccgtgggacaccagggcagcttccacttggccttccgggttcagcccttcagggccaaccgttgatgggggttggaggagggttaaaataacccatcctttaacagaaaataacagtctccctacagaaaagtgccctgaagctcagccccatggtcccgataacctcatggaaaacaaacaacaaataaaaaaaaaaaagtgctgctgacacctctcagaatctggtggacatgaagctctcagctggacaaggccctgaaaacaatttactattagcagagccatgcgctcttgagcttcacctgctgtggtccccctgaaggaaaaagctaanaaatcctaagaaacccaacacagatcttggtccctaaaaactgaaggtccaaaagtgtgggaccccaccccaggtgaggaagacactggccttcactcatggataggcacctcccctgcatctggccccaggaccctgggtttactttggaaagcagaagcagagcagctgtagtgattggttgatttggtcaatgaagagaagaaaaaggtagggaacctcatctgcagactggcctgaaggtctagacatggatggagctgtgagcaaaggctgcaccttgcctggggcccacattcctgacctgggaaacccagctggggccacctgctcactgtggcctcctacaccaccacactgggatccagcagctccagtccctccacaggcattaagaggtaagctgaaagtgtgagtccaggcaattatgtgggcccactgtaagccctttccccctctcttcaagggggaaggtgcaataccctctgccctccttcccctgcaccctactcctcgccctagcaaaacactctgtgaggttggcagctccttgtacccagcttagccctggcacaggggctggggtagggaaaaggccctactggagccagggaagaggccaaggacttacttccagacagagggatttcaaaggggaagaaaaaaggtcatgggaaacacttcacaggacagcagtatctcagcccagagatggcagagatctcaacactcacacagctgcttgagggcacctagatgtgaaggatacaccagagaatagcaggcaacttctgatgcagatcagtggtacctgccctggggcaggagaaggagaaatggtgtgccattcatttgccatctctggtctcagtcacacatgattcagtacttaacattctttgtgaaccaacttatctgagagatttaaggtaagggctaaaagagtgggctaggtatggaagatgaagggacctgcaggacaatgaactagcttcaaagaaaaacagcaagaagcaaagccctaaccatcctatccatcttggtctgactcattctgttgtcccagaaaactgcttggcacaaacactggctaataccctggcaagtttgcaacagcagaacattcagcatatagaatggctctacacagtacatagtagttatgtactggagtgggggtagaacaggacacagaaacaactgtctgcagccattttatggatttctggggcccagtcaatagttcaatttcatttcttacctgttagaccaacagctatgggctcccacacaggaagaagtagaatccccaaggacaggccagggaggtgccagggaaatagaatcagggacaaatcttgaggattgccacatgtgggggtggggggccaggaagcagaaaaaccccatgaagcccaaagaggcagctggacatgggaccccagcaactgctgccatgggagacagtgcctgatgggaactggtggtggccgtctcaggactgaaacccacaggttaagctttttgcaaagccatcagaagccctttccttttcttttaccacaaacaacctgatctcaccaaacaggaaacctcagcatcaagatggcaaaggagccaagtggggtggtgaaggaggtcctaactaagatgtcccctccttcgctgactcctcaggtggagttcggtgcctcttctgtgtgctcccctaacactctgagctctgacacggagagaacttctgtcactgatgggctctttacaggattctgtgtctccctcattggtcttgagcacttgctccctggctgtacttggcaagggcttgagctggaaaagatgaccagactcccaccgcccagagggcgtcccctgcaggagagcttcatgcgcctggtggaggcctgtggggactcggagcaaagcatggacaactggctgagtcggctggacggctgccgctga

SEQ ID NO: 905 - DNA, 380 bp, Homo sapiens
  SIMILAR (311)..(51): 271254mologous to Human respiratory syncytial virus glycoprotein,accession number AJ290220,Smith-Waterman Score=69.
attcaacagaaaattggcatcctgaaaagccagatggggcctgcctcaaaagggaaaacaaaattaatgaacagacaggaaatctgagaattatttttctctgaagtaggatgcgggggaggtaatggctttgtgaataaactggaggaggagggagagagaaacaaagctgtgtttccaaggttgattccccagctgctccgggtgtttcgagctagagggcactcagtggcagagtttgttaagcaccatggctccgtgggctcccagggccccaagctcgtggtgacgagagcaaggcttggtattttctccaggttccagtcaattatcacagttaaattggaacatgcatgtccttctgtggacagaagtgcagg

SEQ ID NO: 906 - DNA, 610 bp, Homo sapiens
  SIMILAR (297)..(365): 561254mologous to Homo sapiens Human secreted protein sequence encoded by gene 78 SEQ ID NO:201,accession number Y91528,Smith-Waterman Score=69.
ggcacgagacactccactgaccatgggagctctgagagctagggtcacatacttggcggctgaccaacttcacccctactttcccgatccagtgctagccaattccccaaatcagccaggagtgtgtctgctgcatctctggactctcacagttgctacagtcccagttcagccccccaagatcaccctgcaaaaggactccccagggttccagtcaattatcacagttaaattggaacatgcatgtccttctgtggacagaagtgcaggagctgccgcagcttcttccaaaatagagctctcctggctgctgcagctgctgacgtcttcctgcatctctcaacctgctcttcctctcctttcttcccaccacgccatctcccctcgcctgcttcccctcacttggactggggcccgctgggacatcacccagtctaccaccctggtgtctcagaggtgcttgcacggctctgctctggtccctcaatctcctggtggcagttggatccccgtcctctgtccattttctccatctcagttttggattggacaccaggtatcactaacttcagatggtccccttgaagctccctccaaggctatggcttag

SEQ ID NO: 907 - DNA, 1309 bp, Homo sapiens
  SIMILAR (670)..(738): 391254mologous to Plasmodium falciparum erythrocyte membrane- associated antigen,accession number X53020,Smith-Waterman Score=54.
  misc_feature (1)...(1309): n = a,t,c or g
atgctttcagcttctggagccgaaatcgtgtctaatactccttgccattttcaggacctaatttaccctgcaataagagagagaatgatatctgatgaccaaatagcaggacaggaaagaacaacaaggccaggactggagagcttgacacatatgagccttgcaccagctgccttcagcaagagagctggaatacactcttgtgactttgagtgccaatatttaatagtgtgtgcattagggccacagtcccggtttccggaattgctctacagggagaagtcagctgaggcgctggttccaatggcactcctagctcgttggttgaagcttattgatgattcaaagttgaggaaactttttcaatcagcgatattgctggaagtggcccttctggcactacctctgtgcttctatctctggctcagcagatacatgataattgctgaatgtgtctatggaaggaggaatggcaaggccacaagagctctgtacagctgctcagaagcttggggagtgaacctgggtggcagagtgagactctgtctcaaaacaacaacagcgacaacaacaataagaaggcagctgcttgtggaacctgttgttgacacttacctatttacaagtccacctaaatcaaactggctgtccactctagggacaattaccaatgatcagaatcaggccaacaataaaaattctaataaaggcaaaagagaaaacaaggagaaagggaacaagtgggagaagcctcgattgcctgcaattggattgttcctgggaactgatgactttatcctcatgaaattttatgacagcgtgcaaggcttgagaaaatctgaaaatttttccacttacaaaatcagagtcctgataaatgtttccatgtacagaatggaatgtcatagtgtagctgctgaagtggatattatcaatatggcagacaaagtaaattctaccaagaaacaatgcatcccaactccatatactgtgaggaaggaaacaggatgactatgcatggttacagcagaatgactgacggagcataatggctcattaccaaagactctggcacacctgcaggaaggcacctctgcctgcattaggtactaccacagaatctgtctgttatgcaccatgggaatacaccatgatcagtgagctcttcaaagaccattctgggaaacccggggcagaaatactatccacctatgtgatgggccacctgaaggcaacatgtcagcatgtttaaggcctccccaatttgacggtaggggcattcatggggttccaattccnggttttgttc

SEQ ID NO: 908 - DNA, 369 bp, Homo sapiens
  SIMILAR (258)..(169): 631254mologous to Homo sapiens Human secreted protein, SEQ ID NO: 7678,accession number G03597,Smith-Waterman Score=102.
atgcatgtacgtctcttggcactgtgcctggtagtacatgatagtgtatccagaattggtgggttcttggactcgctgacttcaagaatgaagccacggaccctcgcagtgagtgttacagttcttaaagatggagtgaagctgcagaccttcgcagtgagtgttacaacttttaaaggcagtacgtctggagttgttccttccttccagtgggttcgtggtctcgctggactttggagtgaagctgcagaccttcgcaaagcccagccggcttcacctctcactggcactccctgcgggactttgcggcacctagcccaggcactctggcagcccagagggagctggtcccctgatgaagcccagcag

SEQ ID NO: 909 - DNA, 792 bp, Homo sapiens
  SIMILAR (197)..(45): 481254mologous to Homo sapiens Human secreted protein, SEQ ID NO: 7678,accession number G03597,Smith-Waterman Score=101.
atgcatgtacgtctcttggcactgtgcctggtagtacatgatagtgtatccagaattggtgggttcttggactcgctgacttcaagaatgaagccacggaccgtcgcagtagacaaaaaagttctccaagtccccacccattcagaagcccagccggcttcacctctcactggcactccctgcgggactttgcggcacctagcccaggcactctggcagcccagagggagctggtcccctgatgaagcccagcagttccaaagtcgcttctacattttcgggtatcttctcagcaacgccccagtctaccagtaccaatttactgtattagtccattttcacactgctgataaagacctacccaagactgggaagaaaaagaggtttaattggacttacagttccacatggctggggaggcctcagaatcacaacaggaggcaaaaggcacttgttatatggcggcgacaagagaaaaatgaggaagatgcaaaagcagaaaccctaataaaaccatcagatctcatgagacttattcactatcacaagactagcatgggggaaaccgcctctgtgattcatattatctcccactgggtccctcccacaacatgtgggaattgtgatagtatgattcaagatgagattcaggtcatagagataatgtgtgagaaaagaggaattaaaactcaagccacctgctttcccctgaaaaagcttctcctgacaaaatacacggtgtcatcggataatggtgagagagacatgcccgtgtcaccaactcagaaatga

SEQ ID NO: 910 - DNA, 1191 bp, Homo sapiens
  SIMILAR (382)..(263): 421254mologous to Homo sapiens Human secreted protein, SEQ ID NO: 6263,accession number G02182,Smith-Waterman Score=69.
atggggcagtgggctctctctctttctggcattttcgagttgtcctcactagctccagtgaaagaacacaagcagacattcccaaacattctaaagaagggttacctggagattagaaaggaccatgacagttactggcaaagctgttatgcagaactttcaccttacaacttatacttctacagcctcgacagcagtgggaatcaaaacctttatgccacgtaccagctttcacacttccagagcatatctgttttaggcaacctggaggccaggatggtggatactgttttgtatgacaacactcagctacagctaaaggcagagtcaccatgggaggctttggactggggacagaagctttgggaagtagtgcatgctgctgtgcccggttacatggggcggcagaatgagctgacaatctcaccagggcttggccatcatgatgactatacacagaatcatagtttccagaagaaaaccagtggggctgctgccaccgtcccctgtcctggacagctccaaacagtaccaaaacatcctcatgtcagggtctctctacaggctgactgtccaaaacagctggaaggcatttacatttgtgctgagcagggcgtaccttatggcttttcagcctgccaagatagacgaggatccgctgttgagctacaacgtgcacgtgtgtctgtctgtccagatggacatcctggatggctgcgactagtgctttctagtcattttcccccagaatgtccttctgcctccgagatgagacccaacagagggctcaggaatggatggaggctctgaagatagctgccaatgtggcgaggagttcagagcaaaccctccaagtcactgtgaggaccaaacccaagaatcaaatgggtgggcatgaactcaggaagaacaaacgccaatctgtgactaccagcttcctgagcattttgacgactttgtctttggaacgaggactcactgctcagagtttcaaatgtgcaggtatgaagcagattttcagcctatagctcattaaagaacaatcctgaaccccacaattggaattcactttaaaaatccccttaataggctagtcacagctatctcctgtttataaaaagtatctctcctcgagaagcttactgtattaaaacatcctatattaaattactatattataacataaggaca

SEQ ID NO: 911 - DNA, 761 bp, Homo sapiens
  SIMILAR (111)..(275): 351254mologous to Homo sapiens Human secreted protein, SEQ ID NO: 4436,accession number G00355,Smith-Waterman Score=67.
ggcacgaggctgaattcactgctcagggtctcacaagcctacagtccagatgctaactggtctgtgttctcatctgggtccttgactggggaagagtctggttccatgccctctcccattgttgacagatttgatcttgtgcccctagggctgaagttggtttctgttttgctgctggctacgagcaggggctgctctcaggatctccaagagggcactggaagtttcctgccatgtggctctctccagaggcctcccacagcatggctggacccaatatgcacagtgaaggaaaaagtaagtgtggaggagtgactgcaaaacccgccaggtctgatggggagcatgacccagaagctgagcctcaaggctcccagcactgttgtttccggagttcctctgatgtccctgagctcctggctccccatctgaaaatgagggcgaacattcccctttctgcctcacagtgtgaaggggctctcagtggaagtgacctgtgcattcctgcagccagaatcaagcccggcactcctcaaacctgccagatgataagaaccccttggacagatgctcacatgaccagcctcatccttggaaatgctcatcagtggttgtgggttgaggcatgggaatcagtgctgatcagaaaatctttgaatctgctgatgatctggaatcctcctccactccaagccctgcagcttccagttgacccacctttccggacagaaccaatgttcatcttacatgaatttgattga

SEQ ID NO: 912 - DNA, 1819 bp, Homo sapiens
  SIMILAR (1190)..(765): 391254mologous to Homo sapiens Human secreted protein encoded by gene No. 92,accession number Y27658,Smith-Waterman Score=122.
  misc_feature (1)...(1819): n = a,t,c or g
tttttttttttttttttttcttaactggcaattttattaagttttcagttctcttaccttttatatactactaagaaaatttaaaccataactagacataaacattctgcagtttaattcaaattttcatatatacagaccagactacatatgtattacactggaaaacttacacatgactgaagctgagcctaataacttcaattaggccaacaacaggaaacactcccacttcctggcagtcacaggcaattaggctaacaataaaaacactccccacttcctggcaggtcacaggctggaaaggactttttcaagggcaggacttacatttgggggctgggaggatacaagtggatgttaggtttggacttggggggccanttacaaaacaaaagtcataggaattaaatgggattttcaatcactgtataattcattcccctggcttaagtacgttttaattttttcacagvrvggaatatatttcaggcaaataaaaacaaattccagattagcatagttcagcgtttcatttatcttacctttatcaaggcaaacaaagtacagatgctgtacattaaaaacatagaaatatatgactcacaccacatcaactcctacgggccaaaggggctttttccttaagccttgcttccttttctgaagcacaacacccccagcttaaatgtacaaaagagccatctgctggtccaacatagccaactccaatgagcaggacgttctatcagcgtcccatattccccaggcccaccgaaagctgaagagctttgccgaggcccttncccggccactggcccccggtaagaaacggtctgctcccaaaccccaccgagggtgatgccttaagagccagagcccgtagacccacttatagcctcccagtcccaattgcaaataataaccattttgggaaaaagtacggtttaccccaagcagtggacgtggtccccgcacccgtgccagttggcccagggttaccgctgcccgaaggaaccaggaacacccgtccatgccagcctggtggaagttgggtaacactccgtaatcctgtttccaggaaagctgcccagcaaaaatctgcaagtccatgttaatgatgaaagttcttttgggatttgaagtcttgatcaacacagggtaacagatggtttcactgcacagtcaaaaagtgacaggcttcccatagagtacaggagaagtttgttgtgcagtctatacagtctgcaggaagcctgctacacaagccattgctcggacatttcatcacataagatgggatttcagtactttcaccgcccgacagaatgcagaactgcgaaaggaagagcagcacgcgacacaaggcgcggaggccccgcagcgggcgcacccctcccgccatcttgccagcgcctgcgcacttccgggccggggggcggggcgcgcctgggagccggagcgtgaactggacgcaggcgcgctgcgactcctggcggccggcgtttgcgctttcgctgtcctcgcgcgggtcgcgggttttcttccggttgagccttctgggaggtccccgaggaggatgcgagcctgggaggttgttccatttccacgcgcccctcacgcccttggacgaggccctcacccctggttccactgcaggagacctgttaaaggtcatccgtggaccgaaatgcgcgcccgaagcaaccaagagcagaggcgggcgaacgcgggaggctggccgccccagtgtgtggtcggatgttgtgtgctggatctcgtgcgaaggttccgaggacactatcgcgtggcgtttcat

SEQ ID NO: 913 - DNA, 1990 bp, Homo sapiens
  misc_feature (1)...(1990): n = a,t,c or g
ggttttctagcaaacagtaaatttaaacaagtaaactattatggtttccattgcttacaaaatgattttcctttacattcttatcatgaacactattttaagcatcaaatgcaatcatctaaaatataaaggtcaatcatttataatagaaacaccttgaccacaagcccttgattgaacattttataatatttcatctacttattaaaacaaataatttcccttgggttggaggggaagtgatttcataaattaattagaaagccatctttagcatattgcttatgtctggatccatgtttctgaggaaaaagacattctcaggtgatgtatttttttcatgcattagtatgcatttttaaaaaataatgcatgtttctttaataattaattttcatcttctataagatgccatgtgaagaagttgtggaaatgtagaataaaaagctaaagctgcccaaatttctgttgaactccttaaaaacagctccatggtttggtttggtcctctcgggttgtggcctagcctatttgcaatgtaatgaagctgcagggttcttgtatagctaaagcgttcaatgcatttcacgtgctgtggtggatgtggggtgctgtagacaggcttcttctcttcctgctctcaaaataccccggccttgacatttgggacagatcctgtccattgtttaaggctgaggcaaaaaaccacacaaaagttgtgtaaggaggatgaggataacaaagggagcgaggaggaaatcttcatgtggaattttnccaagttttaattcgttctccatgaaggattttccatttcagtgaaagtcgccagccagaagagggaactttctgggagtttttgagaatgcccaaaccacatttttatcacacttctttgggaaatcaatgcctttgcataggaaaatccaaattcacggacccccaaaggattttcagtgggggatgtctagtctgggggggtctgaggttgtttttactttattgtgttgtttaaatattttaaaaatatctttagcgtttgggtcttttttttttctgtaaacatttaatttggtctgagaaaagctgaatgtttgggtgtgaccgtttgactgaggtggatttggggctgcctgtggacatttagtgaacaggtggtaggcttcaggaatatcccagttttaatcagtttgcattttggtacagaattttgagtaatggtgaaaattgttgtctttgggaaagcacaaaagaaacctgggaaaggcagttcggctcaggtagctaccacataacattgtgtatgattttcacttcaaagctgtgcttngaaggaaatggcagtcagctccagctagtactatttattgtacccagataactaagatattgtttcatggccttgccttagtcagaggcccttttctctgtccctgaacccccaggtatgggtgaaattggaaattactaatctattggaaatcagttcctgacatagtaaagtttgctttcataactgcagcaaaaagggtccaactttgcccaggtcactgctgcccatggcgtgtacctgtattattttccaggaaaaaaatataatagtctgagtcccaagttatcttgatttaaaattgatagagaaaagaaactgtcggagcaagttaatataacaacctaacaacattggcactttctgtatatgaaatccaatatttaaataacttattcttcgtccattgctgttcttaaaaaaacattgtaagtagctgtaatatacccagtacccaatatgttccttgcaattgcttcagcccaagaaagctgtgtattgttttaaaaattgtaaaaattattgtgatgattcatttagcataaagagaggtggacggaagggttttcctatgtatcaaaacttgtctataattatgtcatctatgtacctagaaaaaagtaaataaatttcttcagttgaaaaaaaaaaaaaaaaaaa

SEQ ID NO: 914 - DNA, 459 bp, Homo sapiens
  SIMILAR (43)..(198): 301254mologous to Ascovirus DpAV4 hypothetical protein,accession number AJ279815,Smith-Waterman Score=64.
cacccacatgattttgctcattgcttttatttatctaacagcatgttttggccatctccccatgtcagtctgtacaggtccactctatcattctatattgggacggcacacaattctataaacagtaataccatgatttatttgcccttcagcaaatggctttgccaattcttacacacaaaaaagggtatgatggaccagtttcttgcatctgtgctcaaactggacatcatcaatcttttaagtttttgccaatctgttgggtgataatttcttttcctttcaaccttcagggtcatttgcagctccctccacctgctctgcccaggcttctagctgctgacagccaaaggcaatctggtgctccaatgcattgattgacgcattgtcatcacttataaggtcagtatgttcatccaatcctttattcatcacgtaactatcaggcattgattccat

SEQ ID NO: 915 - DNA, 425 bp, Homo sapiens
  SIMILAR (3)..(281): 1001254mologous to Homo sapiens HSPC238,accession number AF151072,Smith-Waterman Score=502.
agcaggagacgcgaaccaacatgctgctggagctcgcaaggtcacttttcaataggatggactttgaagacttggggttggtagtagattgggaccaccacctgcctccaccagctgccaagactgtggttgagaacctccccaggacagtcatcagaggctctcaggctgagctcaagtgccccgtgtgtcttttggaatttgaggaggaggagactgccattgagatgccttgccatcaccttttccattccagctgcattctaccctggctaagcaaggctcgaaaacagcagcagcaacaccgactggagaacctccatggagccatgtacacgtgaggaggttggggctgagtgctggccctctgcgtcttccttattacccttgaatcctcattaaaggtttctttacccacaaaaaaa

SEQ ID NO: 916 - DNA, 480 bp, Homo sapiens
  SIMILAR (446)..(228): 981254mologous to Homo sapiens HSPC238,accession number AF151072,Smith-Waterman Score=387.
ttttttttttggtgggtaaagaaacctttaatgaggattcaaggttaataaggaagacgcagagggccagcactcagccccaacctcctcacgtgtacatggctccatggaggttcctccagtcggtgttgctgctgctgtttttcgaacctttatctccgtctgtgctccctcataagtgtcgtcatcaagtgggcagctcatagcggcacaagggacaggaatttgtcagcctgagagcctctgatgactgtcctggggaggttctcaaccacagtcttggcagctggtggaggcaggtggtggtcccaatctactaccaaccccaagtcttcaaagtccatcctattgaaaagtgaccttgcgagctccagcagcatgttggttcgcgtctcctgctcagggtccgacggctcgcagtcgtgttcatcgaaataggacgccatggctgcccagccttctgacgtcgacgcggccgcg

SEQ ID NO: 917 - DNA, 763 bp, Homo sapiens
  SIMILAR (3)..(155): 941254mologous to Homo sapiens HSPC238,accession number AF151072,Smith-Waterman Score=250.
agctcgcaaggtcacttttcaataggatggactttgaagacttggggttggtagtagattgggaccaccacctgcctccaccagctgccaagactgtggttgagaacctccccaggacagtcatcagaggctctcaggctgctctcaccgtgccctgggcccagtactcaagcttctttctgttcatggactgctgggggatggaagaagagtggcagttgggagcaggggagggtggttatcagcttatgaagatcagaccaaggctagaacactactctacttttctcagacaaattcctgtcccttgtgccgctatgagctgcccactgatgacgacacttatgaggagcacagacgagataaggctcgaaaacagcagcagcaacaccgactggagaacctccatggagccatgtacacgtgaggaggttggggctgagtgctggccctctgcgtcttccttattaaccttgaatcctcattaaaggtttctttacccaccctgaggctgtattgatcacagacctggccaggggctctgcatcctccatcaggtctctacttctgttggggaaggtgatcctaaatcgcagaaggcaccaggctgcggttttcctccctgctggcccatctggactcatggcagtggtaaagaactggattactgcaatagccagggcttgggcctatgtgttcatggttggaaggcaaaatgtgtcagggtctggtacccagctaattacttaaagctgataaacta

SEQ ID NO: 918 - DNA, 870 bp, Homo sapiens
  SIMILAR (104)..(523): 371254mologous to Homo sapiens HSPC238,accession number AF151072,Smith-Waterman Score=128.
  misc_feature (1)...(870): n = a,t,c or g
cgctaggccgctatcgagcagggtccgagggctgtgtcagaaggctgggccanccatggcgtgcctattttcgatgaacacgactgcgagccgtcggaccctgaagcaggagacgcgaacccaacatgctgctggagctcgcaaggtcactttttcaaataggatggactttgaaaaacttgggggttggtagtagattgggaccacccacctgccctcccacccagctgcccaaagactgtgggttgagaaaccctnccccagggacagtccatccagaggctctcaaggcttgagcctcaaagtgcccccgtgtgtcttttgggaattttaaggaggaggagactgcccattgacgatgccttgcccatcacccttttcccattcccagctggcattcttaccctgggcttaagcaaagacaaatttcctgttcccttgtggccgctatggagcttgccccattgatgaacgacaatttattgagggagcacagaacgagattaagggcttcgaaaaacaggcaggcaggcaaacaaccgattgggagaaccttcccttgggccctgttacacgtgaggaggttggggctgagtgctggccctctgcgtcttccttattaaccttgaatcctcattaaaggtttctttacccacnnnnnnnnnnnnnnngggggggccgttttaaagaaacaaattttacgaccgggggcgggcaaggtaatattttttttatggggcccccaaaattaatttccggggcgggggtttaaaaagggggggaggggaaaaccctgggggtaaccaaattaaatggcttggaaaaaaatccctttttcgccggggggggaaaaagaaaaaacgccggttt

SEQ ID NO: 919 - DNA, 425 bp, Homo sapiens; identical to SEQ ID NO: 915
  SIMILAR (3)..(281): 1001254mologous to Homo sapiens HSPC238,accession number AF151072,Smith-Waterman Score=502.

SEQ ID NO: 920 - DNA, 480 bp, Homo sapiens; identical to SEQ ID NO: 916
  SIMILAR (446)..(228): 981254mologous to Homo sapiens HSPC238,accession number AF151072,Smith-Waterman Score=387.

SEQ ID NO: 921 - DNA, 763 bp, Homo sapiens; identical to SEQ ID NO: 917
  SIMILAR (3)..(155): 941254mologous to Homo sapiens HSPC238,accession number AF151072,Smith-Waterman Score=250.

SEQ ID NO: 922 - DNA, 869 bp, Homo sapiens
  SIMILAR (766)..(344): 391254mologous to Homo sapiens HSPC238,accession number AF151072,Smith-Waterman Score=130.
  misc_feature (1)...(869): n = a,t,c or g
aaaccggcgttttttctttttccccccccggcgaaaaagggatttttttccaagccatttaatttggttacccccagggttttcccctccccccctttttaaacccccgccccggaaattaattttgggggccccataaaaaaaatattaccttgcccgcccccggtcgtaaaatttgtttctttaaaacggcccccccnnnnnnnnnnnnnnngtgggtaaagaaacctttaatgaggattcaaggttaataaggaagacgcagagggccagcactcagccccaacctcctcacgtgtaacagggcccaagggaaggttctcccaatcggttgtttgcctgcctgcctgtttttcgaagccttaatcttcgtctgtgctccctcaataaattgtcgttcatcaatggggcaagctccatagcggccacaagggaacaggaaatttgtctttgcttaagcccagggtaagaatgccagctgggaatgggaaaagggtgatgggcaaggcatcgtcaatgggcagtctcctcctccttaaaattcccaaaagacacacgggggcactttgaggctcaagccttgagagcctctggatggactgtccctggggnagggtttctcaacccacagtctttgggcagctgggtgggagggcaggtgggtggtcccaatctactaccaacccccaagtttttcaaagtccatcctatttgaaaaagtgaccttgcgagctccagcagcatgttgggttcgcgtctcctgcttcagggtccgacggctcgcagtcgtgttcatcgaaaataggcacgccatggntggcccagccttctgacacagccctcggaccctgctcgatagcggcctagcg

SEQ ID NO: 923 - DNA, 1017 bp, Homo sapiens
  SIMILAR (685)..(638): 381254mologous to Human papillomavirus type 70 Method: conceptual translation supplied by author.; putative E5,accession number U21941,Smith-Waterman Score=41.
ccagaacaagcacaattaatttcttctataaacctaagaatgttgtcaggaaagaaagagaagaaccctgagttacacaggcaccattcaaaattgttctccttagaggtttaaaaatctcctcagagttttaaaaaacagatcccactctgagacgctcctaaaaacagctgaaaggctgatgaaccaggctacggtcagagagaagatagaagagcttactgacagaattcctacatcaaatgacaccactggccaccagtctaatgccaaaatacaatggcaacagaaaatcagaggcactcgatggagaacaacgacgatccacaatacctgccagcagccaaacgcctgagtgaagcccgtgaatcagctcttagtacatctggtgatcacaaggaaaaagtgctctacaactttgatcttttgacgagagaagagcatcttttaaatatatgtgagcttcgcttttcatgtattattttaccactgactgaagagaacagatctgctgagagaacaaccctggaccaagaggcagatggtctgggtttcagtcctgtccttgcctgtgtgtggctttggacaaggcaaccaagcagcagaatggagctagggtggaaagaatgtagatttgccaccagaaggagcatagcgataaagagaggggaagaggagaacacagctgtgctcctcctgtggggccgtcgtttcccaaacaggtgtcttcccctgatggccttttggtctttcctgccctctcaagaggatccagcctgtgtccagaaagggcagcttcctgagagtgggagacttctcaaagtgagactgaaagaaggctcaggaaggtggtgttcaggagcctgtgacatgaggggcttctttctaacctatatcaatgctgctaaagttttacacttgagtgtaaaatactcccagggtacaggacttgaccatagtggagagaactggagattaatgctggacttgaagctggctgctcttcctatgaactga

SEQ ID NO: 924 - DNA, 562 bp, Homo sapiens
  SIMILAR (3)..(479): 691254mologous to Homo sapiens GREB1b,accession number AF245389,Smith-Waterman Score=576.
gtttttgtcaagcaggaaaggatttgcgtttggtatcactgtgtatggaacaaattgacatcccagcaggattcctcctggtgggggccaagtctcccaatctgcctgaacacatcctagtttgtgctgtggacaagcgatttctaccagatgatcatggaaaaaatgcacttttagggttttctggaaattgtatcggctgtggagaaagaggatttcgatatttcacggaattttccaaccacattaacttgaagctcaccactcagccaaagaagcagaagcacttaaagtactacctagtcagaagctcccagggtgtactgtctaaaggacctcttatctgctggaaagaatgtagaagccgacaatcctctgcttcttgccactctattaagccaagctcttcagtgtcgtcaactgtgaccccagaaaatgggacaactaatggatacaaatcaggattcactcagacagggatgggatattttcttttggcatttcaagcatcacatgtatatttaatgagactttttaaaatatatacttactgctggctggg

SEQ ID NO: 925 - DNA, 618 bp, Homo sapiens
  SIMILAR (148)..(5): 331254mologous to Phytophthora capsici nuclear protein PC11,accession number AF212108,Smith-Waterman Score=75.
atggagaaaagagaaagaaatcaaagcgtatcactacagaaagtcatcaaatcacaaaggaagacaagggaggaagaaagcaacaaaacatctgtacaacagccacagaagaatgaacaaaaaggcaacatggggcgcacctggacctggcctgctgggacagcaaccctttctcagctgcaggcgacagctatgggagatggcgaggcgacggacgcccacttccgcttccggccagcagctgaaaggggtgggctgcccagctcgcacatttggcggattcgccctgaggacttgggaacggggcatcgcaggacaagtactgctgctcctacctcctctcccatggacgcaaacattggtgggagcaatcattttatttttatggcaaagagaagccctgaggggacccacatggatgtcttcaaggtcttgcaggcagcaggcgtgggtgaacgcttggcacttggtggagacagagaggccggcgggatatcagcagcgcagccggggtaccggaggtggtctcgggcgaggcgctccgggtctgaagggctccagccaaacggagctcgcagccaaacagtgctggtggctcctgagctgagtgaggcctag

SEQ ID NO: 926 - DNA, 1620 bp, Homo sapiens
  SIMILAR (1003)..(1206): 261254mologous to Glycine max SRC1,accession number AB000129,Smith-Waterman Score=76.
atgggtaaggtcctgggccttctaattgtatggaggtcagaggattataaaacccacgcatatcgaatatgccccttgagtggtacagagagtttcataacaggacccagttcacaggacacaacttgcagaagggattggggctctcacatgaggatgcattccgctgttgagattgtgactcatgtacttggacccaactcacaggagctgttgactgttctacttggagtgggtaaatatgtgggattgggggtctcatttctgggccttcccacagggaaagtccaggcaaaaaagaatagtcaaatctaccaggtgctgggcccagtaatacgtcacaataacccagaccaaggaggaggagaactgaactctggcccagccaggggagaatcaagtttgaagaggggggccatggagacgattgcgttcacgggtcccctggcccgaggttgcaggcccaggcttcagcccacatgtcacatagagcaggttctacgatgctgctggaaggcctggaagagcatctgcaactgctgtttcttccttttcttccactcctcctctttttcttcttcctcaaccaccggcatactttttgtcatcctatttgtcatcacagtagagtgcctgacactatggagacccgggaaccccacctatctcaggtcctgcaaaggtcaggtgaacaggcaagaagtccagaaggaaagtcatctgccacctccagaaagaacagaacaaaacccctacactccaagaagaagtcagcaggccagtgggaagtgccagtctagcccacaacaaactaggcatatggggtgctccgaggttcatgctcgtgtcctgcaggctggagcccacaccagggtccgcagtctgttctggactggaactagcgctttagctggttacccaggcgtccccgatggggaaagggtggaaagtgggtcaccaggcactgtagagactcgggaaatgcacagatatggggtcctgcagcatccaggtgaacatgccgggagtcagagaggaaagtcctctgaagcttccagaaggaatggaacagacctggcactgaaggaagaagcggggctcccagtggcggatgcaggccccacacgtggcagcagtaaacgcaaggcagagatcaagcctctagaatcttggcacagccacgggaggagtgagccagaagagaaccagggcagtggaggtgcgggctgcgctctcactggtgccacagacctaggctgtgttcccaggctgccgtacaaggggtactcggtgtgggtcccagcgcccctcagtggcctgagtgattggctgcagctgcagcttcttccagttactgagcaacaggggcctgtatcatttccaaaggatttcagacaatccccggtacttctggccatcctgcttgtcagcacattgggaaaactgggtgctggagactcggaaaccaccgtgcagacctcgagtccttcccaggcccagccaacagggtgtgaccccacggaaacacctccgcaacaagtaatccacagtgtcctgcttgccagcctaggcttcctcatcacctgctgtttccgaagagaacaatctacactggaatga

SEQ ID NO: 927 - DNA, 480 bp, Homo sapiens
  SIMILAR (142)..(456): 331254mologous to Canis familiaris progesterone receptor,accession number AF177470,Smith-Waterman Score=94.
agtgaccccaacagagtgtcccgggactcatgcctctgatcaagttacccccagaggatcagagaggggttgacgaaggagaagcattcagagggcactggcttctggacagcaatgagtgcccgggccacgcggccccgaagccggcgagggaggcatgctccacccggtgaactggatcccgtggctgagagttcagaggaggtcgaggcagccagtgggagctccaagcccagctttgccccacctccggtgagctccgggctggaacaagctgggccccatggaggaaggtcagtggccaaggcttagggaagcaggacttgacaagaaagatggatgggggctctggcagggaacttggcctcaagccccgaagtgccccacaaaccttgcagtggaagcccaccaagccccagaagcagccctacagtacaaggagactgttgcccccttggaaatggggcccccgatgtgttt

SEQ ID NO: 928 - DNA, 573 bp, Homo sapiens
  SIMILAR (500)..(249): 331254mologous to Homo sapiens GSK-3 binding protein FRAT2,accession number AF062739,Smith-Waterman Score=73.
atggagagccagacacctcctccacctcgtctgtttgcgcaagaagcaatatggaaaggaaaagcctacctgcctgcccctttaaggcagtttgccagatttggcaggaacttcttcaggtatctcacttgtctcatgggaccctgcaggctcctagataagattgctggatccctgcagctggctgccccggctgccgacctctgtgcacctcagggcggcctgaggttcagccttttaagtcaagccaaggacccactacttgtttttctgatcctctcccctcccagcctcgcctccgacagccacggtgctatggcagccacactggcttgcaagagctggctctgtgcatctcttctcaaccacagggtcagcggcgtcatctggcagctggaaactggcaccgtagcgctggctgctgctccctcctcccaccactgccgccgctccttacaccctcacgacactctgcctctcatcccacagcaacatgggccgagtcctcggcacacaggctctggggagatggctgaggagggtgggagctccaggaccctcagagtgaagtga

SEQ ID NO: 929 - DNA, 2661 bp, Homo sapiens
  SIMILAR (1582)..(2088): 661254mologous to Mus musculus Pro-Pol-dUTPase polyprotein,accession number Y12713,Smith-Waterman Score=625.
atggttgaagaagttctcttggataatatcctgaagagtgttttccgacttggttccattctccccatcactttcagttttccttctgacagtcagggccctcttctgcaggtctgccggagtttgctggagatccactccagaccctgtttgcctgggtatcaccagtggaggctgcagaacagcaaagattgctgcctgttccttcctctggaagcttcgtctcagaggggcacctgccagatgccagctggagctctcttttataaggtgtctgttgaccccttctgggaggtgtcttccagtcaggagacgtgggggtcagggatccacttgaggaggcagtctgtcccttatcagagttcgagcgctgtgctgggagatctgctgttctcttcagagccagcatgcaagaataagtctgctgaagctgtgcccacagccgccccttcccccagagacgccctgtccagagaggaggaatctagagaggcagtctggccacagaggctttcccatgctcccatgggctctgcccagttggaacttcctggtggttttgtttacactgtgaggagaaaactgcctactcaagcctcagtaatgttggatgccccacctgccaccaaactggaacatcccaggtcgtcttcagactgctgtgttggcagcaagaatttcaagccagtggatcttagcttgctgggctccatgggggtgggatctgttgagctagaccacttggctccctggcttcagccccctttccaggagagtgaacggttctgtctctctggtgttccagtctctccacctttgtctgaggagattaaccatgcactgcccaaggcaacagtgatggcctcacttggggcagttgccaggaaagacaatgccgattctcttcatgtcccacccccaacacctctgtttgcttctagacctgtaactgcactaaagtactggcaggcccctagagaggacctacagccttttaccagggtaactctgcactggggaaaggggaatgatcagaccttttggggactagtggacactagctctgagctgacattgactccaaatgacccaaaacatcattacggtcctccaattaaagtaggggcttatggaggtcaggtaattaatggagtttttgctcatatccaacttagagtgaatccaatgggtcattggactcgtcctctggtcattttcccagtgccagaacgtaaaatcagcatagacatactgagcagctggcagaaccacattggctccctgattggcagaaagacagatggatcttggagaatgacagtgggttatcgtaagcttaaccaagtggtgactccaattgcagctgctgtaccagatgtggtttcaatgcttgagcaaattaacccgtcacctgaaagtgagtgtttgaaaatgagtcatcaaatcaccatgcgacctgaactgcctatcatgaattgggtgctttctgacccatctagccatgaactggggtatgcacagcagcatttcattatcaaatggaagtggtatatatgtgatcgggctccagcaggttctgaaagcacaaccagccctttcatcacccaatgggtccatgaacaaagtggctatggtgacagggatggaggttacacatgggctcagcaacatagacttccactcaccaagaatgacctggctatggccaccccgagtgcccaatttcccagcagcgagaccaacactgagcccttgacatggcgtcatcctcgtggtgatcagccagctacttggtggagggttgattatattgcacctcttccatcatggaaagggcagcggtttttcttcaccagaatagacacttactccggatataagtttatctatcctgcacccaatgcttctgccaaaaataccatctgtggactcatggaatgccttatccactgtcatggtattccacatagcattgcctctgatgaaggcactcactttatagctaaagaagtgcagcagtgggctcatgcttatagaattcactggtcttaccatgttccccatcatcctgaaggctggggcaaagttctccagaaggctgtacatgctctgaatcagcatccaatatatgctactgcttctctcatagccaggattcacgggttcaggaatcaaggggtggaagtgctatcactcaccatcacccttagtgacccactagcaaaatttttgcttcctgtttctgtcacattatgttctgctggcctagaggtcatagttccagagggaggaatgctgccaccaggagacacaacaatgattccattaaactggaagctaagattgccacctatccactttgggttccttctatctctaagtcaacaggctaagaagggagttacaatattggctggagcgattgacccatactatcaaggtgaagtcagtctactactcaacaatggacgtaaggaagagtatgtcaatgggaaacaacaacagcccaatcctagcaggactacaaatggcccagacccctcaggaatggtttgggtcactccaccaagtaaaaaaccacgaactgctgaggtgcttgctgaagacaaaggaaatacagaatgggtggtagaagaaagtagtcatcaatatcagctatga

SEQ ID NO: 930 - DNA, 1892 bp, Homo sapiens
  SIMILAR (1837)..(1550): 531254mologous to Homo sapiens Human secreted protein sequence encoded by gene 11 SEQ ID NO:72,accession number B24447,Smith-Waterman Score=211.
  misc_feature (1)...(1892): n = a,t,c or g
atgcccctaaatgggcgaatgctgaactatattgcgaagcgtaaggagtgggccgggcatgtgatgtgcgactgttacaactgccacatacgatataaggaggattggattcaccttgccttgtacgggactaccttggtgagacaaacaccgattgggggtaacgccgaagcgttaaagttgagtattggggtggtggcgataactggctgtatgtatgcagatgacgggctgctgatgggcgccggcaaactttatgaggaatggatgttatacgagttgccttttgttattgctgaaggccggagtggaatagtgacgcgaaacatgcgcgtacatgcataccaagtgttgacatgcaccttgaaaacgacacgggtggacggctttgaacggaggtgtccttggcgggaaggcgcgcgggaagggagtagggggtgtacaaacggaaagccggaaaggggggaggacaaatacagtgtacgaaactgctacgcttccgctactgtcaccggctacgctttcagctcccggagccgggctgcctctacctgcgcttttccaacgagatgtcaaccgaagttcagtaggtcaatagaccctactggcaaagctgttcaaactgcggatatccggctatctgctagagctacgctatggttaggcggttcgatagaggagagtccggttctgtgttcgactctccgactgctgctgcggcggcttccgccaccccttacctggaccagtccgaacagaccgactcaaccctgtaccgcgcaaacacagaccaaccagagcgtcggaatcgccgcacctagtgcaatacgcgttatttatccagagtcggttgtactcaacgctgttatttatttaccaggagacccagaagtatccgggttgcccagggccttcaaaaggcgttttagtgtcgaagtacggctcgattgtggaaccttcaaactcctattagtttattgtactcatccgggcgataaaaaagtgaatacgtgtaaaactggtatatcctccgaagtatatacccttaggctacgatttgttctaaaagtggctaaactgactgaagcacttagatccatattcctgtccgaactgcagtcaggcccctctgctgcaggtctgctggagtttgctggaggtccactacagaccctgtttgcctgcgtatcaccagtggaggctgcagaacagcaaagattgctgcctgttccttcctatggaagcttcatcccagaggggcacttgccagatgccagccggagagccggcaggcaggaacgtttaactctgctgaaactgtgcctacagccgccccttcccccaggtgctctgtaccagggagacgggagttttacctttaagcccctgactggtgctgtcgcctttctttcagagatgccttgctcagagaggaggaagctagagaggcagtctagctacagtggctttctggtgctgccnnnnnnnnnnnnnnnnnnnnnnnnnnnnnnnnnnnnnnnnnnactgtgaagggaaaaccgccaactcaagcctcagtaatggtggatgcccctcccccccccaaggtcaaggattccaggttggttctagaattttgtcctggcagggaaaattttcaaccattgattttagcctgttgggctttgggggggtaggatccccttaggtaaaccctttgggtccctgggttcagccccctttgcaggggaaggaatggttttgttttggcggggttccgggggcccctggggttttattaaaaaaaaaaagaaaacaaacaaactcctgcagctagctcagtgtctgcccaaacagcctcccagttttgtgcttgaaacccagggccctggtggtgtaggcacccgagggcc

SEQ ID NO: 931 - DNA, 1220 bp, Homo sapiens
  SIMILAR (506)..(279): 661254mologous to Homo sapiens Human secreted protein sequence encoded by gene 11 SEQ ID NO:72,accession number B24447,Smith-Waterman Score=253.
ttaggcccttctgctgcaggtctgctggagtttgctaggggtccactccagaccctgtttgcctgggtatcgccagtggaggctgcagaacagcaaaaattgctgcctgttcctttctctggaagcttcgtcacagaggggcacctgccagatgccagccggagctctgctgcagatgccctgcccagagaggaggaatctagagacatagtgtggctccagaggctttgccgagttgcagtgttcgaacttcccggaggctttgtttacaccctcaagcatcccaggtcgacttcagactgctgtgctggcagcaagaatttcaacccagtggatcttggcttgctgggctttgtggggggggatccactgagtaagaccacttggctccctggcttcagctcgttttccaggggagtgaacagttctgtcttgctggcattccaggcaccactgggatgtgaaaaaaaaactcctgcagctagctcagtgtctgcccaaacggctgtccagttttgtgcttgaaacccagggccctggtgacccgagggaatctcctgagcctggccatagtcattttaaaattagaatcccctgatgatccaaatacagttattcttgggaacaagaggctacatcctcaaactgatttcttctgcgtggcattctcagtatttctcgttttccttgacactggactggtggctttgcatgtatactggctctttcttctttcctccctgctgatgtctgaaatgcacacgaaagcacaagacctaggactaattcttacttccgcaccatctggtcccttctttcctattttattctggcttcagcccttagtgtctagtcaactacttcccacaaaaaagaaaccttcttgtgtttggaagaaatctggaatcaaaggtgaagaaagtgaaggaaaaaatctggaatcaagtagttattttgcttcaattcttactttagacgtggaggattattaccagggagttacattctattttctccagggcagcagtcagaatttcgataattttttcctccagtctttgatgctggaaaaagttattgaacattcactgaagttaagagggtttctctacctgcaggatttgctcatagggcacacgcacaaaagtgtcacttgtagcatgccagtgactcaagaacttcaagaatcatcatcatatgtgatgagaatgagacaataa

SEQ ID NO: 932 - DNA, 429 bp, Homo sapiens
  SIMILAR (242)..(159): 421254mologous to Homo sapiens Human HUPF-I mutant protein fragment 56,accession number Y21408,Smith-Waterman Score=65.
cccacgcgtccgaatctactccttatagaggaaacacttattgtttggattctttggatctgatgggggcaggcaataaatgaaacaagtgttgaaaatgttaaaggctgtgctgaagaaaagccgagagggaggaaagggaggcaagaaggaagcagactggatgttttcctagtgctttggattatccatgtcccatgtgagcaggcatctgcaagtgtgcccacacccaaccaccaacagcagagatgaccaggacctggaagagaaacagaagggtgggaagagaagaaatgccagctgacccagagcccatcaatgacaggactgtggcaggctcagcactgctggcatccaaccttcagagcagggcactggcactcttctttctgttatgcccgtgtccacttgtatcagctgcaaacaacg

SEQ ID NO: 933 - DNA, 363 bp, Homo sapiens
  SIMILAR (191)..(117): 351254mologous to Homo sapiens immunoglobulin mu heavy chain variable region,accession number AJ244975,Smith-Waterman Score=39.
atgtcccatgtgagcaggcatctgcaagtgtgcccacacccaaccaccaacagcagagatgaccaggacctggaagagaaacagaaggagcagggcactggcactcttcttcctgttatgcccgtgtccactgtagtcagctgcaaacaagcttgcctccgagcagtgcctacacacatgtcacttcgagcacatgctttgtggaatagagcttcatttcacccacttgccaagttaggccttagcagaatgaccggagccagcgccactgtgctgcagaagcagcaggcccaaatgctgcaagagttaataaatgtccagtacccacggagaggagaggaaactagggtgcttgatgactaa

SEQ ID NO: 934 - DNA, 589 bp, Homo sapiens
  SIMILAR (354)..(584): 411254mologous to Homo sapiens Human secreted protein encoded by gene 24,accession number Y00281,Smith-Waterman Score=139.
tattctaaatcttaagagtcattaggttgatgtttgcaattttttatagttaatgcaaggcatgttaaaatataatttgtcttggttttaacattctgagccactgtgtagcagaatttatctgtattacttgacattgcccaattcttcctatattctgtgggataatgttttagctttacttgttcaattggaatatagtttgtactttttttagtttacgttattttacccaggaggcagctgttagttaaaaaaaaaaaaaaatttggaatatactgttcttttggtggttttattctatactaaaacttgaaattgtgagtgactcttggtcatgctttatttatgcagaatatcctccgaatcctaaatctagagctccaaggatgctggtcattaagaaaggtaatacaaaagacttacagctatctggattcccagtagtaggaaatcttccgtcacagccagttaagaatggaactggtccaagtgtttataaaggtttagtccctaaacctgctgctccacctacaaaacctacacaatggaaaagccaaacaaaagaaaataaagttggaacttcttt

SEQ ID NO: 935 - DNA, 2498 bp, Homo sapiens
  SIMILAR (2441)..(2226): 611254mologous to Homo sapiens hypothetical protein,accession number AL136844,Smith-Waterman Score=206.
  misc_feature (1)...(2498): n = a,t,c or g
ttttttagatctgacataaaacctcaagtatttttgctctaagattatgctctttacataagttagaatatatttaaacataagggggagctaaaagcaaatgggggtaaacaaaccagaaaaatcaaaatacaaatatacacagagccaaaatagtatttccgtcagcagcaaaacagaaacaattccaaaattaatgtgcaaatgaaaataaagtagttaacagtcattcatttaataagcttgtgtatttgataatgaaaacgcttagctttccttttctgacctcggaaaagtaatcaccatctttagtaaggtattacttttaaaagtatgactttaacaagtgaataaagcatgtttagagtatgtttatgtttagaaacaataccttgaacactacagaaaacaacaatattctgaaaatccagtttattttccatgtcgtggacagatccagtcagtgtgatcagtttttctgccgtgtgtaaataatttatcaaaaataagttttctccacaagactcttttcccatcaactctgaaaaccctggtctgacaacataccccaataaagcttttgaaaatcacctcttgaaatttggaagaaaatgtgccaagtcttttcctgtaacatttactgcactacaaatggctaaagagcaatttatggtttaaaaggtgaatagtacaacaggtgagttcaggaaattgttttagtgcactttgctccagttttagccaacatgctacattttcctttttggtttttgttttgttgttgttgttttttggggggagggagaaggagaccgcacaaagtggacttgaggatttccattgtacgaaaaagatatgactctgcaagcaaaacagtgtaagctgccttttttcttaagacctggacattttaagacagaagctttgcaaaacattacacaatttttttattattaaatgagaaaatctcatttgttacatcgtcacattgctagtcagagaaatgttgcagtgatggaaggaaagtcaatgttggaccaaccccaagtcctccattcctacaacattcatttacaaagaaataatcgttcaacacagcccaacaaaacattcttgggttttcttcatattgaaggtcccccaaaaaaatcctcttctaatgggggtatttcacctacataaattataggttcttcatttttacaattcaccccaaactgtatggggaggtggtatcacacctaaggatttctaaaggctgttaggggaatcccttcacacatcgtcggtcatctgatggtattcactggcttacttgtctctgtggtccattcattctcagttgtgggggttttgaaagtgctgttcctcccagggtcccaaacttggaagtcacagatcaaggccatttttcaaaatacccattttttcctcagaccattccttctgtaactgttcactaataacttggaattctctcatttcatcctcagttaagggagcacatgtttccaccatttcaactgtcctccctgcccagccccatttccctttaaacaacctgtgttctgccctcaagtgaacttgaaagaacatcagtttgtgggaaggttgaagaccgaatgatctgctgggaaatcactgaggcattgccattctcttgaggaatttcattttcatcgaagtttcggtttatatccctttcttggtgagtactattgctgttatgtaaattaaatgagtcgtcatccttctctgagccagcacggctttcatcttcatgttcctcttctactctgtctcttttcaatgctttcaaaaattccactcttcttatcagtgcgcattcgtgtccagtttggttagacgaggctgctgattaagtttgtcaacaggagaagaggaatttgagcgattacactctttccactgaaatttgtaagatggaacctaaaagttccttggcaagttgatttaaaaagccattaaaagttgcccaacgcccaaatgtggactcatgagggaaagaagttcccaactttattttcttttgtttggcttttcccattgtgtaggttttgtaggtggagcagcaggtttagggactaaacctttataaacacttggaccagttccattcttaactggctgtgacggaagatttcctactactgggaatccagatagctgtaagtcttttgtattacctttcttaatgaccagcatccttggagctctagatttaggattcggaggatattctaagagaggagcttgggagattttttttggttgggtatgtgtgtgtctgagacgtgtaggccccacacacctgcagctaaagacttattgtgatttggttctctctcatactcaggatttaaagacggaaaatcctcagcttcaaactgtttgcgttctcncttgtcttcctttcctccccggttttcaatggtcaggtatgttggttttcatgtagtccctgggccttttcccgg

SEQ ID NO: 936 - DNA, 1521 bp, Homo sapiens
  SIMILAR (1)..(108): 411254mologous to Lampetra fluviatilis peptide YY,accession number L22868,Smith-Waterman Score=58.
atgtctaaaaggtgggcactggctgggttgggatgtctgcagtgtgccagggcctgcctgggccagctctccagtgctgtctgcacatctcctcctaactccagtgattttgtgttggtagaagaagaattctaccacagaaagggacaaaaaggcagctgtggagccagccgcttctggatctaccttactgcccaggtgagcatgctgcagagtgaatctcaggccatgcccaccacatctgccatctcgtcttcaccaacttgcttccaacagcactgccacaggtgcaggtcgatgtctttcaatacggtcaatcgattaatctatctgccccactacaatgtaagattcagtgaagacaggttcgatacctggtttggggtccctgtaggtccaattctgatgccagaaggaatgtctcagtgtggactgacttgcaatgaggacctagaggcaggcactggcagggcagagctgagcagagggagtggtaaatggcccagagcagagggggtggtaaatggcccacctgagctgagggatgaagcccaccatctccctggagcccgtggtcatgaggtcctcattgcaagtcagtccacactgagacattccttctggcatcagaattggacctacagggaccctgcagtctctggggaagccgatgtgagaggtgctggtggcagctgccgccagtgcttgccaaagttgcggactgccaaccacagctggtactgtccagggcctgccctgagcacactgacatctgcccgtgctgaagatgcaaagcctgttgcagcaggagctgctggcaccagccctgatcattccctccttttgcaatgcctcagctcttttatttccatctgttgttctatgataggctgctctccccacgtttctgatagctgtgggagagtggacagcccagagacaaccggagaagcagatcttattactggaataattgcacctttgtgttccaacactgcacagtatttttctcaggagccaaaactggcttctaagattcttggattccaggctcaccattccaggcaagtgctaaagggaaatgtccccaggccagagcaaagaacctttaccttcaaatataccttggatcaaagagagaaagcccctgcatccctccatcagattgatagtaggctcagtagctgtcctgagtcaaaagaccaaagaaaaagggaagcctcaaggagagatgagaggacagcagatgaaaatgagcctgcaggaaaccaagctctgaggagaaatgggcaggcagccaagagcagggcagaaactgcagcagtagcagcggcagcaatgaagtctccaagttatgagtggcaggctctgagaacaatgatggagcaggaagttaatgcagagggcaggcagagagcccctgagacgataagcaagatgagtggagaaaaccgacaggacttagacctgggcatgggcagcagaggaccttatcccagcagcagagggactggcagttaa

SEQ ID NO: 937 - DNA, 359 bp, Homo sapiens
  SIMILAR (202)..(294): 411254mologous to Nicotiana tabacum Open reading frame is homologous to the maize transcriptional activator Vp1,accession number Z26311,Smith-Waterman Score=59.
gttaacagcagggtgcactaggttaagctggggtaacaaatagccccccatcttaggggcttgtaagggtttatgtctcccttatgctccgtgtcccactgtgggtcagctgtccgagcccccaagcccttgaagtagccaccatctggaacattaccaatcttagggacgaaggcaaagtggacagcatgaaccaagggctggcacttaaaacttttactcagaagtcctgcatgccacttccactcacaagccacacagtcacacctaagttcaacgaggcagggatgtatattcctcccacaggaaagagcactgagagggagaagcaccaacctatttcgtgaaaaataatacaa

SEQ ID NO: 938 - DNA, 409 bp, Homo sapiens
  SIMILAR (286)..(197): 501254mologous to Homo sapiens TP1 (AA 1-55),accession number X07948,Smith-Waterman Score=66.
tcacagttctgcaggctgtacaagatgcatggcaccaacagcttctctgatgaaggtttcaggctgcttccacttgcaggtgccttgtggatgttcaacagccattctttactcctgttcggaggcctctatccaagcagggcagggtgtgccccggactgcttggaattccacttaacgctggaagcacgcagacgctcttgaggcggccagctgcgtatcgtgttgaggagccgggagagtgcaccccatgtgggcctgagcgtttgggacgaaccccatgggagtctgatgggaaatacggaccaatatgctgtgagtgtgcacgaggtcctgtttttaccggggccgtgtcgtgataaggtggctgtatagtgaaaccacccgtaaatggttgtgtaacgcacat

SEQ ID NO: 939 - DNA, 588 bp, Homo sapiens
  SIMILAR (51)..(179): 401254mologous to Drosophila melanogaster Mst84Db,accession number X67703,Smith-Waterman Score=69.
atgactttgggctttgctaatgcaaagagaaacgtgcaggctccagccagggacccctcggagaacagtgcatgggctgtgcgcaactttgctgagccattttcccgcgaggcccccagcggcgcgggggctgtggggaggtggtgtgggagtacggtcgctgctgcgcggcgtggggagaactggagcggctgcccggacgcccccgccctggtcccggaaatactctatccaccccgctcccccaaaccgctgctccagattaggcgaggtgaagctggcaccgtgctctattttcgacctgtagcctctgcgaagccgccagttctgcgccagattagccccatccatccagtgtcaatggttgtcttgttgagaaaatcaacatttttgagctatactgtgacctgtgtcagaaaactgacgctgacaacagacctgcaagtacgaacttgttatccctgcttcacagataaaggggctgactcacaggaggattcactgatgcagccaggattgcaccgccagctcagagaggtcagtgagggaaaccccactctctctgactcaaagttcactctgacttga

SEQ ID NO: 940 - DNA, 346 bp, Homo sapiens
  SIMILAR (42)..(104): 421254mologous to Homo sapiens SmB' protein,accession number X52979,Smith-Waterman Score=40.
cgacctttggggacgcaaccctattggtcatttggagagtgcccatgttctatccttatcctgctggatctacacaaagctttggacttcggggatcccctcctcttctttaaacccttccttcccctgaatttcaagagactatacgctgggtggctatctacctctctggctgcacatatgactgtcccacagaggccccttctttgctcccatccccgaacgggccttatcctccccgcccttgggctgtgcgcagattccgcagctcaatgccatataaatgttggcagctttcttatctctcctccacccaagccactcttctgagcaccaggcctctgta

SEQ ID NO: 941 - DNA, 205 bp, Homo sapiens
  SIMILAR (51)..(137): 611254mologous to Homo sapiens Human secreted protein, SEQ ID NO: 6705,accession number G02624,Smith-Waterman Score=75.
ggcctgttaggaacagggctgaacagctggaggtgagtggtgggcgagcaagcaatgcttcatctgtatttacagcgattctacgttatggtgagttgtatttcattatatactacagtgtaataataacacaaatggaaaaagatgaatttggggactgataactctggagttatgcaaaggttctgtgatctactttctcata

SEQ ID NO: 942 - DNA, 317 bp, Homo sapiens
  SIMILAR (122)..(27): 401254mologous to Enterobacterio phage MS2 lysis protein,accession number J02467,Smith-Waterman Score=61.
tcatacttgtcttcctgagtcttctttatcccgaacatcctgagttttcgaatggttgacatgccagctggctttctgcagatgtacttctcgtgtgtaaatttccttctctgtgaggtattcatattgaacatgacctccaagtgtgtttgggtctgtgcagaagacaataggactgcgatttctgatgattaaaactcccgaagtccgcagtttggtgttcagctttaaaacgtgctctgggcgtcctgtggtggctaccagaggctttggtgagtcattgtcaacccagtagctagagaagtgctggaatgccc

SEQ ID NO: 943 - DNA, 205 bp, Homo sapiens; identical to SEQ ID NO: 941
  SIMILAR (51)..(137): 611254mologous to Homo sapiens Human secreted protein, SEQ ID NO: 6705,accession number G02624,Smith-Waterman Score=75.

SEQ ID NO: 944 - DNA, 770 bp, Homo sapiens
  SIMILAR (453)..(307): 301254mologous to Arabidopsis thaliana STP,accession number AJ001662,Smith-Waterman Score=74.
aagtgtagaaatagaatcaaccttttgtgctgtctgtcacaggaagaattcagtaagggatagttcacaaggtacactaacatctagaatcaaacttagagcccataattaagtgatggattgaatgagtataatcccccagtgacccttagggatgaagtaccagaaaaaaaacaagattttcctttgtcttaggttcgaagagggaaggatcaagagggatttgaattaaggaactttcataaagtaaggcagtctactgggagtaaaacttgaagcaaaaacaaggcagaaagcacggagaggagtaaaaacagtaaggaaaggagcaaagaatggcaagaaataggacagtggaagttttcggagatgacaagttagagggaagaagaaatgagcaagaagacatagagaccgacaatgtaaagcaatggtcagagaatgaccgccaggccaaaaaaggtgaggagcacaccctgttccagatggttgatgcccagccatcagtcactccatctccaaatatagaaagaaagaacttacagctgtgtttgagcagaaccaaacaagcagtgtttgattttagagatagtctctacaacgtacaatccccatttccgtggattgttaaaactgcagcaggagagggtgagcaacagaacacagcagctatacaaattgacagtcaccaaatggtgaatacttttactctcttagtgatcattcttttcgttgagaacagagctagcagcaattcagtggcatcctga

SEQ ID NO: 945 - DNA, 894 bp, Homo sapiens
  SIMILAR (744)..(887): 451254mologous to Homo sapiens hnRNPcore protein A1,accession number X79536,Smith-Waterman Score=91.
atgtctaagtcagagtctcctaaagagcccgaacagctgaggaagctcttcattggagggttgagctttgaaacaactgatgagagcctgaggagccattttgagcaatggggaacgctcacggactgtgtggtaatgagagatccaaacaccaagcgctccaggggctttgggtttgtcacgtatgccactgtggaggaggtggatgcagctatgaatgcaaggccacacaaggtggatggaagagttgtggaaccaaagagagctgtctccagagaagattctcaaagaccagattattttgaacagtatggaaaaattgaagtgattgaaatcatgactgaccgaggcagtggcaagaaaaggggctttgcctttgtaacctttgacgaccatgactccgtggataagactgtcattcagaaataccatactgtgaatggccacaactgtgaagttagaaaagccctgtcaaagcaagagatggctagtgcttcatccagccaaagaggtcgaagtggttctggaaactttggtggtggtcgtggaggtggtttcggtgggaatgacaacttcggtcgtggaggaaacttcagtggtcgtggtggctttggtggcagccatggtggtggtggatatggtggcagtggggatggctataatggatttggtaatgatggaagcaattttggaggtggtggaagctacaatgattttggcaattacaacaatcagtcttcaaattttggacccatgaagggaggaaattttggaggcagaagctctggcccctatggcggtggaggccaatactttgcaaaaccacgaaaccaagtggctatggcggttccagcagcagcagtagctatggcagtggcagaagattttaattag

SEQ ID NO: 946 - DNA, 2055 bp, Homo sapiens
  SIMILAR (1970)..(1011): 1001254mologous to Homo sapiens protein A1-alpha (AA 1- 320),accession number X06747,Smith-Waterman Score=1723.
cggaaattgggtatttttaaaagggccttcccagacactttcaaatctgcgggatttatggagcggcattagccagcagcttaggttcctaattcccctggcagagctttggaacttggaattgtgatagaagcattcaacattattatcagggggagtgggtagggaaagtccaaatctctgccagtcccaaatccatacagttgtcatttcattcaagagaattaaatcggtttattgattacacattgataatggataccacaagcttcattccccatctataattttaatctggtaccattattcaaattttagatatatggcatagggatgtgcccaacaattcacttttattaacccattccatggattttgcttggggtaatccccttttaatgggtgaaacttcagggtcacaacagtaacttatcaagttccactacaccaagggtttcccgaaggacaatgggcttctcccaccccaagcagggttggtataataaaatccccaaataggaccggggggcatcacccctgaaaggaatttcctaacttccacactgttggggggggaaattttacccaagatgggccttagggagtagggacttaaccttttacacaggcacattaaaaaaaaaagacatttatttcagcggtcacgatcaggacttgttacattttaggcaatcaaacaggcatgggggtgcaaaaaaaaaaaaaatctacattaaaaaccctttggttggaaatgctttacactttcccaccagaaacagaaaacttaaaataaccctgttatacaatttagtcacaaattacagtccctcgagtttttttgcccattacacatgagtatttggtctaaatacatgttcttctttggtagcagctaggccctggcacccactgtgtctggggcgagtttcacaaaatctgttgtaacctgtagctttcctgtcacttctctggctctcctctcctgcttaagctttgtttcctaattaaaatcttctgccactgccatagctactgctgctgctggaaccgccatagccaccttggtttcgtggttttgcaaagtattggcctccaccgccataggggccagagcttctgcctccaaaatttcctcccttcatgggtccaaaatttgaagactgattgttgtaattcccaaaatcattgtagcttccaccacctccaaaattgcttccatcattgccaaatccattatagccatccccactgccaccatatccaccaccaccacggctgccaccaaagccaccacgaccactgaagtttcctccacgaccgaagttgtcattcccaccgaaaccacctccacgaccaccaccaaagtttccagaaccacttcgacctctttggctggatgaagcactagccatctcttgctttgacagggcttttctaacttcacagttgtggccattcacagtatggtatttctgaatgacaatcttatccacggagtcatggtcgtcaaaggttacaaaggcaaagccctttttcttgccactgcctcggtcagtcatgatttcaatcacttcaatttttccaaactgttcaaaataatctcttaggtgatgttcttcagtgtcttctttaatgccaccaacaaatatctttttcacagttaagtgggcacctggtctttgagaatcttctctggagacagctctctttggttccacaactcttccatccaccttgtgtggccttgcattcatagctgcatccacctcctccacagtggcatatgtgacaaacccaaagcccctagagcgcttggtgtttggatctctcattaccacacagtccgtgagcgttccccattgctcaaaatggctcctcaggctctcatcagttgtttcaaagctcaaccctccaatgaagagcttcctcagctgttcgggctctttaggagactctgacttagacatgacggcagggtgaagagagactttaacgatgcttcttcggcggcgtccacgggcagaaaaggggctttgcctttgtaacctttcg

SEQ ID NO: 947 - DNA, 401 bp, Homo sapiens
  SIMILAR (126)..(287): 381254mologous to Pseudomonas syringae pv. syringae HrpU2,accession number U25812,Smith-Waterman Score=76.
ggggaggagtgagacttcaaaagagaaacgcagcacatcaaatatctgctgtccatctaagatcaaagccgggctgcaaggccacatggctggattggccccctctccccacttcgttctcccaggccagcctacagccgctgcacgcgttcatcttgcagcctgggccctgccagcaagactgtgcccgccaagacagcctctacacacccagaggacagtgggccccccagcatggccaaactgccaatgagacaatgttttcccttcatgaagagtcctcacatacccagctgcagagcatttgacaccaggcatccacaagacacagaccctgctcctcagaatcttgggctcatccgtggaaatcaaggaacaatacaggggaagacagaatatga

SEQ ID NO: 948 - DNA, 747 bp, Homo sapiens
  SIMILAR (222)..(184): 531254mologous to Homo sapiens Human secreted protein, SEQ ID NO: 7782,accession number G03701,Smith-Waterman Score=45.
atgctgcgccagaggctaagaagcccgctggacaccgaggctgagtccccggggaagctgaccacggccaggcaccgcctaaagggagtgtgtgagggatgggggccgcccctcccgcaggcacaggactcagccatcacaaatgccagtggtccttggaacacgtctgcccggctgagcctgccagatgcccagtttagggaagcgcatgggaaaactcagtctccgctggaggaactcattctacatgttcctgccattgatgctgtaggaagaaagtacacagaggtgcacaaggagaacctggctgctggccgtgtatggacagatgctgggtcaaataggcatttcctgttcctgggcatggtgacagctatacagacccactgcccacaaagggttttggtcacagcgcaaggaagctggggttggcctgaaattgcatctgatactgacaagcagaaaaccaggaggagctgcgagatggaagagagcagcgagaaagaggccggagcgagctggacatctaagaggctttgttttataaatgggaaccacagaaaacaaacaccagaactggaagcatcctctgaagcaatcaagtccaagcctctcactctgcagctggaggaactggccccagagactgaaaggggctctgccaggaagcaaaaccaggcacccccgggggatgagcacttcaagggcttcaccatgggtgatggagaccatgcttgccataattaa

SEQ ID NO: 949 - DNA, 462 bp, Homo sapiens
  SIMILAR (37)..(384): 971254mologous to Homo sapiens A human brain-derived signalling factor polypeptide,accession number Y53871,Smith- Waterman Score=575.
  misc_feature (1)...(462): n = a,t,c or g
naagaagacatcgctagaccngcatacgccattcttggcacgaggagcacagtgaaagtccaaggcaatgacatctcccacaagctttagatttccaaagtgaggaaaaaggatgaaggcttatatgagtgcagggtgactgatgccaactacggggagcttcaggaacacaaggcccaggcctatctgaaagtcaatgccaacagccatgcccgcagaatgcaggccttcgaagcctcgcccatgtggctgcaggatatgaagccccgcaagaacgtctccgcagccatccccagcagcatccatggctctgccaaccaacgaacgcactccacctccagccctcaagtggtagccaaaatccccaaacaaagtccacaatcagcaaagagcaaatcgcctgtaaaatctacggagcggacagcaaagttgaccctaaactccaagcaccaccctgcaccg

SEQ ID NO: 950 - DNA, 1161 bp, Homo sapiens
  SIMILAR (545)..(670): 921254mologous to Homo sapiens A human brain-derived signalling factor polypeptide,accession number Y53871,Smith- Waterman Score=200.
gttcagagctaaatgctctgcccaaatttccccactcagttctcacaagaagctatggactgaatatgattttcatgattgcaattttcttggatgaaggaaggtttgtaacttgctgtatggtcataaagctagtaggaggtagagctgactctaaacaccctgtttttaaccatagagctaaaaaacccgaatgcaaatggactcttgtggcatacacgccaatggcatctacaaagtcaaacaccatctgcttcagatttacctgggtgctgacagtgaaagtccaaggcaatgacatctcccacaagcttcagatttccaaagtgaggaaaaaggatgaaggcttatatgagtgcagggtgactgatgccaactacggggagcttcaggaacataaggcccaggcctatctgaaagtcaatgccaacagccatgcccgcagaatgcaggctttcgaagcctcgcccatgtggctgcaggatatgaagccccggaagaacgtttccgcaggcatccccggcagcatccgatggctctgccaaaccaacgaacgcactccacctccggccctcaagtggtagccaaaatccccaaacaaagtccacaatcaggtatggaaccccatttcgagctttttattttaccactcacaaacgctccacagaaagtatttggacgtgtgatgatgcaaaggtagacgaaaccgaaggtagtgaacgtctgttcactagcggtaacttgagcaacctgtgcttggcagatggcaaatggattggaagccctgttggacttgctgttattgactctgagtgtgcaatggtgatcaagctagcaggagtgtggactgagcttcttccaggacaagcacatggggacaataagcttctcaagatgacctttcaggagccaaggagcttccaggcttccatggtaccagtgggctaccaaatgcaggttgccctaggaagagtatggccttgggaagaggaagaccctgaaggagctgacagctggagtcggatgttcatgaattctctgcagctgagaaacaagcccttccctgaagagggtgggagggcagttggcctcatcaaaatgtgcgtgctgacaattgcaaagatgtggaaccagactaagagcccattgatcaatgagtag

SEQ ID NO: 951 - DNA, 204 bp, Homo sapiens
  SIMILAR (111)..(73): 301254mologous to Takifugu rubripes parathyroid hormone- related protein,accession number AJ249391,Smith-Waterman Score=31.
atgctgagggcccagctaagacctgagcttgcatcctatggcaccaacgcctgccaaggtgggacgttccccaggaataagctcatccaccctcgggggttgctggtggatgccacagatgacgaggaggaaatggtggtaccgtccagcatctgtgggctgcaagaaagaagaaatataacaccagaccacctctggcattaa

SEQ ID NO: 952 - DNA, 1063 bp, Homo sapiens
  SIMILAR (2)..(232): 621254mologous to Homo sapiens PRO2550,accession number AF130089,Smith-Waterman Score=225.
ttttttttttttttttgaggccgtctcgctctgtcgccaggctggagtgcagtggtgtgatctcagctcaccgcaacctctgcctcctcggttcacataattctcctgccttagcctcctgagtaggtgggattacaggcacgcaccaccatgcccagctaatttttagtatttttagtagagacggggtttcaccatgttagccaggatcggtctcgatctcttgacctcgtgatccgcccgcctcagctccccaaagtgctgggattacaggtgtgagccactgcgcccgcgccctcgttttgtattattttaaagtcttatactttatcagaatgaggtccaagcatgaacctgggcttgaagagctaggcagcagtagtcatgaaacattttcaataaattaaaaggctttcacagaatgaggttcagctaaaacctctttacattacaaaatacagctaggaggaattacaattctttaatcgctcgaattatgagggagaggaaaaaaagtctaaaaaaatagaaaactctctccatacctgggtatcaaggcaagatgtaacactgcataatgccacaatatgagcagtcactggatgacagatactccagaaacagtggtctctggggatctcggaattatgaccaagagatgaaaacactgtaccaaaaggcatgcatacaatcactgtgtgcattcaatgcgtgagctgcgacataagcccacttctagcaagacaatgaggcagtgttaaagagtatccattaaaaccggcgtgggcaactacatgttgattaaaccttccgcggcagcaaaatgtgggcacagcgccatgtctgggttctgcagctgtttgatgatcctcttgcggaatttctccctcacacgattaaattccattatgtccatggggtcctcttcgatccaaaacttatgaaattcatgcattaaatagctcagtttatcagcagcagtctgtacataattctttcctgtctgttgttccctggagcttactgcattgcctgatttccaggcatacggtacttggcacat

SEQ ID NO: 953 - DNA, 604 bp, Homo sapiens
tttcgtagcgatttggggagtgttgtgaattccgagggctccacacttaagaggttgtacactcacctgtctacctggactccaatttccatatttccagccacttgaggactgagaggtggatgataaaccctgtcatagtggagcaagttcaggtgtttaaccgctgttatgggggatctgccttttctccctcttctttcttacttccataagtatgtatgtgcagagattgaaaaataaccttgagagagtccatccatctaactccagttcattggaaatttctgcttctttgagactgaggttatattccacttcttctgactacaccaccaccatcaatctccttctctgaactcttggatcattacttcaacctgaaacaactcatcaggcagaatagttgcctactgccccaaccccaccaaatgttccagcacctctgatattacctcacatggcaagagggctttgaagatgtgattgagtcaaggatcttgaatggggagattatcctgaattattcagctggacccagtgtaatcacaaaggtttttcaaaagatggaagagaggcagaagagccagaaaaggatatgttg

SEQ ID NO: 954 - DNA, 454 bp, Homo sapiens
  SIMILAR (347)..(448): 431254mologous to Taenia solium RS1,accession number AF082830,Smith-Waterman Score=61.
gggtcttacttccataagtatgtatgtgcagagattgaaaaataaccttgagagagtccatccatctaactccaggaaacattgcagcgttataagagaaattatagactatttgttgaagctcagcatgtccatctccctgctttgaagaaggatgttgggaactgactgtaaggaagacaggattggagaaccaggtttagaagagaaaaggcagtgccagaagtttttgattggagaaaactacagggcaatgttgcacaagaaccattgctggactgcatcattgcttacccaacatgactcagcctcggtattgccactgactcacggagctcctaatagaggagaattagtgtcacagatcgactggaaaaccaatccacatgaagccaggaagagaaatgaagctgctgttgctgaatccatagctggccttaatgatgctggctag

SEQ ID NO: 955 - DNA, 480 bp, Homo sapiens
attaaaaggtaaccttttaatctcgtaggaggaatctcattaagacatttttcctgatatgtagagcagtctgttggcaaaaaggcaaatatttcctttccaaattttgtaaaattatatttaatggaattcttttcctttgattatcaaggactttcactgcaggcagtgctatttcttgtgcctaagaatgtttccaaaagtcgcatcgctaatgatatttgccaagttgagtgtacacaaagtttctcatatcctgttcaagttaatcaacatcaagcacgtggggatgctttagggtgagtctatagtacaaaatgcataaaccatgtccccaggaaatttgaaaggaagcaggtgctgaatggaatttttttccttttccatgagctgtgttaattctatctccagtaggcctaatgcttgaataagcaagatgtctaatcaataaattattttcatgctcagaaaaaaaaaaaa

SEQ ID NO: 956 - DNA, 509 bp, Homo sapiens
atggtcacctgcaataacttagaatgggaatggaaatttgaaatgaagagggggcttagtgaaactgtgttctacttagtcacctggggactaaccccttgtggagcccgagctctcattcacagctttctagagaaatctgagcccgaacctgccagaataggggatctcacccacccagttcagcagcgaggacacctgcagaaatacattcccaaagcaaggctgggcggccgtgtgaagtaagcaatggcctcagttttgcttctgttttggatgaacaccaccacatagggcctgaatgtgaaagaagaccctctatttgtctgttccggggcagcctgggtagtaaaacactgttgaatgggccacagtttcagcagaccattcaggtgaatgggaccagtctctcttcttccaaaatatcagaagttaaaacacttgggaacggagatttggccaagatggacccatttacaggctggactcagtccagagactatagagat

SEQ ID NO: 957 - DNA, 493 bp, Homo sapiens
  SIMILAR (256)..(50): 331254mologous to Homo sapiens Similar to CAAX box 1,accession number BC000393,Smith-Waterman Score=71.
  misc_feature (1)...(493): n = a,t,c or g
cgagttcccccacagtcggggaaaagccggtccccagcatcccactcttgccctcaagctgactgtggaacgcgagacagctttcaaagacaagaggacaggaaggcagttaacaaagtacacgtttccaagacagcctgagctgtctagtgctgatagcagacaggtggggtgttccaggccactgcttcctcccttatctcccagacctggccgtgtgtggaccatcaccagacctaccaaagctgttgggacctggacgggcgtgctgataaaatacgaccaaaccatggaaaataaccctggatttttgcaacttcagctaggaaataacaaggccacctacaccctctcacaagcataatggcagatccctggaacagaaaagcaacattgttattttgtctcaagaagcgaacgcgctggttcncatccnnnnaattnnnnnnngtntnctnantaccctgataggacggatttntttcggccaccg

SEQ ID NO: 958 - DNA, 806 bp, Homo sapiens
ggaagttttcaaaagctaaagctgaagggtgtcaggcctgcgtcttgtctgagatggcagccaagccagcttcagagtcacctgctggacccacatgttcctgagccagatgccaggagctcacccacaggacgggaaagacctgtccccagcatcccactcttgccctcaagctgactgtggaacgcgagacagctttcaaagacaagaggacaggaaggcagttatcaaagtacacgtttccaagacagcctgaactgtatagtggtgatagcagacaggtggggtgttccagtccactgcttcctcccttatctgccagacttggcggtgtgtgaacctcaccagcctaccaagctgttgggcctggacgtgggtgctgttaaaataagacaaccctggaaaaaaccctgaattttgcaagttcggtaggaaataacaaggcacttagagacttctcaagctaatggcagtccctggagcagaaagcaacttgttattctgctcaagagaatccaccagcatgctcttggcctagaaactttttcccctttctgatacctgtttaacgtcattattactctgtaaacaagatgtggagaagatgacagtcaggcagtggcacaaagacttcatgactgttttgttttgaacacagatgagacaataggaacccttaaatcatctctgccttgcagaatcaataaattgatcaggtgtctccatgctctattcatatcgtaggtgttaagacccctcgtgccaagcgggcgtaagacagttcacaagtatcagtgcagcccgct

SEQ ID NO: 959 - DNA, 478 bp, Homo sapiens
  SIMILAR (312)..(440): 321254mologous to Conus textile conotoxin scaffold VI/VII precursor,accession number AF193260,Smith-Waterman Score=62.
tttttttcccagatctttttttctatctttattgttttattgtgattatagtaggaatccatgcttcttacaaaaatgctcagatgaagaaattcataccgtagtgagagttgatcttggactttctaattgttgctttctggtcattaagaaatatgtaaatctcgacggcgacatacgcgtgcattaagaccaaatcaaagctaaagcttgtaggtgctccttctgtgcctgtacctggcccttagtttgaataaaaggcttggaaaggaagattgaactttgcaggcacctcggtaatattctctggaatgaaaatgacacttattttcccctctgcagtcctgtattccacattctggcagctcaaggtcctcttttcaggtggtcaccctcagacatcaactgttaaggccttttcaatgtcagccaagtggtgcctgctcctgtcatccagtctccactgagccctcccatg

SEQ ID NO: 960 - DNA, 1191 bp, Homo sapiens
  SIMILAR (700)..(647): 611254mologous to Macaca fascicularis hypothetical protein,accession number AB046646,Smith-Waterman Score=66.
caaacagtttgcccagcagcaattaaggtgaggctaagatgatgccaaaaatgactggctgtttgctgccttatcactgcctgatgtggatatggagctgggcagagctgctcagcctctgcaaggcaattcagtggccctgggtggcacagcatgggctctgccatctgcttggaagccctctgtaagttcttccagcaccttcacctataccccgactagtacgctcttcaacctttgcagtcactttgcacaacaggtacggttggaggatggcagcttcagcatctcactccctggtccttttccagggacctcgatgcctgaactttcatcagggccaactcatgcaccagggacaggagggacagtcgggtctggcactgatcactcaccaatcgtggagacagcagtgaagaaacaggtcagctaggctacccccggagatgccatcgcctggtgctgattagaaaagagccagattatctactcacttgttctcatgaaggcattatgggaagttaaaggtaaccttcccaggtaaaggttttggccgtgctcctggagggagaaatttgatgagcgaatgagcttgcaggctggaggcccgagagccagtactcgcctatccctggctgatgcgtttggggctgggggtaggatgaggtccacagggctgttgtgcacaactgcagggggcgccagtcatccagaactcacagtgaaaggccccctggagcaccagacacattgtactctctgtgagtgatctgcaaaaggagcccctgctggtgagattgtgggcatctctcctgagtctctcgagaagctactcttcagggaaatgagacctacgtccttggtattgcctctatctgctggggttaccacagagaagagggttatcagcaaacaaaggtcagcaggctccatgagggcaggaccgtgtctgcttttgatcaatcaagtgctggatattccatgggctctcaatcgataccgtaaggtgaacgaaggagaagggacaatggcaggggatgtcagggaactttccacaggtagatgatccacattctggcagctcaaggtcctcttttcaggtggtcaccctcagacatcaactgttaaggccttttcaatgtcagccaagtggtgcctgctcctgtcatccagtctccactgagccctccc

SEQ ID NO: 961 - DNA, 488 bp, Homo sapiens
  SIMILAR (467)..(156): 381254mologous to Mus musculus erythroid ankyrin isoform,accession number U73972,Smith-Waterman Score=208.
gcataaaaaaaatcatgccattaatgtgtggaagcagcgaacacacacacacttctcggtgaatttttacttcctgctgacatttcttccacgaatttctcaatactggcagtaaaaacttatgatccttgactgaccgttcgctgttacgagtggctcttcttttccacatgccggatttctttcttcgttttcaccttaaaaccttctccctgcacatcatcacgttttctctcttgtgggataacaattcgtcttaatactttccgagtgatttttctggtgatgaggttgccttcttcatcagtaaattgttcttctgtgacagattcaccaggaatgttttttgcttcctctccctttataatcaaacgccggcgaataactcgggtagtgactctccgctcttcctctgagcttgaatcatctcactgtctttcaagtcctgacaaatgcatttttagtataattttaccatcacacttaaa

SEQ ID NO: 962 - DNA, 775 bp, Homo sapiens
aagaataataaaataaaacagatgtagtggtgacagctgtagcattgtaagctttagagtagccctcatgcttctggccatgataacactagattctcaagttccttaggccagagtggtcacactgaagtgtctgtggagactaggcaggtcatctaagcaaaggggttgttgtagactattgtacataaataatagctgcctctccctgagggtggattacacttcccagccccaatgccttcacccttgccatggaacttgctttgggcaatgaaataacagcagatacttcaggagatagtgtatttttgttaatgtaccctttcctcactccagtgatgctccagagagactgctccctgctctgctggctggggttgaagatgatgtgggagcagaaccacagttcaacccaccataggttaaggcaatgttgaggcaagaaataaacctttctactcaaacatcatattctcaaggaaaccttccccgtcacctccgacccaggttaagtctctggcaaacaagtggacactggaggcagcttgttcgggtttgtatcctagttctgccactttttacttatgatcataagtttttactgccagtattgagaaattcgtggaagaaatgtcagcaggaagtaaaaattcaccgagaacaagatttggcaacaatggacctcattcccagaagggtcttcaccacgggcttcgaggatcgcgatggcgtaaggcgacgcatatcaaggagatcgaaaatagaggtctga

SEQ ID NO: 963 - DNA, 14797 bp, Homo sapiens
  SIMILAR (14554)..(10163): 951254mologous to Mus musculus ankyrin 3,accession number L40632,Smith-Waterman Score=7173.
aggtgaagagtttaacacaatttattttatgcttaaataatcgactaggtcatccagtgtatggtttttcatacatatgtcattagagctatgtgtcaatgaatgctgattttatgtgaatataatcaacaaattaaagaatttcaccaaaacccaaataaaaatgccctttaaaacacagcagccttattaacctaatatgacactgctagaatggttacaaatgattggcttactgaaaggtgtctacatcttatagccagtacacaatacagtaataattttacagcgtgctgccattctactagctaaggatttctgttcagtcctttttaaatacccccgactggggccttttatgagcaccatccacctctaaagcggcaagcatttacccccttttaagcactaacagatagcatccccccaccccctaaagcaactaccgtataggttatttttttttgttgtttttaggtcatttcattgaaaaattggcaatagcaacaaatattagatgaagggctttgtgtttacagataaaatcttttgtgttgcagtatactgtagtgtttgcaaaattggaaaagatttaatcaaaataaggtgatacacatgcatcaaaatattagtattctgaagaaaaaaatttttcacagaactacagaattcctcattttgggaattatttaaatttgcagcagattttaaagatttgtttttttttaaaatcaagctagcagttttgcatatacaaacattataattgctaatatacaagaatcagtgaagagtcacccccacccagaatccctccctcctcttctagggtgaagtcacttgagacccctatttgttaaatgcatttgcaatattctgtttgtgttctaagaggcagtgccttatcaacattttattctatttttctgttagaatttatacagtgttattatttacagcaaaactatcgatgttttaaaaaagaaacaaatagtgtttataccctgacagtttgggtccaagaaaaataaggcgagctgttgtagatttagtaattttagtgtttctctgtgatttgatcattccatctccttctgtcccttctgatggcaagaatttcttccttttgtaaatgacaccaaattacttgagataaactgttaacagcatggcttcttgtatatacactgcattgctaattgcacacgcgccaatccggaaatgaaagtgatttccatgctctgtaaattggctcatgctaaattaaaatgttgggtggttttcttttcttttctttttgcataaaaaaaatcatgccattaatgtgtggaagcagcgaacacatacacacttctcggtgaatttctacttcctgctgacatttcttccacgaatttctcaatactggcagtaaatacttatgatccttgactgaccgttcgctgttacgagtggctcttcttttccacatgccggatttctttcttcgttttcaccttaaaaccttctccctgcttttgctcagacccactgggacccctcttcttcatgggagggctaaggcttgggtttgccattctggctgggaggaaggtcctacttcatcttttttcatacttgacaggggcacacaggggtttaggtctcttctattataaggcttgctgggttttcttctaggaggatttctggatatggctgctagtggtgatgctggttcttcaacatgaccagatccatgtatttttggtttcagaagtttccttggtaatctgttttcctacatcactttggggattctgggaaagtagattttgtacattgcttctggagtgatttccggatggcttccatttgcttcaaatttgccagtttcccctttgagaaatgagggtatggaatccctacacgggtcagggcggcaacccagcggatctagtaacccaccagttactcttcgagcttgagcgcaggactctaggtttccacttgatgtctcattctgccaaccatcaacagggtcatggaaaacattgttctcatctgcaaaacttctggtgcctgaaatatttccataatcaaatattggtccttctagcagtgtcactatatctattcgattaatttttgtcaagaccgaagttaaggcatcagttgtggcattttttccgtctctggtaacccatttttttaataacatgaagctctgagaaattaaagaatttggattttccacacgtatttgattgatttcatccactgaaaaattcagttcccttgccagttctgtccaactaagtcccaggtgatcggctactattgccatcctgatatctgtccgttcacatggactctgtggaccagtccttctactgctccttttctcactgccggccttttcactctttgattttaaaggtgctgcctctgttttcttatctctagcagacttcgttgtaaccgaaggctggccaccccgggaagtctcggacaacgacgtgtttcttgaggtactttcttcctcatcggacaactcggactgcatctttttttcttcttcagagaggcggtccacaagctttaaggtctcaccactaattcccttaaaatattcaatggaatgtttacatacttccttgagctgacttttcctaactttaactgtgcagctggtggtggtggtagtggtggtagtggtggtggtggtggcagtggtggtggtggtagtgacacaggtggatcttacctttactggcaacttggatggaagctgtttggccttgcctttctctggctgcccttgcttttgtgtggcacatgcttttctaactgcaattatgttatccctgggtgtgtttttcactggaattctggactttacatctacacatgaagaagtagtaagggctttggttttctcggattgactaacctgcttcattttacttgctttagtgtttgacatatggttcggtgggaaggtatcttttggtgaagtggcctttatgggaagtttggatttttgcctaatccctatcaattcctttgttttttgctgttctccaagaactttctgcttatctcttacacagtgtccttgtagtacccctgtcttttttcctgatgagactttcactgggttatctttctctgtggtacaagtgggtgcagaatgttctgtcagaactatattactcataatgttatctgtctgtatagtggaagaatccaaattgttgttgttattaaagttatctttttgaaaatcatgtttttcatggggcctaacgcccatctggctattggctgtatttgaaatcattgttatagtttcattttctaatccctgacaactggtcatcaccgcttctatcttatctgttatttctccagggccttctttcttcatggtcatggtggatgcagaaattcccatttttataggcgtgcgcaacttggggtcaactttagaggtgttagtggctgctgctgatttctccagggagccactactggatgtgccttcctgacactctccgctggtcgggatgctggggttaggttccactgtaggtgtctctacatttctctctagattggtttctacagtggtgtcccctgactgtggctgtggtgtggcagtgaccatacttttatccccttccccctggtcccctgacttcccttcagaagtatgctcaccaatctggaaaaattggagcctctcttcaacaaaatccctcttgctcatgtcaattgcaccactgcgagtcatctcaaacatttttccttcatgaaatgggaaggggttaggctcactagttggggtactttcatcagttggcgttctggctggcgttgtatcaggggttgttgctggagagcggtcttctaccgccagcccaaatggcttagtttcatcttcccgtgatttactgtcaaaaacttcatcatcccctcggttattagaccaagggtcaaaatctagacctttggtagctactgttttaaaaggagtggcaaattcttcatctactttgtaactgaagtaagtatcaggaaacactgatctgtcaggatgtctgccttccagtgtgaagaactgggcccctgacttctgatcagtcttatcaggagtcttttcagatgaagaacttttagaaggtggcttgtcctcatctggtcccacctttccctcctcctcgataacttcaagtttactttggctaaaagagcggtcagctggcttcagaatgccctctgtgttccagatatctttcttaatttccatggcttgaattgggagtttagaatcactctctgtcaagccatcatcttcatcttgcaggtcatagccatccagagagtcgatctctgtggcatccgtgtcatgagaaaactctgctgtggtggcaatggaacactctgtgatggactggtcgttgttcccattctgggcaatttcattctgaggtgaatcaaggccaaggccaaattcattatcttttccagatccattactttccagttctttctggttggaagccttttcagcagaagctttgggtttttctttttgttcatcgtccacttcctttaatttgaaggtatattttttaactgggactggctgataaatagattcgtcatcgcttgaatcactgacgtctgccccgggaggaactggtgaaggtggctgcactctaatgacaggttcagccagctggtacttgtcatgctcatcttgcagattgacttcaatcatgtcaacctctttttctgggagataatgatgcttcttatctgactcaatctggtccgcatccagtggtggaggagggggaaattcaatataggcaactctgttatttttgggtctttggttagagtctttgctcacgtcattaggcatttcacgctcaactgctgtttcctccactgtagtctgcttaagggaggttgacttggcctgttcctcctcctctgactcctcagaaacctcgggaattgggctgggtttgcctggtatataagctatgagcgagtcaggtgtcttagatgtaaattcataactcacttcctctgaactgggtgtttctggggttaaagggcttttcccagagctgtctagaaaggatacttgctctagagtatcatcttctggactaccttggggagaaggaggttgcttttgctgtctagttgtataaaaggtccccctggtttcttgtactgtcttacattcctgacttatgattttttttacacctccttgttgtatctccttttcatattgcttccccacttgtacaaaactgacataaacgggtaaagtttttatctctttccctccctctgtctgggctagtggtgcgagtttttccaatccatcaatgggactgtggtcgaatacatcactagagggagattcctttcctgggctaaactctaaagaatcaggagatttggtgggggaggtttcggtttcctcgagaggtgggcataaacctacataactctggtgtttggaaactttgctgatttctgaataggtaactttttcatcttctatagaattaaagtgctgtgtctcaactgtctctttactcatgcttgactgggacaatttttgtgatagttcatgttttggaaatgccgactgttcacaaaaaccatcgggaatattagaagacagcattctcctctcatcagcaactctgacgggaatgtgtgacactgctgagctctcgctcctcctggaaggctgatcaagcaatccgcctggatggtccccttctttcacaacatattccctatataagacttttttggagggagattttacagtcatttctttaatttctgagagagagccgtttgttaacaatttgcgttctctctcagtcacagacataaattcattcttttgatcaacacttttactctcagggtgaccaatgtgattctctcttacatcatgaacaagtacatgcgaaagtttttctttctgagacttattgttagtggctcccgaactctcccatgttctaaagacctttttgtcccatggtcccctagttgctaaatctgaggttatatgacatgccaagtctttagcctgctgctcagaaaaagagtcaggcattgctttacttgacatttcagttctctgttttttcacattatcagagccagaatcatttacaacaatttcgttgctttgggcatgctcatctttggtttttaataccataaaatctttttgcacagatacactttcatctgggaggtctatggccttctgctgtttttctctagcaaaaacttggtagacgggtagcttgctctcctgtatttttttaactgggattctggactggccatctgactttctgtcttcttgagacatgtccttactttttgcgtgtgtgccttgttcaaattttaatctaatggaactgagtttagattgtttgagctggaatccagactggggcccatctggtgctttgctctgtgaaatacttcctttggcttccactgtggacttgctgtcctcagtctgttgggagagaaccatcttctctgggctgctgggcagactgggtgccttctcctcggccttggggaagccttgtccatcagggccatgctgtcttgccttaacccactcatcattggatgccagcagttctgtcagtagcactttctcagggctgctactggtagggctttgagaagaatattctttgccatttttagggcgtgcctttttctctggggactgcagttcatcatttagcttttcagttttgtcacgaaaaaactgtgacacttcagtcagtttttcttcagcctccttcacagtcctgtccaccctatcttcatatatcaacttctctctacctctgtctaatctgtcctcagtaaagcgcatccacatggcatgttttggactactaacattgccagaatagtgcaacactgtcactttatcaaaatgctcatctttagacactttacctacaccattttcagaaacatctttatagattttggagagaatttcttttttgggggcagtggctattttttctctggaccgcttatcagacccctgtaactctgagctagggggtcctgcatggtctgtaaccgattcctcagtatcagaatgagacacatctagcttttctgacagaagcattttctcagcaaacctgtaagactcccctcttagttctgacaactcatcgtcatggtattctattgagtgttgactcaaaagcttcaatgttttataagagtcatcagatatgagttgagcagaactagggcggctatcttcttcttgggacacaggagtgtttactctggaagactccagataagaaggcaatgactcttcagcagtaagttcttcttcttcttgctgaccctgttcctctgaacaaggaaaagcatcgtgtttttctggcagaaaatcttttaggttaatatctccccgggataagtctttctgatatacatacatttctttttctggatgctttttggtttctctaataatgacttcagtgggctcagcttggttacctttttcgatgtggacttctattatacgctccagtttgggtttcatttggttgtccttctctgcatgctgggctgaggtttcagcagcagacttgtgaacatctggagacactgccgacttatgttcaaacagacctgccagttctttggaaggatcccgcccggactgaaaggccttcatgatgtcatggactgacatggtttcttcaattctttcagatgcaccttcaccgcctggtggagaatgataaaccattctggtggttgtggttatgtgagtctcttctttaacacgcatgcctttgcttaaaacccgattgtggtcatcttcttcactactggctttcatttgaaatgctttaaccttttctttaatactagaggtggtgggctttggttccaattccataaaagtaggtgaaggtttaggtgacacaggctcctctggttgggtctggggaacatccccagctgagggatcatagctcctgataacatgaaccacttcagttcttgtttctgtaataacaggagggatgggaacttcatgaaaaagtggtttaggaccagtcgtttcagcgctttgtggggctgaaggtgtcttttcacttcttgtttcaaagccactgtcagacaagggacttttatcttggtcgtgttgagaaaagtcatcaggagactctaaaatagtatctgttccaaaaaaggaatcagccattttacacaattctttctcagaggtggaagtcctcatggaggctggaggcattttgagtttgtgttcctgcaaagcaattgctggttttaaaactcttttctgtcctccctcaccatccttctttgcatcctcaaacttgtattttaagtttgtcagtgaactactcccaatatcatttgttaggtaatcaataactttggtcaagttataatccttttcggaggcggcttttgcttttacttgcactctctctggcagagatggagactggctcgcagcagcttgttgtctggcttcccggatttcttccgaactaaattctatccagtcatcttcaggagagtgtcctttgtcactctttggtgatttgggtgatcctttattatctacacatacatcctttttaaggatttcactaactttcactaagtcttcctttactttctctacaattttgaaaggttcttcatcatctattctcccttcctttgggagttcaggttggaatggcttctcctcaggcacatctgtctgtagtattgcggtcatccgcattaggtcctctttcatttcagctacatcttttagtatctcctgactggaagataaagaagatggtgtagacaacttaagggcagagggtgcaaggaacaaagatgacttaactggagatgaagttcgactgaagtgaggctgaggatgtgtctccgtagtcaatgttttaatgggtgacagcaaggctgctgctgattttgtaaatgaattagagtctggaagtttctttaatgctggttctggcaaaacattgactacagagtatactggcactgttataattgatgaagttacagatgaggtagttgcagatattgacgacccaagggatgtatagagtgcacttgcggaaggagttcttagagactgaaaagctgatggtgctgcagaaacatatgacctgagtggggaaaatggcattgcagtcgtggtagaaaacactttctcaactgtgtcagtggctgcactgaccacagagctcacagagtttgtagcagaagaaattttttcctgtaacgtggcagtggctttgcatccattaattaaagttgaggatgatgcatattttagaggggaaatagatccattgactaatgctacctctgcatgtccaggcatctgcttcacaggtgatgagagagaagatgccattgtaattttggctgatgaaatgacatcaactcgtgatttaactggagacaccactgactttaaaggtgaagatattagcggtgctgctgatgtaataattgacttaaatggcaaacttgaggaatacatattaatgtttgatttgggggaggcagggggtgtcatagtaattgatgacctctccaaaagagaccctgctgtagtcactggagaggttcgagaggaaaacgtagaattggatgccagcccttttaagggcgtagcttccgtgactgctggagctctagccagggtaccagaggaaacctggatattgtatggagattgtgacaccacagtttttatcggcgaagacattgtccgtaaggatctaattggagatgccacgtcactaatggatttaactgaagatgtagttgacgcgcctaatgtggatttgattggagaaggtgtcgaaacagaccatattgattttaacggagaagctgatggcgtattagaggaagaacttgataaggaagtgaagcctgacttggctggcccaggcactgtaatcggagctgttgtccaggactggtatggtcttgtagaaaagaatggcttgtatgagtaagtggtggggagggatcttgttgctcctgtactccgttcaatcattccaggctcagtcaagtagctgtagcgcttacgtaaagctaaggatgcgaagctctgtcgtctatctgttttctcaatctcatcatcttgatctgactctgtctcctttttatgtgctggcagagtgatatttaagttgcaaaccgctgtttgaggcagtccttttgttgtctttcgttctttcagaaaagacagacgaccacagggctcttggctggtgtctctaatcttgatggaaaatggcagtctattttctttgaaagaataaaagttaaaaacaagttgctgtcctcctttggtaagtggggccaaatttccataacaatcaacataaataggttttccttccagaacctcaatatctttgcttcttgcgacttcctcaaaattctcttgttgctctaaagttttgtccactttgtcatctgtcatgcagaaacatcgcaaggaagattctacgggatcattcattttggcaaaaacaacaaacttggccatatatggaacacatatcaattctctgtacagttgcgtggctaaccccacagtttctaaaacttgatggcagtctgcaagccaaaatctggctgaaacattggttgtaaaggagacacaatcttttataaacgtcaaaggagttgttcctgtgatgtcttcccactgagcaggcgaagtgccccctgtaatgctacagagaagacgcagattgggtgtagtgtcccctttgtatccattggatacaccttctcctgagggcgggggcaccggaatggtcattgtgattggtttatggaatttccgtcttcttggttccacagtgacaattgggctaaaagttgctttgtttccaaggatctttttcacaatttcatctggaacaggctgggcctggaggcccactcgaattcttttagttagggcaccctctgggaaagatgcttgaacaaggggcactgtggtgctgctcagaattccaccttcaggaccaatctggttgctttcctgcttaatccgggaaaccactgcaaaatactgggggaaatctttcgtgataatcctgcagatacgctttttccctaactcttctgggctatcaagttcttcatccatgccattaagtaactcggttaaatcttcatttttgctgtcaaactgatgctccttccaagtttcaccattttcacttcgaagaacaatgagttctctctcttttcctctcatggacccaaagtgagggatttccactatgacagggcctaaaaattgtgcccctgcaggacccatttctaccagcctactgctaatccctctcctttcaccatgtgggggtgggttggccagtttatgtctctttaccaaacggcaggtgattcgagtgggggccgtacacttgcgtggaggaatgatgattctcatcccgtgatgacggcttcctctcatggagccccctctcgcgtccaccataaagctaaccagaaacccagaatgaatggggcttgaaacaagattgacattgtctaaggtgtctgcagcccagctgtaatgtctaagagaatctgaatcaaattcccttgtgaatgttagatgctgctctttggatggcacaaggagttcttcaatcatcatgctgtcccgtgcataggagcttctgttcaaggtgtaagacctatccgaactgaaggagcggaggctggcagaacgcgctccgagactaaagcccatgtaaccctctgcaggcagggaatcatcacccaattccttaaggtcctgtggcccaagatatttgtctgtgtccccggtcattgcatcttcaccttcttcaacatctgagatatattcgccatcactgagcatttcaggggcattggctttacgaacttcatcatcagacatatcaagaacttcattcatcgtttctggaacattcattttgtgcttctctgtgacagtagttgtggtcatggtttcttcggtcactatcttcagggtgtccactactgagatgtagccgaggcgccgggcaatgccaagggcagtattcccattcacagtgagttcattgggggaggcgttgttctgaagtaagacatttattatatgcgtatgcccctgctgtgctgcttgatgtaatggcgtatacccattctttgttttggcattaacttttgcagaatgctggagcaggaaattaacaatcttgatatttccatagtggcagcccacatgcagtggtgtgtatcccatctttgtctgggcgtccacatgagccccttggtttacgaggacttctgccacattcactcgatcttcttgagcagccaaatggagtggggtcaggccgctcttattgctcaggttcacattcgcatttctaccgaggagcagcgacaccatgtccacgtgcccttcctgagctgcgagatggacggaagcaattccttgccgggtaactgcgttggcatcagcaccatattccagcagagttgtcgctatgtccatctggttctttttggcagcgatgtgcagtggcgtataaccattctttgcggctgcgtgaggtgaggctccttggtccaaaagcagaagggccactttctgattatcgtaatgtgcagctacatgcagtggtgttagcccgctcttcccagcagcatctggagatgcacttttctgtagcaggagattggcgacttcaagctttccatattttgctgccacatgaagaggagtaaatcctttctttgttgttatagataaagacgctccatgatccaaaaggaacgcggccacatcctcatgcccctctcgggcggaaaggtgaagtggggtgtacccagaagttgtggctgcatttggagatgccccttgctgcaacagctgttgtactatgtctgctttccccagtcgggctgaaatgtggagtggtgtttggtcatccttagctttagcttctacctgagctccgtcttgtaccagataccgcacaacttcagcttggccggagcgagctgccatgtgcagtgctgtttctcctctcacattggtggtgtttggtgaggctccatgatgcattagttgtgatacaatatttacatgccccatgaaggcagcaacatggattggggtaaggcccgactcggttacagcttggatggatgcaccgtgtttcagaaggagttccattactttaattcgattcttcttgcaggcgatatgaagaggggtaaagccattcagggctttggcattggggttagctttcttatccaagagaaccttggcaactttgtaatggccacagtgggcagccacgtgtagggcagtcaggtagtcattggtgacatcatccacgggtacattatgctggaggagaagctggacgcagtttaaatgatccccttgtgtggccatgtgcaatggagataatccattcttggtttttgaaagaatgggggcagctcgatcaagcaacatttctaccacctgctcgtggccactccttgctccacagtgcagtggtgtcagaccatccctggttttggcatcgattttagctcctcgatcgagcaatagttttaccatatttgcatttcctctttttgatgcaacatgtaaaggagtgatgtcattccttgcggtgaaatccacagcagccgctcggtttaacagcaacgtggctacattgatatttccatagtgagcagctatgtggagcggagtgaagccactctttgattccacatctgcattgttgtcattctgcagcagcagggcggcggcttttgtgtcgtctttgcgggccgcgatatgaagagctgggagacgcacttttcctttggtgtcattctctagcaggagcgaaacgacttggtcgtgaccttgttgcaaagccactgccaatggtgtgaagccatcctctgtggctaggctctggcttgcaccattgtcaagaagaaacttgacaacttccaggtgattttcctgggctgccatatacaatggcgtgaaaccattctgagattgtgcattgacattggctccatttgtaaccaagacttttaccacctctgcttgcccagccaaagatgcgatgtgcaatgctgtgtttcctttctttgtagctgcatccacattggcttctctctgcagcagctcagaaacaacctctacatggccttctttggaagcaaggtggagagcgttcaacccattctgattgcaaatgttgatgtcaactccattttttatgtagtcgagggccttttcaaggtgtccagctcgagctgctcttaagtaacttgcattggcatcagactttttcttccgatcccgggaccgtttgcggtgtttcctttttttctcaggctcttcttcagcattgatttctaaatccctgtttttctttaattgtgaggctgcatgagccataatgcatttaaaaagatcctctcaagcacacacggcttccttgtaaaaggtgatatcctcaggcacctctaataggcttacagcagcattccaatcactagagagaaagctttgactagaagcaggaagatattcacaatgcaaagatgctggagaagctgaagcttttaaaaacccaaatgatggtgtccc

SEQ ID NO: 964 - DNA, 873 bp, Homo sapiens
  SIMILAR (837)..(757): 371254mologous to Human herpesvirus 6 H88,accession number U92288,Smith-Waterman Score=66.
tttttttttatagtttttacctactttatctcattgagttggagttttcccccaacagagtacagtacatatctgcccatttttatggagaaggaaatggaggttctcagagtctgaatctaagatcccatggtcagtgattggtacagctaggatgcacacccaggtcttctggctctctctctttgctgttatctaactgagaaatttgggcaaaatagagtaaaggtcttgacatcagggataactaaagcaccaaggtcattttctacatcaaaacactttagtgaagcagctaaatccgatgatgtcctctttagctttggccttctctcactgtgtgctgtttggagaactctgttatgttgctctggcctttaactcaggctcagtcttccgaaatgagctgctgccggttaggagcatgttttatcacgtccctgttgcatcaaatcccagccactgctttgcttgaaggtaatcttgatatcaccctaactgtccaactccaaatcctagatgcccataatttcccttacaggctctgcctaatagacagatgcatatgctttatatcttcctccacttacccacaaatagatggactgaaaagtagcagagacatcggagacaaaatttcatttgtaagaagtaatggctctatcaacatgggcaagccctttaatttctgagtttatttttctgtaaaattagtagcccattttctacttcctagggttgttatataggttagaagcaatatatttaaaataccaagcacatggcaggtgtgcaacaaatgatagctatttttatgcaacagatacacctgcacaggagccaaatcctcgtgccaagcttggcgtagtcagt

SEQ ID NO: 965 - DNA, 573 bp, Homo sapiens
  SIMILAR (201)..(572): 1001254mologous to Homo sapiens PAT1,accession number AF017782,Smith-Waterman Score=638.
ttttactcgggcctgcgtccgctgccgccgtccctcagtttgcccccggaggaggcagggcggccgtgccttctgccgtgcgcccgcgtggctgccaccgcccctccgaatcctccggggccgcagaggggttcgctacggagggaggtgggggccttcgggaggaggaggcggaggaggcggaggaggagggaaggaagatggcggccgtggaactagagtggatcccagagactctctataacaccgccatctccgctgtcgtggacaactacatccgctcccgccgagacatccgctccttgcccgagaacatccagtttgatgtttactacaagctttaccaacagggacgcttatgtcaactgggcagtgaattttgtgaattggaagtttttgctaaagtactgagagctttggataaaagacatttgcttcatcattgttttcaggctttgatggatcatggtgttaaagttgcttcagtcttggcctactcattcagtaggcggtgctcttatatagcagaatcagatgctgcagtaaaggaaaaagccattcaggttggctttg

SEQ ID NO: 966 - DNA, 687 bp, Homo sapiens
  SIMILAR (544)..(684): 891254mologous to Homo sapiens Human secreted protein fragment encoded from gene 84,accession number Y07935,Smith- Waterman Score=229.
tttgcttgctcatcagcacaaatatttactgagcacttaccatggactagaactgctcgaaacactgggaatagagaagggaatcaaacagacaaaaaacatgttcaagtctctcaagtctacgtgtcctatcaattccaaggactcatcatttttgtattttctatttttctattccaattcttcaaagtgagaaagcagaggtcttaaaaccctgctccaagtttccagttggagctgtccagcctcctgacctagtgtcagcagagggcacaactgagcctcaggtgcagtgaaaagaggtttcttgatcccagccagatctcttcttaacttctatgttccaggtgcccctcagctgtacaaaaagagttgcttctgagattccaggttgaggcctgggaactggcagtcattgtgacaatgggaatctgtgtgagaaggcaggccttcatacttcaggcagttgacaagacagccttagctttcgttttctgcttgctacagagccttaaggtcagccagaagcgagtgactggaaacttcttcattcccatctctctcctggacttcagcatgggctggacccagaccccaggatctaacaactggcgacgaggatggaaggaggtgagtgggtcttcagcccctgagggctcccgggacggctacgtggccgcagcatga

SEQ ID NO: 967 - DNA, 694 bp, Homo sapiens
aaaacacccgctttcaaaaattagaatgcaaggtcttgtatttaagtagcctgaaataatcttttaaatggaaaataaagattaatcagagtgaaaattaaatgttattttgacacaatgaatcacaagcaacgattaaatgtatatattctgtatctatatgttttccaggtcaatcttcaaaatgagctgaaaacaactgtttagaatagtgtgattttgcagtctttgcattgctgtttagagtatcaaacaaaattctgggccacagatacgctgcatttctccagtctgggatgctcctgtcagggctttagagatgaccatagggatggaacaaaacactgatctggggataagggcatagcaaaccaaggacaaggaaaaggggtaacccactgggtgggaatctcatttttccattactgaccaatggacaatataccaatatttcaaattgtatcactttcaatcagaggatgagaagaggttttctcccacttgcctcatttgagctcaaccaggtagatgcctggagtcttctctagagcaacatgtgattcctttgaaggagtaagacagttcactttctcggcaaggcttctattttgccctggtggccctctgaaccagacaacagggaacagactgagttcttgaaggaagttagtatcacacaacccaatcgtcttcc

SEQ ID NO: 968 - DNA, 738 bp, Homo sapiens
  SIMILAR (189)..(1): 611254mologous to Homo sapiens Human fetal kidney protein fragment BD140_1i,accession number B10260,Smith-Waterman Score=182.
  misc_feature (1)...(738): n = a,t,c or g
aacctttttgtaatatttccnggaaacaggatagaatggaggtccctgaaaccatcccctataaacttccataaaattattcaggtaagaagggagggggagaaacaagaaacaaaaataaaccaaactttcagccccattcaatgttaaacactaggccagcttgaccctctgaacctgcttccccatggttgtttggggcctattacctcagaatcacccagagccctgttacaagattatttccccttagctgctctatagataacttcctgaacattatgaaacattgttttccctttgagatattctttcaggtcctgcatactagtaaaactgctgatatcagctgctctgtaggaccctattgacacaagctggtctgaaagaccccacaagaagctgagtcaccaaagaatgggtttcagtgtaatgatgatttcattctccttacctcaaccaacaactccaattttccaggcccttaccctctatgattcccttaaaaagcccagcccagaacttcaggatggggaaatggatttgagggtctccttcatctccgcacttggtgctctgctctgtggtcatttagctttttctctggggcaaatccagctgtctcagtgtatctgtcctgatgtctgccaagaagaggaggagaggcatcagggaagctttcataaggaaggaatgaataacaaaatagttactgctaatacgaaaggaagggtgtaa

SEQ ID NO: 969 - DNA, 333 bp, Homo sapiens
  SIMILAR (7)..(135): 861254mologous to Homo sapiens putative protein TH1,accession number AJ238375,Smith-Waterman Score=193.
ggcacgaggtttccagtggtagcaatgggtgtgctgaagtgggtggatgggactgtatcagaaccaaggtactttcagctgcagactgaccatacccctgtccacctggcgttgctgatgaggtcctgcagctgcttgttaagctttttgagactgagcactcccagctggacgtgatggagcagcttgagttgaggaagacactgctggacaggtggttcacctgctgaagcgaggtatgtacttcctgttgcagttacattccgaagtgtctggagaagctggacactgacatttcactcattcgctattttgtcactgaggtgcctgacg

SEQ ID NO: 970 - DNA, 625 bp, Homo sapiens
  SIMILAR (484)..(452): 1001254mologous to Homo sapiens dJ543J19.2.2 (A putative TH1 protein, isoform 2),accession number AL109840,Smith-Waterman Score= 63.
ggctttttaaaaatttacttattacttgttcttagcaaattaagacaattacaataaaacatcagctaactgggttcttgtgagaaaactgaggtcagcttggaaaggagttccccgagtggagttcccagcggcccgcggctgacggccaacggtgcattgctgacctcagtgacaaaatagcgaatgagtgaaatgtcagtgtccagcttctccagacactttcggatgtaactgacaacaggaagtacataacctcgactcagcaggtgaaccatcctgtccagcagtgtcttcttcaactcaagctacagaagaagggggacagggagctggttagagagggtcctcctcagccctctggcaagccccacgggcactgctcacctgctccatcacgtccagctgggagtgctcagtctcaaaaagcttaacaagcagctgcaggaccctgggggtgcaggagctggtggcaggtgctgatctacaaacaggccagagggagcttcgctgagcagtgtggtcacgctcagcacacagagaaactgggcactgtcacagccaccaaagagcttatcactgtggaagaaggtcctgacacctaagccagggccatcagcttcca

SEQ ID NO: 971 - DNA, 1146 bp, Homo sapiens
  SIMILAR (32)..(178): 951254mologous to Homo sapiens dJ543J19.2.2 (A putative TH1 protein, isoform 2),accession number AL109840,Smith-Waterman Score= 236.
  misc_feature (1)...(1146): n = a,t,c or g
tgtagaccccnatccagtgtggtggaattctgtacttcctgttgtcagatacatccgaaagtgtctggagaagctggacactgacatttcactcattcgctattttgtcactgaggtcagcaatgcaccggtggtttcatgtttcatactgtttacactagcactgccctttttggcttaatttagttcattttgtacctaactgagaactgtgctttctgatgtagtgatgacaatgacagatactcgtttaccaaaaagcaccttctgcctgcagcagctgtatgacacactttacctccattaccaccctgggcatctgaatgttggagatgggtggtgtcaccggccggtgggggtggggagggattttttccaaactgatggccatttcacccgggatgtccggggatgccctgcactagtgtgcggaagaagtcaccctgtgctcccccacgcaggtgctggacgtcattgctcctccttatacctctggaattcgtgcaaacttttccttcccccatcctgggagaatgaccagcatcgcaggtacccatccaaaacgggaaggcgagcatgaccctgtgacggagtttatagctcactgcaaatctaaattagttcaccatgatgaagttagatttgcagtgagctaatttagagcatcctcccagagcttgaagcagaacattcccagaaccccgttgtggaaaaaacccctttcaagaaagctgtttttaagaggctcgggcagcgtccttgaaaaatggggcacccgctggggaggaggtgggatgaccttcctttacaaaaggaaaatgggtaggcagctttcagttgaggaaactgccctttacaaacagttcccttctctgctgttcaatccaatactgctcccaaatccctgtttttcagtgtttcattttccctcaagggcagggcgctggggcttcccacgaccccctcagggacagattctgggccgtccagccgcgggccgctgggaactccactcggggaactcctttccaagctgacctcagttttctcacaagaacccagttagctgatgttttattgtaattgtcttaatttgctaagaacaagttatcagttaatttttaaaaaagccttaaaaaaaaaaaa

SEQ ID NO: 972 - DNA, 395 bp, Homo sapiens
  SIMILAR (99)..(308): 331254mologous to Homo sapiens Human HUPF-I mutant protein fragment 29,accession number Y21381,Smith-Waterman Score=64.
tcttctgcccctcattttcccactctgtaactttcctgcggtgtcttaggtcttaacatccatcgctggtaactcactaagtccatctgaccgtggaaaggaaaagctcacagtgtgaaaggcgacgatgaggctgctcccacctacgagggccctgcagtagcagactcggaaggatcagccggaaaatgcgagagcctgctcgaggtcccctcacctgctgagctgcaagacagacgcctgctgcaaacacctcatcttccgttagatcagccagcttacctggagcctgcaaaacctgaacttggggctcctggcctctattccattttttccatttctgtgagggttaagaggttctctgaaaaagcctgggaaattttatagtacaaccc

SEQ ID NO: 973 - DNA, 2360 bp, Homo sapiens
  SIMILAR (469)..(1650): 911254mologous to Homo sapiens mucosal addressin cell adhesion molecule-1,accession number U43628,Smith-Waterman Score= 1837.
atggcgggagttgtggttcagctgcgggggccgcgcgggagctgccgggagctgtgggcgggccagaccctctacgcccgacccgccctcgcagcccatggcccatcggcccggcagtggacgcagagcctcggccccgttccctccccggaccccccggacccgctctccgtcctccctgcagagccgagggccttggcccagccccgcatcctccccgaccgtgctcgatccagcccgggtaagccgattggcaatgcttggaaccccatggactggctgctgctttttattccatggccagggaaactgaggcacagacagaccctgagggtcgggggtcaggccaggaaagccccttgggaagcccccggggagcagctggagcggggtcgccgggcggcgggaaggagtgggcgcctctatttaagcggcttccccgcggcctcgggacagaggggactgagcatggatttcggactggccctcctgctggcggggcttctggggctcctcctcggccagtccctccaggtgaagcccctgcaggtggagcccccggagccggtggtggccgtggccttgggcgcctcgcgccagctcacctgccgcctggcctgcgcggaccgcggggcctcggtgcagtggcggggcctggacaccagcctgggcgcggtgcagtcggacacgggccgcagcgtcctcaccgtgcgcaacgcctcgctgtcggcggccgggacccgcgtgtgcgtgggctcctgcgggggccgcaccttccagcacaccgtgcagctccttgtgtacgccttcccggaccagctgaccgtctccccagcagccctggtgcctggtgacccggaggtggcctgtacggcccacaaagtcacgcccgtggaccccaacgcgctctccttctccctgctcgtcgggggccaggaactggagggggcgcaagccctgggcccggaggtgcaggaggaggaggaggagccccagggggacgaggacgtgctgttcagggtgacagagcgctggcggctgccgcccctggggacccctgtcccgcccgccctctactgccaggccacgatgaggctgcctggcttggagctcagccaccgccaggccatccccgcccatcataataaacgcgggacccactcgctctcagggcagcccaaagaggtgactctcacccctttgacagttgaggaaactgaggcactcctgcacagcccgacctccccggagcctcccgacaccacctccccggagtctcccgacaccacctccccggagtctcccgacaccacctcccaggagcctcccgacaccacctccccggagcctcccgacaagacctccccggagcccgccccccagcagggctccacacacacccccaggagcccaggctccaccaggactcgccgccctgagatctcccaggctgggcccacgcagggagaagtgatcccaacaggctcgtccaaacctgcgggtgaccagctgcccgcggctctgtggaccagcagtgcggtgctgggactgctgctcctggccttgcccacctatcacctctggaaacgctgccggcacctggctgaggacgacacccacccaccagcttctctgaggcttctgccccagaaagggtacactggccagcagttttgccacgagagtatccagaacaaaggagacagggtcatttataacctgacgcgtccaccctactgctctgtccggtttccattggctggaacgggacggtttccattggctggaacgggacctcacattctgtatttatcccgatcggctagcagcttggaacttttaaaaagaggcaaaggcagaggagaacaaaggaaggaagaagtagcttgtggaatgctaagaaagtggaatatggcggtgcttccggtcccgctgccctcagcgaagatggcggcagtggagaagcggcggcaagcggtaccaccgccggccggtttcacggacagcggccgccagtcggtatcccgggcggcgggggcggccgagagcgaggaggacttcctgcggcaggtcggcgtgacggaaatgctacgtgcggccctgctgaaggtgctggaggcgcggcccgaggagccgatcgccttcctggctcactacttcgagaacatgggcctgcgctcgcctgtaaacggcggcgccggggagcccccgggccagctcctgctgcagcagcagcgcctgggccgcgcgctatggcaccttcgcctggcccaccactcccagagcgccggcgcaggggcccggggcttgctgggagttgtagtgcgcgatgccttcttgggtgggatggatcggacaag

SEQ ID NO: 974 - DNA, 642 bp, Homo sapiens
  SIMILAR (1)..(261): 241254mologous to Human immunodeficiency virus type 1 gag protein,accession number U73088,Smith-Waterman Score=84.
atgggaccaaatagcaccttagagaacctcctgaagggggccacttcggtcttttataatagggaccaggaggaggcccaaaagaaagagagaaagctcaggggaaggacaaaggctctagcagcagctttgcaggctggcaaagtccaggagccccaagatgcatccattagttgctatcagtgtggcaggccagggtattttaaagaggaatgcccaggcagcaagacgaagccacctcaaccctgtccatccagtggcaaaaaccagtggagacagaactgtccccagatatggaggtcactgggttcagagccagtctcacagatgaaagggtacacttgccagaagttttgccacaagagtacaccgaacaaaggaggcagggtcatttataacctgacgcatccaccctactgctgtgtccgctttccattggctggaatgggacctcacattctgtatttgtcccgactggctagcaacttagaacttttaaaaagaggcacagacctagaagtagagcatcattctaaatcctcaccacgtgcaaccttgttagacaagtacgacaaccagatctctgacctctctttgacatctctggctttccaggcttttgtagcctttttaccaacttag

SEQ ID NO: 975 - DNA, 1173 bp, Homo sapiens
  SIMILAR (592)..(630): 611254mologous to Arabidopsis thaliana F24O1.6,accession number AC003113,Smith-Waterman Score=47.
atggtgggtcagcaacatgtgagcacagatgaaagcgcacggccgttcacggagcagctgaaggtgcagacgaggagcactggagggcgtgcagagcacaagagcccccttgcagccaaagccaaagggagagatccaagagaacatgtcggcagggcacagtggcaagcaaggtcaaatgccactcagaggcccggtgacaatgaccaccgcagcaaaggcgagaacagcagctttagcacagaccttgcgggacgaccacgtgcccatgagcgaaccagctgcctgaggcactgcagatgtcctggttggagctcaagggagctgtggagctgtggttttggtcagaagcagatggacgtctgcagggtctgcatagtactagcgagagctgcctgcctgcatggtggggcgtttcatctcttggcaaagctgcagcagacgttggcttcagagcaggcgggccaggagaggagctgtggccagacagccattgccaaggaagggtctggggctcgtagggtgccacagatacccacacccggtgcattttccacttatacccagacctatgcctacgggagctacatccctgccccacctcctccattccctgtccctgtctcacctcgggagcttcccactgggattgacaatgtggaactatggtctgcatttgggaagagggaggagcaggagggcttggcagttacccgctggctcctctccccaccacagaaagagtacactcgccagcagttttgccatgagagtacaccgaacaaaggagacagggtcatttataacctgacacgtccaccctactgctgtgtctggtttccattggctggaatgggaactcacattctgtatttgtcccaattggctagcaacttagaacttctaaaaagaggcaaaggcagaggagaacaaaggaaggaggaagtaacttgtggaatgctgagaaaggtatgtctttatcagcagcttgaaaatgaactaatacaaccagttgcagataaagaatctctgaatccacctataactgaccaaacctggatctgctcacttggcacaggaaagccaaagatccacaccaaggtttgtggcgagagaaagcagggcttttatttgccggcaccaagcaaggagaatcaggcagctcacacttaa

SEQ ID NO: 976 - DNA, 6743 bp, Homo sapiens
  SIMILAR (6087)..(6740): 1001254mologous to Homo sapiens solute carrier,accession number AY008285,Smith-Waterman Score=1123.
agccttttgtcttcctggagtcagtggtgaggctggtgatggatgagggttatctgatggggaatggacctcccataagggaagtagtatcagaaaagtattcttgtgaggaaaacacagaggagaacaaagagagcaggttgatggttctaaccttggagagtgtggaggaaaacagggcactgacagcagcagagggcatgacatactcctttgcaggatttcttcgtttccaagcaaataccctgtacatcctggactggtggagccagcgagaggctggagctggagcctatcggctgggccccgcctcgcctcaggggacactgctcggagacaaagcccggggccctggccaagggcaccgcggaggcgccttcccagacgcggatgacgtggctgtcctgactgacgggaaggaaaatggctgctcgcccagctccatcaccagcagcggcttgtggacaactcgcccacgcatccctggagcacgagcacttgccaggggacgcctggggcgcccctcctcccagaagctcccgcggaagactggagcaggccacctggctgcggataatgggaaccacagagtgagagaactccacatcggcctgaaggaagagcatgtgaaggaagactcagaaacagagcctcatcaggaagaggaagaggaggaagaagaagaagaagaggaagaggaagaggaggaggaggaggaggaagaaaagaagaagaagaagaaacagtttctccactggagacacaccttgagttcagggagacatctctccacacttggaccatcttcacagaccctggcagcagtcgatgggcaaagctgtgtaacagtgatggccgtttaccattgcctggtattcattgtccagcacgatgatgtggagctcaaatactctgccatcctcagcgggcatattgttggatctctcctcacacttccaggcccacactcatggctgttcatgatcacccaatggccaaagtacactcagaaatggaaggcgatgtctgagtgctcatcgtccccctgtggaaatgcacctgcagctctcgttttcttaaaggacaaacgaaacttctcagcagccattctacaaatccttaaatccataatgcccaggaaagcaaggcagaaagggtacactcaccagcagttgtgccatgagagtacaccgaacaaaggagacagggtcatttataacctgacacgtccaccctactgctgtgtccggtttccattggctggaacaggacctcacattctgtatttgtcccgattggctagcaacttagaacttttaaaaagaggcaaaggcagaggagaacaaaggaaggaggaagtaacttgtggaatgctgagaaaggagttagaagccgctcttcacagagatgacgtggagtttatcagtgacctgattgcctgcctgcttcagggctgctatcaacgaagagatatcacgcctcagacattccacagctacctagaggacatcatcaactaccgctgggagctcgaagaagggaagcccaaccctctgagggaagccagtttccaggacctgcctcttcgcacacgggtggagatcctgcaccgactctgtgattaccggctggatgcagacgatgtcttcgatcttctaaagggcctggatgcagacagtctccgtgtggagccattgggtgaagacaattctggggcactatattggtatttctatggaacacgaatgtacaaagaggacccggtgcaaggaaaatccaatggagaactctctttgagcagtgaaaagcaggaagaaaattccttggcatccgagccacagacaagacatgggtcccaagggccaggccaaggtacttggtggctcctgtgccagacagaagaggaatggagacaggtcaccgagagttttcgcgagaggacctcccttcgagaacggcagctctacaagctcctcagtgaggacttcctgcctgagatctgcaacatgatcgcccagaagggaaaacgtccacagcgcacaaaggcagagttgcatcctaggtggatgtctgaccacctgtccatcaaacccgtcaagcaagaggagactcctgtgctgaccagaatagaaaaacaaaagcgcaaagaggaggaagaagagcgtcagattcttctagcagtgcagaagaaggagcaggagcagatgctaaaggaagagaggaaacgcgagttggaggagaaggtcaaggcagtggaagtgatgaaggaacacgccatgtcagtgtctggagtgtgcttagctcactcagcctttgtgttcattgtagatcgagcgaagaggagaaagctcagggaagaaagggcatggctgctggctcaaggaaaggagctccctccagaactttcccatctggaccccaattcccccatgagagaggaaaaaaagactaaagacctctttgagttggatgatgatttcactgctatgtataaagttctagacgtggtaaaggctcacaaggattcctggcccttcttggaacctgtggatgaatcttatgcccctaactattatcagattattaaggcccccatggatatttccagcatggagaagaaactgaatggaggtttatactgtaccaaggaggaatttgtaaatgacatgaagaccatgttcaggaattgtcgaaagtataatggggaaagtagtgagtataccaagatgtctgataatttagagaggtgtttccatcgggcaatgatgaaacattttcctggagaagatggagacacagatgaagaattttggattcgagaggatgaaaagcgggagaaaagacggagtcgggctgggcgaagtggtgggagccatgtttggacccgctccagggacccagaagggtccagcaggaaacagcagcccatggagaatggaggaaagtcgttgccccccacacgccgagcgccctcttctggggacgatcagagcagcagctccacacagcccccgcgggagaggccagcagtaccaggaacatttggccctctgcgaggatcagatcctgccaccttgtatggctcctctggagtcctggagccacaccccggggagcctgtgcagcagcgtcagcctttcaccatgcagcctccagttggaattaacagcctccgaggacccaggctaggcacaccagaggagaagcaaatgtgcggggggctgacacacctttctaacatgggcccacaccctggatccttgcagcttgggcagataagtggcccaagtcaggatggaagcatgtatgctccagctcagttccagccaggattcattcctccccggcatgggggggctccagcccggccaccagactttcctgaaagctcagaaattcctcccagccatatgtatcgatcgtacaagtacctgaatcgagtacactctgccgtctggaatgggaaccatggtgctacgaaccaaggacccttgggcccagatgagaagccccacctggggccaggaccctctcaccagcctcgcactctcggtcacgtgatggattcccgagtcatgagaccacctgtcccccccaaccagtggactgaacaatcaggcttcctacctcatggagttccttcctcagggtacatgcgaccgccctgcaagtctgccggacatcggttacagccacctccagtgccagcacccagttctttgtttggagcacctgcccaggctcttcggggggtgcagggaggggactccatgatggacagcccagagatgattgcgatgcagcagctctcctcccgcgtctgccccccaggtgtgccttaccacccccaccagcctgcacacccccgtttacctggcccttttccgcaggtagctcacccaatgtcagtcactgtgtcagcccccaagcctgccctgggcaaccctgggagggcaccggagaacagtgaagcacaagagcctgagaatgaccaagcagagccgttgcctggccttgaagagaaaccaccaggtgttggtacttcagagggggtctacctcacacaactacctcaccccacacctcccctgcagactgactgcaccaggcagagctcaccacaagaaagggaaacagtgggcccggagctcaaaagcagctcctccgaatctgcggacaactgtaaagcaatgaagggcaagaatccctggccctcggatagcagctaccccggcccagccgcccaagggtgcgtgagagacctctccacggtggcagacaggggcgctctatccgagaacggagtcattggggaagcatctccttgtggatcggaggggaagggccttggtagcagtggttccgaaaagctgctctgccccagaggcagaacgttgcaggaaaccatgccatgcacgggacagaacgcagcgacaccgcccagcacagaccccggtttgacgggaggcactgtgagccagtttcccccgctgtatatgcctggcctagagtacccgaattcagctgcccattaccacatcagtccaggcctgcagggtgtgggccctgtgatgggagggaagtccccagcatcccatccccagcattttcccccaaggggctttcagtctaaccacccacattctggaggctttccccggtatcgccccccacaaggaatgaggtattcctaccacccaccgccacagccttcctaccaccactatcagcgaactccttactatgcctgtccacagagcttttctgactggcagagacctctccatccccagggaagcccaagcggacccccagccagtcagcctcccccaccaaggtccctcttctcagataagaatgccatggccagtctgcaaggctgtgagacactgaatgctgccttaacttctccaacccgtatggatgcagtggctgctaaagtcccaaatgacgggcagaatcctggtccagaggaagagaagctggatgaatctatggagaggccagagagtcccaaagaatttttagacctggacaaccataacgcagctaccaagcggcagagctcgttgtcagccagcgagtatctctatggaactcctccgcctctgagttcaggaatgggatttggttcatctgcatttccaccccacagtgtgatgctgcagacggggcctccctatacccctcagcggccggccagtcactttcagcccagggcttactcttcccctgtggctgccctcccacctcaccacccaggggccacccagcccaacggcctctctcaggagggtcccatctatcgctgccaggaagaaggcctgggtcactttcaagctgtgatgatggaacaaattggcactagaagtggaataagaggacctttccaggaaatgtacagaccatcaggaatgcagatgcacccggtccagtcgcaggcctcgttcccaaagacccccacagcagcaacatcacaggaggaggtgccgcctcataagcctccaacacttcccctggatcagctcagcagcgatctgaactatatcctgggttccagaaaaggcagaggttcttaccgaaagcaggggaggaagccgcagcccaaggaggtcgtcacttgccgggaagacagccccaacagcggctaccccaaggagccagcagccttgtgtcctgggatccccagcccctgcagaatgacccaccaggatctgagcatcacagccaaactcatcaatggaggtgtagcagggctcgtgggggtgacctgcgtgttccccatcgacttggccaagactcgcctgcagaaccagcatgggaaagccatgtacaaaggaatgatcgactgcctgatgaagacggctcgggcggagggcttcttcggcatgtaccgaggggctgcagtgaacctcactctggtcactccagagaaggccatcaagctggcggccaacgactttttccggcggctgctcatggaagatgggtatggccagggaaagtccccctctcacaagagggcagctgcaccagggcaggcctgtggcctgcggctgaaggagcctgacgcctgttcccataggatgcagcggaacctgaagatggagatgcttgccgggtgtggggctgggatgtgccaggtcgtggtgacctgtcccatggaaatgctcaagattcagctgcaggatgctggacgcctggccgtccatcatcagggctcggcctcagcaccctccacctccaggtcctacacaactggttcggcttccacccacaggcgcccctctgccaccctcattgcctgggagctgctccgcactcagggcctggctgggctctacaggggcctgggtgccactctcctcagagacattcctttctccatcatctacttcccactgtttgccaaccttaacaacctggggttcaacgagctcgccggtaaggcgtcctttgcacattccttcgtgtcaggctgtgtggcaggttccatagctgcggtcgcagtgacgcctctagatgttctgaaaactcgaatccaaaccctcaagaaaggcctgggcgaggacatgtacagtgggatcaccgactgtgccaggaaactctggattcaggagggaccatctgccttcatgaaaggcgctggctgccgggcactggtcatagcacctctctttgggattgctcaaggggtctattttattgggattggagagcgcatcttaaagtgttttgactag

SEQ ID NO: 977 - DNA, 516 bp, Homo sapiens
  SIMILAR (516)..(481): 411254mologous to Homo sapiens SEQ ID NO 437 from WO9922243,accession number Y19719,Smith-Waterman Score=40.
atgatatgtggcatatcttatcaattaaataatgttggacttcagagggtgaaggaattaggcatgaaggtatatctcaacagggctgtgaatgactggaaacaaggtcttctctcttcacactggttctcacttgatgaaggaaagtatttaagacaatacttctttaacatacttaataatggaatggatatagaaatgggagaaatcagtgtgaaagcaggctttgaaagggtacacttgccagcagttttgccacaagagtacacggaacaaaggagacagggtcattataacctgacgcgtccaccctactgctatgtccagtttccattggctggaatgggacctcacattctgtatttgtcccgaatggctagcagcttagaactttttaaaagcagcaaaagcagaagagaacaaaggaaggaggaagtaacttgtgaaatgctgagaaagctccctgagagcattttgaattatagcacagaacattgccatccacaaggtgcatga

SEQ ID NO: 978 - DNA, 801 bp, Homo sapiens
  SIMILAR (142)..(375): 501254mologous to Gallus gallus high mobility group protein HMG-17 (AA 1-90),accession number Y00416,Smith-Waterman Score=161.
atgatagcagatttgagcagacaaaagaaaaaaatcagtgaatttaaagataggtcaattgagattacacaatctgaggaacagaaagaaaagtatgaaaagtatgtaagtgcccacatcccaccactgatgccaccatgcccacgagaaggattgaaggggatagatactaaacgagataaagccaatgtgaaggataaaccacagagaaaatccacaaggttgtctgctaaacctgctcctctaaaaccagggccaaagccaaaaaaggcccttggtaaagaaaggaaagaaggtacccaaagcgggtctaagaaacagcctcacaggtcacccccagcaaacacaagcctctggccagccaagcagctggacacctgtgccacaggcctgagaaacagccctgtggtccacccaagcagatatatccccggaccagaccagcagcttacacccaaatcaagggccagagaagtagccccatgggccacccccagcaaacacatccccaggtcagccaagcagaaagggtacactcgccaacagttttgccacaagagtgcatggaacaaaggagacagggtcatttataacctgacgcgtccaccttactgctgtgtctggtttccatcggctggaacgggacctcacattctgtatttgtcacgattggctagcgacttggaactttttaaaagaggcaaaggcagaggagaacaaaggaaggaggaagtaacttgtggaatgctaagaaaggtaaaaatacttccaaataaggaagaggaacaagctacgacctaa

SEQ ID NO: 979 - DNA, 912 bp, Homo sapiens
  SIMILAR (583)..(675): 451254mologous to Homo sapiens Human NAF-1 protein FSP-TSR- like domain,accession number W92469,Smith-Waterman Score=67.
atgctctacatcctccctaccgtcaggcagattcccatagtagcatccagtagggaaatggtcgtgctttcagtgcccactgaagtcaacctgatcacattagacgtgttccacatccatgaattcaaccaagtgtcgatgaaaaatatttggaaaaatcaaatggaaggttgcatttgtactgaacatgtagagattttcgtgtcattcttccgcgtatatagttcagtacacagtgatacacgtctgcccatgattacgcgatatcctaccagaggacagacctcatgcagttttcataggcatctcttaactgcacaaccagagaataactttgagatattaggaaaaaggccttcaaattcattcattttaccaagaagcactgagcccttgatatgtacaaagaaagcatcagaggaggcacaaaaaaggatgcaaaagaagcaggaaatccgggttaagtcccatgtggtttcttccccccctccttggggtttctgggctctcctttgtgaagaaagaggtgcccctgagaacgcccagctgtgtatcacggtagagcggcgtatagccatattccgcttaggcgggttatcccgagtgaagcgattacgccgcttagcatcatctcggatgtcgccgtgcccggcgctagcgcatgaagccaaatgcggttttaccgtggcatcgcgttttgggagtaaccgtgtcgcagtagtagggccgagagaagcaaacactggggccctgaaaaaacatcagcaacttcttgtagcatctgtaggtggggaaggtttccaagccaccgagagggctgtgaacgcagttactagggctccactttttgcctacatgcctaataaagatacagttgcatacatacgcattctacttgctatgatgaactga

SEQ ID NO: 980 - DNA, 458 bp, Homo sapiens
  SIMILAR (232)..(104): 341254mologous to Homo sapiens bA472K17.1 (novel protein),accession number AL390755,Smith-Waterman Score=62.
agaactgattattttgttgatcatgtttcaaaacccgtgccctttaaacaagttcccagagtaaattgaatgcaattgtgggaagtttaactttttaaaggaaatcttgttgtattttgagattgagggagaggatgatgggagagggtgactggaaacctgcccaaggactgaaaaatctaaggggatgggaggaaggatgaacagagaagagaaagactagaattctgggtcagaaactcttaccgaatgagtcatcccacaggacaaataaaacctcactcatcaccctgtcttccctctctgtagcgagagaagcaaacactggggccctggaaaaacatcagcaacttcttgtagcatctgtaggtggggaaggtttccaagccaccgagagggctgtgaacgcagttactggggctccagtttttcctcagccaagtaggaagaacctctaa

SEQ ID NO: 981 - DNA, 405 bp, Homo sapiens
  SIMILAR (130)..(258): 511254mologous to Plasmodium vivax circumsporozoite protein,accession number AF059336,Smith-Waterman Score=87.
aaacttgggttaattttgctcagagtatccagagttagccactaggctgcgggtgaaatgggatggagaagaacaacagcaggcttcctggagccacatgggctgactagggcactctgtggctggcctggcatgggctcgcagccagccagccccctggcagcaggttctcctcagggcttgggtcttcaacctgtggcgacaggaggcagggcagactgtggaggacaggatgcaggtcagggagagggaaggcaggggtggaccgccatgagcatgaaaagacccgaagcaagttgactcttgcaatgtgcaactgttatgttctgcaaaatgagcaacgatgtatcaaattgatgcaaatttagatgttgatacttacaataaagtttttaatgtgtttta

SEQ ID NO: 982 - DNA, 1359 bp, Homo sapiens
  SIMILAR (80)..(1240): 1001254mologous to Homo sapiens NAD+-specific isocitrate dehydrogenase beta subunit isoform B,accession number AF023266,Smith-Waterman Score=1974.
tgatacatcgttgctcattttgcagaacataacagttgcacattgcaagagtcaacttgcttcgggtcttttcatgctcatggcggtattgagcggagtccgctggctgacccgagcgctggtctccgccgggaaccctggggcatggagaggtctgagtacctcggccgcggcgcacgctgcatcgcggagccaggccgaggacgtgagggtggagggctcctttcccgtgaccatgcttccgggagacggtgtggggcctgagctgatgcacgccgtcaaggaggtgttcaaggctgccgctgtcccagtggagttccaggagcaccacctgagtgaggtgcagaatatggcatctgaggagaagctggagcaggtgctgagttccatgaaggagaacaaagtggccatcattggaaagattcataccccgatggagtataagggggagctagcctcctatgatatgcggctgaggcgtaagttggacttatttgccaacgtagtccatgtgaagtcacttcctgggtatatgactcggcacaacaatctagacctggtgatcattcgagagcagacagaaggggagtacagctctctggaacatgagagtgcaaggggtgtgattgagtgtttgaagattgtcacacgagccaagtctcagcggattgcaaagttcgcctttgactatgccaccaagaaggggcggggcaaggtcactgctgtccacaaggccaacatcatgaaacttggggatgggttgttcctgcagtgctgtgaggaagttgctgaactgtaccccaaaatcaaatttgagacaatgatcatagacaactgctgcatgcagctggtgcagaatccttaccagtttgatgtgcttgtgatgcccaatctctatgggaacattattgacaatctggctgctggcctggttgggggagctggtgtggtccctggtgagagctatagtgcagaatacgcagtctttgagacgggtgcccggcacccatttgcccaggcagtgggcaggaatatagccaatcccacggccatgctgctgtcggcttccaacatgctgcggcatcttaatcttgagtatcactccagcatgatcgcagatgcggtgaagaaggtgatcaaagttggcaaggtgcggactcgagacatgggcggctacagcaccacaaccgacttcatcaagtctgtcatcggtcacctgcagactaaaggttcgaacctctgacatgggtggctatgctacttgccatgacttcactgaggctgtcattgctgccttgccccacccataggccctgtccatacccatgtaaggtgttcaataaagaacatgaaccaaaa

SEQ ID NO: 983 - DNA, 434 bp, Homo sapiens
  SIMILAR (267)..(127): 421254mologous to Plasmodium vivax circumsporozoite protein,accession number M28746,Smith-Waterman Score=85.
ttttaaaacacattaaaaactttattgtaagtatcaacatctaaatttgcatcaatttgatacatcgttgctcattttgcagaacataacagttgcacattgcaagagtcaacttgcttcgggtcttttcatgctcatggcggtccacccctgccttccctctccctgacctgcatcctgtcctccacagtctgccctgcctcctgtcgccacaggttgaagacccaagccctgaggagaacctgctgccagggggctggctggctgcgagccaggagggccaggcagttagccctgccagccacagagtgccctagtcagcccatgtggctccaggaagcctgctgttgttctactccatcccatttcacccgcagcctagtggctaactccggatactctgagcaaaattaacccaagtttcatggagaact

SEQ ID NO: 984 - DNA, 1597 bp, Homo sapiens
  SIMILAR (80)..(1219): 971254mologous to Homo sapiens NAD+-specific isocitrate dehydrogenase beta subunit isoform A,accession number AF023265,Smith-Waterman Score=1894.
tgatacatcgttgctcattttgcagaacataacagttgcacattgcaagagtcaacttgcttcgggtcttttcatgctcatggcggtattgagcggagtccgctggctgacccgagcgctggtctccgccgggaaccctggggcatggagaggtctgagtacctcggccgcggcgcacgctgcatcgcggagccaggccgaggacgtgagggtggagggctcctttcccgtgaccatgcttccgggagacggtgtggggcctgagctgatgcacgccgtcaaggaggtgttcaaggctgccgctgtcccagtggagttccaggagcaccacctgagtgaggtgcagaatatggcatctgaggagaagctggagcaggtgctgagttccatgaaggagaacaaagtggccatcattggaaagattcataccccgatggagtataagggggagctagcctcctatgatatgcggctgaggcgtaagttggacttatttgccaacgtagtccatgtgaagtcacttcctgggtatatgactcggcacaacaatctagacctggtgatcattcgagagcagacagaaggggagtacagctctctggaacatgagagtgcaaggggtgtgattgagtgtttgaagattgtcacacgagccaagtctcagcggattgcaaagttcgcctttgactatgccaccaagaaggggcggggcaaggtcactgctgtccacaaggccaacatcatgaaacttggggatgggttgttcctgcagtgctgtgaggaagttgctgaactgtaccccaaaatcaaatttgagacaatgatcatagacaactgctgcatgcagctggtgcagaatccttaccagtttgatgtgcttgtgatgcccaatctctatgggaacattattgacaatctggctgctggcctggttgggggagctggtgtggtccctggtgagagctatagtgcagaatacgcagtctttgagacgggtgcccggcacccatttgcccaggcagtgggcaggaatatagccaatcccacggccatgctgctgtcggcttccaacatgctgcggcatcttaatcttgagtatcactccagcatgatcgcagatgcggtgaagaaggtgatcaaagttggcaaggttcgaacctctgacatgggcggctacagcaccacaaccgacttcatcaagtctgtcatcggtcacctgcagactaaagggagctagagccctttatttcttccaaccttgcaaggaccacactccccatacccttcagtgcagtgtaccagggaagagaccttgtgcctctaagcagtggaccatggtcaccccttgctgggtagagcctaggttgtccttgggccggcttccttaggggacagactgttgggtggtgatggggattgttaggatggagcccaggccacatggatgatgatgattctcccccacaggttcgaacctctgacatgggtggctatgctacttgccatgacttcactgaggctgtcattgctgccttgccccacccataggccctgtccatacccatgtaaggtgttcaataaagaacatgaaccaaaa

SEQ ID NO: 985 - DNA, 1516 bp, Homo sapiens
  SIMILAR (1343)..(1212): 951254mologous to Homo sapiens Human protein clone HP10531,accession number Y94896,Smith-Waterman Score=210.
tttttttttttttttaaaacacattaaaaactttattgttagtatcaacatgtgaggttggcatcaatttgatacatcgtttctcattttgcagaacataacagttgcacattgcaagagtcaacgggctgggggtcttttcatgctcatggcgggccaccctctggccttccctctccctgacctgcatcctgtcctccaaagtctgccctgcctcctgtcgccacaggttgaagacccaagtttcatggagaactcccagaaccttgaaccagtgcatggttatcaccattctttgttactagatgtaggagaaggtactgcagagtcctctggcctggaacaggcaagggatcgtttctcctcttcctggggtgagccgtggccaggccagccacagagtgccctagtcagcccatgtggcttccaggaagcctgctgttgtttctacttccatccccattttcacccgcagcctaagtggctaaactccggataactcctgaagcaaaattaaccccaagtttccatggaaaactcccagaaccttggaaccagtgccatggttatcaccattctttgttactagaatgtagagaaaggtactgcagagtcctctggcctggaacagcttgggggaggattcagctccctgtttctccctcactcccaggagattcgaaaagcaagtttgagagaaaaaacagtaactaaaaaagtccatgaagaaggatctgacatgtccttttgtgaagtaacattacccctctccccatcacgacgcaggagatgacatgttacagtaagagggttacagcaattccccatctggagtgccattcaactgcctgcagaaatcttccattttaatgcattttaaacacattcaaaacgagtgctgactctccaacctaggggaaaatgccccaataaaaaatatagatagaaaatacatgctaatgtaatggcaaacttatctccacactaaaacggcaacagtcttgcggttgagggcaggggtgcggtggaacctccctcttcccacaagaacatcagcaccagagatgctcggtccccgggctgatctgatgggtgggggaccacggcactgtcactcgggctgccggtccggtcccagtgttggcctgggggcttattcagtgcttgcagcagggaagttgggtgggcgacattgagggtcattgtttgaaggctctcagggcttccaaagcatcacctctggaaaatcccatctccatgagccgggcgacctgttcctcagaaacttctagagggggcgctgctggctcagactgccgaccgccttgatagtttactgttttgtcgctgacgtaaaggaggaaaaagactgattccaattgatcattcctccctgctgctgtctctgtcgcctcccttgtgcaaactgagagaacatcagctgccggtccagcagctccattctctgctgtctctggatgtccagcgtggctcccatcccaattctggcttcgct

SEQ ID NO: 986 - DNA, 375 bp, Homo sapiens
atgggagagctcaggatgctgttccttgggaagggaacccaacaacaacaagggaagaaaacgtgggggagtttctcgggacaggaaatacctgagcagaaccttaaaagatgggttgaaaattgtcagtcatggcaggctcctgggcacatttccccacccacccctctagggacaggaaaactccctgtggcttcagagggtaattctggagaccatctggtgcccagactgaccgtgaagcatttcatggctcgtctgtccccagcagtgaaatttgctgcaggcactgtgctccgcctaaggatgcagagtgatgacatgatcggcactgatgggatggagcagtcaattcaatcaaaacgcccaagttga

SEQ ID NO: 987 - DNA, 268 bp, Homo sapiens
  SIMILAR (228)..(79): 331254mologous to Drosophila melanogaster Coding region GR21D.1,accession number AX058709,Smith-Waterman Score=69.
ttttattttggatgtcgacaaaagccctgattaccatgctgccctagcaacaacagagctggggttacaggacaactataagcttaaaatccaaggaaagacagatctttcccaggagagacgagatgcaagcactggcttacctgtggtggagcagaacaggaagagatgtcagcaccatacacccacaaggcttactcccttgccttctgtggaagacagcaaaaatggctgtccccctcagtatctacagccttttgcaatgtga

SEQ ID NO: 988 - DNA, 762 bp, Homo sapiens
  SIMILAR (250)..(759): 921254mologous to Homo sapiens p40,accession number U93564,Smith-Waterman Score=805.
atggccgggtactcctctgagacaaaacttccagaggaacgatcaggcagcaacaattgctgttcaccaatatctgctgttctgcagcctctgctgctgatacccaggcaaacagggtctggagtggacctccagcagactccaacagacctgcagctgagggtcctgactgttagaaggaaaactaagaaacagaaaggacatccacaccaaaaacccatctgtatgtcaccatcaaagaccaaaggggagaatggaaccaagttggaaaacactctgcaggatattatgcaggagaacttccccaatctagcaaggcaggccaacattcaaattcaggaaatacagagaacactagaaagatattcctccagaagagcaaccccaagacacataattgtcagattcagcaaagctgaaatgaaggaaaaaatgctaagggcagccagagagaaaggttgggttacccacaaagggaagcccatcagactaacagctgatctcttggcagaaactctacaagctagaagagagtgggggccaatattcaacattcttaaagaaaagaattttcaacccagaatttcatacccagccaaactaagcttcataagtgaaggagaaataaaatactttacagacaagcaaatgctgagagattttgtcaccaccagacctgccctaaaagagttcctgaaggaagcactcaacatggaaaggaacaaccggtaccagccactgcaaaatcatgccaaattgtaa

SEQ ID NO: 989 - DNA, 642 bp, Homo sapiens
  SIMILAR (235)..(618): 721254mologous to Homo sapiens p40,accession number U93566,Smith-Waterman Score=457.
atgcaatatgttcaacaaaaacctaaacttaaatttcaggtgcacatttgtgcttatcggaaaacagttctgcagcctccgctgctgatacccaggcaaacagggtctggagtggacctccagcaaactccaacagacctgcagctgggggtgctgactgttagaaggaaaactaacaaacagaaaggacatccacaccaaaaacccatctctacgtcaccatcatcaaagaccacagagaagtccttaaaggacctgatggagctgaaaaccaaggcacgagaaatatgtgacgaatgcacaggcctcagtagccgattcgaccaactgaaagaaagggtatcggtgatggaagatcaaatgaatgaaatgaagcgagaagagaagtttagagaaaaaagaataaaaagaaacaaacaaagcctccaagcaatatgggactatgtaaaaagaccaaatctacgtctgattggtgtacctgaaagtgagggggagaagggaaccaagttggaaaacactctgcaggatattatccaggagaacttccccagtaatctagcaaggcggccaacattcaaattcaggaaatacagagaacgccacagagatacacctcgagaaaagcaactccaagacacataa

SEQ ID NO: 990 - DNA, 1980 bp, Homo sapiens
  SIMILAR (571)..(1977): 891254mologous to Homo sapiens putative p150,accession number U93572,Smith-Waterman Score=2199.
atgttcgctgttctgcaggctccgctggtgatacccaggcaaacagggtctggagtggacctccagcaaactccaacagacctgcagctgagggtcctgattgttagaaggaaaactaacgaacaaaaaggacatccacatcaaaaccccatctgtacatcaccatcatcaaaaaccaaagtagatacaaccacaaacatgggggaaaaacagagcagaaaaactgaaaattctaaaaatcagagtgcctctcctcctccaaatctaaagaagaaaagagagaagaatcaaatagatgcaataaaaaatgataaaggggatatcaccaccgatcccacagaaatacaaactaccatcagagaatactataaacacctctactcaaataaactagaaaatctagaagaaatgggtaaattcctcgacacatacaacctcccaggactaaaccaggaagaagttgaatctctgaatagaccaataacaggctctgaaattgaggtaataattaatagcttaccaaccaaaaaaagtccaggaccagatggattcacagccgaattctaccagagaaccaaagacaaaaaccacatgattatctcaatagatgaagaaaaggcctttgacaaaattcaacaacccttcatgctaaaaactctcaataaactaggtattgatgggacatatctcaaaataataagagctatttatgacaaacccacagccaatatcatactgaatgggcaaaaactggaagcattccctttgaaagctggcacaagacagggatgccctctctcaccactcctattcaacatagtgttagaagttttggccagggaaatcaggcaagagaaagaaataaagggaattcaagtaggaaaagaggaagtcaaattgtacctgtttgcagatgacatgattgtatatttagaaaaccccatcatctcagcccaaaatctccttaagctgataagcaacttcagcaaagtctcaggatacaaaatcaatgtgcaaaaatcacaagcattcttatacaccagtaacagacaaacagaaagccaaatcatgagtgaactcccagtcacaattgcttccaagagaataaaatacctaggaatccaacttacaaggggtgtgaagaacctcttcaaggagaactacaaaccactgctcaacaaaataaaagaggatacaaacaaatggaagaacattccatgctcatggataggaagaatcaatatcatgaaaatggccatagtgcccaaggtaatttatagattcaatgccatccccatcaagctaccaatgactttcttcacagaattggaaaaaactactttaaagtgcatatggaaccaaaaaagagcccacattgtcaagtcaatcctaagccaaaagaacaaagctggaggcatcatgctacctgacttcaaactatactacaaggctacggtaaccaaaacagcatggtactggtaccaaaacagacatatagaccaatggaacagaacagagccctcagaaataatgccacacatctacagctatctgatctttgacaaacctgacaaaacaagaaatggggaaagaattccctatttaataagatggtgctggtgctggcaaaactggctagccatatgtagaaagctgaaactggatcccttcctcacatcttatacaaaaattaattcaagatggattaaagacttaaatgttagacctaaaaccataaaaaccctagaagaaaacctaggcattaccattcaggacataggcatgggcaaggacttcatgtctaaaacaccaaaagcaatggcaacaaaagccaaaattgacaaatgggatctaattaaactaaagagcttctgcacagcaaaagaaactaccatcagagtgaacaggcaacctacagaatgggagaacatttctgcaatctactcatctgacaaagggctaatatccagaatctactaa

SEQ ID NO: 991 - DNA, 456 bp, Homo sapiens
  SIMILAR (91)..(420): 761254mologous to Homo sapiens putative p150,accession number U93563,Smith-Waterman Score=426.
atgaagcttccagaggaaggatcactcagcgatatttgctgttctgcaatatttgctgttctgcagcctctgctggtgatacccagggaaacagggtctggagtggacctccagcaaactccaacagacctgcagctgagacaaacagagagccaaatcatgagtgaactcccattcacagttgcttcaaagagaataaaatacctaggaatccaacttacaaaggatgtgaaggacctcttcaaggagatctacaaaccactgctcagcgaaataaaggaggacacaaacaaatggaagagcattccatgctcatggttaggaagaatcaatatcgtgaaaatggccatactgcccaaggtaacctatatattcaatgccatccacatcaagctaccaatgacagaattggaaaaaactaaagttcatatggaaccggaaaagagcctgcattga

SEQ ID NO: 992 - DNA, 475 bp, Homo sapiens
  SIMILAR (3)..(395): 1001254mologous to Homo sapiens Hb2E,accession number AF235097,Smith-Waterman Score=706.
agggcgcgggcgatggggcgcgcctcgacttcgtggtgcgctatgagacccctgagggcactttctgggccaacaaccacggccgcaactacacagtcctgctccggatcgcacccgctcccacacccactgatgccgaagggctgccccagcagcagcagctgccgcagctggagccacagcccgagtgccagggtcccgtggaggctgaggccaggcagctgaagagctgcatgaagccggtgaggcgcaggcctgccgaggaggaactgaagacgaagaacatggatgataacacctttgccatggcagagcatcctgatgtccaggagtcagtgggtccactggtagcccccacccctctccgtccatggccccagatgacacttcaggtctgctggagtttgttggagttccactccagaccctgtttgcctgggtatcaccagcagaggctgcagaacagcaaagattg

SEQ ID NO: 993 - DNA, 1251 bp, Homo sapiens
  SIMILAR (271)..(489): 1001254mologous to Cloning vector pEH1 lac repressor,accession number AJ007659,Smith-Waterman Score=349.
atggctgggtactcctctgagacaaaacttccacaggaacggtcaggcagcaacatttacagttcaccaatatccgctgttctgcagcctctgctgctgatacccaggcaaacagggtctggagtggacctccagcaaactccagcagacctgcagctgagggtcctgactgttagaaggaaaactaacaaacagaaaggacatcccacaccaaaaccccatctgtacatcaccatcatcaaagaccaaagggattttgccgatttcggaaccaccatcaaacaggattttcgcctgctggggcaaaccagcgtggaccgcttgctgcaactctctcagggccaggcggtgaagggcaatcagctgttgcccgtctcactggtgaaaagaaaaaccaccctggcgcccaatacgcaaaccgcctctccccgcgcgttggccgattcattaatgcagctggcacgacaggtttcccgactggaaagcgggcatgtatgttctctggcttctctgaagcagtcacatgacattttgcccatcaaaatggcaaaggccattctctcctctgccgggaatgttcttcagatccagactgatagagatttggccgatttggggaccgccatcaaacaggattttcgcctgttggggcaaaccagggattttgccgatttcggaaccaccatcaaacaggattttcgcctgctggggcaaaccagcgtggaccgcttgctgcaactctctcagggccaggcggtgaagggcaatcagctgttgcccgtctcactggtgaaaagaaaaaccaccctggcgcccaatacgcaaaccgcctctccccgcgcgttggccgattcattaatgcagctggcacgaccaggtttcccgactggaaagcgggcagtgagcgcaacgcaattaatgagcaaactccttgtgggcctcgtggcagcatccaggtgggggtgcgtgcaactcgcaaagccccagagggcatgttacagggctcttttagctctgcggtctgtggacgggttaagtgttaatagctcaggggccctttgccttgctgcatggggtggctgccttctgccagcgagggcaaagagccagtgtgacagccttctttgggtacccgcacccagtacatccggaattcttgtctggtgcccaagtgaaatgagattgacacctagaggcgacgggaccatcacagtaaaggaagaagtgtgcgctgtggatcctctaccgtag

SEQ ID NO: 994 - DNA, 642 bp, Homo sapiens
  SIMILAR (232)..(639): 531254mologous to Homo sapiens p40,accession number U93567,Smith-Waterman Score=344.
atggagtttgagatcggcgaacggacagactgcctcctcaagtgggtccctgatccccaaacgaaggttccagaggaaggatcagacagcaacatttgtcgttctgcaacatttgctgttctgcagcctccgctggtgatacccaggcaaacagggtctggagtggacctccagcaaactccaacagacctgcagctgagggtcctgagtgttagaaggaaaattaacaaacagaaaggacatccacaccaaaaccccatctgtacgtcaccatcatcaaagaccaaagagaaagactttgacaagctgacagaagtaggcctcagacgatgggtaataacaaagttctccgagctaaaggaggatgttcgaaaccattgcaaagaagctaaaaaccttgaaaaaagattagacaaatggctaactagaataaacagcatggagaagaccttaaatggcctgatggagctgaaaaccatggcacgaaaactacgtgatgcatgcatgagcttcagtagccgattcgatcaagtggaagaaagggtatcagtgattgaagatcaaatgaatgaaatgaagccagaagagaagtttagagaaaaaagagtaaaaggaaacgaacagaacctccaagaaatatag

SEQ ID NO: 995 - DNA, 570 bp, Homo sapiens
  SIMILAR (226)..(567): 821254mologous to Homo sapiens p40,accession number U93574,Smith-Waterman Score=478.
atggctgaatgggaacagctccagtctacagctcccagcatgagcgacgcagaagacagggtcagaccgacacctcacacggccaggtactcctctgagacaaaacttccagaggaacgatcaggcagcaacatttgctgttcacccatatctgctgttctgcagcctctgctgctgatacccaggcaaacagtgtctggagtggacctccagcaaactccaacagacctgcagctgagggcacaagaacatgacgaatgcacaagcctcagtagccgattcgatcaactggaagaaagggtatcagtgatggaagatgaaatgaatgaaaagaagcgagaagagaagtttagagaaaaaagaataaaaagaaatgaacaaagcctccaagaaatatgggactatgtgaaaagaccaaatctacgtgtgattggtgtacctgaaagtgatggggagaatggaaccaagttggaaaacactctgcaggatataatccaggagaacttccccaatctagcaaggcaggccaacattctaattcaggaaatacagagaacaacacaaaaataa

SEQ ID NO: 996 - DNA, 687 bp, Homo sapiens
  SIMILAR (241)..(318): 881254mologous to Homo sapiens Human secreted protein sequence SEQ ID NO:103,accession number Y87064,Smith-Waterman Score =117.
atggtcttagaaaaggctagagaagaggtagatccccccagtatgctgattcccccagtaacccagtgtgggcagctgcccaggtcacagtgcccacagccaaccctaagtagaatgttaacactggaggtagggataagcttgggcattattgtgctcatgatttcactctggccagacaccgtaaaggaataccaaagcagagaagccttgagtttcaagaagtacaacaagaacccaggtctgctgaagtttgctggagatccactccagaccctgtttgcctgggtatcaccagcagaggctgcagaacagcagatttctgccctttgtttcctttggaagcttcgtcccagaggggcacccaccagatgccagccactgctttcttatacgaggtgtctgtcagcccctgctggaagctttgtttacaccatgaggggaaaacctcctattcaagcctcagtaatggcagacgcctctccccccaccaagattgagcatcccaggacaacttcagactgctgtgttgccagcaagaatttcaagccagtggatcttagcttgctgtgctccatgggagtgggatctgctgagctagaccactgggctacctggcttcaatcccctttccagggtagtgaacggttctgtcttgctggtgttccaggcaccactggggtatga

SEQ ID NO: 997 - DNA, 5450 bp, Homo sapiens
atgctgttttgggcctttgacaaaattcaacagcccttcatgctaaaaactctcaataaattaggtattgatgggacgtatctcaaaataataagagctgtttatgacaaacccacagccaatatcatactgaatgggcaaaaactggaagcattccctttgaaaactggcacaagacagggatgccctctctcaccactcctattcaacatagtgttggaagttctggccagggcaatcaggcaggagaaggaaataaagggcattcaattaggaaaagaggaagtcaaattgtccctgtttgcagatgacatgattgtatatctagaaaaccccatcatctcaacccaaaatctccataagctgataagcaacttcagcaaagtctcaggatacaaaaacaatgtgcaaaaattacaagctttcttatacaccaataacagacaaacagagagccaaatcatgagtgaactcccattcacaattgcttcaaagagaataaaatacctaggaatccagcttacaagggatgtgaaggacctcttcaaggagaactacaaaccactgctcaaggaaataaaagaggatacaaacaaatggaagaacattccatgctcatggataagaagaatcaatattgtgaaaatggccatactccccaagaggactccattattatcgctgcctagtacattatatgaggagctgtggagacttaggtcctacttcccattgtgccctcaactttacaacatggagcagaataccacagactgggtaatttataaagaacagtgcatttggctcacagctctggagactggggagtccaagagcactgcaccagcatttggcaagggttatcccatggcagaatacatcatatggggcagattgacacctcacatggctggctactcctctgagacaaaacttccagaggaacgatcaggcagcaacatctgctgttcaccaatatccgctgttctgcagcctctgctgctgatacccaggcaaacagggtctggagtggacctccagcaaactccaacagacctgcagctgagggtcctgactgttagaaggaaaactaacaaacagaaaggacatccacaccaaaaccccatctgtacgtcaccatcatcaaagaccaaaggatcaaattcacacataacaatattaaccttaaatgtaaatgggctaaatgctccaattaaaagacacagactggcaaattggataaagagtcaagacccatcagtgtgctgtattcaggagacccatctcacgtgcagagacacacacaggatcaaaataaagggatggagggagatctaccaagcaaatggaaaacaaaaaaaggcaggggttgcaatcctagtctctgataaaacggactttaaaccaacaaagatcaaaagagacaaagaaggccattacatgatggtaaagggatcaattcaacaagaagagctaactaccctaaatatatatgcacccaatacaggagcacccagattcataaagcaagtccttagagacctacaaagagacttagactcccacacattaataatgggagactttaacaccccactgtcaacattagacagatcaacgagacagaaagttaacaaggatatccaggatttgaactcagctctgcaccaagtggacctaatagacatctacagaactctccaccccaaatcaacagaatatacattcttctcagcactacaccacatttattccaaaattgaccacatagttggaagtaaagcactcctcagcaaatataaaacaacagaaattataacaaactgtctctcagaccacagtgcaatcaaactcgaactcaggattaagaaactcactcaaaaccgctcaactacatggaaactgaacaacctgctcctgaatgactactgggtacataacaaaatgaaggcagaaataaatacattatttgaaaccaacgagaacaaagacacaacataccagaatctctgggacacattcaaagcagtgtgtagagggaaattcatagcactaaatgcccacaagagaaagcaggaaagatctaaaattgacaccctaacatcacaattaaaagaactagagaagcaagaacaaacacattcaaaagctagcagaaggcaagaaataactaagatcagagcaaaactgaaggaaatagagacacaaaaaatccttcaaaaaatcaatgaatccaggagctggttttttgaaaagatcaacaaaattgatagaccactagcaagaccaataaagaagaaaagagagaagaatcaaatagatgcaataaaaaatgataaaggggatatcaccactgatcccacagaaatacaaactaccatcagagaatactataaacacctctatgcaaataaactagaaaatctagaagaaatggataaattcctcaacacatacaccctcccaagactaaaccaggaagaagttgaatctctgaataaaccaataacaggctctgaaattgaggcaataattaatagcttaccaatcaaaaaaagtccaggaccagatggattcatagccaaattccaccagaggtacaaggaggagctggaggccagcatcatcctgataccaaagcctggcagagacacaaccaaaaaagagaattttagaccaatacccctgatgaatattgatgcaaaaatcctcaataaaatactggcaaaccgaatccagcagcacatcaagaagcttatccaccatgatcaagtgggcttcatccctgggatgcaaggctcgttcaacatatgcaaatcaataaacgtaatccaggatataaacagaacgaatgacaaaaaccatatgattatctcaatagatgcagaaaaggcctttgacaaaattcaacaacccttcattctaaaaactctcaataaattaggtattgatgggacgtatctcaaaataataagagctatctatgacaaacccacagccaatatcatactgaatgggcaaaaactggaagcattccctttgaaaactggcacaagacaggggtgccctctctcaccactcctattcaacatagtgttggaagttctggccagggcaatcaggcaggagaaggaaataaagggcattcaattaggacaagaggaagtcaaattgtccctgtttgcagatgacatgattgtatatcgagaaaaccccatcgtctcaacccaaaatctccataagctgataagcaacttcagcaaagtctcaggatacaaaatcaatgtgcaaaaatcacaagcatttttatacaccaataacagacaaacagagagccaaatcatgagtgaactcccattcacaattgcttcaaagagaataaaatacctaggaatccaacttacaagggatgtgaaggatctcttcaaggagaactacaaaccactgctcaaggaaataaaagaggatacaaacaaatggaagaacattccatgctcatgggtaggaagaatcaatatcgtgaaaatggccatactgcccaaggtaatttatagatttaatgccatccccatcaagctaccaatgactttcttcacagaattggaaaaaactactttaaagttcatatggaaccaaaaaagagcccgcattgccaagtcaatcctaagccaaaggaacaaagctggaggcatcacactacctgacttcaaactatactacaaggctacagtaaccaaaacagcatggtactggtaccaaaacagagatatagaccaatggaacagaacggagccctcagaaataatgccacatatctacaaccatctgatctttgacaaacctgacaaaaacaagaaatggggaaatgattccctatttaataaatggtgctgggaaaactggctagccatatgtaggagaaagctgaaactggatcccttccttacaccttatacaaaaattaattcaagatggattaaagacttaaatgttagacctaaaaccataaaaaccctagaagaaaacctaggcaataccattcaggacataggcatgggcaaggacttcatgtctacaacaccaaaagcaatggcaacaaaagccaaaattgacaaatgggatctaattaaactaaagagcttctgcacagcaaaagaaactaccatcacagtgaacaggcaacctacagaatgggagaaaatttttacaatctacccatctgacaaagggctaatatccagaatctacaaagaactcaaacaaatttacaagaaaagaacaaacaaccccatcaacaagtgggtgaaggatatgaacagacacttctcaaaagaagacatttatacagccaaaaggcacatgaaaaaatgctcatcatcactggccatcagagaaatgcaaatcaaaaccacattgagataccatctcataccagttagaatggcgatcattaaaaagtcaaaaaacgacatgctgactggaacaagacaagaatgcccacttttactgctgtttttcaatatagtagtggaagtaatgtctggagcaattagacaagagaaagaaataaagggcatccaaattgaaaagcctccgctggtgatacccaggcaaacagggtctggagtggacctccagcaaactccaacagacctgcagctgagggtcctgaccgttagaaagaaaactaacaaacagaaaggaatagcatcaacctcaacaaaaaagacatccacaccaaaaccccatctgtaggtgaccatcatcaaagaccaaaggtagataaaaccacaaagatggggagaaaccagagcagaaaagctgaaaattctaaaaaccagagtgcctcttatcttccaaaggactgcagctcttcgtcagcgatgaaacaaagctggatggagaatgactttgacgagttgacagaaggagccttcagaagtcttagcaaatggcacaccaggagattatatcccgcatctagctcagagggtcccacgcccacggagcctcggtcactgctagcacagcagtctgagattgaactgaaagctgggtgcccctctgagatgaagcttccagaggaaggatcaggcagcaacatttgtcgttctgcaatatttgctgtgctgcagcctctgctggtgatacccaggcaaacagggtctggagtggacctccagcaaactccaacagacctgcagctgatggtcctgactgttagaaggaaaactaacaaacagaaaggacacccacaccaaaaccccatgtgtacgtcaccatcatcaaagaccaaagagctaaaggaggatgttcgaacccatcacaaagaagctaaaaaccttgaaaaaagattagacaaatggctaactagaataaacagcatagagaagaacttaaatgacctcatggagctgaaaagcatggtacgagaactacatgacgcatga

SEQ ID NO: 998 - DNA, 859 bp, Homo sapiens
  SIMILAR (511)..(846): 401254mologous to Pneumocystis carinii kexin-like serine endoprotease,accession number AF009223,Smith-Waterman Score=148.
caatgccaaccacaaatggggccagctaagggtgtggtgggagaagccatcctgcagctctgagatccacaaagtggagatagcagtagcaccaactccactgctttggaggctgcccagtcgaatttgggagccagcgagggacctgacagcagcacattggacaccagaagacacccaaagggagaggagtggaagaccttctggtgtgggctgggcagcaattcacttgaaggagaaacagcccgggtgtggagaggcggccatccttggcgggatcctttctaaggagccgagaaatcaacgtagagcttcctctatctgattctctaacaactgcagaccttccatgagtcaagctttgtgtcaaaaggacaaattaaaaggacctataaatggcaccacccagcccaatggacagatgccccaggctgcagattctgtcagtgctgttctcgaagaggcccaggcacatgctgaaacatggaaggataagaagccagccctcgggaaccaccaggagccaggagcacccccggccccccaaggccccaagtccagcctgccccaccccctccggtgcagaggtcctgtgacaccagtggcagccccgccacaccccccaaggccaagggcacaggcagcgtggtcttccccgccccgcccgactacttcctgccgccacagccaccaatgccgcccctggagtacccagagctcccgctgccgtccccggacttcatggagacccccctggacttcgtgctccctcccctcgctgtcgccaagaggcctcctatgccccacccccccaacaggcacgaagcatcaatgttcacaagcagcaaatgaataaaag

SEQ ID NO: 999 - DNA, 1231 bp, Homo sapiens
  SIMILAR (377)..(69): 361254mologous to Glycine max hydroxyproline-rich glycoprotein,accession number L22029,Smith-Waterman Score=147.
tttgcagtaggaagaacgtttaacttttattcatttgctgcttgtgaacattgatgcttcgtgcctgttggggggggtggggcatagaaggcctcttggcgacagcgaggggagggagcacgaagtccaggggggtctccatgaagtccggggacggcagcgggagctcctgggtactccaggggcggcattggtggctgtggcggcaggaagtagtcgggcggggcggggaagaccacgctgcctgtgcccttggccttggggggtgtggcggggctgccactggtgtcacaggacctctgcaccggagggggtggggcaggctggacttggggccttggggggccgggggtgctcctggctcctggtggttcccgagggctggcttcttatcctggctaattttttgatttctagtagagatgagccccttgttctgttgcccaggctggtctggaactccggagctcaagcaattctcctgggggacggctgggtggaatgtatgccagctgcttgctggttttaccttccatgtttcagcatgtgcctgggcctcttcgagaacagcactgacagaatctgcagcctggggcatctgtccattgggctgggtggtgccatttataggtccttttaatttgtccttttgacacaaagcttgactcatggaaggtctgcagttgttagagaatcagatagaggaagctctacgttgatttctcggctccttagaaaggatcccgccaaggatggccacctctccacacccgggctgtttctccttcaagtgaattgctgcccagcccacaccagaaggtcttccactcctctccacctctaatcccagctactcaggaggctgaagcaggaggatcacatgaactcaggaagcaagggttgcagcgagctgacatcgcgacgtagcattccagcctttgggtgtcttctggtgtccaatgtgctgctgtcaggtccctcgctggctcccaaattcgactgggcagcctccaaagcagtggagttggtgctactgctatctccactttgtggatctcagagctgcaggatggcttctcccaccacacccttagctggccccatttgtggttggcattgtgggacagcgtgttcagggcaactctgctcctgtatattgcgggctggtctgcgctgtctgcacactcatagacgtcagagcacaggctggtctgcacaacccttgtgccgc

SEQ ID NO: 1000 - DNA, 1659 bp, Homo sapiens
  SIMILAR (1257)..(1207): 471254mologous to Homo sapiens chordin,accession number AF136635,Smith-Waterman Score=62.
atgcagacagcgaaggtgcaggccgcgatatataggagcagaggcaccctgaacacgctgtcccccaatgccagctacaagtggatccagctaagagtgcggagggagaagccgtcctgcagctctgagatccacgaagtagaggtggtagtagcaccggaccccactgctttggagcctgcccaatcgaatttgggagccagcgaggttcctgactgcagcacattggccaccagaagacacacaaagcggggccagctcaggatgcggtgtttggagcagtcctgcagctctgcgatccacgaggtggtggtgggagtagcgccagagtccactgctttggagcctgccccgtctgattcaggagtcatgacgaccagaagacgccaaaagagaaaactggatttgaataccacttccatcactctttatgatgtgatggtgaatgtgtttttaactcatctgagcctcagtttgctcatctatagaagatgtgattgttgtaaggcttccataagtgtgcagacagagaaggcgcaggctgtgatatacaggagcagaggagccctgaacacgctgtcccccaataccagccacaagcggggctatctcagggtgcggtgggtgaagccgtcctgcagctctgcgatccatgaggtggaggtggcagtactaccagactccactgctttggagcctgcccagtcgaatttgggatccagtgacagacctgacagcagtacattggcaaccagaagataccccaggtggtggtcctcagttggtggtcttcagttgttgggcagtgatggaaggaggatgaatctgtgctctctcctgccccagtcacagctctcaggcttgttgcatccaggcctttctaaaataaactggacaggttggcaggattttttagcagacaagtcagctcagagtatggggccagccccagtcagggccggcacaagggttgtgcagagccagcctgtggctctgacgtctatgagtgtgcagacagcgcagacgcagcccgcaatatacaggagcagagttgccctgaacacgctgtcccacaatgccaaccacaaatggggccagctaagggtgtggtgggagaagccatcctgcagctctgagatccacaaagtggagatagcagtagcaccaactccactgctttggaggctgcccagtcgaatttgggagccagcgagggacctgacagcagcacattggacaccagaagacacccaaagggagaggagcggaagaccttctggtgtgggctgggcagcaattcacttgaaggagaaacagcccgggtgtggagaggcggccatccttggcgggatcctttctaaggagccgagaaatcaacgacctataaatggcaccacccagcccaatggacagatgccccaggctgcagattctgtcagtgctgttctcgaagaggcccaggcacatgctgaaacatggaagccaccaatgccgcccctggagtacccagagctcccgctgccgtccccggacttcatggagacccccctggacttcgtgctccctcccctcgctgtcgccaagaggcctcctatgccccaccccccccaacaggcacgaagcatcaatgttcacaagcagcaaatgaataaaagttaa

SEQ ID NO: 1001 - DNA, 640 bp, Homo sapiens
  SIMILAR (2)..(547): 1001254mologous to Homo sapiens Human protein comprising secretory signal amino acid sequence 4,accession number W37867,Smith-Waterman Score=985.
  misc_feature (1)...(640): n = a,t,c or g
gatgaaccacctgccggataacatcaatgtttatgcaactactgctgccaaccccagagagtcgtcctacgcctgttactatgatgagaagaggtccacgtacctgggggactggtacagcgtcaactggatggaagactcggacgtggaagatctgactaaagagaccctgcacaagcagtaccacctggtaaaatcgcacaccaacaccagccacgtcatgcagtatggaaacaaaacaatctccaccatgaaagtgatgcagtttcagggtatgaaacgcaaagccagttctcccgtccccctacctccagtcacacaccttgacctcacccccagccctgatgtgcctctcaccatcatgaaaaggaaactgatgaacaccaatgatctggaggagtccaggcagctcacggaggagatccagcggcatctggattacgagtatgcgttgagacatttgtacgtgctggtcaacctttgtgagaagccgtatccgcttcacaggataaaattgtccatggaccacgtgtgccttggtcactactgaaganctgctcctggaanttttccaagtgtgancgcccaccgactgtgtgtganagagctganagtgaatnagagntccgtgtnggcctct

SEQ ID NO: 1002 - DNA, 607 bp, Homo sapiens
  SIMILAR (60)..(125): 901254mologous to Homo sapiens Human adrenal gland cysteine protease,accession number W15460,Smith-Waterman Score=117.
  misc_feature (1)...(607): n = a,t,c or g
aatgatctgnaggagtccaggcagctcacggagnagatccagcggcatctggatgatanaattgtccatggaccacgtgtgccttggtcactactgaagagctgcctcctggaagcttttccaagtgtgagcgccccaccgactgtgtgctgatcagagactggagaggtggagtgagaagtctccgctgctcgggccctcntggggagcccccgctccagggctcgctccaggaccttcttcacaagatgacttgctcgctgttacctgcttccccagtcttttctgaaaaactacaaattagggtgggaaaagctctgtattgagaagggtcatatttgctttctaggaggtttgttgttttgcctgttagttttgaggagcaggaagctcatgggggcttctgtagcccctctcaaaaggagtctttattctgagaatttgaagctgaaacctctttaaatcttcagaatgattttattgaagagggccgcaagccccaaatggaaaactgtttttagaaaatatgatgatttttgattgcttttgtatttaattctgcaggtgttcaagtcttaaaaaataaagatttataacagaaccaaaa

SEQ ID NO: 1003 - DNA, 2373 bp, Homo sapiens
  SIMILAR (1)..(591): 901254mologous to Escherichia coli integral membrane protein,accession number K01992,Smith-Waterman Score=881.
  misc_feature (1)...(2373): n = a,t,c or g
aagaagaaacataagaaggaaggaaaaatagaatatatttaaagaaaagaaaaaaatatagttgtaaaataattaaattaattttaggagtgctgtaaggggttctgatataaatctttattttttaagacttgaacacctgcagaattaaatacaaaagcaatcaaaaatcatcatattttctaaaaacagttttccatttggggcttgcggccctcttcaataaaatcattctgaagatttaaagaggtttcagcttcaaattctcagaataaaagacttccttttgaaggggggccttaaagaagccccccttgaggcttccttgctcctcaaaaaacttaacaggcaaaaacaaaaaacctcccctagaaaagcaaatatggacccttctcaaatacagagcttttccccaacccctaatttgtaggtttttcaagaaaaagactggggggaaggcagggtaacaggcgaggcaaggtcatcttgtgaaggaagggtcctggagcgggggagcgagcccctggagccggggggctcccccaggggggggcccgagccaaccggaagactttttcacttccccttttccagtctcctgatcagcacacatgtcggtggggcgcctcaacacttggaaaaagcttccccaggaggcaacctccttcaagtagtgacccaaggcaacacgtggtcccatggaacaattttattcctgtgaaacggaataacggcttcttcacaaaggttgaccagcacgttacaaatgtctcaacgcaatactcgtacgtgggggagtgcccagttggaagccatggggtccggaagtgcatgcagggcctctggggtagcaggcttgntcgccggtgagcggggctctcgtcgggacagggagctgctcccacctcagccctcggacgctgcccagcaaaggaaaacgatctaacgcaactgaacttctccaaatgaaggtgccctgccatcccaaatgcccgctggatctcctccagtgagctgccctggactcctcccagatcattggtgttcatcagtttccttttcatgatggtgagaggcacatcagggctgggggtgaaggtccaaggtgtgtgaactggaggtaggggggaacggggaaaaactggctttgccgtttccataccctgaaactgccatcactttccatggtggagattgttttgtttcccatactgcatgacgtggctggtgttggtgtgcgattttacccaggtggtactgcttgtgcagggtctctttagtcagatcttccacgtccgagtcttccatccagttgacgctgtaccagtcccccaccgtacgtggtcctcctctcatcatagtaacaggagtagaacgactctctggggttggcagcaagtagttgcataaacattgatgttatccggcaggtggttcatcatggacccagactcacaggcttcaatgtagaacaccatctttcgggtacattttgtgtttgtacatgtaatggatggtctcattcaggtcctttacatgaagatcttcattgggaaaaaccagtattccagtagatccatggtcagtgaagtaaatgaacacgtgatcctgggggccactcttcaggactttgccggatcctatgcccttcactgcttctgcatcgcctctcaacacagcaaggaaattttgtggggtaacatcctctccagtgtagtccttcgggactccctgatagacatctgtgccattgggcctgttgatcacaattcctggagtgggattgtcttcagagtaagcaatgtcatcgtacatcatcacaacgatctgttcgtcaggaatcccattgcggtgaaagatctggtaggcacggcacgcgtctgccaccacaaccaccgccaccgccaccaccaccgccactgccaccaccaccaccaccaccaccaccatcaccaccaccgccaccaacaccaccaccgccaccaacaccaccaccgccaccgccaccgccaccaccgccgccgccaccaccgccgccgccgccaccgccgccaccgccgccaccgccaccgccaccaccgccaccaccaccaacaccaccaccaccaccaacaccgccaccaacaccgccaccaacaccgccaccactaccaccaaaggagtgcgcagcctggattcctcatatacgcagatcacgatagggttcacgctcctattagaattggcatcggtgacctggtgcctataattataccagccatttgaacctgccacgatcaccacccagtgcttgcctccatcttcaggatcatctataggaacggcaccaatgcccagggccacactgaggaatacagctactttccaaaccat

SEQ ID NO: 1004 - DNA, 927 bp, Homo sapiens
  SIMILAR (589)..(398): 621254mologous to Homo sapiens Extended human secreted protein sequence, SEQ ID NO. 402,accession number Y36017,Smith- Waterman Score=188.
attataagaattaaaatttattttcatttgttgttgtgtaaaactcacatgtggaagtgttccttgcacaggccgcagcactgaaatacagtttcacacttctgccagatattctatctcagaaagcaaattacctgcaaactaacactggatgacaagtgtcaccagaagtgctttggaaacatgattatgttatacaaagacttggcaaatccaacagcatacagtgcaactgaaaccttccccaaggatctgagaagtcttgccgatggaatccttggacatcaagagccaggcgaggagcaagtttccgatctgctgagattctgctccgccttcacgcgaatcagcatagccaagtgccccatccaccagccaagtccttcagtgctgaggacgcacgcatagccaggacagtcacgggcaaacgtgacatcaaatccgaagggcggctgtcggctcccttcctgtctcaaccacttggtccgcctcgcttatcctccctcaggtagcaccagatgatcagcgccacgaggaagcagctgaggggcagcaccttccaccagggccgctgatgtccctttcccattggtatggcccaccgaccagcggtgagggttggctttgctggaggaaaactcaatggggcggtcagggtcgtcctcttcctcggcggcagggtgggcccgattcccgggaaccgggcaacggatgaaggcttcgggaagcccagcctatgagcctcagcgcccggacggccgccttggcgcgccgtgatagcgtcacttccgtcgccggaaaccggaaaccgggcgccataccaggcctccgctcacgactacagaacgtggtcccagtagcgcagcggaaatgacgttcggctgcgaagagctctttccgtcgcaggcccggagtgcgcgatggcat

SEQ ID NO: 1005 - DNA, 1403 bp, Homo sapiens
  SIMILAR (1280)..(936): 401254mologous to Homo sapiens My028 protein,accession number AF061731,Smith-Waterman Score=144.
  misc_feature (1)...(1403): n = a,t,c or g
aggtttaccccctattccccttaaaaatttataatttccctaaagcctttaaaattcgtaaggagattgttccaataagtcccccccccaaaataaaggttcctttcaaaaattcccaagtaaccaattttcccattcccacctttttaaaactcgggcaaagcccaagttataaaaagactccccataaggaaaaaaattttacgttgcaaacccgcgttaaatttgggccccccaagggttctttaaaaaggcccccccnnnnnnnnnnnnnngatttttcataattttattaaatcatcactgggtaaactaatggtttgcgtatcacacgaattacactacaatctgataggagtggtaaaaccagcccaatggaatccaggtaaagtacaaaaacgccacctttctattgtcctgtcttatttcctcgggaaggaggacttctacctttaccaccatttcatgagcccagcagtggacttgagttacaatgtgtaaggttccttggggttatagcctggaaaaaaagccatcaaattcttgaggacttgacatctctcggaaaagaagccaaactagtagaactgatgagctggattgctttagattgataacatttacaaatacggagtcccagttgacatgcttattaatgttggaaataaaccatgcctgtactgggtcagtgagtttcggtcagctgggttgggaatacccagttcccagagctttagggcgacaccatttgaaattgaggttatcaattgtaggaggagtcatgggctcccatcaggctatggggtatccttctttgggtctgaagccctaatcaagtccttaccaactgtaagcagccactgccttggtaaaactttgcccacggaagtctggcctcactgaaactccaagctgtctgaacaaattcattgcgcttcctgctcaagccccagccctcgaaaaccaattgatccccaaaagatgttagctgggcacttcaaagatagaaaggtggtccggtctgcccccagacacacttaagctgcctcccagactatcccagcagtggttgtaatttttcctggcactgccttagcctacccaggtcctctaggaaacgttcacggctggggacctgaccaattggcaaaccaggtgaagaatacacttcatctccctgggaggtgatgtaagacatcatgaggaggggaagggttagtattgtgtggtactgagggtaagagcagatgcgaaggatagtggcattgaagaggatgactccagtggcatccatccccttttctctcgaagggcacccgaatgattgtcacgagtctttagactccaactcctgcggcagcttacgaatttcctaaaaaccctaagctgggccagccaggcag

SEQ ID NO: 1006 - DNA, 351 bp, Homo sapiens
  SIMILAR (337)..(65): 301254mologous to Neurospora crassa related to high cysteine keratin-associated protein,accession number AL355930,Smith-Waterman Score=92.
atgactgtggaagccatcagggtgcagcatccttcttggtttgcaaaggtaatcactgaagagtccaaatgtcaggcactgagtgctacactgcaggacagggtccctccctggagggtgcttgggccctccacagctaatggcatgcacagacaggaaaacatactgttggtagcaatgagggtgatgggggtgagggtaggagacatggaaaatagagaagcacttaagaggctgtttcaggcaaaaatgacaacaaaaatatatgggaataaaccggagtcgactggagaggaaccaagggattctggaattaaaggagttacgggaaagggaaggaatcaaggataa

SEQ ID NO: 1007 - DNA, 1284 bp, Homo sapiens
  SIMILAR (472)..(708): 311254mologous to Gallus gallus type II collagen,accession number M74435,Smith-Waterman Score=89.
atgcctgaagagaggtgtcgggatcatcacatggcttgccttgcatgtgggtgggtcatggattgggctgttccttccttctgcatctccatcgtcagaaatgcaggctctcaggctccacacctgagctacttaaccagaagttcttggggtacagttcccaagaacctgtcttcaaaagaactcaatttccccaagcaattcggtagctggagtttgctagtgatgccttggcaaattggagagaacatcaacccttctgtactcgacaaagacaagtttaaacagattccgggcccaacaggggactcatttgccattttccatggcaaagaatctgagcactggaataagccagagaccctcttggaagctgcactcgctcttgcagatgacttggtagatgactcttatgccgtgaatcacccgtatcctccaagagcacgtggaagttcagatacagcttttctccctgagagtgctacaagcatcctaaggggccttaccttgagtccaggtgctggggcccaatctcagctgaagatcccagagatctggggaagtgatgaagagatctggggaactgactcagcagggggaagcctgtgtacaacccacacctgcaggctacgtgctcctgtgctggctgagccgatggactcagcttcaccagatcagtgttgttgccactcagaaatgcctttggctgttggagaaaccaggctgtatgcctatctgctgcatatgaaattcctgatgatgcatgcaacgtatagggaattctacattgacccagtaagctcagcccctgtgcacactgccgacctcccgcaccctcctgctggtgcatggaataaggtggacataaagaaacagaaagaaagtaaaaaaaaattctttggggctgactgtaagcagccacttcgcaatcccgaaggctggccagtcacatgcagaggtagtcaggccccagtagtacaacttacacctaaatggagcctggacatcacacatgttctttggatcgcacgatgccttgccactccacacccatcacagttggccaaagcatcccccgtggggttgtgtgaaacgttagtcagaggagggaatcatagttgtggtcagggaggaggtggtggacagttctgcggtccaaaatggatgtacaacttggattcaaagttaaagaacgtctttgctgcagaacttcttggggtttttaaaatgttaatgattgctgtgaagattcaagaggggcctaaactaggaaaggttttctga

SEQ ID NO: 1008 - DNA, 997 bp, Homo sapiens
  SIMILAR (289)..(1506): 611254mologous to Homo sapiens retinoic acid X receptor b,accession number X63522,Smith-Waterman Score=1095.
tgcagaacgataccacgctgatcgccagaccgtgggtcaagccataccttggtttggagataatgaggatagtaggaaattgaccacatcttacctggtgtttcccttgtactatgtacatacctcttttctctcagctattgtgttgccctgtgagctttggccaatgtggggcattccgaaacccgggacacccaccttccccgaaccccgaatttttcctgggccccagaaggtgcaatccaagtctcgggcacaaagctttggttcaagaggcagcaagcgacacacccggaaaaagctccgggtaaaagccccccgggccccatccccaagcccattggaccaccctgacccggaaaacacaaacccgatgcggcccccagcccccacagatccgggtcaccaacccagaagcctcatgaccggcagacagcgctttcacaccgcacaacaacgtttcacggtccgaccccagcaccaccgctcgctcatccagcgccgaccgtgtcaacgccagcgagtacccaacatccagcgaggagacatcaggtcgctccgcttcgggtgttttgcccgacaccatccacggcaccaccggaacatccacgacagaacccgaacccggccccgcagactgactcggcactcccgggggctgttcgaggatgacgtgcgcgttagtaccactgatcccgaacgacgacacccccacccgacgaacacgaccactcctgggccagggcgtgttctccgtaaggagttgaaccgtccccgccgaccaatccacctccggcgacggcgattccacgtgcaacgtgcgtggcagctgcccgtgccgcatcgccatcaccatcttgatcacaccagccacacccgccgccgcttgcgtatgaccgatgttcgacttgaccgaccccaaccacaacggccggccaggatcacgatcacggccgtaggtggcgatcagcgcctgcgcctcgatcggatcagctag

SEQ ID NO: 1009 - DNA, 684 bp, Homo sapiens
  SIMILAR (480)..(527): 1001254mologous to Homo sapiens RNA-binding protein,accession number AF023259,Smith-Waterman Score=98.
ttacttctttatccctttgtttgtccccccttccccactaaatataaactcgatgaaagaaggaccttgttctgattcatgtgcctctatatcctgcacccaggtcaattcttgaccttggaacttggcaaaaagaggaacaaaaagcagctcttgtgtggggtagatggaggagggataagaaataatccaccgcccgcatttgagttcttcaggttcagttccagcggcagcagcgttgctgcaaaaatcgcttgctattcgagatagccagcagagggaatcggaactttgcttgcagcaggggttgaagcagcctttttttttttttttcttggaggaaatactgcagccttctggactgcgtacgctgctccctggagaggctctctcggttccacccaccggcctgtcatccagttccctgcctcggagataaagattccagctacatgggcaaacgcctggatcagccacaaatgtacccccagtacacttactactatcctcattatctccaaaccaaggtatggcttgacccacggtctggcgatcagcgtggtatcgttctgcactttttgtttgtttctttgtgtttgcttttttgaatgaccgactgactgttttatctgggatttgtttctgaagttgtattttagggcatttgttctcaaactttagcat

SEQ ID NO: 1010 - DNA, 1470 bp, Homo sapiens
  SIMILAR (184)..(1416): 991254mologous to Homo sapiens RNA-binding protein,accession number AF023259,Smith-Waterman Score=2169.
tgctgtgttggaactagcgagtggtggagtctctgaagcctcatcagtcaccaggactgccggggacagtggattaagagaaagaagctcgcctgcctggaggctcatataccctgttactcagtttcctgcctcggagataaagatcccagctacatgggcaaacgcctggatcagccacaaatgtacccccagtacacgtactactatcctcagtacctccaaaccaagcagtcctatgcaccagctccccaccccatggctcctcccagccctagcacaaacagcagcagcaacaacagcagcaacaacagcagcggggaacagttgagtaaaaccaacctgtacattcgaggcctcccaccaggcaccactgaccaggacctaatcaagctgtgccaaccgtatggaaaaattgtatctacaaaggcaattcttgacaaaaacacaaatcagtgcaaaggttatggttttgtagattttgacagtcctgcagccgcacagaaagcggtagcatctctcaaggcaaatggcgtgcaggcacagatggctaagcaacaagagcaagacccaacaaacctatacatctcaaatctccccatttctatggatgagcaggagcttgagaatatgctgaaaccctttggacatgtcatttccacaagaatactaagagacgctaatggagtcagcagaggtgttggctttgccagaatggagtctactgaaaaatgtgaagtggtaattcaacattttaatggaaaatatctgaaaacaccaccaggcatcccagcccccagtgagcctttgctgtgcaaattcgctgatggaggacaaaagaagcgacagaatcaaagcaaatatacccagaatgggaggccttggcccagggaaggagaggctggcatggctttgacctatgaccccacagctgccatacagaatggattttattcttcaccgtacagtattgcaaccaaccgcatgattccacagacatctatcacgccattcattgctgcttcccctgtctccacataccaggtccagagtacttcatggatgcctcatccgccatacgttatgcaaccaacaggtgctgtgattacaccaaccatggaccatcccatgtcaatgcagccagccaacatgatgggcccactgacacagcagatgaatcacctttcgttgggcacaacaggaacgtatatgactgctgctgctcctatgcaagggacctacattcctcagtacacgcctgtgcctccgacagctgtttctattgaaggtgttgttgctgatacctctccccagacagtggcaccttcatcccaggacaccagtggtcagcagcaacagatagcagtggacacatccaacgaacatgcacctgcatattcttaccaacagtctaagtaagtctgggctgtgctaagctcttttcctcaagatcagccatcttgacatcac

SEQ ID NO: 1011 - DNA, 211 bp, Homo sapiens
  SIMILAR (74)..(15): 571254mologous to Pseudomonas pseudoalcaligenes 2- aminomuconic acid semialdehyde dehydrogenase,accession number U93363,Smith-Waterman Score=56.
ctctcctcccttgcctcgggatgacctgccacacccttctttcttcgggcacagctcaaaggccgttccctccacccaagtcttgcctatgtgcatcagctggcagcgagagacccacctggacagcagccttaaagaaacaggtctatttgtgggctttgatgaagaagaaacggctgcccgtatttttagctcacaaatcaacttttaa

SEQ ID NO: 1012 - DNA, 211 bp, Homo sapiens; identical to SEQ ID NO: 1011
  SIMILAR (74)..(15): 571254mologous to Pseudomonas pseudoalcaligenes 2- aminomuconic acid semialdehyde dehydrogenase,accession number U93363,Smith-Waterman Score=56.

SEQ ID NO: 1013 - DNA, 339 bp, Homo sapiens
  SIMILAR (12)..(167): 341254mologous to Drosophila melanogaster prothoracicotropic hormone,accession number X98159,Smith-Waterman Score=60.
aaaccatcatatggtccatgctgactaaccatgtgagtatgagtctgtattttgttggatttttctcagctgtaatcacaattttgctggttttacttagaagcatttataatgcgatcattattccagctttttttcttgagtattttcagtttggggtttggaaaataatttttttcctggaagcaagcacatgataaatgcctttagaccttgaaggtggcttttctcatctcaatttttgggtggatgttctttcttctcccttttggaacaggaaaggtctcagctagaataattagaaaggtagggttataatttataaaacctgtaagagac

SEQ ID NO: 1014 - DNA, 876 bp, Homo sapiens
  SIMILAR (676)..(735): 751254mologous to Homo sapiens alternative HHLA3 protein,accession number AF126164,Smith-Waterman Score=75.
atgagtgaacacatcatgaagattgtgttcacagagcacagatacaaagccaaaagatggttggatttaaccagagttgtggttgttctaggcaaggcaatagcaggaagagcaaaggaggatttcagtggtgggcaggctaggagggataggaggactaagttatcaaatgatgaagatatccccaaatatgatatctatccactggaaataacctttgagtttttgacctttagtaaaagggagaaggataacattgttggcagaaatgtggatggtgataggggaaaccagaatgggaaaccatttgttgaatttttttacgagactcagataaaatgtaccccaccaatttcccaacatcagccaattggtgctgcagtctatttcccttgggtcggggatctcttcagtatggtccctttgcagttcaccatggaagagaaaagtcctgatcctgacgccaagagagagttcttggatcttgcaagaaagaattcaggtgtgtacactggaacagacattgtgactgatcatctaggaaactgcctggtcctcagatatcagagctatctgctccttgaccacgatctcttgtttgttgctctagctcggggagacaccctccatggtgcattgccccgtttttcagatgaagatgtagagacaaagaaagaaaggggtcctgatccagaccccgaaagaaggttcttggctctcacgcaagaaagaattcaggacactgagtgtggcagcttacagtacgactgcactcagtttttcattccccattctgtggaacaatacattcctgcatgctgcaacatcacttgcagttacttcctgcaagagaaatatacttccccacctcagtga

SEQ ID NO: 1015 - DNA, 613 bp, Homo sapiens
  SIMILAR (610)..(494): 511254mologous to Homo sapiens Human secreted protein, SEQ ID NO: 6606,accession number G02525,Smith-Waterman Score=88.
tttccaccgtaggcctcaaagcgctccaaatatccacttgcagattctataaaatgagtgtttgaaaaactgctcaatcaaaagaaacgttcaactccatgacctgaatgcacacaacagtgagaagtttctgagaaagtttcttggtctccccgcacaggttgttaatcttggttgccttggccttgttttttttaaagttgaaaattgaatttacggccattggtccttggattctttccttcattggccaattggttccccttcttctccaggcttggcctcgcccagggttcctgtgttcagtgttagtaaggtggtaaaccttgttgggcacagcagaaagaaactcacatttggagttaaactgagctcctcgctcaagaagcctgtaatcgtcagcacgttcaggaaaggagtcagcttggacgcccacggaaattttaaggacccaggcctgggacacagcagtgacataccatctctggtgtgaggtgtttggatcatggaagtgatttcctccatgctgttcttgtgatagtgtgggagatcgcaaaacatctgatggtttaaatatggcagtttcccctgtgcgttttttctctctctccat

SEQ ID NO: 1016 - DNA, 294 bp, Homo sapiens
  SIMILAR (164)..(18): 421254mologous to Archaeoglobus fulgidus pantothenate permease (panF-1),accession number AE001029,Smith-Waterman Score= 88.
atggagtgcaaggggcctccaatgtcaagcggagccaagagaggagcagacaaggagaaggtggtgtcccgcacgctagggaaggaagaaagaagctggagactggttaattgggccaaagatacaatgaaggaaagtgacaagaaggaaggtgtccatgttcctggccatggccgctataccaaggtgcatgacagttcacatacacaacgtaatttgatgccgccggcaggatctatgtctgttttacccaccaatgtctacacaccacctagcatcctgcttggtgtctag

SEQ ID NO: 1017 - DNA, 400 bp, Homo sapiens
  SIMILAR (183)..(341): 571254mologous to Homo sapiens Human secreted protein fragment encoded from gene 42,accession number Y07785,Smith- Waterman Score=118.
cttgtctgcagacctcattcttcctggtcacaggacaagaacttgggacccgtcaaatggcaaggctaaaagagctggtataacacaaacagggctgagacatgccccttgcttgccatgctatgggggaagagaaggagagaagagctgcagcccttcagggagcctagacttgggagccccccaggccaggaacaagcaggagccctgccccttctgagttggactccctctttggggccctgtggttcctggcatactgcattccccagtgccagctgtggaagctgcttgcagtgcacctggtccagctgcagccttgcagagagtgggcgcccatgccagcactggagctgcccaccttgcagcagctgcgggtgtgcctgactgcacagtggct

SEQ ID NO: 1018 - DNA, 936 bp, Homo sapiens
  SIMILAR (177)..(662): 321254mologous to Homo sapiens zinc finger protein,accession number X78932,Smith-Waterman Score=198.
atggcagaggaccgaattgcctcccaagaccacacctccaaatactatcacattgaggattgggtcctcaacatagaattttggcagacattaagtctttatatcaaagcagccttcattgtatcgcatcggagaattcatactggagagaaaccttacaaatgcaaagaatgtgcaaggtcttcagtgaccgttcagcttttgcaaggcatcggagaattcaactggagagaagccttacaaatgcaaagaatgtggcaaggtcttcagtcatgttcacgtcttacagtgcatcggagaattcatagtggagagaaacctacaaatgcaatgaatgcggcaaggtctacaataatccatacaggagaaaaccatatacatgtgatgtatgcgacaaggtcttcagtcaacgttcacacttgcaaggcaccagagaagtcatactggagagaaaccttacaaatgcatgaatgtggcaaggtcttcagtcagacttcacatcttgtggggcatcgagaattcatactggagagaaaccttacaaatgtgataaatgtggtctttaattccacttcgaaccttgcaaggcatcggagaattcacctggagagaaaccttacaaatgtaatgaatgtggcaaggtctttcgtcacaatcaacactagcacgtcatcggagtattcatactggagagaaaccttcgtgtgtaatgagtgtggcaaagcctttagacgtagccacatttgccacaggtcgacttctgaaggtggtaggcctagagccacggcggcaacacaacgtgtgcgtcttattgcgacgctttccaacaatgacgttcccttcgtcatctggcttctgcggccaagaccagagaaccggaagagaaggcacttccgctatatcacgctcagaagctcaacattcgtgttgaattag

SEQ ID NO: 1019 - DNA, 1324 bp, Homo sapiens
  SIMILAR (45)..(1394): 791254mologous to Homo sapiens Novel protein (Clone BM46_10),accession number W85727,Smith-Waterman Score=1745.
atgacatcagagaagagacacttgaggctttctggaggacttaagcttgaagaaaacttagccaggcttaaaaagcttccaccgccgaccgggcagccccagttacccgataacgctcccaaggccccgtgtttacattctttcccactggaagcagaaattatacgcccaaattcctacctgccttccctggattcctggtttcctaagaaagggtttggcccacccctgggcgttcgaacagtccacagaagcgggcaaagaaagacgactcagtctttcccctccgccaatctcttctccgggaccacaatcccagaatcagggccacgcggctgggcgcgccctctagcagcagccctggtgaccgcagcgcacgagcgcgggaaaatgaggctgcgcgggctgaagacgcaccgagaggagccgcccccgcggtaccgcgcagcctcgcgtcccgtagtggggaacaagggctgccgtaacaatgtcacagactcaatgacttacagcaaagaaaattattctttgccagtactggagataggatctagatgcaacagcactccagaaacaatgagaaacctagcactgaatcttggtttctattaccattctccaataaaagcatcgggactccttggagaaatggctgattctaaaactagggcaggggataacaaaatgggtctggagcatcttgtagtggcagaaaggaaagtagcgtcggccaaaagcctccgggatcggaatgaggaggctgctggagaattgctttctcctaaaagggattatcccaggcgcacacggtcattacacgcggggacgctcagtcggtgcgggcccgacgaagactcgcccatccggtcgccagaaaactgggagtccgcccgcctttccggcactgaaacgcgatcggccctgcctgacgaagggaacgtcatctttggaaagcgtcgcaataagacgcacacgttgtgccgccgctgtggcttaaggcctaccaccttcagaagtcgacctgtggcaaatgtggctaccctgccaagcgcaagagaaagtgcatggattccgtgaaggaacaacacctaaacccagagggcagctgttgcagcatccagttcatcttaagaatgtcaacgattgtcatgcaataaatgttctggttttaaaaaatacatatctggttttgcctcaaagcacagcagtcaatgctcaagtcaaacatgtcacattccaagatgcattggtccagtcacaagggtggtccttatccactggcaacactttcctgccttcatcaacattctgtcatcaagggtaa

SEQ ID NO: 1020 - DNA, 421 bp, Homo sapiens
  SIMILAR (402)..(118): 401254mologous to Bos taurus ribosomal protein L37,accession number S79980,Smith-Waterman Score=99.
atcgatacgactttttttttttttttttttttttttttgttttttaaaaccagaacatttattgcatgactaaacgttgyaaatccttaaaaatgaaactggaatgctgcaaaaaactgccctccttgggtttaaggtgttgttccttcaacggaaaccaatgcctgaatctgctggtaaaaaaattttaaggtgcctcattcgaccagttccgaaagtattatcgtcttttaagccttggcactccaagtttataactttctcttgcgcttggcaagggtagccaacatttgccaaaggtcgaccttctgaaggtggtaggccttagagccacaagcggcgggcacaacgtgtgcgatcttcagttgcgacgcttttccagaacgatgacgttcccttcgtgcatctcgcttctgcggcc

SEQ ID NO: 1021 - DNA, 720 bp, Homo sapiens
  SIMILAR (418)..(227): 351254mologous to Homo sapiens RNA polymerase II fragment which precedes the C-terminal domain,accession number W18375,Smith- Waterman Score=70.
atgattaaattagatcctgaccttcgtcgctctaattacaacgaggacccgaattactggttctggcccatttgtgaagttgctgccctttcacaagctgtgaaacacccattctacaggaaccagtgcatcttgccaaagggaacatgtaggagagactgtgctgggtcagaccagcaggtgctgactgacgtggctacagcaaggggaccacctgtatggccgctgcacctccaagctgtgggacgcagggacagctgggaccagtcgacgtccactggccctctgatggctcctaggactgaatcttggactccaggggctagcgggagccggcacaagagggtcgaggagccaggaaccccaaacgtccggcgccaggcgctagccaagctgctgcgcgccccggcgcccagctggctcggggacagccgctgggtgtcggagaccggagctagcggattgcagcggaaaagcaaagcccaaaagctcttagacaggggctctgccaacccagggggattccgtgttactcagacattggagtgtgaccattcatgttatatagatgggcccctggaaatccccatgataaggacagttggggagatcaagggactcgtgagtgtgaatgaattatatcagtactggaagccttctgcttacttctgtgaaagagcttgtgtcccacacctgcttcccgtttttgtccgtaattag

SEQ ID NO: 1022 - DNA, 219 bp, Homo sapiens
  SIMILAR (103)..(171): 651254mologous to Aspergillus nidulans brlA protein,accession number M20631,Smith-Waterman Score=57.
atggggcagcagggcacctcccgagacagcatcgtgcacctacgagcatctggagttggtccaggccaggtctactgctccaatgcagtacagacacctactgacccagaaaaaaacggccaattgctgacaaacgatggccgaccaatcactggtgactttaatttggatacccatgccagtccaatcacctatggccaggaacattcaacagtttga

SEQ ID NO: 1023 - DNA, 222 bp, Homo sapiens
  SIMILAR (220)..(95): 371254mologous to Mus musculus G7A,accession number AF109906,Smith-Waterman Score=58.
atgatcacggatggaagcctggatctccacgcaggagtgaagagctctggaaatggtgatgttaggtggagggagaatgatcacagatggaaaaaagagctccggaaatgccacggcttgtccctggcaagaggaccccaggacaagcgggaaatccaggcccacggaaggtcggtgtctcctcaggcctgcactcgcccagtgggctgctctgctgagtga

SEQ ID NO: 1024 - DNA, 989 bp, Homo sapiens
  SIMILAR (366)..(716): 261254mologous to Homo sapiens SRp55-3,accession number U30829,Smith-Waterman Score=96.
atttatttgcatataaatacatttatcatcaaagttttaaaaatggtggtggtgggatggaggtagcatctctgtcctaagtggtgagcatctggccaggtgtccaagtcagtggggaagagaaaaatgtcttaggctttctggttgatgacattgggaatgtttaccttgggaaagaggagatttgcataagtaccttaaatgtcattctgattgagttttaggatgagtcacagctggaaggaggaggcagaaaagaaagatcttgacactctagatgatgggccaaatgtagcaacatgaattgtgtggggatcaatgccagtatctttcctgaggttttacaaagccacctgcctgcatacagggaggggagtagccctcaagagcaacgctcatcacaacaagcctccagggtcttggttaactccaagaggaagtcaaaaagtcatgcagctgccaagaaaagaagaaagaattcaactgaggggcataagacagaaggagagaccaaggcaggggtgaaaggaaggaaagtgcacttggaagagggccaagcagacaacttgagagatcaagggggatcaagtcccagacgaaaatcccccgtggctcgccgactcgccgactgccggcaccgcgctaacctcacagttcggtaccgtagtataggcgcggtgccccaaggacccgcaggacgttgtgtaaacctgggcaagcttttgaagttggtttgccagtctcagagaattagaacactgcataaaaccttagaactcagtgtattccagctctcacagtctactgatgaagaaactgaagccaagaaaggtagccacagtgcctgggccagacagacccaggttccagagccagcccaaccatctcccactatcccacgcttcctctccagcttacactgtactgtacagatatcggtaaaggagtcatcatttgtaaataaggctggcaatgttccctcctcctaa

SEQ ID NO: 1025 - DNA, 588 bp, Homo sapiens
  SIMILAR (178)..(300): 291254mologous to Mesocricetus auratus transforming growth factor beta3,accession number AF298188,Smith-Waterman Score=69.
atggcaccagaagtggaaaattccacccctctggtcccaagcatttcagataagggatattcaacctataatggtgacaatgaagatgatgtcaacactgcagaaaaagtgcccagagacaacatgttgaaaatgtgtgaagggcttattcaagggctagggcagtgtgcattcacaataaaacatgaaatcctgtcagtgtataaaatcaaagacttattttccggcttgcatccggatcagtgtgttggctgtaaaccaaccaacacagatgatcaatattacagcacaaaggaagtaaaaagcctttgtgattatccaagccccagggaagcagcttccacctccacattccaagctgccatggaaacaacaatgctgcctattccactacaggctttgcgagactcctctgaagacctccctccagagtccacagttgcgagactcctctgaagacccctatccagagtccacagttgcgagactcctctgaagacccctctccagagtccacagttgacttcctcctcagagtcctaccacaggattaattcctgaaatctttcccaaatccaaacgttaagc

SEQ ID NO: 1026 - DNA, 1149 bp, Homo sapiens
  SIMILAR (81)..(134): 551254mologous to broad bean necrosis virus 6KDa glycine-rich protein,accession number D86638,Smith-Waterman Score=50.
atgaagcttgcactggcgtcgtttacaagcgtactggaaaacctggcgtacccacttaacgccttgcagacatccccttttgcactggtaatagcagagcccgacgatcgcctcccacatttccacctgatgggatgcgcctgtgggtttttccctcggatctgggggatttccacgcatagcatcctaaccacatctgaaacgctgtttgttataaaccattttaaaagtcaccttagttacaaacagctgctcaatgtgtggcccacggactgcagctttagtattacctgggagcttattggaaatgcagtggctaaggcctactcaagactgaacgaggaactgtattttatcaagattcccaggggtccaagaggtgcttacttgatctctagcaggctaaccccaagacggcacaatgccattcaggctgggttccacaattccgcctgcagaaggaatgatcgcaggtctctcaagggcaaaccgaaatttggcagatgtctgaaatcacactggaaagcgagcaacgagagagaggggctttattgtggggtgaatcatccccacgtagatgatctgaacaacccctgtatgcatactgacatcatcaggagagacttggaggcagaggatactatgccccgagcaactagcattctatcttctgtcttgaatctgactactctaggtacttcaaccaggaaatttatccactttagaagagtcatgtcattagattgggcccacctggataatctaggagactctccccgttttaagacccttaaacttaatcacatctgcaaagtcctttcggccatctaccctcttaaactccctgaacaagagccatctggaaatcttgttcctgtcctccatcctttctgtgagaccacaccagcacagctgggttgcagcaggcactgccgaggtgctgctggactggctatgctccagaccctcactgttaacatgcaattcttgtccttttgtgttaagcatgatgggacagtcaagatgcaggaaagcaagctagggttcccactgattctacattatgtccatggaaaaactgtcttccatgaaaccggtcctggtgccaaaaagggatatgccaaagatagtgagattgacattgcctaa

SEQ ID NO: 1027 - DNA, 747 bp, Homo sapiens
  SIMILAR (333)..(55): 291254mologous to Homo sapiens Fragment of human secreted protein encoded by gene 17,accession number Y14482,Smith-Waterman Score=75.
atggccagtgtaacaggacaggatctgccaatattcaacctcacaagatgcaacagaagatacctctggccatgggatgtgagagagtggaagaccgagtggggctggatacatgcagaagctggagctcagcttggaaatgatcatagtgttgagtccgggaagatggataagggcctgtggcaatgcagtaggaataaacaggtggtgatggacttccagcagggacccaacatgctggtgaccattcatttggatgtggaagatgaaggaggagatggtcaaagcaatagcaggtttctgcctcaggtgaccagccaggcctgggccacacgggtaggaataccctggcagttcacattctcactcagtctcacactcactttgtactctgatgctgacatgaagtggctctgctggcagcccacgtgtttccagatacttgacccagctgcaggtatgaaggccttacctcctggcaaatgtgaaacaaaagtcgaaggagacaaagagcctatgcagctgtgtcatgggtggtggtggtgggcacctccactgtgctccagcatagacgtgctgctctctaaggctgccttggttgtcagcagcaatggagaccccagtcccgtaagcagaggcagatggtgccttgtgttggaagcagcttggattcctgagttacagattggaggagagcccccaagatacctacccaatcagaaacatccacattggaattttttctga

SEQ ID NO: 1028 - DNA, 529 bp, Homo sapiens
  SIMILAR (181)..(62): 851254mologous to Homo sapiens Human secreted protein, SEQ ID NO: 5884,accession number G01803,Smith-Waterman Score=172.
gcagacagaacaagagacccggagaccccgtctgggggtgggagtggcgggcgggaaacggcgacaaaagagggagcgagaatgggagaaaacgcaaaaagagccaataggaggtgccacacagcatcccccgcctcgcgccaagactataattaaaaagcctaccccgaggaaaacccaagagccgtcaccgctgaaacaggaggcgaaaacctttctcgcgacattgccaagcaggagcgaacagcccggaaacgccccggagtttacgagctagtctctgtcattgagccatcaagaaggaaaaaccactcagaccgcgttctctccctctcactccccaatacggagacaagaacgatcatcaatggctgacggcagttgcagcgaaacaacacgccaaaaagccggcttcacgctcaggagaaaaacgctacctctcttcctcgtggttttcggtgctctacacgttcagagaaacttctctagtaacacactatagcggacgcgtgggcggacgcgtgggcga

SEQ ID NO: 1029 - DNA, 685 bp, Homo sapiens
atgcacctgctgcaagcagccctactgttggctgtgccctgccttctctgctatgttgctgttggctatgccttctctgtgctgctgacactgctgctgactgctccggctcttttgccagatgattttgagggcttcaatataagggaaaaaacaggctggtatggaaagaaggagggtatggtcacattatcgaatccacaagttgcaagagaaaaggagcagttcaatgatttgtattttaacgccaagcaggctgagcagaaggggtatctgaatactgctagacgagaagccagcctggcattcaaagtgacagagaccacccataacaagagtgggttgatcactgagagctgattaggtgctcaggcttccagtggaacattgttcttcgtagcgagcaaagccagcgtcctttttcgtagggaagcattcttcttatatgtcagtctcctatccgtgccattttctggtaccaagacctctggcatacactatcttctggcatggcatgtatactaaaacttgtacacgctctcagatcttaaaatgcagcaattatttctctaattagatagttacctatcttctatgacttcagtgattgcaaattccagcagaagctactgttctaataagaaaagaatcagaggtcttaatgcatagtaaaagagtgcctcgc

SEQ ID NO: 1030 - DNA, 549 bp, Homo sapiens
  SIMILAR (326)..(120): 281254mologous to Neurospora crassa ccg-4 putative polypeptide 2; Method: conceptual translation supplied by author,accession number U46085,Smith-Waterman Score=67.
atgatcaagtcaagctggttctatgttaagttcaagtatgcagagaaggaatatgtggtaacaagttatatgataggggaaggtgatctatttgaaagtctaatgcagaataaagtagtagtagttatcccctggcagagtaaaaagataagcaaaacttgggacgtcaacttacagcaagagctgtatggaagagaacagtgtgcagtatcccagcagcaggattctccagggacaaggcctaggtctgccactgagggtagtctgcttccttcatcagaattgccgctgctggccttctggaccattagagttctttctggttgttatccacttttcattccttctcaacccatagaattccaggtgctagcagtcagagacaaatggctaaccctctttgagtctcttggagtaaagcctggttgtgttctgcgtggattgcatcctgtgcagattgtggatagcaagggcttccttgcaggcctgttgggagcattgattgagatcatgggtgtagaaagcctggactatagccagagtcaataa

SEQ ID NO: 1031 - DNA, 384 bp, Homo sapiens
  SIMILAR (127)..(2): 501254mologous to Bovine herpesvirus 1 BICP22,accession number X76943,Smith-Waterman Score=88.
atgggcccgacccggaagcccaacgtgtgcagccggctgagtcgccgggcgctgggctgcttctcgcgcgacgcaggcgtggtgcagaggaccaacctgggcatcctgcgggcgctggtgtgccaggaaagtactaaatttaagaatgtctggacaactcattccaggtcacctatagcctatgagagaggaagaatatattttgacaattatcggcgctgtgtcagcagttttggaggcagcagtttgccctgtgacctgaattctctgatggatctaagaataattatggattttcagattgttcagcatttttcgtgctatgaggacagacgggtggcacttccaggctgttttcgtcttggaccagaaaccagaatttag

SEQ ID NO: 1032 - DNA, 675 bp, Homo sapiens
  SIMILAR (993)..(4): 831254mologous to Homo sapiens p40,accession number U93567,Smith-Waterman Score=1399.
atgcccttgttcttctttactacactgagatgtttgggtggagagaaacataaatctggcttacttgcacatccgggcacagtaccttcccttgaacttcattatgacatagattcttttgctcacaagttttttgctgaccttctcctaattatcaccctgttctcctactacattctttttgctgaaataatgaaaataataatgaactcagaggccggtgctgcagtccttggcctcaaagctgtcacaaatattcctttgcagatcccagaaaaacagtggttccaatctgctcaatcaaaagaatggttcagctctgtgagagtagtgcacacatcacaaagcagtttctcagaaaccttccttcgggtttttaagggaagttgctacaaaaacatgatttccaaactgttcaatcaaaagaatggttcaactctgagagatgaagaacatatcacaaaaagtttctcagaaagcttctgccagtttttacgtgaagatatttcctttttcaccataggcctcaaagcactcacaaatatccctttgcagattctagaagaagcctcaatgtgccccgaaatttccattgcagattcaccaaaacaggtttctaaactgctgaaggaaaagaaaggtttaactctgcgagatgaatgcacacataactaa

SEQ ID NO: 1033 - DNA, 797 bp, Homo sapiens
  SIMILAR (704)..(336): 611254mologous to Homo sapiens cytochrome c-like polypeptide,accession number S80864,Smith-Waterman Score=338.
ttttttttttatagagaaacgatagttgggcccaggggaccagcactcaggataccaaggacctgcaccagcaccggcctctgagttccctcagtttttattgattattattttcattatttcagcaaaaaggaatgtagtaggagagcagggtgataataaggagaaggtcaccaaaaaaaacatgtgagcaaaagaatctatatcataattaagttcaagggaaggtactatgcctggacgtgcacgtaggccagatttatgtttctctccacccaaacatctcagtggagtaaagaataacaaggcagcattgctgcaaaacatgtctcacctcccaccatagggcggtttttctcccatctcagaactgaacaaatgtacaatcgggttttataccgagacattcagttcccaggggcagacaggagacagtggccttcctctatctcaactgcaagaggctttcctcttttactaatccacctcagcacagaccctttaagggtgtcaggctgggggacggtcaggtctttctcatcccaggagcccatatttcagactatcacatggggagaaaccttggacaataccctgctttcaagggcagaggtccctgcagctttccgcagtgcattgtgcccctggtttattgagactagagaatggcgatgacttttaccaagcacactgcctgtaaacattttgttaacaagacacatcctgcacagccctagatcccttagaccttgatttcatacaacacatgtttttgtgagctcaaggttggggcaaag

SEQ ID NO: 1034 - DNA, 421 bp, Homo sapiens
  SIMILAR (421)..(230): 341254mologous to Human papillomavirus type 16 E5 protein,accession number AF120713,Smith-Waterman Score=64.
gcagttttcaagtctggggaaataggcacatggacagattattatgaaggtatttcattagctttcttctctttatggcagcttcagattgatgaatttgaggtacaaatgagtgagtgacatatgtatattttcctctgattttatgactgatttacaaattaggagtgcaaatgggctgttccccgatagcatcttctgggaagaatccaaccaagatacaaagcagatgatggtggatcggcaaactcttttctatgaaaagaaaaaccagatataccagggactggaaagcacctgcttgaaaattgatatgagcatgtctgaatttttcccttataagagcctgagtattgtaacagggactaaacttaatgcagaatcaaatgtaaggaccacatatcaagaagcaggacagtag

SEQ ID NO: 1035 - DNA, 486 bp, Homo sapiens
  SIMILAR (191)..(69): 951254mologous to Homo sapiens cytokeratin 18 (232 AA),accession number X12876,Smith-Waterman Score=196.
tttttttgaactctgaactttttattggcctcctgctccccaaagggtaccctgcttctgctggcttaatgcctcagaactttggtgtcattggtctcagacaccactttgccatccactatccggcgggtggtggtcttttggatggtttgcatggagttgctgctgtccaaggcatcaccaagactgtaacagaagaccaagcccaagttataaacagccccgtggagtagaagggagacaagaaaggtagagggaaaaagcctcctgacctctacctttatctccaaatcaccctcagcctcttcctccagaaaagggaaactcaaggccaaacttcatttgcatactaagtacagctagggacaatacttagtttgctttcttcaagggggagacctctgtaactgttactcccttgaagacacaggagcacccacggagcaacggcccagtgctcagtggataccagtgaacagacacatg

SEQ ID NO: 1036 - DNA, 897 bp, Homo sapiens
  SIMILAR (859)..(1752): 991254mologous to Homo sapiens dJ402N21.3 (novel protein with Immunoglobulin domains),accession number AL049553,Smith-Waterman Score=1548.
atgggccaccatcgtcggcaaagcctgagtcctgtcctatctctctcctccccggacagcatgagcttcaccactcggtccaccttctccaccaactaccagtcactgggctctgtccaggcgcccagctacggcgcccggccggtcagcagcgcggccagcgtctatgcaggcgccgggggctctggttcccggatctccgtgtcccgctccaccagcttccggggtggcatggggcctgggggcctggccgcggggatggctgggggtctggcaggaatgggaggcatccagaacaagaagaccatgcaaagcctgaacgaccgcctggcctcttacctggacagagtgaggagcctggagactgagaaccgtaggctggagagcaaaatccgggagcacttggagaataagggaccccaggtcaaagactggagccattactgcaagaccatcgaggacctgagggctcagatcttcgcaaatactgtggacaatgcctgcatcgttctgcatattgacaatgcccgtcttgctgctgatgactttagagtcaagtatgagacacagctggcgatgcgccagtctgtggagaacgacatccatgggctccgcaagctggagacagagattgaggctctcagggaggagctgctcttcatgaagaaccacgaagaggaagtaaaaggcctacaagcccagattgccagctttaggttgaccgtggaggtagatgcccccaaatctcaggacctcgccaagatcatggcagacatccgggccaaatatgacgagctggctgggaagaaccgagaggagctagacaaatactggcctcagcagtttgaggagaacaccacagtggtcaccacagtccgccgaggttggagctgctga

SEQ ID NO: 1037 - DNA, 1493 bp, Homo sapiens
  SIMILAR (134)..(259): 801254mologous to Homo sapiens Human secreted protein HCHPF68, SEQ ID NO:163,accession number Y86248,Smith-Waterman Score =182.
  misc_feature (1)...(1493): n = a,t,c or g
tgacatccaatgaactctgaactttttattgngcctgcctgctcccccaaagggtacactgcttctgctggcttaatgcctcagaagctttggtgtcattggtctcagacaccactttgaccatccactatccggcgggtggtggtcttttggatgatttgcatggagttgctgctgtccaagggatccaccaaagattaaaagtcctcgccaatcttccagcaggcgggcggtaaggtggcgaatctcagcttccagcttgacctttgatgtttcagcagggcctcatactccctgggcctggcgctgtcccctctgcccggggtctgtgccaagctctgactcaaggtgcaagcaaggatccccgttggagctggctccaatctggtaagggcgtaggngggcctccacctccctcaaggctgttctccaaagctgggccttccagatttctcatggagtccaaggtcgatctccaaggactggaactgtacgtttcaagcttctgtgagcgtgcgtctcagcaagctccaaacctcaagcagactggttgtggtgaccaactgtggtgctctcctcaatctgcttgagacgagtacttggctagcttcttctcggttctttttcgagcccagctcgtcatatttgggccccggatgtcttgccatgatctttggcgaaggccctgaagatttgggggcaatctaacctccacgggtcaaccccagagctggcaatctggcgtcttgataggccttttaacttccttcttcgtggttccttcttcatgaagaagcagctcctcctttgaggagcctcggatctctgtctccagctgcaagtcggtgtgataattggtgtcatcaaatggaccttggggagcccatggatgtcggttctccacaagactggcgcatggccagctctgtctcatactttgactcttaaagtcatcagcagcaagacggggcattgtcaatctgcagaacgatgcgggcattgtccacagtatttgcgaagatctgagccctcaaggtcctcgatgatcttgaagtaatggctccagtctctgacctggggtcccttcttctccaagtgctcccggattttgctctccatgctccggttctcggtctccaggctcctcactctgtccaggtaagaggccaggcggtcgttcaggctttgcatggtctccttctcgttctggatgcctcccattcctgccatgacccccggctcactcccgtggccaggcccccggaccccatgccgcccctgaagctggtggagcgggacacggagatccgggaaccagagcccccagcgcctgcatagacgctggccgcgctgctgaccggccgggcgccgtagctgggcgcctggacagagcccagggaccggtagttggtggagaaggtggagcgagtggtgaagctcatgctgtccggggagagagaaaggacaggactcaggctttgcggacgaccccg

SEQ ID NO: 1038 - DNA, 990 bp, Homo sapiens; identical to SEQ ID NO: 662
  SIMILAR (184)..(918): 641254mologous to Homo sapiens cytokeratin 18 (424 AA),accession number X12883,Smith-Waterman Score=754.

SEQ ID NO: 1039 - DNA, 1531 bp, Homo sapiens
  SIMILAR (52)..(855): 521254mologous to Homo sapiens cytokeratin 18,accession number X12881,Smith-Waterman Score=432.
cggggtcgtccgcaaagcctgagtcctgtcctttctctctccccggacagcatgagcttcaccactcgctccaccttctccaccaactaccggtccctgggctctgtccaggcgcccagctacggcgcccggccggtcagcagcgcggccagcgtctatgcaggcgctgggggctctggttcccggatctccgtgtcccgctccaccagcttcaggggcggcatggggtccgggggcctggccaccgggatagccgggggtctggcaggaatgggatggcatccagaacgagaaggagaccatgcaaagcctgaacgaccgcctggcctcttacctggacagagtgaggagcctggagaccgagaaccggagcctggagagcaaaatccgggagcacttggagaagaagggaccccaggtcagagactgggagccattacttcaagatcatcgaggaccttgagggctcagatctttcgcaaatacttgtgggacaatgcccgcatccgttctgcagattgacaatgcccgtctttgctgcttgattgattttaggagttcaagtattgaggacagagctagcaccatgagccagtcttgtggagaaccgacatccaatgggctccgcaaggtccatttgatgacacccaatatcacacggacttgcagctaggaagacagagatccgaggctctcaaggagggagctgctctttcaatgaagaaggaaccacgaagaaggaagttaaaaggcctacaagcccagattgcccagttcttggggttgacccgtgggaggtaagatgccccccaaatcttcagggaccttcgccaagattcatggcaagacatccggggcccaattatggacggagctgggctcgggaaggaaccgaggaggcagcttaggacaagttatttggtcttcagcagattttagggatgggcaccacagtgggtcacccacacaagtctgcttgaggttggaagcttgctgaagacgacgcttcacagagctggaggacgtacagtcccagttccttgggagatccgacctggggattcccatggaggaaatcttgaagggccagctttggagaacaagcttaagggaaggttgaaggcccgcttacgcccttacaagatggagcaagcttcaacggggatcctggcttgcacctttgagtcagagcttggcacagaccccggggcagagggacagcgccaggccccaggagtattgaggccctgcttgaacatcaagggtcaagcttggaagctgagattcgccaccttacccggccgccttcttggaagaatggccaaggacttttaattttggtgattcctttggacgaacgcaactcctttcaaaacctcccaaaaaaccaacaccccgccgggtaatgtggatgggaaagttggtgtttgaaaccaatgacaccaaagttctgaggcattaagccagcagaagcagggtaccctttggggagcaggaggccaataaaaagttcagagttcattggatgtca

SEQ ID NO: 1040 - DNA, 481 bp, Homo sapiens
  SIMILAR (99)..(1): 631254mologous to Homo sapiens hnRNP G protein,accession number Z23064,Smith-Waterman Score=125.
  misc_feature (1)...(481): n = a,t,c or g
tctaaagcctcttggagggccttttctttttggaggtggaggcgggccacgtttcccaccttcaaatgaagggttggtgggctggttcccccccaaggcgttttccctctaaaagcattcccttccagtttttggggggcaccctagggtttggtggggcttccaaaggggcaaaaacaaaaccctcttatttgttgggttcccgggtttttctcaaaaagaatttccccttttggcccaaatttgccaaaaactggttcaaaaaccttttcctttggtttcggttttaagccccccaaagaaaagcttttctgggggattttgtttcaccccnnnnnnnnnnnnnngggccggtgagtcggaggggtgacaatgggttcaagctccaacgagctcggcgataggggcttcctagcagctcagcaccatgtggcggctgccgggtgcgaggaccgaaccgcgaagccgctagcacacgaaa

SEQ ID NO: 1041 - DNA, 2104 bp, Homo sapiens
  SIMILAR (158)..(904): 561254mologous to Homo sapiens Human hnRNP G protein,accession number W93958,Smith-Waterman Score=562.
  misc_feature (1)...(2104): n = a,t,c or g
gggggttgcgcagtacgtgctagcggcttcgcggttcggtcctcgcacccggcagccgccactggtgctgagctgctaggaagcccctatcgccgagctcgttggagcttgaacccattgtcacccctccgactcaccggcccaaaaaaaaaaaaaaatggttgaagcagatcgcccaggaaagctcttcattggtgggcttaatacggaaacaaatgagaaagctcttgaagcagtatttggcaaatatggacgaatagtggaagtactcttgatgaaagaccgtgaaaccaacaaatcaagaggatttgcttttgtcacactttgaaagcccagcagacggctaaggatgcagccagagacatgaatggaaagtcattaggatgggaaaagccatcaaggtgggaacaagccaccaaaccatcatttgaaagaggtagacatgggaccgcccccacctccaagaagtagaggtcctccaagaggttttggaggttggaagaggaggaagtggaggaaccaggggacctccttcacgaggaggacacatggatgatggtggatattccatgaattttaacatgagttcttccaggggaccactccccagtaaaaagaggaccacgaccaagaagtgggggtcctccctcctaagagttctgcacctcctaagagatctgcaccagttcacagcagcagtgaatggaaggaagagctcctttatcacgtggaaaagatagttagggaggtccacctcgaagggaaccgctgccctcttcgtagagatgtttatttgtccccaagagatgatgggtattctactaaagacagctattcaagcagagattacccaagttctcgtgatactagagattatgcaccaccaccacgagattatacttacccgtgattatggtcattccagttcacgtgatgactatccatcaagaggatatagcgatagagatggatatggtccgtgatccgtgactattcagatcatccaagtggaggttcctactagagattcatatgagagttatggtaactcacgtagtgctccacctacacgagggcccccgccattcttatggtggaagcagtcgctatgatgattatagccagttcacgtgacggatatggtggaagtcgagacagttactcaagcagccgaagtggatctctactcaaagtggtcgtgaatcgggttggcagacaagaaagacggcttcccccttctatggaaagggggtacccttcctccacgtggattcctacagcagtttcaagccgcggaagcaccaaaaggtgggtgcccgtgggaggaagccgatttaatagagggggaggcagaaccagatactagaaacaaacaaaactttgacccaaaatcccaagttcaaaagaaacaaaaaaaagagtggaaacttattctatcataactacccaaggactactaaaaggaaaaattgtgttactttttttaaattccctgttaagttcccctccataaatttttatgttcttgtgaggaaaaaagtaaaacatgtttaattttatttgacttatcgcattgcttttcaacaagcaaatgttaaatgtgttaagacctggactaatgttggaccctttccaagaaaaggtatccccgtaaaggccacttccgtatcgtgatttttcccaggcaaatgagggcagggcaattctaaggatcttccacaaaacatctaggccatcttaaangggaggaggatggaatcattcttacctattacaaacaaggctaggctattagagggtggttggggtatgctactcataagatttccagggtgtcttccaactggaaatctcaatgttcctcagttacgaaaaaccctggaatccaccatgccctatggtaagggaaaagtggcctattcacccagtaaacccaaaaaaagcaaatggataatgctggccatttttgcctttctgacatttccttggggaatctgcaagaacctcccctttcccttcccccaataagaccatttaagtgtgtgttaaacaactacagaatactaaataaaaagtttggccaaaaccaacaaaaaaaaaaaaa

SEQ ID NO: 1042 - DNA, 654 bp, Homo sapiens
  SIMILAR (208)..(489): 841254mologous to Homo sapiens glyceraldehyde 3-phosphate dehydrogenase (EC 1.2.1.12),accession number J02642,Smith-Waterman Score=394.
atgactgcttttaactctggtaaagtggatattgttgccatcaatgaccccttcattgacctcaactacatggtctacatgttcctgtatgattctacacatggcaaattccatggcaccgtcaaggctgagaacgggacgcttgtcatcaatggaaaccccatcacccattttccaggaccaagatccctccaaaatcaaatgggcgccccagccaaggtcatccatgacaactttggtatcatagaaggattcatgaccacagttcacaccatcactgccacccagactataaatggcccctccgggaaactgtcacgtgatggctgcagggctctccaggacatcatccctgtctctactggcgctgccaagcctgtgggtaaggtcatccctgagctgaacgggaagctcactggcatggccttccatgtccccactgccaatgtgtcagtggcggacctgacctgtcgtctggaaaaacctgccaatatgatgacatcaagaagcaacacccactcttctaccttcgatgctggggcagccattgtcctcaaggaccactctgtcaagctaatttcctggtatgacaatgaatttggctacagcaacagggtggtgcacctcatggcccacaatgcctccaaggagtaa

SEQ ID NO: 1043 - DNA, 1414 bp, Homo sapiens
  SIMILAR (1322)..(1155): 821254mologous to Xenopus laevis glyceraldehyde 3-phosphate dehydrogenase,accession number U41753,Smith-Waterman Score=249.
gggttttttttttttttttttttttttggttgagcacagggatactttattagatggatacatgacaaggtgcggctcccataggcccctcccctcttcaaggggtctacatggaaactgtgcggaggggaagaattcaagtgtggtgggggacatgagtgtggcaggaaatccccaacagtgagggtctctctcttcctcttgtactcttgcttggggctcggtggtcccaggggtctttactccttggaagccatgtgggccatgaggtccaccaccctagattgctgtagccaaattcgttgtcataccaggaaatgagccttgacaaaagtggtctgttgaggggcaatgcaggccccagcgttcaaaggtggaggagtgggtgtcagctgttgaagtcagaggagacccacctggtgcttcagtgtagccccaggatggccccttgaggggggccctgccgacggcctgctttcaccaaccttgcttgatgtcaatcatattttggcaaggtttttctagaacggcaggtcaaggtccaccactggacacgttttggcagttggggacaccggaaagcccatggccagtgagctgtcccgttcagccttagggatgacccttgcccacaggccttgggcagcgcccagtagaggcccagggatgatgttctggaagagccccgcggcccatccacggccacagttttccccgggaggggccaatccacagtctttcttgggttgccagtgatggccatggaactgtggtcatgaagtccttcccacgattacccaaagttgtcatggaatgaccctttggccagggggtgctaagccagttggttggtgcaggaggccattgctgatgaatcttgaggctgttgtcaatacttctcaatggttcacaccccatgacgaaacatggggggcatcaagcaagagggggcagagattgatgaccccttttggctcccccctgcaaaatgagccccagccttcttccatggttggttgaagacgccaagtggacttccacgacggtactcagcgcccagcattcgccccacttgattttggagggatctcgcttcctggaagatggtgatgggatttccattgatgacaagcttcccgttctcagccttgacgggtgccatggaatttgccatgggtggaatcatattggaacatgtaaaccatgtagttgaggtcaatgaaggggtcattgatggcaacaatatccactttaccagagttaaaagcagccctggtgaccaggtgcccaatacgaccaaatccgttgactccgaccttcaccttccccataggtgttctgagcgatgtggctcggctggcgacgcaaaagaagattgcggctgactgtcgaacaggaggagcagagagccccc

SEQ ID NO: 1044 - DNA, 481 bp, Homo sapiens; identical to SEQ ID NO: 1040
  SIMILAR (99)..(1): 631254mologous to Homo sapiens hnRNP G protein,accession number Z23064,Smith-Waterman Score=125.
  misc_feature (1)...(481): n = a,t,c or g

SEQ ID NO: 1045 - DNA, 1627 bp, Homo sapiens
  SIMILAR (241)..(170): 371254mologous to Mus sp. anti-human glycoprotein GPIIb/IIIa IgG2a heavy chain V region, MA-16N7C2 {VH chain CDR3 region},accession number S75677,Smith-Waterman Score=64.
gggggttgcgcagtacgtgctagcggcttcgcggttcggtcctcgcacccggcagccgccactggtgctgagctgctaggaagcccctatcgccgagctcgttggagcttgaacccattgtcacccctccgactcaccggcccaaaaaaaaaaaaaaatggttgaagcagatcgcccaggaaagctcttcattggtgggcttaatacggaaacaaatgagaaagctcttgaagcagtatttggcaaatatggacgaatagtggaagtactcttgatgaaagaccgtgaaaccaacaaatcaagaggatttgcttttgtcacactttgaaagcccagcagacggctaaggatgcagccagagacatgaatggaaagtcattagatggaaaaagccatcaaggtggaacaagccaccaaaccatcatttgaaagtggtagacgtggaccgcctccacctccaagaagtagaggccctttccaagaggtcttataggtggaagaggaagaagtggaggaaccaggggacctccctcacggggaggacacatggatgacggtggatattccatgaattttaacatgagttcttccaggggaccactccccagtaaaaagaggaccaccaccaagaagtgggggtcctccctcctaagagttctgcaccttcaggaccagttcgcagtagcagtggaatgggaggaagagctcctctatcacgtggaagagatagttatggaggtccacctcgaagggaaccgctgccctctcgtagagatgtttatttgtccccaagagatgatgggtattctactaaagacagctattcaagcagagattacccaagttctcgtgatactagagattatgcaccaccaccacgagattatacttaccgtgattatggtcattccagttcacgtgatgactatccatcaagaggatatagcgatagagatggatatggtcgtgatcgtgactattcagatcatccaagtggaggttcctacagagattcatatgagagttatggtaactcacgtagtgctccacctacacgagggcccccgccatcttatggtggaagcagtcgctatgatgattatagccagttcacgtgacggatatggtggaagtcgagacagttactcaagcagccgaagtgatctctaatcaagtggtcgtggtcgggttggcagacaagaaagacggcttcccccttctatggaaagggggtaccctcctccacgtgattcctacagcagttcaagccgcggagcaccaagaggtggtggccgtggaggaagccgatctgatagagggggaggcagaagcagatactagaaacaaacaaaactttggaccaaaatcccagttcaaagaaacaaaaaaaagagtggaaactattctatcataactacccaaggactactaaaaggaaaaattgtgttaccttttataaattccctgttaagttcccctccataatttttatgttcttgtgaggaaaaaagtaaaacatgtttaattttatttgactttcgcattgcttttcaacaagcaaatgttaaatgtgttaagacttgtactagtgttgtaactttccaagtaaaagtatcccctaaaggcc

SEQ ID NO: 1046 - DNA, 1499 bp, Homo sapiens
  SIMILAR (479)..(562): 961254mologous to Homo sapiens Human PRO873 protein sequence,accession number Y41723,Smith-Waterman Score=142.
atgaagattccctggaaaagatctaatcttcaagtaaaggatgaggaggagtgggccaggcaaagaaagatcctgtttgagtttggagccacaggagcaagtgtgggaggtggaagcaaggagacagcatcccatcttcagtcaaagcctcatttgccagattctcttataggctgtggccacaacaataggagtatggatataggctttgggagaaggttgcccacctggctggatgcaaccacaacagcacacagatcctggtaaactgcctgagggcacttatcagggaccaaggtgatgcgtgtgtccaacaagatgagattcctccaactgaacttccagagagacccggaagaggtgtcaacaacctggaattcaattggctcttgccttatatcatgaagttcccgctaaaccggcaggcgatgagaaaggaaccatcactaagatgctctggagtacccgcaccctgttgaatatcaccaaggagcaggtaccacttgtggtggaggagtacctggacaatgtcaatgagcatgtctggaagatgctacgaaaccccccggctccacaccctccccatacacccagaaggtgtccctcttctcgtcagctcctccctgggttacattgctggatacagaggcgggagggctacctactactgccccatcgtcccaccttgtctcctgcccccactcaggtcctcccacggccacttggagtctctcctgaagtgctgccaggccccatcccgcgtggatcggcccggttctgggctggccgagctggagcagttccccatggtggttacggcagagccaggctttggaaacccacggccggtgctggacgtgccccgcgacaggcacgtgcctacaagacgtggagagcatgaacagcagagatttgtcctcaacggaaaacagcagatcttctccgtttcagaggactcctggtcctcaacgtctatagcccagctgaggtcatggtatgggtccatggagcgctctgataactggcgctgccacctcctacgatggatcagctctggctcctatggggatgtggtcgtggttacagtccagtaccgccttggggtcctggcttcttcagcactggagatgagcatgacctggcaaccagggcttcctagatgtggtagctgctttgcgctgggtgaagaaaacatcgcccccttcgggggtgacctcaactgtgtcactgtcttggtggatctgccggtgggagcatcatctctggcctgcctttcagaggccacagaggaggagaagcagctaagcctcaccatgatggcccatggacccactttgcccggacaggcccttaaagtgtcggcgctctgtgactggagttatgctcttttgaaatgtcacaaggccgcctccacctctggggcattgtacaagttcttccctctccctgaagtgcctttccgctttcttcgtgaggagctctctcaaaatggggattag

SEQ ID NO: 1047 - DNA, 4746 bp, Homo sapiens
  SIMILAR (913)..(1695): 911254mologous to Homo sapiens zinc finger protein (583 AA),accession number X51760,Smith-Waterman Score=1358.
  misc_feature (1)...(4746): n = a,t,c or g
atgactggaatctgctacacagaagatgaaagatcatataagaaaaatgctcaaccaacggcagcaagtaaaaagcaaaaagaaacacagaaattctgtctaagagtagacgggcaacaaaaagtgaagctctcggtgctccaggagaaaagcgcgcagctcacagtacaacttaagagccagaagttcctgggccaccccacagcgggccggggtcgcagcgagctctgcctggacctccccgatcccccagaggacccagtggcactggagacccggagtgtgggcacctgggttcgagaacgggacttgggcatgcctgatggggaggctgccctcgccgccaaggtcgctgtgctggagacccagctcaagaaggcgctgcaggagctgcaggcagctcaggcccggcaggctgacccccagccccaggcctggccaccgccggacagcccggtccgcgtggatacagtccgggtggtagaagggccacgggaggtggaggtggtggccagcacagccgctggcgcccccgcacagcgggcccagagcctggagccttacggcacagggctgagggccctggcaatgcctggtaggcctgagagcccacctgtgttccgcagccaggaggtggtggagacaatgtgcccagtgcccgctgcagctaccagcaacgtccatatggtgaagaagattagcatcacagagcgaagctgcgatggagcagcagaaatgaaatgggaggaccagaacattggagatcagtgccaaaatgccaagagaaatctaaggatggcattaacatcctctctgggctgtggatttctccaggttgtgctgagactccagaatttacagcaggtgatagtcagctatttcggccagtgcaagtttggatgcctgcaaggtcaatcatgcgagcatcaggaatatggagagaagccatatacacataagcaacgtgggaaagccatcagtcatcagcactccttccagacacatgaaaggccccccaccggaaagaaacccttctattgtaaagaatgtgcaaaaacctttagttctcttggaaacctccgaagacacatggcggcacaccatggagatggaccttataaatgtaagttgtgtgggaaagcctttgtttggcccagtttatttcatttgcacgaaagaacacacactggagagaaaccgtatgaatgtaagcagtgttctaaagcctttcctttttacagttcctatctaagacatgaaagaatccacacgggagagaaagcgtatgaatgtaagcagtgttccaaagcctttcctgattacagtacctatctaagacatgagagaactcacaccggagagaaaccctataaatgtacacaatgtgggaaagccttcagctgttactattacactcgactacatgaaaggactcacacgggagaacaaccctatgcatgtaagcaatgtgggaaaacgttttatcatcacacaagctttcgaagacacatgataaggcacactggagacggaccacataaatgtaagatatgtgggaaaggctttgattgtcctagttcagttcgaaatcatgaaacttacttcacactggagagaaaccctatggaatgtaaagcagtgtgggaaagtgttatctcatagctcgagctttcgaagtcacatgataacacacacaggagatggaccccagaaatgcaagatatgtgggaaagcctttggttgtcccagtttatttcaaagacatgaaaggactcacactggagagaaaccctatcaatgtaaacaatgtggtaaagccttcagtcttgccggttcccttcgaagacatgaagcaactcacactggagtgaaaccctataaatgtcagtgtgggaaagcctttagtgatctctcttcctttcaaaatcatgagacaactcacactggagagaagccctattgaatgtaaggaatgtggaaaagcattcagttgtttcaaatacctttctcaacatagaaggactcacatggctgaaaaaccttatgaatgtaaaacatgtaagaaagccttcagtcattttggtaacttaaaagtccatgaaaggattcacactggagagaagccatatgaatgtaaggaatgcaggaaagcattctcttggctcacttgccttctgcgacatgaaagaattcacactggaaagaaatcttatgaatgtcaacaatgtggtaaagccttcactcgttctcgtttccttcgaggacatgaaaaaactcacactggagagaagatgcatgaatgtgtctgcaaggtggacaaacagaaccgtgctggctacagccctattatgctcaccgccctggccaccctgaagacccaggacgacatcgagactgtccttcagctcttccggcttggcaacatcaatgccaaagccagccagccatatgtggcccagggggacctgagtggattccaagacattggtggctacacaaaaaggaaactggacttttattccacgctgttggctggcagtccaggacctcagcatccaggaagtcacctttgtcctcagaccaacctggaaaaatctcgcttttctgcccgtggacaccgccgaagaagcatcgttaaagtctctcttcaccctgccggtcatgtctaagtcagagtctcctaaagagcccgcaacagctgaggggngggaagctttttcattggagggttgagctttgaaacaacatgatgagagccctgaggagccattttgagcagatggggaacgctcacggacttgtgtggtaatgagagatccaaacaccaagcgctccagggggctttgggtttgtcacatatgccacttgtggaggaggtggatgcagcctatgaatgcaaaggccacacaaggtggatggaaagagttgttggaacccaaagaggagcttgtcttcccagaggaagattctcaaaagaccagggtgcccacattaacttgtgaaaaaagatattttgtttggttggcattaaaagaagacacttgaaagaacatcaccgtaagagattatttttgaacaagtattggaaaaatttgattggattgaaatccatgacttgacccgaggcagttggcaagaaaaaggggctttgccttttgtaaccctttgaccgaccatgacctccgtggataaagattgtccattccagaaataccatactgtgaatgggccacaacctgtgaagtttagaaaagccctgtcaaaagccaagaagatggctagtgcttcatccaagccaaaggagggtcgaagtggttcttggaaacttttggtggtggtcgtgggaggtgggtttcggtgggaatggacaacttcggtcgtgggaggaaacttcagtggtccttggtggcctttggtggccagcccgtggttgtgggtggatatggtgggcagtgggggatggctataatggatttgggtaatgatggaaagcaattttggaggtggtggaaagctacaatgatttttgggaaaataccaacaaatcaggtcttcaaaattttggaccccatgaaggggaggaaatttttggagggcagaagctcgtgccccctatgggcggtggaggtccaatacttttgctaaaccccgaaaaccaagggtgggctatggccggttccagcagcagcaagtaactattggcagtggcaggaggttctaattacagccaggaaacaaagcttattcaggagaggagagccagagaagttgacagggaagctacaggtttacaacagatttgtgaaactcgccccagacacagtgggtgccagggcctagctggcttacaaagaaagacatgtttttaggacaaattactcatgttgtatggggcaaaaaaactcggagggactgttatttgtggactaattggttattaacagggttattttaagttttctgtttctggtgggaaagtgttaagccattcccaaccaaggggttttaatggtagatttttttttttttttttgcacccccatgcctgtttgattgcctaaaatgtaaccagtctgaatcggtgaccgctgaattaaaatgtccttttttttaaatggtgcctgtgtaaaagttagtcttactctttaagcccatcttgggtaaaatttcccccaaccagtgtggaagttaggaaattcctttcaggggtgatgccccggttcctatttggaatttatataccaaccctgcttggggtggagaaagccattgtcttcgggaaacctctggtgtagttcgaactgaaaaagtactgtttgtgacctgaagtttcacccattaaaaggggnttaccccaagcaaaatccatggaattattggttattaaaagtggattgtttgggcacatccctatggcaattatatcctaaatttgaataatgggaccagattaaaattatagatggggaatgaagccttgtgtatcatccattatcaatgtgtaatcaataaacgattataattctcttgaatgaaatgacacctgtatggatttgggactggcagagatttggactttccttacccactccccctgataataatgttgaatgcttctctcacaattccaagttccaaagctctgccaggggaattaggaacctaagctgctggctaatgccgctccataaatcccgcagatttgaaagtgtctgggaaggcccttttaaaaatacccaatttccg

SEQ ID NO: 1048 - DNA, 411 bp, Homo sapiens
ttttttggtataaatttgtattccaaacagggtcaaaagcttccaggatcacagtggtctctacctgccctctctctgctaggcaaaatcctcacagtcctcaagggcctagtaaatgtcactgccacgaagcccttccagatttccccgctgggacaagcctactctgcaactgttttatatcatggctaccaaaagtcctagcaatgccagattagactcctgctcatgctgaagttctttccatagtagccaggctcattacagtgcctgagattctactatcaccatatccatcttgcaggtatagtaccagcatccctaaaagaagggatcacattcagttatggagactcacaaatattttggctgacgaaaacccacaataacaaacctgctaagagagagggg

SEQ ID NO: 1049 - DNA, 1185 bp, Homo sapiens
  SIMILAR (958)..(1182): 561254mologous to Homo sapiens p40,accession number U93567,Smith-Waterman Score=204.
atggaccctgctgccactaccctgatgaagtgctttggcctgcaccactcattggagttttgtggccagcagactgagatcagttcggcctctccaacacagcaggttcctagccttgaggggccagagaacaaaggcctcccctcccctggcatgtgtaccaccagccctgagagtgggcttggagtggctatctgcttggggtgtggacagaacccagacatgcagactggcatgcccacacgtctgtgcacagagattcttgcggagtgtgccaaactaaaggtgaaaaaaaaagtggggttcatgaaagccttaagttatgcatcattagataaagaagatttattgagtcctattaatcaaaataccctgcaacgatcttcctcagtgcggtccatggtgtccagtgccacatatgggggttcagatgattacattggtcttgctctcccggtggatataaatgatatattccaggtaaaggatattccctattttcagacaaaaaacataccaccacatgatgatcgaggtgcaagagcatttgcccatgatgcaggagaaagtacagaagacactggactacaggaacatacagatgataactgcctttattgtgtctgtattgacattctgggtttccagcccagcaaccaactgagtgcgatatgtagtcattcagactttcaagatattccatattctgattggtgtgagcagactatccataatcctttagaagtggttccctctaagttttcggggatttctggatgcagtgatggggtgtctcaagaaggctcagctagcagcaccaaaagcacagaattgttactaggtgttaaaacaattccagatgatacaccaatgtgccgtatactccttcgcaaagaagttctaagattagtcattaatttgagtagttcagtttcaactaaatgtcatgagactgggcttttaacagaggtagacacccagatacaagaaatccagagaacacctgctggattctacacaaaacgaacatcactagggcatataggcaccagattgtttaaggccagcactaaagaaaaaatcttaaatgcaactagagaaaaaggtcagatcacatacaaagggacccccatcaggctaacagtggacttctcagcagaaaccttacaagccagaagagattga

SEQ ID NO: 1050 - DNA, 1292 bp, Homo sapiens
  SIMILAR (824)..(627): 281254mologous to Human immunodeficiency virus type 1 Vif,accession number AF110969,Smith-Waterman Score=74.
tttcgttctgcccacctccctccctccatctcagctctaaatttataacttagtaagtgggtgtgtctttggggctggtttggatccctcaagtagaagagagcaagccagaaacacatgtgcaagagatttactgggggaaggacttgtaaggggaaagggagtaactgtaggcacagagccttcagacccagtgcaggtgtgatgcctgtggaaggagatggggaggaaggaaggtgggaaggagttgcttccagctgcagccattgggtgggagcagcctggggtgtgtgaatcttccacagatctgaaggggcagtgtctgaaggctgtcagtcatctacgctctcttgaagggagcactgaggggcacagctgcacactgccacagttctctttcagagatgttcttaggttcatgaaagccttaagttatgcatcattagataaagaagatttattgagtcctattaatcaaaataccctgcaacgatcttcctcagtgcggtccatggtgtccagtgccacatatgggggttcagatgattacattggtcttgctctcccggtggatataaatgatatattccaggtaaaggatattccctattttcagacaaaaaacataccaccacatgatgatcgaggtgcaagagcatttgcccatgatgcaggagaaagtacagaagacactggactacaggaacatacagatgataactgcctttattgtgtctgtattgaaattctgggtttccagcccagcaaccaactgagtgcaatatgtgagtcattcagactttcaagatattccatattctgattggtgtgagcagactatccataatcctttagaagtggttccctctaagttttcggggatttctggatgcagtgatggggtgtctcaagaaggctcagctagcagcaccaaaagcacagaattgttactaggtgttaaaacaattccagatgatacaccaatgtgccgtatactccttcgcaaagaagttctaagattagtcattaatttgagtagttcagtttcaactaaatgtcatgagactgggcttttaacaattaaggagaagtatcctcaaacatttgatgacatatgcctttactctgaggtttcccatttgctgtcacactgcacattcagacttccgtgtcggaggttcatacaagaattatttcaagatgtacagtttctacaaatgcatgaagaagcagaggctgtgttggcaacaccaccaaagcaacctatagttgatacatctgctgaatcctga

SEQ ID NO: 1051 - DNA, 443 bp, Homo sapiens
  SIMILAR (217)..(143): 401254mologous to Pennisetum glaucum homeobox protein,accession number AF011553,Smith-Waterman Score=43.
ttttttcctgcagggcttttattggctctataagtcaacttcgattccttaaagcagtctgtttatatttgaaagcacgacatttcaaaaccttggtaaaataaccatcatatccaattgtgtccctttttgtcagcatataaggtttccaggtttcttttctctgcagcttccagaagaatggacagtcagactgagtcaggcctgttgagcttccactaacaattcctccaggtttcagcaaatgtgaccgaccagacaaactggaagagcctgttggactttcatcagcaatttcttcagagatctcctcaccaaggcataaggctcctatggaggacgagctgaccacgtactgagctgagtgttgagttgaccaccagccttaggggaatgtctttgtagcgaggagcactgcggaaatgttgcacggcctaatcttg

SEQ ID NO: 1052 - DNA, 562 bp, Homo sapiens
  SIMILAR (6)..(299): 551254mologous to Homo sapiens fumarylacetoacetase (AA 1- 349),accession number X51728,Smith-Waterman Score=235.
  misc_feature (1)...(562): n = a,t,c or g
atggatatgcgacgacatgtgagatgccgtgcgggacgtgacgttgtctggaggaatatacgagaccttccagaagaatggacagtcagactgagtcagcctgttgagcttccactaacaattcctccaggtttcagcaaatgtgaccaccagacaaactggaagagcctgttggactttcatcagcaatttcttcaagatctccnnnnnnnnnnnnnnnnnnnnnnnnnnnnnnnnnnnnnnnnnnnnnnnnnnnnnnnnnnnnnnnnnnnnnnnnnnnnnnnnnnnnnnnnnnnnnnnnnnnnnnnnnnnnnnnnnnnnnnnnnccaaggcataaggctcctatggaggacgagctgaccacgtactgagctgagtgttgagttgcccaccagccttaggggaatgtctttgtagcgaggagcactgcggaaatgttgcacggcctagtcttgtggcatttccctctgtggggacttcagctttcacctcattctcttattctttcaactcctttcctccctctcctttacttcttacccttctgtcgtcttctcgcagc

SEQ ID NO: 1053 - DNA, 387 bp, Homo sapiens; identical to SEQ ID NO: 536
  SIMILAR (99)..(383): 951254mologous to Homo sapiens HSPC164,accession number AF161513,Smith-Waterman Score=476.

SEQ ID NO: 1054 - DNA, 400 bp, Homo sapiens
  SIMILAR (391)..(2): 931254mologous to Homo sapiens protein x 0001,accession number AF117231,Smith-Waterman Score=593.
gcttggcggagctgtgagtggtaaagagggacttgtaggcctccgattcttcactgtcagcgatggacctctttgtggctccacacggaggcttcccagcttttccagaagagctctcattcattgctgtgcttttgggagccaagttggttttcttctctctagaatcaaggctggcttcttcaggcttccctgtcttaacttttgatggccctggggcttcttcactgacatctggttttgaaacagactctgctgccttgggtttctttgttttcttttccacgttcgctctcagccttctctcctccatccttgtcttcagcacgtccacatcctccttggtgccattgagaaattcaatgacggcatctttgttataaagtctgccaagttcaca

SEQ ID NO: 1055 - DNA, 412 bp, Homo sapiens
  SIMILAR (3)..(203): 891254mologous to Homo sapiens putative ribosomal protein (AA 1-184),accession number X53777,Smith-Waterman Score=311.
cccacgcgtccgcggacgcgtgggtcggaggcctacaagtccctctttaccactcacagctccgccaagcctccgtgtggagccacaaagaggtccatcgctgacagtgaagaatcggaggcctacaagtccctctttaccactcacagctccgccaagcgctccaaggaggagtctgcccactgggtcacccacacgtcctactgcttctgaagcccgcactgccaccgctcctgccccagaaggttgtttagtttccacgtaggcaggtcgctttgtgcctctgagtgcgctgctgtgtgttctctctatagttctgtgtcataaagctgtcctggccagccttcaagctggtgtggccactcttgatgtgaggcgtgtcggttccaggggggacatgggaggggctgca

SEQ ID NO: 1056 - DNA, 1134 bp, Homo sapiens
  SIMILAR (1)..(285): 981254mologous to Homo sapiens HSPC169,accession number AF161518,Smith-Waterman Score=484.
atgggttgcgacgggggaacaatccccaagaggcatgaactggtgaaggggccgaagaaggttgagaaggtcgacaaagatgctgaattagtggcccaatggaactattgtactctaagtcaggaaatattaagacgaccaatagttgcctgtgaacttggcagactttataacaaagatgccgtcattgaatttctcttggacaaatctgcagaaaaggctcttgggaaggcagcatctcacattaaaagcattaagaatgtgacagagctgaagctttctgagcgagccttgaaagagataaaagcggaagtttgccacacgtgtggggctgccttccaggaggatgatgtcatcgtgctcaatggcaccaaggaggatgtggacgtgctgaagacaaggatggaggagagaaggctgagagcgaagttttaaaagaatatcaaagaaacccaaggcagcagaggtctgtttccaaaacccagatgtcagtggaaggaagccccagggcccatcaaaagttaagaccagggaagccctgaagaagcccagcccttgattctagagagaagaaaaccaacttggctcccaaaagcacagcaatgaatgagagctcttctgggaaaagctgggaaagcctccgtgtggagccacaaagaggtccatcgcttgacagtggaagaatcggaggcctacaagtccctcttttaccactcacagcttccgccaagcgcttccaaggagggagtctggcccactggggttcaccccacacgtcctacttgcttctgaaagcccgcactgccaccggctcctgccccagaaggttgtttaagtttccacgtagggcaggttcgtttgtgcctctgagttgcgctgcttgtgtgttcttttctattagtttttgttgttcataaaaggtgttcctgggccagccttcaagctgggtgtgggccactctttgatgtgagggcgtgttcggttccaggggggggacatggggaggggcttgcacagtgggcccgaggttcatgctttgtttccacctgcatgtgccatttgggtcctttccatggccaggaagccctgtgggctgcactttttatgcttgcagtaacaagagactccgagagt

SEQ ID NO: 1057 - DNA, 999 bp, Homo sapiens
  SIMILAR (157)..(864): 341254mologous to Baboon endogenous virus strain M7 polyprotein,accession number D10032,Smith-Waterman Score=275.
gcgcttggcggagctgtgagtgataaagagggacttgtaggcctccgattcttcactgtcagcgatggacctctttgtggctccacacggaggcttcccagcttttccagaagagctctcattcattgctgtgcttttgggagccaagttggttttcttctctctagaatcaaaggctggcttcttcaggcttcccctgtcttaacttttgatggccctggggcttctttcactgacatcctggttttgaaacagactctgctgccttgggttttctttgttttcttttccagcttcgctctacagccttctctcctccatcattgtcttcagcaagtccacatcctccttggtgccattgagcacgattatcatcatcctccctggaaaggccagccccacacgtgtggcaaaactcccgcttttatctctttccaaggctccgctcaagaaaaacaacacaagccgcaaccacccgaaggaagcagaactctgtgtctggccagttcatctcccaggcccaccaacgggggaagatgaagacgcgcccgctggaggtcatctgtgcttgtccaccttttagtgtttcctttatccccttcccagggcagggattatcaggaaagcttcagcttgtgtcacattcgttaatgcgttttaatgtgagatgcctgccttcccaagagcctttttctgcagatttgtccaagagaaattcaatgacgggcatctttgttataaaagtctgcaaagttcacagggcaactattggtcgtcttaatattttcctgacctaaagtacaatatgttccattgggccactaattcagtcatctttgtcgaccttctcaaccttcttcggccccttcaccaggttcatgcctcttggggattgttcccccgtcagcaacccatcgcaggacgggagtcagacccagcagcaaacccccaaagctgtcacttccgggatttccggcgaaaaaaaaacccacgcgtccg

SEQ ID NO: 1058 - DNA, 759 bp, Homo sapiens
  SIMILAR (10)..(723): 841254mologous to Homo sapiens putative p150,accession number U93568,Smith-Waterman Score=1084.
atgataggccatctgcaagctgaggaaaaagaagccagtagtggctcagttcaagtccaaaagcctcagaagcaagaagccaactgtgcagtcgtcagcctgtggccagaggccacagggcccccgcaaaccaccagtgtaagtctaagagtccaaagaccaaagaacctggaactgatgtccaagggcaggagaagcagaaggaagcatccagcacgggagaagatgaaagccagaagactcagcaagcaaaggtatcccaccttcttctgcttctgtgttctacctgagctggcagccaattgcatggtgtccacctactcgaggcctcccaaaaggctggattacaggctggagcccccacacctggccccaagtctgaccgttgagcgaacaaacgcccctgctgcaggttccacgtggctggcactgagcccgaacgcctctgctgtggccaccatggactcaacaggactcaccatctagacctactcgtgaccgatttattccagtgaagggatacaaagcaaaaccagctgagggagagctctagcctctcggaatttgtcttcttcagtggaaaccccgagaagactgatcagttcttcagttctaaaacaatggcccaggtgttggcagtatgcttcccgggtgttgttaatgtgtcaccaccatgaagcacctggtgtcggttgtagctcctctttgccattggcagtcattggcactgcttacattctcacactgggggctcaaatg

SEQ ID NO: 1059 - DNA, 450 bp, Homo sapiens
  SIMILAR (1)..(402): 821254mologous to Homo sapiens mariner transposase,accession number U52077,Smith-Waterman Score=567.
atgatgttagacaaaaagcaaaaccgagtgattttcttatttgagttcaaaatgggctgtaaagcagtggagacaacttgcaacatcaacaatgcatttgacccagaaactgctaatgaacatacagtgcagtggtggttcaagaagttttgcaaaggagacgagagccttgaagatgaggagtgtagtggctggccatcggaagtcaacaatgaccagttgagagcaatcatcgaagctgatcctcttacaactacgcaagaagttgccaaagaactcagcgttgaccattctacagtcatttggcatttgggacaaattggaaaggtgaaaaagctcgataagtgggtgcctcatgagctgactgcaaatagaaaacatcattgttttgaagtgtcatcttattctacacaacaacaaaccattcctcaatcagattgtaatgtgtga

SEQ ID NO: 1060 - DNA, 412 bp, Homo sapiens
  SIMILAR (71)..(157): 471254mologous to Staphylococcus aureus orf14,accession number U93688,Smith-Waterman Score=62.
cgccttttccccaaatcagccaggtacatgccccagaaaacactggcttgcctcgttcccaccttaattaccggaccaaacgaacgtgaacacactgttttcaaaaccaaactcaattgggatcacgggggcctcggtttccttgattgtaaaatgggtatatcgccccccactctatttagcccaagaaaacaatttatctcttgatgtctctttcgtctccaggatctatgcttttacagactcactgggaggaaatatccagaccaaatcctaaagcctgatctaatttgggagatgctcagaagttttggttctatgcaagaacagcagtggtaataatccaagcttggctttagacacaggacgtttccttaggggcatatgggatctctgctggctcaaagtgatg

SEQ ID NO: 1061 - DNA, 585 bp, Homo sapiens; identical to SEQ ID NO: 537
  SIMILAR (988)..(1131): 701254mologous to Homo sapiens retinitis pigmentosa GTPase regulator,accession number AF286472,Smith-Waterman Score=163.

SEQ ID NO: 1062 - DNA, 412 bp, Homo sapiens; identical to SEQ ID NO: 1055
  SIMILAR (61)..(210): 961254mologous to Homo sapiens dJ1153D9.1 (A novel protein (protein X 0001)),accession number AL109806,Smith-Waterman Score= 259.

SEQ ID NO: 1063 - DNA, 1740 bp, Homo sapiens
  SIMILAR (85)..(1005): 361254mologous to Homo sapiens dJ1153D9.1 (A novel protein (protein X 0001)),accession number AL109806,Smith-Waterman Score= 326.
  misc_feature (1)...(1740): n = a,t,c or g
cggacgcgtgggtttttttttcgccggaaatcccggaagtgacagctttgggggtttgctgctgggtctgactcccgtcctgcgatgggttgctgacgggggaacaatccccaagaggcatgaacctggtgaaggggccgaagaaggttgagaaggtcgacaaagatgactgaattagtggcccaatggaactattgtactctaagttcaggaaatattaagacgaccaatagttgcctgtgaacttggcagactttataacaaagatgcccgtcattgaatttctcttggacaaatctgcagaaaaggctcttgggaagggcagcatctcacattaaaacgcattaacgaattgttgacagagctgaaagctttctgataatccctgccctgggaaggggataaagggaaacactaaaggtgacaagcacgatgacctccaagcgggcgcgtntttcatcttgccccgttgtgggcctgggagatgaacggccgacacaggttctgcttccttcggtgctgcggctgtgtgttttctgagccgagccttgaaagagataaaagcggaagtttgccacacgtgtggggctgccttccaggaggatgatgataatcgtgctcaatggcaccaaggaggatgtggacgtgctgaagacaaggatggaggagagaaggctgtagagcgaagttttaaaagaatatcaaagaaacccaaggcagcagagtctgtttccaaaacccagatgtcagtggaaggaagccccagggcccatcaaaagttaagaccagggaagccctgaagaagcccagcccttgattctagagagaagaaaaccaacttggctcccaaaagcacagcaatgaatgagagctcttctggaaaagctgggaaagcctccgtgtggagccacaaagaggtccatcgctgaccagtgaagaatcggaggcctacaagtccctctttaccactcacagcttccgccaagcgcttccaaggaggagtctggcccactggggttcaccccacacgtcctacttgcttctgaagcccgcactgccaccggctcctgccccagaaggttgtttaagtttccacgtagggcaggttcgtttgtgcctctgagttgcgctgcttgtgtgttcttttctattagtttttgttgttcataaaaggtgttcctgggccagccttcaagctgggtgtggcccactctttgatgtgagggcgtgttcggttcccaggggggggacatggggaggggcttgcacagtgggcccgaggttcatgctttgtttccacctgccaggtgcaatttggtccctttcccatggccccaggaacccctgtgggctgcaacctttttatgccttgcaagtaacaagagactcccagagtccctcaccggtgcaagagttggcacatattaattaactaaaattctaatgatcttgctaccagcaataaaatcaagtaaggccaagtgaaactgggctttaaaaaggatggatttccaatacccctgtgcccactagaagcttcggaagggcctcgtccctctgctacagccctgggaggagccaggatccttgttggtctagctaaatactgttaggggagtgtgccccatctcatcattctcgaagatagcagagtcatagttgggcacccggtgattgggttcaaaaataaagactggtctgtctcttcccaatattttgtgaaaaggtaaaacgggaaag

SEQ ID NO: 1064 - DNA, 300 bp, Homo sapiens
  SIMILAR (116)..(286): 401254mologous to Homo sapiens Human gene 20-encoded protein fragment, SEQ ID NO:305,accession number Y86390,Smith-Waterman Score=84.
caaacaaataaataaataaatggtcatgctaaaattgcagggttccagacgttccctctgcacctggcctagaagtaaacagacatatgtgcatccgtgtgtttgtttcagttttggccaaacggattcgtgttctcgagctgctgcggcggccacaaggaacccggatgccgctgagcttagcccgccagactctccggcttatggctcccaggcccaggcacccggcctgcctcgtccgtggcgcgcatgcgcaggcccagatcggcgctccgcgccggctgtgtcgccacctggcgg

SEQ ID NO: 1065 - DNA, 375 bp, Homo sapiens
  SIMILAR (1)..(174): 711254mologous to Homo sapiens HDCMC29P,accession number AF068295,Smith-Waterman Score=182.
atggcagttctgctgaaatttgtttcagaaggggacaacatcccagatgcattaggtcttgttgagtatcttaatgagtggcttcagatactcaaaccactttgctgtcctgtgatagcgagttatcatgagatctggttgtttcagtctgtagcacctcctccttccctctttcttcctcctgctccagccatccaggacgtgctggcttccccttcaccttttgcgatgactgcacagggaacacccactacaaagaagacaaacaggtttaacctcacgtgccaactccaaataattagtagtggccacctgaagcatcctgttgagaactcttggggctgcttacgaattcggcagcaaaaaatgcggtaa

SEQ ID NO: 1066 - DNA, 653 bp, Homo sapiens
  SIMILAR (648)..(298): 781254mologous to Mus musculus Clast3 protein,accession number AB031387,Smith-Waterman Score=455.
tttttttttttttttttacttaggaaataaaattttattgtacaaaatttacatttggtgcatatgatgaaaagcatggcaaagagacccttaatctttttttctttgatatttactgtgaaagtaatttcctaataccagatcatacaattttttttgtatagaatgtttaacagctgtgttggtagtaagtgttttgggtataaggtataaaacagaaattagatcagaaaagtgcagaggggaaaaccactgccaaagagtaatctccaagaacttggtattttccacccgtgaggcagatactgtggggtcatcgctaagtggttttgagtattctgaaggccactcattaagatactccaacaagaccctaatgcatctggggattgttggtcccccttctgaaacaaatttcagcagaactgccatttggatttctttagaacagctttcatcatagagtgtttttgtgatacctcctcccggaatgcggatacaaaactcggaatcatctatttcaggaatgcaccggcttttttccatttcttcccagttaaggctctttattttattttgaacacttttttgcatggaaggtgtaagtaggtaccggaagggagtactacgaagctgcagatcattacgctgat

SEQ ID NO: 1067 - DNA, 494 bp, Homo sapiens
  SIMILAR (1)..(243): 901254mologous to Homo sapiens unnamed protein product,accession number AK000888,Smith-Waterman Score=374.
atcatcacctacaggaccctcttaagaaagtgtattgtgtactgaaaaacacaccagctgtctctggatgcttttctggttgccttgaagttcatgcaggtggaggacgtggacattgacgaagttcagtgtattctggctaacttgatatacatgggacacgtcaaaggctacatatcgcatcagcatcagaagctggtggtcagcaagcagaacccatttcctcccctgtccacggtgtgttgaaagtacacggagccccgaggacggactcggctggttctggagtctttgtgagacttctttgaaggaggctttgcgtgaaggctgctcggctcacttttcctaagtgtggttcctgaaggctgtctttgtaactttttgtagttctttgtgtaaaaagcgtattctgaatttatacacatggcatgttcttcattatatcttccaggatacatctatttttatatattaaatttgaatgtgttatcaaa

SEQ ID NO: 1068 - DNA, 802 bp, Homo sapiens
  SIMILAR (802)..(491): 971254mologous to Homo sapiens FLJ00071 protein,accession number AK024478,Smith-Waterman Score=526.
ttttttttcaaaggcaaataaaataagtttattgggatgtaaccccatcataaattgaggagcatccatacaggcaagctataaaatctggaaaatttaaatcaaattaaattctgcttttaaaaaggtgccttaagttaaccaagcattttgataacacattcaaatttaatatataaaaatagatgtatcctggaagatataatgaagaacatgccatgtgtataaattcagaatacgctttttacacaaagaactacaaaaagttacaaagacagccttcagcttctccaggatgaggaagattccgcagcgaatgaagaaggcctcgtgcttcgccagcgcctcgtgcagcagcagcaggttgccctcgctggtgaggggggaggcgcgtcagaaggagggtgagtttctcacagagcgtgcacgtcaactctcatcaggcttgcatttttaaaaccccaaacaggaaggatggcatactctacctcacagctctggttacttccgcaaactgcatcaggtgatactttttcaggagctccacagtgggcatgtgacccaatagcatttttactggaagcaaatagatcagaatcatccttttgttcttctgactagaacggtgacaatgctcaaaggcaaatgacaggtactcctcagcttgcttaaaatcgctgtcaaacatagccttgcgtccaacgtagtatttgtatgttactctctgtgcagtgctgtaatcgtctttcagggttgagctgtcaattgctctaaataagggtttacataaatggagtttgtg

SEQ ID NO: 1069 - DNA, 871 bp, Homo sapiens
  SIMILAR (3)..(437): 991254mologous to Homo sapiens FLJ00071 protein,accession number AK024478,Smith-Waterman Score=732.
atttgcttccagtaaaaatgctattgggtcacatgtccactgtggagctcctgaaaaagtatcacctgatgcagtttgcggaagtaaccagagctgtgagcgagggcaacctgctgctgctgcacgaggcgctggcgaagcacgaggccttcttcattcgctgcggaatcttcctcatcctggagaagctgaagatcatcacctacaggaacctctttaagaaagtgtatttgttactgaaaacacaccagctgtctctggatgcttttctggttgccttgaagttcatgcaggtggaggacgtggacattgacgaagttcagtgtattctggctaacttgatatacatgggacacgtcaaaggctacatatcgcatcagcatcagaagctggtggtcagcaagcagaacccatttcctcccctgtccacggtgtgttgaaagtacacggagccccgaggacggcctgatgaaaacctgggaattcctttttcacagactcggctggttctggagtctttgtgagacttctttgaaggaggctttgcgtgaaggctgctcggctcacttttcctaagtgtggttcctgaagcgctgtctttgtaactttttgtagttctttgtgtaaaaagcgtattctgaatttatacacatggcatgttcttcattatatcttccaggatacatctatttttatatattaaatttgaatgtgttatcaaaatgcttggttaacttaaggcacctttttaaaagcagaatttaatttgatttaaattttccagattttatagcttgcctgtatggatgctcctcaatttatgatggggttacatcccaataaacttattttatttgcctttaaaaaaaaa

SEQ ID NO: 1070 - DNA, 959 bp, Homo sapiens
  SIMILAR (81)..(752): 531254mologous to Homo sapiens ribosomal protein L13,accession number BC000851,Smith-Waterman Score=420.
agtagcaggtgtattaaatgtattttcaatttaagatggttttttaaaagaaatttttttttaaccaacaaagcaaaggcaaataaaataagtttattgggatgtaaccccatcataaattgagagagacatccatacaacgcaagcctatataaatctggaaaatttaatatcaaattaacattctgcgttttaataaaggtgcgcttaagttaacccaagcattttgatagacacattcaaatttaatatatataaaatagatgtattcctggaagatataatgaagaacatgccatgtgtataaattcagaatacgctttttacacaaagaactacaaaaagttacaaagacagccttcagggaaccacacttaggggaaaagtgaggccgagcagcctttcacggcaaagcctcctttcaaagaagtctcacaaagactccagaaccagccgagtctgtgaaaaaggaattccaggttttcatcaggctgaaatttagttacaaatgaagggagattactcgggggtgtgcttgaaaattctcagcctcagcatccctggggaaaagcgcctccaagagttccggcttcagggagccttggttgcagtaccggaccggtctcatcagcacaaccaaagtggaaagaaacaactgctcccccgtcctcggggctccgtgtactttcaacaccccgtggacaggggaggaaatgggttctgcttgctgaccaccagcttctgatgctgatgcgatatgtagcctttgacgtgtccctgcggggcagaaagggaggaatgcgtttacatttttggatctgagtcatgtcaaagatgctgggtgatctaattaatttggcattagcattcttccccaagagcggcacagttcagttcagcgggaacccaatgagtaaaaataaaaacaatcggccctctaaatccacggtgggtttcat

SEQ ID NO: 1071 - DNA, 4953 bp, Homo sapiens
  SIMILAR (3686)..(1539): 1001254mologous to Homo sapiens ATP-dependent metalloprotease YME1L,accession number AJ132637,Smith-Waterman Score=3650.
ttttttttttttttttttccgcttttagttacatattcttctaagttttctgattacttaccaggtaattttcaaccatataagaaaaaggaaccaacactcagctctgtagaaatctaccttcttttagaaacctcaggcctctgcacccctttagacaactcatttacaaccacaaccttccatggcttctcacatgccagccaggggcaggggtaaaaacggcaatttctttacaccgaaaaggtccctttttatgtaccaaaacagaccctcccccaaacccacaacttttttgggcccttatggatggacttcgccatggagatcaatctcctaggtgtccccctggactggccccggacagggtctaggacaacacagggttaaaaagggacagcaggggtcgttcaactgcccacactggcctcagggtgttttcttcaaggcacggacaattctggcaatggggggactttacacgtggggaaaaggaatcaaactgtgcaggtaccctcagtcctctgccactacccagctcaatagcttgaagctcagaggatcaagtcaagtctctgtctcacttttaatctagcacacaagaggcacaaactcaggcagtacacgggtattgaagcatgcaacaggtcattggtaacaaaactcagttagattaagagtacattaaataaatctttgtagttgagtagaaatcacaaaacagttggtgaggacaggtctgtaggctcagctttacatcccaggtttttatacaccagcagccagattcacaattgatagatattgcaccggaaagatgtgtgcagggaaaagaaatcatcatcacatttaagtgttcatgataaaaaaataaaaacaaaaccagatatgacctccatgtagtacataaagtgccttcagaattggtgcatttacaacaaaaactgggttatttagctaccattagcaaacgcatacaaacaggagactaaacagatctggtttccacagttttgaatcaagcagtgccaagtttcattcaaaatgtctctactacaaacagcaaagaggaaatagaataaaagatgactgtacagcgcccaggaagggttaagtaatttctcggatgagaaatgggagtccaaccctgtctcaaatgtgttagaacacatgtaattacttctaaggaataatggtgtgattcctttcaagtcaacacaaaatttgtcatgctatgttacaattctctcagcctgtagctattagctaaatttgtacaaaaaaaaccccaaaacaaaaacgtaatatccagtttttcattctgagtatggaaaaaattatcattatgtctaatattatattggaaattctctcaaagtacttgtctgtaggtttttggacaaaaatttgccttccaattctaataaagtagagggtggaggtgtcagagtacttcaaaaataaaaatgtcattgacattaagcctggtataaaagtgaaatacaaaaaaaaaaaaaaatgctcacttttccaagtacatgagacatctttaatcataacgaaataaaatctgaaaatcggtctaaatcattttaaaaagtaaacatgagtcgtaatactatacctgttgagtgattaattccattcattgtcattagaaaggatgtaaaatatttattaagggctttgcctgcagaggcacaacataaatagcattaagtcctcctgaaatgtaattagtgtacacatcaaccagttgataatttgtggtgggaaaggcaggaactcaagctgggaccaggttcccgcatccgaacttggacgagtgcgtggtgaaggctcggctccagggaccatgcctgcagctgctctctgccatcgcctctgcaaaagtctgttaggcaaatgcaaaagtgcaagcagaacttgcttgaagaacaaccacccccgaggcacagggtgcttaatccaccccttcaaatccttgagcattttccacggccatgagaagtttctctcgtaaatcttcaaaggtttcatatggaggtaagtcaaggcgattaaagcatgtgtgagctctgggcagtttctcaggactgccccattgctctattgtaaacagctgaggaccattggaaccataaagttcggcaaatccattcataggtactcgcgatgtccctgtgacaaactgcagtaaccggatacgcttttcggcgtccatgagtagcacagccttccagaaccactgaatgacggggtggtttgggcagtagccgttcttgtaaatagaatgctgtctccagtcattcacatccacatcaccgaggccgcacatgagcaactccagctcattttcgtcaaaaattttaatcaaatcaataggaagtagttctgtgaatccctccaagaaggcgttcatctgcttctggaccctgttcacaaatctccactggatgactaagtcgatatattcccttttgttttcatttgtgaccattatttctgacccattgggcttcaaatccacttgatatgtctgtccaaagttttcttcgtctatgcagaacatgaggtccagctcagtagggtcattctccaggatccatttcaaagagttgtaatattcactatccacagattccatgtcattcagggttatctgctttcccaacatcatcttgtaaaatggtctaatgaagaaaccatctaagagcttcccatgaaatacggccagaccagcaactcttccaataaaagtgaagtaggacaaatgatcctcattacagaggcctgaattagggttgatctgaagggtgtagttgtccgtggcagagtactcaaagaggccgtagtaggggttgaacatctctttggacagtaagaagaaccattctctggccacacccccatagtcaagacctttctctgattcaaactcaatccacagtctagcttttaggacatctggtcttttcacggacataattctccgataggactcttcaaatatgttatttctgtgaagtttcatttcaaacctattggggatatcagcaggtttctttaatttcttcctgaagtagtcatatttctgcttaaattctctggagtaagggacagccggaccagtaatagctgggttctgcagtcttgggtcttcccactgagtaattttgctattatgatcaatataaaacgttcggccatccaagtgaattctttcttcccagccaggaggaagggggccaaggtcattggggtttaaagatgtctttgaccgcatatgtactggaaatttcaaacgtggatcttcccaggttgtagtctttgtgttatgatcaatgaagaagggccggccgtttggcgctatcctcatttcccagccgggtggcaagaagctctgtgtgactttgtgttgtggtttgggggagttgtaaggtgatggctgtggggactgtgggttggaaagggtgtctttcacagcccgacgtacgggtgagtccttggcaccctccagcggggcagataaagttactgttggcgagctgaggctacgaggccggcggatctgaggctcgattagatggttgttactgtttgtggctgatccggacgcaccatcttctgcaagctgcatgataggtcgagtccaagttgtggttcgattgttatgattgacatagtatgtgcgccccttagcatcttttctttcttcccagcctgaaggcagacccggcgtggtatgtacataggccactgatggcggtggtagatggccctgttctgcaactgcgtcggtgacactgcatgacctcaaccttgaggagggttctctttgaatcaaagagctgaactgttccccattggagtctggagtgatctgaagccttctgcttagttcctctgacagctcctgagggctggtccgagatcctggggaggccggtggtgggggcagagccagaccgagagagtctccagcgatattcacttcctctgaaatggtctcccaaggctcggggacatccccgccctccgagggctcgggctccaagtcttcgctgatgtgcctgcgggagcggaagcgccggtgtgctgcctcctggttgatctgtctgatgttattgtccgactccgaggacacgtccatcaggcttggtctgtgccactgagtggtccggttgttgtggttgacatagtaagttcggcctaaattgtccactttttcttcccacccgggaggcagaggaggaggaggaagttcctcttggtgctgagaagccgagtcatttgagtcaacaacttcccatccatgctccatgtcatccctctggtcactgttttcttcatcttgacctccattttttggcatataggccattttcaatcgcaaaaatcccttaactcgagacttatgacttcttggtctgaggagaaagtccttaaatgtatagggtcgctccatggttggatcttctgtcggaaggtgactaaggggcacgtccacctggcccaggaagtcgtctcgtgtcagtctattttcgtcaaatacttcaaataggagtctgtgattagatgggtttaccctgaaataaaattcttcattccattttgggttcagtgtctttttaattgtttttgtctggaccaaagcaagttctctattctcatccgctacgtacaatgaaagtttcacatacggatcacagattccaggcaggaagagctcgtctgaagtggggagcggagagagaggcaggtctagatgcagatggtctgtttcccctaacaacagcaacggcggcgaggagaaatcctggtctctgccagctcccggccaggtaaccaacagcctggagtgggaggtgccgtgctggggaggcaccgcgtggacagggctctgcagccgctcccgcccaggtagggccctgcgcagccacccacccgggc

SEQ ID NO: 1072 - DNA, 1560 bp, Homo sapiens
  SIMILAR (1111)..(1491): 581254mologous to Homo sapiens 15-NOV-1994 hMutT2 cDNA,accession number T29786_cd1,Smith-Waterman Score=304.
atgggatttcgacagagttttgaaaaaaaaaaaaaaaaaaaaaggcccggagagagctcccttcctggtcagttttgttcagatgaccgcagtcttcgggttgggctgtgcccttctgcttctcccggcagttccccgagcttgtctgctcagaggacccagggtccggagccccagcgtgggcgcatcacgggagagggtccttctgctccaggtaggcagggagacccccaaggaagcggcccttcccccggtgcctgttgccgagcagcaaccctccgagaggggaaggcgcagggtgctagccagaaccgagctccagcaccaccacctacctctcgcagcggacctgagtgctgcacacggtggaccgcatacctgcgacacgaggcctggcaccaaataggccctcgatcaagaatagcaaaacctcggagagagaaggagccttggtatacaggtttaccaaataccaaggggatcccacgactcaggtatgaggagggcgacccaggccacaacggctcgggaaccgccgccggtatccgcgtccgcagcgccgccagccaggcgagagccgtgtgggatcccagcgcccgcactcccgcccccgccaaggagccaggaatggcacaactagagaggagcgccatctctggcttcagctctaagtccaggcgaaactcattcgcatatgatgttaagcgtgaagtatacaatgaggagacctttcaacaggaacacaaaaggaaggcctcctcttctgggaacatgaacatcaacatcaccaccttcagacaccacgtccagtgccgctgctcatggcacaggttcctacgatgcgtgcttacaatctttcccttcctagaatggatgtgtatgtatcgattaaaggattggcttctgggagacttacttgctggtataagtgttggccttgtgcaagttccccaagctctacgaggacaggggccactctgcctcttcaccatttatccccagcctaacatctggtacatgacagagaacgcttcactacgagtgtatcgttctggtgaaacagtcctgaccaccaatgggtggctactgcatagagttccctgcagggaactcatagaagatggtgaaaccccaggagcagctgctctttgggaagccttgaaggaaaaaaactggcctaacaaaggggacgctgcctgaaatgttctcccagtggtcctatatggacccaggtttgtcaaactgtacccacacacatcgtgacagtaatcattaacggagatgacgcagaaaatgtaaggcccaagccaaagcccaggggatggagaatttgtggaagtcatttcgttacccaagaatgacctgctgcagggactcgatgctctcgtagctgaaaaacatcttacagtggatgccaaagtctattcccatgctctagcactgaaacatgcaaatgtgaagccatctgaagtgcccgtcctgaaattttaaggccaaagacgacactggccatttttgtaaatgagactaccaggccttcttcacaaaggctttgtattc

SEQ ID NO: 1073 - DNA, 535 bp, Homo sapiens
  SIMILAR (272)..(532): 801254mologous to Homo sapiens adenosine 5'-diphosphosugar pyrophosphatase,accession number AF155832,Smith-Waterman Score=335.
ggcggtttgcactgatcgcctgcggaattcggcacgaggaggcgccggtgtttcgagccgtggcaccggcatcggctgacactgctgcctccagctagttatttcgtcctcttccgttcttcacccctacaccttggaggtgaacttctcacctgagggctgtaaagactcgtttgaaaatggagagccaagaaccaacggaatcttctcagaatggcaaacagtatatcatttcagaggagttaatttcatgaaggaaaatgggtcaagcttgaaaaaacaaccgtacatggatcctactggtaaaactagaacttgggaatcagtgaaacgtacaaccaggaaagagcagactgcggatggtgtcgcggtcatccccgtgctgcagagaacacttcactatgagtgtatcgttctggtgaaacagttcccgacccaccaatggggggctactgcatagagttccctgcagggtctcatagatgatggtgaaaccccagaagcagctgctctccgtgagcttgaagagaaactg

SEQ ID NO: 1074 - DNA, 572 bp, Homo sapiens
  SIMILAR (457)..(263): 981254mologous to Homo sapiens protein phosphatase-2A regulatory subunit-beta,accession number M65254,Smith-Waterman Score=316.
tttttcaatatgtgtggtactttattttttatgttctttttttaaatctggggtattagtctgtgctttgggagaaatgcactagctctgcaattcccagctgggcaagtgtgtctctagtatctccacgcaactgatacactggtcccttccccatgtcctctccaggcactgtgggtcttgggaagtggttcttgtcagcccgagggacactgggttctccactgtccttcacaggaaattctagcttcctcagcctttgtgccaccacacttatagcttcctgtgcaaagtatttgacatccatgtcttcatcttgacctaacttctgtagtactggcttcacttctccctgtaaagcattggtatctagaattggtccaatcttttgtagagatttggccacattgaagcgaacatttgctacttggtctcctgccatttttaatacgatggggcagcatttgcttagtagttatttcctgaccacaggcctcagacagtggcattaatgcagaataaagtggtcattctatgcaagtaattaggatgatttgccattactaacactt

SEQ ID NO: 1075 - DNA, 873 bp, Homo sapiens
  SIMILAR (119)..(217): 451254mologous to Caenorhabditis elegans contains similarity to human homeobox protein CDX-1 (SW: CDX1_HUMAN),accession number AF067219,Smith-Waterman Score=75.
atgagttctgaaaggagccaggtctttcctgtggttggggctctggagaccatcagtgaccaggatgtggggaacagccaggtggacaccaaaaggcccgatggggtggcgctttccagggccccgagggaaaggcacctcagcacgaccctgggctgccccagctttctctgcccagtgccccatatacttgtaggctgctgctggacacccaactctgctggcacaactgagggcatcctggctgggaagcacaggctgaggaagctagaatttcctgtgaaggacagtggagaacccagtgtccctcgggctgacaagaaccacttcccaagacccacagtgcctggagaggacatggggaagccgaaagaaacagggacagggattcatccagctcgttgtagtctgaaggagccaggaacctacctgaatgatctgcgctgtgccctcttaagactcaggcggaccaaagagagtgcccgaggccaggaggaaaaaggctttagcacctcccctgacttcttcctggccctgagccactggatctccagccctaatttctccgctcagactcaaacttccacagaacccctccacctcttcccgcggctctttctccagaatggtatctggctcctgctccgtaagacaaataacgcgggcggaacaccccatgattatatttccaggaagggaatatgctttaaaagacttagagccattgctgacaatttacttctgaagaagcttatcttccattggtcctctgagactgtcctggtcctaacctctagccccggaaattctagaaagcctcctcaagggccagatattgtatggcagcaatgctttgcactctccacctgctga

SEQ ID NO: 1076 - DNA, 358 bp, Homo sapiens
  SIMILAR (3)..(218): 421254mologous to Homo sapiens HDCGC21P,accession number AF067801,Smith-Waterman Score=84.
acttcctcctctctgaggtccgtaaaagccctgggctcagccagagcagggcagaggatgacgggatgaccagctgcagagaggagtactctactgataactggagatgatgggcgaccaccttcagagagaaactgttagcagagaggagctgccgtctgctgagagcttcagagacctgcagacatctgaatgacttgcctgcagagaggagccactcttttcagggccttctctcagctgagagctgaacacccaatgggataattgcctacagagaggagccacccactcctcttgagctggttccaacaccaatataaacttctttttcacccttcaaaaaaaaaaaaaaaaa

SEQ ID NO: 1077 - DNA, 777 bp, Homo sapiens
  SIMILAR (776)..(699): 651254mologous to Homo sapiens HDCGC21P,accession number AF067801,Smith-Waterman Score=85.
atgagattcatactgacgttggggggttggtatgggtgtgatgatgatgtgaccctacaagatgagggacctacaaggactagccaaagggttggctcgtttactcagcccacagctttcaaaccttcacaggacggggagcatgcaggtgacaggatggctaaatgtttcatagctcagtgtgacagtcctctatatcccaagctcttgtttggcgtccaggaagaatcaggtcacacgaacaaattgaagggtggatggggtggtgggaagggccaggatggttttggaaaaggcaacattcgggcaggaaaacaggaatgcatgttctcactttgggccatgggtctaggcttgagggtgtggccctcgccggggaccaccccctcttctacccagtatttccctgcctcctgtccatatcacatgtacaaagatgaaagctccacccctggtccactgagctatggaaatttgttcagactatgggaagacagaggagaaatcctcaagacagttggaaatccaagaacaggagagaatgtgggcatccctggcaagtcattcagatgtctgcaggtctctgaagctctcagcagacggcagctcctctctgctaacagtttctctctgaaggtggtcgcccatcatctccagttatcagtagagtactcctctctgcagctggtcatcccgtcatcctctgccctgctctggctgagcccagggcttttacggacctcagagaggaggaagtacatgctgattggtccatag

SEQ ID NO: 1078 - DNA, 1273 bp, Homo sapiens
  SIMILAR (865)..(2085): 971254mologous to Homo sapiens putative p150,accession number U93572,Smith-Waterman Score=2027.
atgaaaaaggcgcttactgtggccacttcctcctttcccacctctgccctagaaggagcccttgggaatgcacagccctccattgtttgtctggtgctgtttctgccaaaactcccaggagaagcccggagccctgacccaagggcctttggaaaggacaaatccccgaggattttcatgggttccaatggagcctcggattttctaggtttgcttgagcgactcatcaccagcctctccatttgctcagaaaatgttcagaaacaaaatgaaataaagagacaaaggaaaaaaaaaactggcaaagggtcaggttttgagaattgttttcaagaagtcattgtattcagattggtggagcaggctactgtaaacccctcaggcagttcctccatggatgagacacaggggcctctggccatgactgtccatcttcttgccaactctgggcacggctcccttctgcagaggactctggaccagctcctggattgcatttgcccagaggtccggctctttcaggtgtctgaacgggccagtcctgtgaaatactgtgaaaagtcccattccaagcggtcccggtttccagggatgtccgtgttgctcttcctgcacgaaagcccgggagaggataggctatttcgcgtcctggactctctccagcattcgccatggcagtgctaccccacccaggacactcggggaaggctgtgtccctacttttttgccaatcaggagttctacagcctggacagtcagctgcccatctggggggtgaggcaggtagcactgtggctccgagatcctgagggcgacgctgtactgcagttttgatagctatgaaaacgccatcagactctacgagatgatcctgcagagagaagcgaccttgcaaaagagcaatttttgtttcttcgcgctctatgcctccaagagctttgctctgcagctctccctgaagcagctgcccccgggaatgtcagtggaccccaaagagtcttcggcgctgcagtgtaaggttcaagagatcggccagttagtgcctctgctacccaatccatgcatgcctatcagcagcaccaggtggcagactcaggactacgatggcgacgagattctgcttcagccaggcatccgccagggtcgccagctggctgctagcagctctgagggttacatccttcatgtggattccaagtgccttgccccaccatggcgcaacaaaatgtctggacttcagttagaccaactaggatcagattctcttctctaa

SEQ ID NO: 1079 - DNA, 240 bp, Homo sapiens
  SIMILAR (395)..(631): 881254mologous to Homo sapiens Human prostate cancer- associated protein 12,accession number Y48226,Smith-Waterman Score= 365.
atgaagcagaagtgccacatcattgggaactatgatgatgatgacgacgatgacgacgatacacttattctggattctatcagcaaattaaataatatgagctatgaacaccaaggttctctcttcagccgcagtctacgatcccagttagatggactgctgatttctgtttttaacctgtcacatccaacacaaagtcaaggtacaactgcagacactttgctcttccaaggttactaa

SEQ ID NO: 1080 - DNA, 945 bp, Homo sapiens
  SIMILAR (859)..(2184): 871254mologous to Homo sapiens putative p150,accession number U93574,Smith-Waterman Score=2000.
atgcttctcgcactggctcatgaacacccccagctgtgcgtgcctgggacagagacccatgggaaatggccatttcctaggactaactcagggcagtccctccgcctgcccttcagcaactctccagaacaaaagccgaggtcacctcccctgctcttgaaaaccctcaatggtcaagaagctttgtcaaatcctcatgagccttgcacagtgccaggtgctgtacctaatggaggcagcgtagaaacagagaagagaaggcaacaggaagctgcagccacttcctttgagaagaggtggacagtgagcaagagtttagggggaaagaagctgaaaaaggacagtaccggtccaggggttggaacagctggaggactccctggtaccacagcacaaatggggctgggtgccccaggaacaagaacatacacacataccccaccttccacacaccttttttctgtaaacagacctcatttctcggaccacagaagtggacacatggctgagctgttccctgccttgggaacaagccaatctgcacagaagcagaagcagcacagagagcagaggcagggggacgggaaacacatagggaaaagacagcaggggaggcctgaagagagaaggaacaatggtaggaccacttcccaaatcaatgaaacgaccgtcctcttttgtgtcttgacttcaggtgtccggccgaacgacggagtcttttcctttcttgtcgatgcagtttctcagcctcctgttgcttcttctgctgttcagactaaaagagaaaatgaaatgagtagagggaaagagagaaaattctatacctcttttctggtaaccgtcaggctgccaacagtaccaccaccaatctcagaactgctgccaggagaaatgctgcccacaggctccaggggacatggtggggctgcctggactctgctctga

SEQ ID NO: 1081 - DNA, 732 bp, Homo sapiens
  SIMILAR (732)..(547): 961254mologous to Homo sapiens unnamed protein product,accession number AK024137,Smith-Waterman Score=290.
ttttttttggtatttctggatggtttaatcatgaatggcggtaggcagtgtaagaaaaaagttcctagagcatgataaaccttggtttctggcacaggataaacctttcatttcatggtgtacatttcacaatattaaaaaaaaaaccccaacctggttttcatgattaaagccgtggggaaaggacaatgttcccagggagcaacgactcgcaagcacaccccctggggctgtgcggttggccgtcggcggggccagcttcaaagtccaacccacaaggcacaggttttcaaatctttacctctgtgtacaagaacgtaacaagaaactttaaaaaaacgtgtgtttcccctcgtctgtgtttaaacacccctaacgatgaatcagtttggggaagacgtacccctcccctaaatcaacaggtaggacccacttccccaaatcaatgaaacgaccgtcctcttttgtgtcttgacttcaggtgtccggccgaaacgacggagtcttttcctttcttgtcgatgcagtttctcagcctcctgttgcttccttctgctgttcagacctctttaacgtgaatgtcaattgtttgctgccaacggtggtgtcggatacactcaatgtcccattttttgcttcaattttcaaacgatcttcaagggttttgttcatcagtttctgctttgtggcagaatctttgaagcttataaattcttctcctgctttgatctc

SEQ ID NO: 1082 - DNA, 453 bp, Homo sapiens
  SIMILAR (221)..(18): 361254mologous to Mus musculus papilin,accession number AF314171,Smith-Waterman Score=123.
catagaccgctttggagacctctgcacgagctcgcccgggagatccgtgccctggagagaagcaaggagcagctgctctcggagagagctggacagaagtttgtattacaggctcgtagcaccggaggtttctgatggagcagacaagttgaggaaggccggccttgctgaacacagtggactgaccgggtctggacccctcccccacaggtgactgtgcactgcagcagagagaagaggaaggagtcagaaacactctactgagatcctcccggatagataacgtacgtacatattgatacctctacccggactctgtgattaatggtgaggtggggagcacccgagtcctctgaactgaacagctgtgcagcaacatctgctgggtggaatgctggaaggaccgcgtcacacaccaatcctagctaaagtttcacccaagtcttctgaaaa

SEQ ID NO: 1083 - DNA, 229 bp, Homo sapiens
  SIMILAR (80)..(193): 351254mologous to Homo sapiens BAI 3,accession number AB005299,Smith-Waterman Score=72.
gcatgatgttgctgcacagctgttcagttcagaggactcgggtgctccccacctcaccattaatcacagagtccgggtagagtgcacagtcacctgtgggggaggggtccagacccggtcagtccactgtgttcagcaaggccggccttcctcaagttgtctgtccatcagaaacctccggtgctacgagcctgtaatacaaacttctgtccagctcctgaaaagagag

SEQ ID NO: 1084 - DNA, 712 bp, Homo sapiens
  SIMILAR (352)..(441): 701254mologous to Homo sapiens Human secreted protein encoded by gene 20,accession number Y36243,Smith-Waterman Score=78.
gtaccagtctccccagacctgagctgcaggagggctgtgtgcttggacgatgccccaagttcagccggctacagtgggtcgcttcttcgtggagcgagtgttctgcaacctgtggtttgggtgtgaggaagagggagatgaagtgcagcgagaagggcttccagggaaagctgataactttcccagagcgaagatgccgtaatattaagaaaccaaatctggacttggaagagacctgcaaccgacgggcttgcccagcccatccagtgtacaacatggtagctggatggtattcattgccgtggcagcagtgcacagtcacctgtgggggaggggtccagacccggtcagtccactgtgttcagcaaggccggcctttctcaagttgtctgctccatcagaaacctccggggctacgagcctgtaatacaaacttctgtccagctcctgaaaagagagattctgcaggaagccagttaccatgttgtgatggtcctcaagcagtccatgaagaaggactgaggtttcctgacaaccactgggctatgtgagaaagccttccagaagcagattccccagcccagccgagtattcagataactacagccccacctcgaatctttcttgcagcctgatgagacctcaagccagaaccacacagctaaccatttctgaatttccatgcaataaatgcataatgttataagccaaa

SEQ ID NO: 1085 - DNA, 474 bp, Homo sapiens
  SIMILAR (35)..(358): 281254mologous to Nicotiana tabacum ribosomal protein S14,accession number Z00044,Smith-Waterman Score=77.
atggcagaggcactgaggatcctccagatgcactgccaagagaaggaaagcgagctcagagatgctggagcagcgactggcccgggagatccgtccctggagagaagcaaggagcagctgctctcggagagtgagcctcccgcccaggctgaaggcggagctggagatattcggggagcaggtccgagcgcccccgaggtcggggccggcgagggagagtgctcagagtaccacgtgcttcagggaattgagctagaagcctactggcaactgtctgttcctcagagcaggctccttcatcacagcggcagctcacagatgttctcggtgctcagctcctggtctcaaaggcagctggtctctctagagttgaaaggagctggacagaagtttgtattacaggctcgtagcccggaggtttctgatggagcagacaacttgaggaaggccggccttgctgacacagtggactga

SEQ ID NO: 1086 - DNA, 335 bp, Homo sapiens
  SIMILAR (3)..(92): 931254mologous to Homo sapiens chondroitin 4-O- sulfotransferase,accession number AJ289134,Smith-Waterman Score= 158.
tcatgcggaggaatccctttggtgtggacatctgctgccggaaggggtcccgaagccccctgcaggaactctacaacccaatccaggtgcagaggcggctggccatcagggtggacggtttcctgggacccagtgaagagtatggcgcttttgtcccaagtctccgattcatgctgatgcccgatgtttcccccagaagttccttccggaaagcgataaatgagctggagtttgaaaagaagtgtgacttcttcaaggaactggcagatactaggggagttcagaagcagctgacatccaattattcacggtcatgggggaaagggattgaatga

SEQ ID NO: 1087 - DNA, 633 bp, Homo sapiens
  SIMILAR (150)..(632): 991254mologous to Homo sapiens chondroitin 4- sulfotranseferase,accession number AB042326,Smith-Waterman Score= 842.
gcggccgcgaagcgactccgatcctccctctgagccttgctcagctctgccccgcgcctcccgggctccggtccgcgcggcggggtccctgctcctgcgccccgggcgcgcttcccggacatcccggtccccgcagccaggacaaagccatgaagccagcgctgctggaagtgatgaggatgaacagaatctgccggatggtgctggccacttgcttgggatcctttatcctggtcatcttctatttccaaagtatgttgcacccagtcatgcggaggaatccctttggtgtggacatctgctgccggaagtggtcccgaagccccctgcaggaactctacaacccaatccagctggagctctcaaacactgctgtcctgcaccagatgcggcgggaccaggtgacagacacgtgccgagccaacagcgccacaagccgtaagcggagggtgctgacccccaacgacctgaagcacttggtggtggatgaggaccacgagctcatctactgctacgtgcccaaggtggcctgcaccaactggaagcggctcatgatggtcctgaccgggcgggggaagtacagcgaccccatggagatcccggccaacgaggcacacgtctccgccaacctga

SEQ ID NO: 1088 - DNA, 315 bp, Homo sapiens
  SIMILAR (310)..(143): 911254mologous to Homo sapiens put. LLRep3 protein (AA 1- 221),accession number X17206,Smith-Waterman Score=268.
ttaatttttaatacaacatccccagtggtaattctgaaagtgatttaaatgctttaaatatagcataaatgaccaggtttttatttgttgttgttttttttccaggcttaattcactttatttttcttgtgtaaaaaccctatgttgtagccacagctggagcccgggtcctctgtacggagactctagtgtgggtcttgacgaggtggtcagtgaattcccgatagggagacttggtgaatacagtctccttccagaggtccccggtcaggtagttgtaggtcttagagatggcatcaaaggtggcctcgtgcc

SEQ ID NO: 1089 - DNA, 1239 bp, Homo sapiens
  SIMILAR (607)..(1695): 921254mologous to Homo sapiens putative p150,accession number U93563,Smith-Waterman Score=1804.
ctagacataaaggttctccaaatccctactagactcaggagtccagctggcttcacctagtggatctcgcacaggggccacaggtggagctgcccacagtccggcccgtgcacccgcactccacagcccttgggcagtcgatgggaccaggggcaggctggctggaacagcaggcttatggagtcccaggcctgcattccatttcaaggtatccctctctctgcctttttcttgtgtttcctctccttttcctgggcctcctcttggtccttctccaagaaaacaccaaatggcagatgatgctggtgcaggagtagggggccggaggccccgggggcctaggatggggaacgtggtggcttccgcagaggctttggtagtggcatccggcaccagggttgtggctgtggacagggccagggccaaggccgtggagttcgtggaggcaaggccgagtataaggagtggatgaccgtcaccaagctgggccacctggtcaaggacatcaagatcaagtccctggaggagatctatctcttctcctttttcaaaacctcgtcctctctcaaggacgaggttttgaaaattatgctggtgcagaagcagacccataccagccagtgtaccaggttcaaggcgtttgttgccactggggactacaatggccacatcagtctgggtattaagtgctccaaggaggtggccactgccatctgtggagctatcatcctggccaagctctccattgtccctgcgtgcagaggctactgggggaacaaaatcagcaagccccacaccatcccttgcaaggtggcaggctgctgtggctctgtgctggtgtgcctcatttctgtgcccaggggcactggcattgtcttggccccatgtgagggcgataggggattgagaaagtcctctccagcaagcctgtcccctgagtcttgtaaggatggcagccactctagaagcttttaactggctgaagggcgcagtgttttgtttaattaaaaaaactgtgccactactcggaaagatacacaatgttgtgaattcctgcaggggggattctgctctgttagtgaatgtttcctcactgctggctagggaattcatctgaagttgcttgccattccaccatcttccagctcctaaaatgctggtgttattgtgtccggaatttagtccttctggtgggttcttggtcttgctgacttcaggaatgaagccgtggaccttcat

SEQ ID NO: 1090 - DNA, 1438 bp, Homo sapiens
  SIMILAR (784)..(692): 931254mologous to Homo sapiens Human secreted protein, SEQ ID NO: 4473,accession number G00392,Smith-Waterman Score=166.
  misc_feature (1)...(1438): n = a,t,c or g
atgtccgagtatggcagattgcattttcccaaaaatggccacaacagtatcactggtcccacctgctttcccccttgctgtgggcttgcttttctgaacgccgtcattccccttgctatggcatccatttcctctcactcaacctgggcaagcctttgtgacttcctcgaaactagaatatggtggaaatgtcacggcgtgacttgcaagactggatttaaaaagcgccgaacactgtctttctgtgaagaacctgaccgccatgttgtgaggaagcccaggcatctgaacaaaggccacatgcaggtattctggctaatagctccaactagggccccaagccagcccctggcatcgatcatcagacatattgataatgatgtgggttcaagaaactctcactttcctcttaatacgaaagaaaacaacagtgcaaatgtgatgatgtatgataacggacaactagggagttatggggtgggcatggaaacgtgctgcaggtaccaagcaatccaaagagagcatgggtctttcagaggctgtggtgagttggaacagccaaagctggtcgtcaatggaagcctagaagaacgcaatccacaaaggaaaagaggctttggtagtggcatccggcaccagggttgtggctgtggacagggccagggccaaggccgtggagttcgtggaggcaaggccgagtataaggagtggatgaccgtcaccaagctgggccacctggacgaggttttgaaaattatgctggtgcagaagcagacccataccagccagtgtaccaggttcaaggcatttgttgccactggggactacaatggccacatcagtctgggtattaagtgctccaaggaggtggccactgccatctgtggggctatcatcctggccaagctctccattgtccctgcgtgcagaggctactgggggaacaaaatcagcaagccccacaccatcccttgcaaggtggcaggctgctgtggctctgtgctggtgtgcctcatttctgtgcccaggggcactggcattgtcttggcccctgtgcccaagaagctactcatgatgactggtatcaatgactgctacacctcagccaggggctgcactgccaccctgggcaactttgccaaggccacctttgatgccatctctaagacctacagctacctgacccccgacctctggaaggagactgtattcaccaagtctccctatcaggagttcactgaccacctcgtcaagacccacaccagagtctccgggcagggactcaggcttcagcttgggctacaacataggggttttaatacagaaaaataaagtggattaagcgggnnnnnnnnnnnnnnnnnggggcgcccgttttaaaggaaccaagtttacggccccgggcgggcaagggaatattttttttaagggggcccca

SEQ ID NO: 1091 - DNA, 733 bp, Homo sapiens
  SIMILAR (37)..(315): 981254mologous to Homo sapiens put. LLRep3 protein (AA 1- 221),accession number X17206,Smith-Waterman Score=483.
gaattccgtatcccccggctgcaggaattcggcacgaggcgcaccaggttcaaggcatttgttgctatcggggactacaatggccacgtcggtctgggtgttaagtgctccaaggaggtggccaccgccatccgtggggccatcatcctggccaagctctccatcgtccccgtgcgcagaggctactgggggaacaagatcggcaagccccacactgtcccttgcaaggtgacaggccgctgcggctctgtgctggtacgcctcatccctgcacccaggggcactggcatcgtctccgcacctgtgcctaagaagcctgctcatgatggctggtatcgatgactgctacacctcagcccggggctgcactgccaccctgggcaacttcgccaaggccacctttgatgccatttctaagacctacagctaccctgacccccgacctctggaaggagactgtattcaccaagtctccctcaacaggaactcactgaccacctcgtcaagacccacaccagagtctccgtgcagcggactcaggctccagctgtggctacaacataggggttttataccagaaaaaaataaggtgaattaagcgtgaaaaaaaaagacaactaaaaaggggccgccgtttttaagggatccctgaggggccccaagttacgcggtgtttgcagtgacaaagcctttccctttcagggagccgatttttaacctccctggagacttt

SEQ ID NO: 1092 - DNA, 496 bp, Homo sapiens
  SIMILAR (112)..(417): 981254mologous to Homo sapiens HHR6B (Human homologue of yeast RAD 6); putative,accession number M74525,Smith-Waterman Score =528.
  misc_feature (1)...(496): n = a,t,c or g
ccggnaggaggctcatgcgggatttcaagcggttacaagaggacccacctgtgggtgtcagtggcgcaccatctgaaaacaacatcatgcagtggaatgcagttatatttgggtacttttaaactagtaatagaatttnctgaagaatatccaaataaaccaccaactgttaggtttttatccaaaatgtttcatccaaatgtgtatgctgatggtagcatatgtttagatatccttcagaatcgatggagtccaacatatgatgtatctnctatcttaacatcaattcagtctctgctggatgaaccgaatcctaacagtccagccaatagccaggcagcacagctttatcaggaaaacaaacgagaatatgagaaaagagtttcggccattgttgaacaaagctggaatgattcataatagacaactggtctgttaatctttttcatcattgttgtgtataatttacctctcattagaaaggctancaaatttt

SEQ ID NO: 1093 - DNA, 450 bp, Homo sapiens
  SIMILAR (308)..(445): 701254mologous to Homo sapiens Human secreted protein, SEQ ID NO: 7253,accession number G03172,Smith-Waterman Score=159.
  misc_feature (1)...(450): n = a,t,c or g
aaatcttaacatcaattcagtctctgctggatgaccngaatcctaacagtccagccaatagccaggcagcacagctttaatcaggaaaacaaacggagaatatgagaaaagagtttcggcccattgttgaacaaagctggaatgattcataatagacaactgttatgtgaaagtttggcgctggaggatctacctctgagatggctcattcacatggctgtttgcagcagatctcagttcattactacatggatctctccacaagactgcttgagtgtcctcacatggcaggaggtcttccttcccgtctctattaaaaatacaaaaattaggcagggcgcagtggctcatgcctgtaatgccagcactttgggaggctgaggcgggtggatcatgaggtcaggagattgaaaccatcctggctaacacagtgaaaccctgtctctacta

SEQ ID NO: 1094 - DNA, 2634 bp, Homo sapiens
  SIMILAR (1087)..(2709): 941254mologous to Homo sapiens putative p150,accession number U93564,Smith-Waterman Score=2654.
cgtccctctttctccaccccgccgagcctaaactagtgacggggagggagacgggatagtgtttctgtttccgtggtctttgaatccacaacctctagtctgaacacagagaacacaaatttgtcgattacttcaggaagcccagggggaaccgcgccccgctgaagggctcggggaaggcgcgctcccgcgtcccgccccctcctcccccagcactcacactgtggtagcggcggagggcggagggatccggaggcggcggagggagacgtcattgcagggttgtttgtcagtctcggcggcggcggcggcggcggcggcggcggcggcgatccacagtgattcggccgccgcccaggggggagggggggctgcgcgggacttttttttttttcagactgaccgtaggggcagctgcggagcatgttcgaccccggcccggaggaggctcatgccgggattcaaagcggtaacaagaggacccacctgtgggtgtccagtgcgctaccatctgaaaccaccatcatgcagtggaatgcagttatatctggacccgggagggacaccttttgaagatgggtaccttttaactaagtaatagaattttctgaagaatatccaaattaaaccacccaactgttagggtttttatccccaaaatgtttccatccccaaatgtgtatgcctgatggtagccatatgtttaagatatcccttcagaatcgatggagtcccaacatatgatgtatccttcctatccttaacatcaattcagtctctgctggatgaacccgaatcctaaccagtccagcccaatagcccaggcagcacagctttatcaggaaaacaaacgagaatattgagaaaagagttttcggccattgttgaacaaagcctggaatgattcataaatagacaactgggtctgttaatccttttcatcattggttgggtataattttacctctcatttagaaagggctaacaaattttaaagtgcacagggttttaaggattctgcagaaaaaaaaagaaaaaagtccttccagtttaggaacctacaaaagcttgtgtatcttgattaatgtactttttattgcatgggtgtggagctaagttattgctgcataaatttgtaatatatcctgtttgtatttttttccaagtgtataatgttggtgtggagttttcatgacagaatatacacattttgtaaatctgtacttttttcaaatattgaatgccttatttttgaattctttagatttttaaattggagaaaagcacttaaagttttttatatatgaatattacatgtaaagctgttaaaatacataacttcagtgcaagagactttgtcacttatttccttatgtgtgtaggaggggttaataagtctctagctctccatctattgatagtttcatttacaatttcaaaagaacattcttatattttatcaaggaagtcttcaaatttgattctaaatagcgattataatctccaactttattttgaatgtacctctattagtttcaattgagtaattctagacataactggtttgactctgtccaactctgtatttaggccatttgttacagtttcttcatgcattacttactgttaaaactgtaccttttgcgatttcacagttggcacttctgccatgagcagagaactgatgcgacttgttttgctgcttggtagcactttaaaaaattttttgattaatgaagaaagtaaaaccataaacattgccaaaaattcatgccccagtattagcaatgaattagttgaattggtttgagaaaggcacatattggagggaaatcttggtgtaacttaaatatttgaaaattacctttaatgcaatgcatatctgtttattctgggaaatgttttaatgccagggcctgctgagttgcttcttcttgtggagattttttttttaatctcctgagttgtataaaagttgtactgcatcttagtttactggataaatttaaaacacagtattgtagaaagctaatacaaaactatcctatgccttcaaatagtatagaaaatggaaaatatacaagtaaattctgttgaaccacctgtgtagtctctctagtagttaaaacagctattttagtaaccccaagagtttcttctcatatccataaaattggattacagtatggcaatatctacagcttctattcattatgcaacgtttaacattgattggataaatgcttataggctgggccaggtggctcccacctgtagtcccagcactttgggaggcaaaggcgggaggatcacttgaggccaggactttgagaccagccagggcaacataataagacttttctctactttaaattttttaaaaaattagttgggcatagtggcacttgcctgtagtctcagctacttaggaggctgaggtggcagaatagcttatgcctaggaggttgaggctgcagtgagctgtgattatgccattgcactccagcctgggtgacagagcaataccctgtctttaaaaataaaagctattacttggcaaaaaattccgcactatataattcgcacacattaattagggtttatgtaccatacaaaaaaaaattaattagggct

SEQ ID NO: 1095 - DNA, 1852 bp, Homo sapiens
  SIMILAR (567)..(848): 371254mologous to Caenorhabditis elegans R05D7.3,accession number Z81105,Smith-Waterman Score=119.
gactaggaagctctgataggagtatctgtttccagaagaagcaattctttggaacagacagccaagcccttggtgacaggcatgctggagagcaaagaggaggatgtggaggtagaaaagtggtctcctttgagtctgcatcttcatacactgaagggatatggacaggtgcaagaggccagatactcacccaaggtgaggccttcaaacttatgtactccccatggcttttcacaggtgagtctgttgaaatagtcagtgaggtcagagtagaagtaggagaacttaacatcataaaagactggggaagagagagtgtggagaaaggaggggcagtaatatccatggaagcagagagagtaaaaggccaagctatgatagcaactggtggagtgataactggcctggccgccttgaaaaggcaagactctgccagatcacagcagcatgtcaacctcagcccgtctcctgctacccaagagaagaagcccatcaggcgccggccccgggcagatgttgtggttgttcgtggcaaaatccggctttattccccatctggtttttttcttattttaggagtgctcatctccattataggaattgctatggccgttcttggatattggccccaaaaagaacattttattgatgctgaaacaacactgtcaacaaatgaaactcaggtcattcggaatgaaggcggtgtggtggttcgcttctttgagcagcatttgcattctgataagatgaaaatgcttggcccattcaccatggggattggcattttcattttcatttgtgctaatgccattcttcatgaaaaccgtgacaaagagaccaaaatcatacacatgagggatatctattccacagtcattgacattcacacgctaagaatcaaggagcaaaggcaaatgaacggcatgtacactggtttgatgggagaaacagaagtaaaacagaatgggagctcctgtgcctcgagattggcagcaaatacgatcgcctctttctcgggttttcggagcagttttcgaatggacagctccgtggaggaggatgaacttatgttaaatgaaagtaagagttctgggcatcttatgccccctttgctctctgacagctctgtgtctgtctttggcctctatccacctccttccaagacaactgatgataagaccagcggctctaagaaatgtgaaaccaagtcaattgtgtcatcgtccatcagtgcttttacattgcctgtgatcaaacttaataactgtgttattgatgagcccagtatagataacatcactgaagatgctgacaacctcaaaagtaggtcaaggaatttgtcaatgggattcccttgtggttccttttgcccaacaccagtgaatccttccagcccgtcagcacagtgctaccaaggaataattccattggggagtcgttgtcgagtcagtacaagtcatctatggctctcggacctggggctggacagctcttgtctcctggggctgccagaagacagtttgggtccaatacatccttgcatttgctctcgtcacactcaaagtccttggacttagaccggggtccctccactctaactgttcaggcagaacaacggaaacatccaagttggcctaagttggatcggaacaacagcaagggatatatgaaactagagaacaaagaagacccgatggataggttgcttgtgccccaagttgccatcaaaaaggactttaccaataaggagaagcttcttatgatttcaagatctcacaataatttgagttttgaacatgatgagtttttgagtaacaacctaaagaggggaacttctgaaacaaggttttaa

SEQ ID NO: 1096 - DNA, 3000 bp, Homo sapiens
  SIMILAR (2538)..(4982): 911254mologous to Homo sapiens putative p150,accession number U93572,Smith-Waterman Score=3872.
atgctggagagcaaagaggaggatgtggaggtagaaaagtggtctcctttgagtctgcatcttcatacactgaagggatatggacaggtgcaagaggccagatactcacccaaggtaatcattgagatttggaaaatgggagttgattggtccacaggcctagttttaaaggcagagcagcattcttttgcatttggtgttatggaaacaggaatcagaataagaaaaaagaaaacctcaaatgaaagcaaatctggaggcccctccccatctcaaatgggaggctctgggaacctgattggaagaggaagaagaaagggaggagttaaaaataactgtaaagagccaaatctgagaactgaccctgctaaaaaagtcagacaagtcaagtggtgcagctggtgtgtgctagaaggtgagtctgttgaaatagtcagtgaggtcagagtagaagtaggagaacttaacatcataaaagactggggaagagagagtgtggagaaaggaggggcagtaatatccatggaagcagagagagtaaaaggccaagctatgatagcaactggtggagtgataactggcctggccgccttgaaaaggcaagactctgccagatcacagcagcatgtcaacctcagcccgtctcctgctacccaagagaagaagcccatcaggcgccggccccgggcagatgttgtggttgttcgtggcaaaatccggctttattccccatctggtttttttcttattttaggagtgctcatctccattataggaattgctatggccgttcttggatattggccccaaaaagaacattttattgatgctgaaacaacactgtcaacaaatgaaactcaggtcattcggaatgaaggcggtgtggtggttcgcttctttgagcagcatttgcattctgataagatgaaaatgcttggcccattcaccatggggattggcattttcattttcatttgtgctaatgccattcttcatgaaaaccgtgacaaagagaccaaaatcatacacatgagggatatctattccacagtcattgacattcacacgctaagaatcaaggagcaaaggcaaatgaacggcatgtacactggtttgatgggagaaacagaagtaaaacagaatgggagctcctgtgcctcgagattggcagcaaatacgatcgcctctttctcgggttttcggagcagttttcgaatggacagctccgtggaggaggatgaacttatgttaaatgaaggtaagagttctgggcatcttatgccccctttgctctctgacagctctgtgtctgtctttggcctctatccacctccttccaagacaactgatgataagaccagcggctctaagaaatgtgaaaccaagtcaattgtgtcatcgtccatcagtgcttttacattgcctgtgatcaaacttaataactgtgttattgatgagccaagtatagataacatcactgaagatgctgacaacctcaaaagtaggtcaaggaatttgtcaatggattcccttgtggttcctttgcccaacaccagtgaatccttccagcccgtcagcacagtgctaccaaggaataattccattggggagtcgttgccgagtcagtacaagtcatctatggctctcgttttcgtggctggacagctcttgtcttctggggctgccagaagacagttcgggacttatgactctgatgatcttagatatattacattccaagtgaggaatgcttccaccaggagacacagcagtgggttcacaaaactgaaagttgaagctgccacctgcctctttgtacaactcatgccagccaattttcaggcaaagaagggagctacagtggtggctgggaagatcgatcctgattatcaagaggaaatggggctgttacttaatgagatacctgctaaaccccttggactgataaaccttaatgtgccagctctcctggctttcaaaaaaaaaatcatggcatgcccttgctctcctcctgctggactcctggagcatgggcccggtgactccagccacagtcttcacccagtcctgaggagctccttcttctcagtccctacttccctcaggactgctccacttcttcaagaccacggatcaacaaggctaaaaggacccaaagagaccaatctagaagtcccagaaaagagagttccagttttcgtgttctctttcctgagggacagtggaggcctagggctcaaaggagatgtaaaggggagagaaatcaacaaggtagaggaggctctttccctctaccttgcatcctactatggggccttgcattctaccgtgctatacgtgctgcagacaatcaatgcagaaaaagcatttgacaaaatccagcatcgctttatgattaaaacccccagcaaaatcggcatacaagagacatacctcaatgtaataaaagccatctatgacaaacccatagccaacataatactgaatggggaaaagttgaaagcattccctctgagaactgaaacaaaacaaagatgcccactctcatcatttgtattcaacatagtactggaagtcctagccagagcaatcagagaagagaaagaaataaagggcatccaaatcggtaaacaggaagtcaaaccgttgctgtttgctgatggtatgattctgtacctagagaatcctaaagactcctccaaaaagctcctagaactgataaattcagcagtttcaagatacaaaattaatgtacacaaatcagtagcagtgctatacaccaacagtgaccacgctgataatcaaatcaagaactcaaccacttttacaatagctgcaaaaacaaaacaaaataaaataaaatacttaggaatatacctaaccaaggaggtgaaagacctctacaaggaaaactataaaacactgctgaaagaaatcatagatgacacaaacaaatggaacacaacccatgttcatggatgggtcaaatcaatattgtga

SEQ ID NO: 1097 - DNA, 426 bp, Homo sapiens
  SIMILAR (185)..(313): 931254mologous to Homo sapiens transcription factor IIB,accession number AF093680,Smith-Waterman Score=203.
cctcgtagtccctagtcagtgtggtggaattcggtgaatacagcaagtaagacctccctcttgccagaatccatccctaagacaagccaaggagatgccggagatgacgcgtttccagtcctggaagagggcctctagaagattcaggaaaagggggagaacagtcacatttcgcctctcaaaagaagcattgccttgacagatccatgcaaattgtcgcatccgacgggtttacttctcagacagactctactcagaagatgagctgccggcagagttcaaactgtatctcccagttcagaacaaggcaaaggtaagccagtcttccccagaggaaggtccaccagtgagtggggggagctgtgttcctggaaggtgctctggtctaagaattcagctgcagagcctctctgtgttgacactttg

SEQ ID NO: 1098 - DNA, 1414 bp, Homo sapiens
  SIMILAR (329)..(910): 401254mologous to Homo sapiens transcription factor IIB,accession number AF093680,Smith-Waterman Score=223.
cgtacgctcagcttggcacgaggctggaagaattcccggcgcggacggtagatgctgtggtttttgttctgatctcgcagcttagggagctgaaggatcgcgggacttaggcgttgccgcgttccgagtccggccatcagtggctgcagatccggaggccaggagctcaaccacccttcttcggaacagggccggcctgctgctgtgcccttgacgctcggtgcctgtatctactccggggcctaggtcggctccgggggcggcttaggagaaggccgccggcgaagatgttcaaaaacacgttacagagcggcttcctctccatcctctacaagcatcggcaagcaagcctcttgcaaatctggggacaaaaaggtacggaatgggccacattcaaaagaattcactgattaatggacatccagttccctgggtgcttaggagatttgaaggggacaaatgttaaggcaccacatattttcaacatggcccttgcaggaccccaaggaagacgttggggatttaaaatttccttttccttggtcatggtttatcaaaaacctgaagaagtattttaaccttcgaagtgcaggtactagatgccaataatgtgcgtcgtcgctttcgggcaagtaactaccagagcaccaccccggggtcaaacccttcatctgcacccatgcccatgcgggttgaatgacggctggaaccaagattcagttcaactttgctagactttcacacggccgagcatacggcacccaattacatcgagacccctcaggagtgcagatcccatgcaaaattggtcgcatccgacggggtttacttctccagacagactctactcagaaagatgagctgccgggcagagttcaaactgtatctccccagttccagaacaaggcaaagcaataactggaattgtgactcgagggaatagaccccctgggatgtgactcttctttttaaaaggaaacctatgtggaggaccgatgccaaaaacatatttatcttagtttgctctgcctgtagttctggttatttatacttggtgttgctttgtcattggacaccgggtgaacatgcccgtaactctgtgactgccattgtaagtgccagtgggggtaagccagtcctgtgagtggcgtcatgacacgctggagcttattccgccgccctgccccccagtgtggggggagatacctttaccatgaacttacagaattaaagatggcccataaaggaattcccagaaccaatatttcttcctgcgggtttattctatgttttatatattatctaaatatatgtatatgctgtgtcatactcataatctggaaatgaataaagtgatatattacctggtttgtaaaaaaaaaaaaaaaaaaactcgagggggggcccggtaccc

SEQ ID NO: 1099 - DNA, 480 bp, Homo sapiens
  SIMILAR (7)..(42): 831254mologous to Homo sapiens pol,accession number M14912,Smith-Waterman Score=50.
atgaccctagagaaggtggacgccactgtgttcacagacagtagagctttctcgagcagggagtatgaaaggccggtgcagctgttaccatgggacagatgtgccgtgggctcaggctttacaagcaaacacctcagcgcaaaagctgaattgatggccctcactcaggctctccgatggggtaaggataacgtattaacgtttacactgacagcaggagcagaaagtgtcaaccttgcagcagatttggacactctgggagccaaactggatgtggaagctccaaagctaagagaccagacagactccatcttggctctttcactggcagctccctcctcaaggcttaacttgtgcaagctgactcccagcacgtccaagaatgcaattaactataagatactgtggcaagctatatcagcagttcccaggaattcatctgatgataacgcccaaagccccgggtctatcaccttgtaa

SEQ ID NO: 1100 - DNA, 730 bp, Homo sapiens
ctgtgcggtggcattcttaatatctcagtataacccccttgttataattgaggaatcaacgatttgattccccaataacacaagtggggaatgtaatgcccaaccttgtttttactaaccctgtttttagactctcccttttcctttaattacccagccttgtttccacctgaattgactctcccttagctaagagagccagacagactccatcttggctctttcactggcagccgcttcctcaaggacttaacttgtgcaagctgactcccagcacatccaagaatgcaattaactgataagatactgtggcaagctatatccgcagttcccaggaattcgtccgattgataaacgcccaaagccccgcgtctatcaccttgtaatagtcttaaagcccctgcacctggaactgttgtactttcctgtaaccatttatccttttaactttttgcctactttatttctgtaaaactgttttaactagaccctcccctcccctttctaaaccaaggtataaaagttaatcaacgccctgccttggggccgagagaattttgagcgttagccgtctttcggtcgccagctaataaatggactcttaatttgtctcaaagtgtggcgtttttctaactcgcttgggtacaacaaggccaaggtggaaggatcacttgaagctaggagtttgagcaacctgtgcaacctagtgagacccccatctttctaatag

SEQ ID NO: 1101 - DNA, 480 bp, Homo sapiens
  SIMILAR (116)..(478): 671254mologous to Homo sapiens initation factor 4B,accession number X55733,Smith-Waterman Score=403.
  misc_feature (1)...(480): n = a,t,c or g
attcggcacaggaataagaaggggaagactatctccctaacagactttctggctgaggatgggggtactggtggaggaagcacctatgtttccaaaccagtcagctgggctgattgaaacggatgacctggaagaagatgtttcgaccacttggcacagtaacgatgacgatgtgtatagggcgcctccaattgaccgttccatccttcccactgctccacgggctgctcgggaacccaatatcgaccggagccgtcttcccaaatcgccaccctacactgcttttctaggaaacctaccctatgatgttacagaagagtcaattaaggaattctttcgaggaaaatccagcttccaagttcagttctgcaagcaagtatgctggctctctnttgttgatggtgaagatgaaaaattaaggggagaagattatggccgattagacntttacatcctgtgcttttctcnagtttctgtncg

SEQ ID NO: 1102 - DNA, 504 bp, Homo sapiens
  SIMILAR (11)..(133): 901254mologous to Homo sapiens monocyte chemotactic protein,accession number M37719,Smith-Waterman Score=191.
agcgtcataatctttatttccagcttgcttttcatgatggcatatccctacatggaactttttagtggattttgtttgttttttgtatttttgtgtgctgtagaggatgtggaaagaagggcttcaggaaggaagtctgggttggggtgaggttagtttccctcagtacatgtgggcacagttttcttcagcttaagggaaatcttaggagagggacattgatacttttacttgcctttaatttgtttacattactgcccaagcagatgaaaataaagtagatgggatgaatgccccaaaaggccaaactgggaactctagccgtggtccaggagacggagggaacagagaccactggaaggagtcagataggtatgcttgttctctttctcatctttcctctgatccacatgtttgtgtaattaagaaattaagttcttggttctcagagcactgccagatcgctcattgtgagcaaactaaagtcagccaacgtagacagtt

SEQ ID NO: 1103 - DNA, 2566 bp, Homo sapiens
  SIMILAR (427)..(990): 951254mologous to synthetic construct chloramphenicol acetyltransferase,accession number A02739,Smith-Waterman Score=981.
cgacccacgcgtccgtttctctctcccacatggcggcctcagcaaaaaagaagaattagaaggggaagactatctccctaacagactttctggctgatgatgggggtactggtggaggaagcacctatgtttccaaaccagtcagctgggctgatgaaacggatgacctggaaggagatgtttcgaccacttggcacagtaacgatgacgatgtgtatagggcgcctccaattgaccgttccatccttcccactgctccacgggctgctcgggaacccaatatcgaccggagccgtcttcccaaatcgccaccctacactgcttttctaggaaacctaccctatgatgttacagaagagtcaattaaaggaaatcctttccgaggatttaaatattaagtgcaagtgccgtttacccacgtgaaaccccagcaatcccagagaggttgaaaggttttggttatgctgaatttgaggaccctggattccctgcctcagtgccctgaatcttcactgaccagtctctaggtaacaggagaattctgagtggagcgttgctgatcaagcacaggatagagagagggatgatcgttcttttggccgtgatagaaatgggggttctggcaaaaaaaagtacagagtgggagggctggtctctgctacagacagctttgatgactacccccctacgaagaggtgatgatagctgtgggagacaagtatcgagttgggttttatttcagaccggtttcgggatggggtatcgggttgggtttcgggaatggccccgccaggaataggattcgatatggtggccgggatcgctatgatgaccgaggcagcagagactattgatagaggctatgattcccggataggcagtggcagaagagcattttggcagtgggtatcgcagggatgatgattacagagaaggcggggaccgctatgaagaccgatatgacagacgggatgatcggtcgtggagctccagagatgattactctcgggatgattataggcgtgatgatagaggtcccccccaaagacccaaactgaatctaaagcctcggagtactcctaaggaagatgattcctctgctagtacctcccagtccactcgagctgcttctatctttggaggggcaaagcctgttgacacagctgctagagaaagagaagtagaagatcggctacagaaggaacaagagaagttgcagcgtcagctggatgagccaaaactagagcgacggcctcggaagagacaaccaagctggcgaagtgaagaaactcaggaacgggaacggtcgaggacaggaagtgagtcatcacaaactgggacctccaccacatctagcagaagtaagtcagaccaggatgcacgaaggagagagagtgagaagtctctagaatatgaaacactcaataaaggaggaagattgccactctccaacttctaaacctcccaaaacctgatcagcccctaaagggtaatgccagccccctccaccaaagggagaatgcttgggtgaagccgaagttcttaaccctcctgcttcgatctcaagagctcaagacacagagcaggaagtcccctaacaagtggtggggaaaatgtagctccaggctcaaccatctgaggaaggaccaggaaggaaagatgaaaataatagtagatggggatgaatgccccaaaaggcccaaacttgggaactctaagccgtggtccaggagacgggagggaacagagaccactggaaggagtcagataggaaagatgggcaaaaagggatcaagactcccagattctgcaccttgagccaaagaaacctgaggaaaatccagcttcttaagttcagtttcttgcaagcaagtattgctgctctctctgtttgatggtgaagatgaaattgagggagaagattatgccgaatagcccctctacatcctgtgcttttctcctagtttctctccacccctggaaccattcgagagcaaattcaaaacctctattccagacaagacaaaataaaactcaacatctccctgaagacctttcttaccttttttttaaaaacaaaaaatgaaattattttgcatgctgcctgcagccttttaaagtattggagtaactgggagaattgccaatacagccagagagaaagggactacagctttttttagaggaaaagttgtggtgcgttatgtcaccatgcagttgccagtgtgattagtgcctaggggtctccatttagcagaaatggtaatgacagtgatataatgcctggaacctggttgggcagtaggggagggaggtaagaaggaaaagtgtgagatttctaccttttagtttttatcctattgtggcatatatgaattctcaaaccattatctgaataaaattttcccactcttggaaaggtagatttagcctcaagttgttctagtctccaggaggctgccagcccctcctcttatttaattctgagttttgggggccagcctaggagggaattccttttttttttttttttaaccccccaggggggtagttgggaatgagacta

SEQ ID NO: 1104 - DNA, 648 bp, Homo sapiens
  SIMILAR (505)..(594): 461254mologous to Bacillus subtilis ywzC,accession number Z99123,Smith-Waterman Score=64.
atgaactcgctcaatcccattgctttactctgggcagcagctggggaagccatgagatgtcagccaattgacagagtacccggcatttatcaggccccaggttcaaaacaccagatccaggagataagtaaagccaagaccagcgctgcccaggatggagacacaggtgcctacatctccagtggtggctgcggcgaaggcagaagtcttgggccaagcgactgctaccaagtgacactgtgcaggcaggggagcttcggtgtcttccctgagaaactgaccaaggccaaggcatacttgggcttaggtttcctgcaggaactatggctagctagctcaccccggcacacgctgaccttgcatcaagtgctggagcacgtcatcaagctaaagcagcaggggctggccaacctcctgagctccattcccgactgcaagggaggcctgtcaccccggaacattagtcaaagggctgtgttgacagtgatttcaactcttgaattatacgaaggacctggccgcaagaaggcattgagccccgaggaggacaacaggcctcagacctctccagagtccgatgtccttctgcacaagtccttgttgtccagtctgtggcccaaacacccacagggcatggtggaggcctga

SEQ ID NO: 1105 - DNA, 207 bp, Homo sapiens
  SIMILAR (181)..(113): 471254mologous to Homo sapiens Human secreted protein encoded by gene 2,accession number Y36225,Smith-Waterman Score=53.
atggaggtgaggccgtcgctgaccgcgctgtttaaaatccagtgcttagaacagtgcctggtacccagcaggcaatcggcaaatgcctgcttagtcagtacatgctcagtcaatggccgcagcctgctgctgggtgcctttggatttgggtcccaaatgccggcctccagagtggcggacacatttaacagatctgaagttgactag

SEQ ID NO: 1106 - DNA, 492 bp, Homo sapiens
  SIMILAR (110)..(151): 501254mologous to Carassius auratus ATPase 8,accession number AB006953,Smith-Waterman Score=47.
atgtcctttatccagattaaaaaacaacaaagtaggttacacagtggaccttccagcaagttttcaaaagatttccattggcccatggtcatcgcacagtatatggcctcatccaggtccctggctcctcgcatgcgttcttccctggctctgtttgggtcccaggagcagcccatgctgttcccttgggcttgcatgcttttcttcaccctctatcttatgtcaccctttatccctgcatccctcaggcctatctcagtcatcacttcgtggggcacccaaccctggtttctgcccacccttgttcagtctcctttagcgaagggctctcgggtcctttccttcggaagccctgatcaccattccctccaagtagctggaactacagtccttaaagaaactggagcaagagcatgtggacctatccgtgctgactctcgactggggattttcctgctgctcagggatcaggcattaactcttcatgtgtaa

SEQ ID NO: 1107 - DNA, 830 bp, Homo sapiens
  SIMILAR (621)..(52): 271254mologous to Arabidopsis thaliana contains similarity to phytocyanin/early nodulin-like protein~gene_id:K19P17.3,accession number AB007644,Smith-Waterman Score=103.
ttaccttaagagggacaactgaaacagagacaagcaccccaacagtagggtgcttcgaggtcctggaggggagccctggccctgtggagagagaccgagtcgtgcagcgtccgtggcctgcatttgaaactgaagggcaagaggctggtgagatccgagagtcatgccgctgcgtggaggaacatgctgaacctctggaggaacggctctacctccagtcgcagttggctggtgtttgtttgcacaaggattctttggtaacaatctgcagtcggtttctggcggaatgtgaggtgaagtcacgactgactttcgggatggaggttgttcctggtgaacaggacaaagtccttgcattcatggagcctgttctgcatcctcccttgatgtatgttcgggtgaagcagccctcgatgcacacctatgagctcagggactgtgcgcaggtgaaccagcctgtgacacacgcctacgagctcaaggagcacggtgcagagaccacagtgcaggtgaaccagcctctgacactcatctacgagaatagggtccacgtgcaggtgtaccagcccttgatatacacctatgagctcagggtccatgtgcaggtgaaccagcccttgacacaaacctatgagctcagggtccatgtgcaggtgaaccagccctccactcacacctatgagcacagagaccatgcgtctcccttctctcctggacagaaggccgtgtcctgggacttctctgatggcgagaggctgcggctgtaccagcgaatccactttctgttgccacccgtggaacgttctcactcttccaagaagccaggctag

SEQ ID NO: 1108 - DNA, 525 bp, Homo sapiens
  SIMILAR (334)..(909): 981254mologous to unidentified cloning vector 29kD protein essential for the replication of mini F plasmid,accession number AB015619,Smith-Waterman Score=982.
atgaaggtgtctctcacaccccttgggcccctgctgcggatgctggtgttgctgggttctgtagaagtgggaatgctggtgctggcttccctcacatctctgtccctctcgctgcaggacagcaatttgaggctggcgcccatgcggctctacacgctctccaagcgccactttgtcctcgtgtttgtcgtcttcttcatctgctttggcctgaccatcttcgttgggatcagagaaacttctattaagacaagctttcccatgactgttaaagtcgatggtgtagctcaagatggaaccacgatgtacattcataacaaagttcacaaccggacaaggaccctcacatgtgcagggaaatgtgcggagattattgtggctcaccttggctacctgaactacactcagtatacagtgatagtgggatttgaacacctgaagctccccatcaagggaatgaacttcacaaacatcatctcctacaagccttttatggttctcagcacctttctccagaagctgtag

SEQ ID NO: 1109 - DNA, 930 bp, Homo sapiens
  SIMILAR (664)..(897): 291254mologous to Mus musculus HES6,accession number AB035178,Smith-Waterman Score=79.
atgccacccactgaagacggcaagggaagaggccagaaagtgctacgaacaaggaggaaacagctccaagttgttgggcagtcgggcgctgggtctcaaaggagggccacttgcatggacagaaggccagcccaggagacaaagagggatttaccgaagggctgtgggacccctgataagaacaacggactccatgcaggttctcacgactggttctctctgtctctaggaaattctactcactcagagctgttccagaccccagacattcaggtaaataaaggtatggagcaagcttgtgttggctttgagtcaattgcatctcccacagacatcccctccagcaacctccttgatgacgttcaagccagggagaggacaaatagttccccaaaagaaaattggagggctgctggaaggggaaagatgcaccggaaggccacagaatgccagacagccattccacgaagacacgcattaactcacaaaggtcataccatctctgcccttgtggctttctctacttcctcttactcatgtggccggaagaaaaaagtgaacccatatgaagaagtggaccaagaaaaatactctaatttagttcagtctgtcttgtcatccagaggcgtcgcccagaccccgggatcggtggaggaagatgctttgctctgtggacccgtgagcaagcataagctgccaaaccaagacgtctttttacaagggaaacggttccacgaagccttggaaagcatactttcaccccaggaaaccttaaaagagagagatgaaaatctcctcaagtctggttacattgaaagtgtccagcatattctgaaagatgtcagtggagtgcgagctcttgaaagtgctgttcaacatgaaaccttaaactatataggtctgctggactgtgtggctgagtatcagtaa

SEQ ID NO: 1110 - DNA, 606 bp, Homo sapiens
  SIMILAR (640)..(320): 841254mologous to Homo sapiens apoptosis-associated speck- like protein containing a CARD,accession number AB023416,Smith- Waterman Score=434.
gttcagtacccctagtccatgcggtggaattcgaaagtacgggtcgcgagaggttgttcgcgccttgagagttaagcgaagtgtggtggcttccaaggaatacaaacataaaggccttcgaccgttgcaaatagactaaagtgaaaacaaatctgaatgaagatgaagttatttcagaccatttgcaggcagctcaggagttcaaagttttctgtggaatcagctgcccttgtggctttctctacttcctcttactcatgtggccggaagaaaaaagtgaacccatatgaagaagtggaccaagaaaaatactctaatttagttcagtctgtcttgtcatccagaggcgtcgcccagaccccgggatcggtggaggaagatgctttgctctgtggacccgtgagcaagcataagctgccaaaccaaggtgaggacagacgagtgccacaaaactggtttcctatcttcaatccagagagaagtgataaaccaaatgcaagtgatccttcagttcctttgaaaatccccttgcaaaggaatgtgataccaagtgtgacccgagtccttcagcagaccatgacaaaacaacaggttttcttgttggag

SEQ ID NO: 1111 - DNA, 563 bp, Homo sapiens
  SIMILAR (865)..(2085): 971254mologous to Homo sapiens putative p150,accession number U93572,Smith-Waterman Score=2027.
ttgaattatgtttgtcaatttgggcctgctcctcttcaagtttttcttggtcttgcctccaaaacatacatgcctgtgactggactcagttatcctgtccctgcccacacacttgcaccaggtgaggcaccctggattgaccaccaaaactacttcacagatgctaaaagttggtgctggcgcttagcacttgagagagctgagatttccgagtattcagcaagtcctgttaccaccagctggatgactttccagcctattgtaacagccttcctcctggaccacctccagaacaaatgggctgaggaagggcttgagcgtcctttgcaatggctgtgtccttatggggtcttctcccagcatcctaaactgaaaccacactttgtggatgatgttaatatctaagcttatctgttaacccaggttaagctttcttaaccttcctgttttcacttcaaattagcaactacagtgccaaggaaaacggaaatgagtgacaatgtttacaacaatagcaccattaagttgttttttaagggagctgcttagggataatgttaaaa

SEQ ID NO: 1112 - DNA, 431 bp, Homo sapiens
  SIMILAR (199)..(29): 331254mologous to Mus musculus Ig light chain variable region,accession number U26476,Smith-Waterman Score=66.
tgcatgctgctgccaaaccagagatcacttgtagacttgaaagggaacatgagctttgggtgaaggattcccagcccccaacagaggccaaaaagctaccacccagccagcttgtcctggcccgccagcagagccgcagcactgcagggcccttctgttgtgagtgccagggcccttgctggctgcctgagcaaggcaaaaggttcaaaacaggaagtctctgggcagctattcccagttgtttcaatgtcttttttaaaaatcacatacactcgagtaagactgagtctcctcaccgaagagatctggctgtatcccgagtctctgaaacctttgctccagtcccgtgggagcgtgccgtcccgaggatgtggagccgcaagggctcgccagagggatctcaggagctaggcctcaaggagcgctgttga

SEQ ID NO: 1113 - DNA, 590 bp, Homo sapiens
  SIMILAR (564)..(361): 381254mologous to Homo sapiens Human neurofilament-H mutant protein fragment 2,accession number Y20843,Smith-Waterman Score=66.
  misc_feature (1)...(590): n = a,t,c or g
ttctgttgttctgcatagtttacaaagtgctttcacatacatgatctaatttggtttactgaacttagaaaggtagactttcaaggaaaaaaacatcgatttccaccaatagtaaaagctactgcatcagacctgtcactcaacagcgctccttgaggcctagctcctgagatccctctggcgagcccttgcggctccagcatcctcgggacggtcacgttcccacaggactggagcaaaggtttcagagactcgggaatacacccaaatctcttcggtgaggggactcagtcttactcgagtgtatgtgatttttaaaaaaagacattgaaacaactatgggaagcagaggcaaagggcaggcaaggctttgggttttggcgactggggaatccngtgcgggcctccctttgggtgaaggacctgaccccgtggtgggggtgaacagggttttccttgaccccgtcccaggggtttccctttcaggacagatggatttcactaggggaagcgtgatgctggtagcctccactctcaggctgggcagggtaggctcccagggaggcagctcccagcgcagcctcttccat

SEQ ID NO: 1114 - DNA, 1881 bp, Homo sapiens
  SIMILAR (1993)..(2379): 941254mologous to Cloning vector pSacBII RepL,accession number U09128,Smith-Waterman Score=612.
atggatgaagctggaagccatcatcctcagcaaactaacacaggaacagaaaaccaaacactgcatgttctcactcgtaagtgggagttgaacaatgagaacacatggacacaccagtctgatgattgcaatgatctgatcgtagaataccacaagcctaaccaagctgcggccctgctacagctgccaaacagagcagtattgttgctaaagcagattattaaaacctcagtggaagtggatcatcgtaaaggtcttcatcctcatggtctttacgttgagtgggctgaggaggaagataagggaggagttggtcttgctgtctcaggggtggcagagatgggagaaaattcccctctttacaattcttcaaaatccacaattctattgatctttgaccagattacaaataggaacaatgagagttgccgtggccatgggctcagtttgtttgtcccatttgtgtatgatcgccttcccctgcggggaactgggcaaggggcaagcctggtggttcagtcctctggagtcctgatgcttgttgggctttttctttttgccagcatgctctggcactggcaaacaagtcatttagagggagctgaggagagatcaacagaatctgagaaaagtaggcaatgtgcacgcagaggccgtcacgtgggtcgccgaggctcgcaagtgcgcgtggccgtggcggctggtgtggggttgagtcagttgtgggacccggagctgctgacccagcgggtggcccaccgaaccggtgacacagcggcaggcgttagggctcgggagccgcgagcctggcctcgtcctagagctcggccgagccgtcgccgccgtcgtcccccgcccccagtcagcaaaccgccgccgcgggcgcgcccccgctctgcgctgtctctccgatggcgtccgcctcaggggccatggcgaagcacgagcagatcctggtcctcgatccgcccacagacctcaaattcaaaggtgatggatgagtatttatacgaccagaacaatactacactgtatgaaaatggtgtaaaagaagtaaaagacatggtcccttccggccccttcacagatgtagtcactacaaatcttaaattgcgaaatccatcggatagaaaagtgtgtttcaaagtgaagactacagcacctcgccggtactgtgtgaggcccaacagtggaattattgacccagggtcaactgtgactgtttcagtaatgctacagccctttgactatgatccgaatgaaaagagtaaacacaagtttatggtacagacaatttttgctccaccaaacacttcagatatggaagctgtgtggaaagaggcaaaacctgatgaattaatggattccaaattgagatgcgtatttgaaatgcccaatgaaaatgataaattgggtataactccaccagggaatgctccgactgtcacttcaatgagcagcatcaacaacacagttgcaacacctgccagttatcacacgaaggatgaccccaggggactcagtgtgttgaaacaggagaaacagaagaatgatatggaacctagcaaagctgttccactgaatgcatctaagcaagatggacctatgccaaaaccacacagtgtttcacttaatgataccgaaacaaggaaactaatggaagagtgtaaaagacttcagggagaaatgatgaagctatcagaagaaaatcggcacctgagagatgaaggtttaaggctcagaaaggtagcacattcggataaacctggatcaacctcaactgcatccttcagagataatgtcaccagtcctcttccttcacttcttgttgtaattgcagccattttcattggattctttctagggaaattcatcttgtag

SEQ ID NO: 1115 - DNA, 452 bp, Homo sapiens
  SIMILAR (281)..(361): 401254mologous to Sus scrofa mahogany,accession number AF273610,Smith-Waterman Score=67.
  misc_feature (1)...(452): n = a,t,c or g
ggctggcataaattttaataaagtatgtacatggaataggtgcatgtaatgcaagtagattataactaattttgtttgggaaatacaaaaagcgagttcagaaactacttttgctttaacatagctattattagtatatgtttcttatgcattaatgcatttttataaagtgttaatgtttagagcctaatgctttctgtgtcagtcattcccaatatcatgcagaataaatcagagttcggtgagaatctgagaatatgtttcccatgccatctcagggtataactgcaccagggaatgctccgactgtcacttcaatgagcagcatctacaacacagttgcaacacctgccagttatcacacgaaggatgaccccaggggactcagtgtgttgaaacaggagaaacagaagaattatatggaacctagcanagctgttccactgaatgct

SEQ ID NO: 1116 - DNA, 733 bp, Homo sapiens
  SIMILAR (482)..(655): 371254mologous to Homo sapiens hXR1prime amino terminal sequence,accession number R33742,Smith-Waterman Score=70.
tatttttgtaagcattacaagcactctgatatggagacggctgattcttcagtggagagacctgcctttgataatgagcacacggcctgatgtgatcagtaaacattcctctggaaacacttgccactttgggaagtaaggcagcccactgtttgggtgtaggaagcctgcagaaccgcatctgagtgggtccaggtaagtccccaagctcctgcaggcctgcttctctctcggcggcagggcggagatgcacggtacctactttgaggctgaggattcaatctctgaccacacaacgcacagtccagtccgcatcatgcctgacacacagcaagcactccataaacacgactaccgttattcatttacaattaaggaagaaagaggtaagtatgcttgcctgaccatgattttcaaaatcattttcaagccgaatccaagaatgtgatgagtgtgaagacactggaagaacctgatcacgcaggctcctttctcaagaaccccgatgcccgcaggtgaaggggcacatgccaaggacaagcccgcctcagccctggacatcgttcatcgcgcgagtgagcaatgcttgagtgagaaacctgacagcggtgtccccataacttccaccgcctctggagccacccggcaaaagccagcgtctgacaatccttcagtaatagtgaagacacctgttatattgctgtccagccaaaagctccttgttgcaggatga

SEQ ID NO: 1117 - DNA, 622 bp, Homo sapiens
  SIMILAR (340)..(218): 361254mologous to Oryctolagus cuniculus alpha-myosin heavy chain subfragment 2 exon,accession number K01697,Smith-Waterman Score=66.
tcactttagagcctctgaattccaaatccactcttcgttatcctcctttgtgatactggagatgaatcctgtaaacatttctttgcctgctagcacgatattaagtgctgctgttttcaggatgagcaaatcactttcagctgaccacactgtggcatctggccagcaggatctctcctggtacagggggaaggaaggaagacttccttcccagagacttctcagagtttattactgcattcttctcctcttcctgatctaatcgaaggttggattctcccaggtctccttccatgaacctcttctctttcctctcttcactttttgtcatagtatcttccatcattcccttggctttcatggacagggtgatgatctccagatttgtatcccagaccctgaggtcttccgtgagctttagactcacagacccaactgtctactcagcttggcatcagcatccatcctgctggattctgcagatcctgctgcccagatgccacagtgtggtctgtttgggtacagactagccatctcaaacctaatgtattcaaagctaaattactgatttgtcgttcctggtttgtttcctctacagtcttccccatctcaggaagcagca

SEQ ID NO: 1118 - DNA, 492 bp, Homo sapiens
  SIMILAR (374)..(156): 341254mologous to Homo sapiens Human molecule associated with cell proliferation, MACP-1,accession number Y44821,Smith-Waterman Score=70.
atgaggactgtacagaggagagtagtccagagggagaacagcaagtgtaaaggccctgaggtcagagtgtgcctagaatgctcagggaatatcaatgggacagcgaaatggtacttgggagaagaaaagttgacagcagaagagccgtggaggtgccagcatgctgtcctcagcctgtgctttgagtggttgactgactcacctatcaagactcagcctgaaacgggcctcctcattgaggcttctggggccagtcccccagccctgctgccccttcctctcctctcacaccacaaggagatcattctaccacctttctcatcacaatatgcaagtggaagaaagtggaggggtgagagtgaaagggcttcagggccacatgctgaaagcctagagtttaaaactgagaagcccagccagtggtggtggtggtatagcggtgagtacagctgccgtccaaactatgaagccagtacttactgcagtgcataa

SEQ ID NO: 1119 - DNA, 815 bp, Homo sapiens
  SIMILAR (349)..(170): 311254mologous to Naja atra cobrotoxin homolog,accession number AJ239050,Smith-Waterman Score=57.
  misc_feature (1)...(815): n = a,t,c or g
atggcagtcagggcaatgaccagccacatcaacatatgctccaaattgggagccgagctgaatgactttgccgtcttcaccaccttcggcttggcctccgctctgctcctaggcgtggatggacttctgagtgggatcctggccatcatctatgtgtcagctgcttctttccacttgtgcttttattcacctggagtcccctccacatacaagggtctaccctgcccctatgcttcctgcatcttggcttccacctcccttctgaccaaaggcaacaggttcatcctctgctgcatggcctcactcatgattctcttcatgatggaccagagctactatccatatgacaaaatcctggagtctgagaactggaaaaaattggtttatataggagatgtaaagcttcaaaaatatctctgtacctttgagaaactggggatggaccacatcaggatgagggaattctgggcagagtgtttctccacgacaagaatatacccaaggctgagagatgttaatacaagcagttcccaactaagaatctttccagacaatgatcatgtctttcctggttatgtgaaatctgaaaacatttcccatgaaacaatctgaaaggtggctgggaagggaagtaacattttctgagtgctatggtttgaatatgtcccccaaagttcgtgtgttagaaannnnnnnnnnnnnnnnnnnnnnnnnnnnnnnnnnnnnnnnnnnnnnnnnnnnnnnnnnnnnnnnnnnnnnnnnnnnnnnnnnnnnctgtctgttattgctggagtaggctagttatcttgggagtg

SEQ ID NO: 1120 - DNA, 377 bp, Homo sapiens
  SIMILAR (96)..(254): 331254mologous to Lycopersicon esculentum extensin,accession number Z46674,Smith-Waterman Score=82.
gctcttcactcatgttccttggagtttttccattcctggttcttgctcttcttgtcccacttttgaatctttcttggagttactgcttccagggtttccatccaggcccaacttacagaagcagctcagtagcttcctcctgttaggattcagcccccaaccctgttccctcccagcatcctcagcccacgttctgggttcagcctcctccactgctccctgcttgctttcccatgcatcctattgtgaagaacttttcgtccttacagcacgtctatgtacagtacctcactgatgactacaaaaaatctcatgaagtcatccagggagatggattattttcttcatttttacagatgcagagattgagatgccag

SEQ ID NO: 1121 - DNA, 763 bp, Homo sapiens
  SIMILAR (110)..(394): 361254mologous to Arabidopsis thaliana lcl|prt_seq No definition line found,accession number AC007260,Smith-Waterman Score=149.
ccagtgcacctgcattgtcgatataactgctgagaaaaattggcagcttgacccaagtaaatacggaaatcctcataataactgcacaaaggtggaagggtcaggtcctcatccccattttagaaatgaggaaatggaggaacagagggtacggtccatcagtgggccatccgtatgcagagagattcaccagagctatcgaggcttggtgatgcggggccccataattggtcttagcgcgcacgtctatgtacagtacctcactgatgactacaaaaaatctcatgaagtcatccagggagatggattattttcttcatttttacagatgcagagattgagatgccaggccaaacaccagagcaccctagaaggtttaactaaaagaatgctcatgtttgacccagttcctgtcaagcaagaggccatggaccctgtctcagtgttccgtgtcatccacagacttgccattcaagtctacagcttcattcagattctgaataagaacactgagcaagttagggccagggacatcattgccgcagtgagggtggccttcagtacaaaggataaattaagggcaagggcctggaatgatggtacaccaggtgtcctacatggaaactctgtccagcggctggtgaagccagctgaaacctcatcttctaaaatgcaaagtaaatgtgaaaactttgggagcctgggagagaaaaactccctggtttggaaactcagcggaacaggaactcgatcttacaaatga

SEQ ID NO: 1122 - DNA, 228 bp, Homo sapiens
  SIMILAR (2)..(79): 301254mologous to Human immunodeficiency virus type 1 envelope glycoprotein,accession number AF053198,Smith-Waterman Score=54.
atggcaccatcatctgctcaagttctggagaggcttcagggagttttactcatggcagaagataaagttggagcagcctcatctccaatcgtggggaagagagaaactgaaattcttcctgtgactgaacacatgagaatgcgacagttacttggggtaacaggtttcctgtgggtcctgtgtgaagagtatgcattcattccagtgtcggggaggggagaagaatga

SEQ ID NO: 1123 - DNA, 477 bp, Homo sapiens
  SIMILAR (77)..(388): 951254mologous to Homo sapiens carnitine acetyltransferase,accession number X78706,Smith-Waterman Score=493.
  misc_feature (1)...(477): n = a,t,c or g
agccatcctggcggnnnnccccgaacgttagcancgtcangcgnggaannagacttccccagtgggagaagctaagcccaatgccttcatccagatggctttgctgctggcctactacaggatctacggacaggcatgtgccacctatgaaagtgcctggctgcgcatgtttcacctgggccgcaccgacaccatccgctcggcttccatggactcactcacctttgtcaaggccatggatgactccagcgtcacggagcaccagaaggtggagctgctgcggaaggccgtgcaggcccaccgaggctacaccgaccgggccatccgcggggaggcctttgatcgacacctgctgggcctgaagctgcaggccatcgaggacctggtccctgccaagacagactgtgtcatgttcttcgggcccgtggtccccgacggctacggtgtctgctataaccccatggaggcccacatcan

SEQ ID NO: 1124 - DNA, 384 bp, Homo sapiens
  SIMILAR (211)..(405): 921254mologous to Homo sapiens acidic ribosomal phosphoprotein (P1),accession number M17886,Smith-Waterman Score= 300.
tttttcaccaacacaattcccctttattgatgaccttccacattaatatcatacagcagggcgggggcaggaaccaagctgagtggaaccagaggcggctcgctagcaatgttatccacaggagcacagccgcaacggaggtgaaacctcacaccctggcccctcggcccagacaatcctgtctccaggtcctgggagtttgggaagcagggtacagatggtggcctggtcatggagttggcagggagtggccggggctgagctggtgagacaaagagctcttgccagtctcctgctctggagggctggttcccttccccagaggaggcaccggtggaggacgtgccagggatgacccacggaaggcacttggctggggctgca

SEQ ID NO: 1125 - DNA, 271 bp, Homo sapiens
  SIMILAR (2)..(163): 981254mologous to Homo sapiens Human choline acetyltransferase,accession number R95692,Smith-Waterman Score=293.
  misc_feature (1)...(271): n = a,t,c or g
cgagaccctgcccgtggagtacctgggggggaagccactgtgcatgaaccagtactatcagatcttgtcctcctgccgagtgccgggccccaagcaggacacagtcagcaacttcagcaagaccaagaagcctcccacgcacatcaccgtggtacacaactaccnagacaaggtgaaccgggattccgtgcgctccatccagaagagcatcttcaccgtgtgcctagatgcaaccatgcccagggtctcagaagacgtgtaccgcagccac

SEQ ID NO: 1126 - DNA, 205 bp, Homo sapiens
  SIMILAR (105)..(203): 1001254mologous to Homo sapiens Human choline acetyltransferase,accession number R95692,Smith-Waterman Score=173.
acaaggtgaaccgggattccgtgcgctccatccagaagagcatcttcaccgtgtgcctagatgcaaccatgcccagggtctcagaagacgtgtaccgcagccacttcatcgtggcagaagatggctcctgtgggcttgtgtacgagcatgctgcagcggaggggccccctattgtcacccttctggactatgtcatcgagtacac

SEQ ID NO: 1127 - DNA, 2859 bp, Homo sapiens
  SIMILAR (517)..(732): 691254mologous to Homo sapiens Human secreted protein sequence encoded by gene 40 SEQ ID NO:101,accession number B24476,Smith-Waterman Score=241.
ccccgcctcgcgagtcctcctccccgggtgcctgcccgcagcccgctcggcccagagggtgggcgcggggctgcctctaccggctggcggctgtaactcagcgaccttggcccgaaggctctagcaaggacccaccgaccccagccgcggcggcggcggcgcggactttgcccggtgtgtggggcggagcggactgcgtgtccgcggacgggcagcgaagatgttagccttcgctgccaggaccgtggaccgatcccagggctgtggtgtaacctcagcggccaggcagtctctgtcctccagccaagttttccctcatcaaaacgatcttcgcagattctgacaggtgaagcctctgggcttcctgaagcccttctccttgatgaaggcttccagccgcttcaaggcacaccaggatgcactgccacggctgcccgtgccccctctccagcagtccctggaccactacctgaaggcgctgcagcccatcgtgagtgaggaggagtgggcccacaccaagcagctggtggatgagtttcaggcctcaggaggtgtaggggagcgcctgcagaaggggctggagcgtcgggccaggaagacggagaactggctgtctgagtggtggctcaaaaaccgcctaccttcagtaccggcaagcctgtggtcatctactcgagcccacggcctgacgctacacatatcaggactttttggacctgcatggtcagctccgatttgctgccaaactcattgagggtgtgttggatttcaaggtcatgattgacaacgagaccctgcccgtggagtacctgggggggaagccactgtgcatgaaccagtactatcagatcttgtcctcctgccgagtgccgggccccaagcaggacacagtcagcaacttcagcaagaccaagaagcctcccacgcacatcaccgtggtacacaactaccagttttttgagctggatgtgtaccacagtgacgggacacccctcactgcggatcagatctttgtgcagctggagaagatctggaactcatccctacagaccaacaaggagcctgtgggcatcctcaccttcaaccaccgcaactcctgggccaaggcatacaacaccctcatcaaagacaaggtgaaccgggattccgtgcgctccatccagaagagcatcttcaccgtgtgcctagatgcaaccatgcccagggtctcagaagacgtgtaccgcagccacgtggcaggccagatgctgcatgggggcggcagcaggctcaacagcggcaaccgctggtttgacaagacgctgcagttcatcgtggcagaagatggctcctgtgggcttgtgtacgagcatgctgcagcggaggggccccctattgtcacccttctggactatgtcatcgagtacacgaagaaacccgagcttgtgcggtcttcccatggtgcccttgcccatgcccaagaagctgcggttcaacatcacccccgagatcaagagcgacatcgagaaggccaagcagaacctcagcatcatgatccagggacctgggatatcaccgtgatggtgttccaccattttgggaaaagacttccccaagtcgggagaagctaagcccagatgccttcatccagatggctttgcagctggcctactacaggatctacggacaggcatgtgccacctatgaaagtgcctccctgcgcatgtttcacctggggccgcaccgacaccatccgctcggcttccatgggactcacttcacctttgtcaaggccatgggatgactccagcgtcacggagcaccagaaggtgggagctgctgcgggaaggccgttgcaggcccaaccgagggttacaccgaccggggccatccgcggggaggcctttgatcgacacctgctgggcctgaagctgcaggccatcgaggacctggtgagcatgcccgacatcttcatggacacctcctacgccatcgccatgcacttccacctctccaccagccaggtccctgccaagacagactgtgtacatgttcttcgggcccgaggtccccgtacggctgacggtgttctgctgatgaaccccatgggaggcccacatcaacttctccctgtcggcctacaacagctgcgcggagaccaacgccgcccgcctggcgcattacctggagaaggcgctcctggacatgcgtgccctgctgcagagccacccccgggccaagctctgagcccctaggactcaggcctgccaatgccacagccaagcccaccctaggatgggccacccaccagggctcagctccttggttccctcttccttggttccctcttccctggtccccccaaatctactgagccacggaccgcatcctccagggggcctgcaggccccagccaagtgccttccgtgggtcatcccagcacctgcccagggcccgaccctggggctgagttgcaagaggctgagcaggacgtttaggcccgggcccctggcacgtcctcaaccggtgccctcctctggggaaagggaaccagccctcccagagcaggagactgggcaaagaagctcttttgtctcaccagctcagccccggccactccctgccaaactccatgacccaggccaccattttgtaaccctgctttcccaaactccccaggaccctggagacaggattgtctggggccgaggggcccagggtgtgaggtttcacctccgttgcggctgtgctcctgtggataacattgctagcgagccgcctctggttccactcagcttggttcctgcccccgccctgctgtatgatattaatgtggaaggtcatcaataaagcgggaattgtgttggtgaaaaaaaaaaa

SEQ ID NO: 1128 - DNA, 584 bp, Homo sapiens
  SIMILAR (1)..(459): 1001254mologous to synthetic construct chloramphenicol acetyltransferase,accession number A02739,Smith-Waterman Score=856.
atggtagaggtcgagttagaaatcagaaaggttggtgctttgtgtgtgggggtgaagggccacaagggaactttgaggggtggcagaaatggtctacatcctgaagtattcctggtgcacacagttgttgcaatttatggaactgtccacaaggcagggctcacaatgtgggggaattcctcaggaataagaatggaattcctcaacattgtggaggaacgttgtgggaaattcctcaagaaaaagaagctgtttaataaatgcactgtggctacacagcaggaaaaatgcctccttcccctgcactgggccctaggccttgaggaagaaacctgggttcctgtgacagcccctctctccccagctgtcacttttcccgtgcgtgcactgggtagggaaggccaacaactagggagctacccaatgttaccagagccagggggcccagagccagcagttcaaggcacctcggtgcattgcaccagggagagcctgtgtcactcgtcatgcctggctttggaggagcagatgtctgcaagggcgctgtgggaagcttctgatcagaatcagctctgacgcagtga

SEQ ID NO: 1129 - DNA, 129 bp, Homo sapiens
  SIMILAR (128)..(84): 601254mologous to Salmonella typhimurium TrbA protein,accession number AF112468,Smith-Waterman Score=41.
ttcttttattttttgcatcttcatccttcagagctgggttcatatgtcatgtctttagaaaaaccatccttggccttcccatttctgcagataaacagaaagttaggtcaggtcatcctgtacgatata

SEQ ID NO: 1130 - DNA, 1107 bp, Homo sapiens
  SIMILAR (583)..(864): 241254mologous to Danio rerio protein kinase CK2 alpha',accession number X99964,Smith-Waterman Score=87.
atgttgtactggcttatgcctaaaggcaaattactctggattgccagtttcctaaccaggctacaagggatccagcatactctacccagagtagaggaaaaatctatacaatcagtaaaagatgacaatatctaccatccgcacccaagacccagaattgctgtagttggaagcagctccacagtaatttcctatagccctggggagtatgcttttaccaatggcacctctagatgcccttcactctctcttgcagcagggccaagactgataacgaatggcccgtgggaagcgcacgaagtccaacgtgaatcaacgatagcactaatgaaattgcttcaagttctagagcagaaggtgaggctgagagaaggacattcactgggaaccgtcaagatgtcaaaaaatatcaatcccatgggccatgtttccaatcctcctacctcctacccagacgaactcattacgaaacaggtttgtcctggatcccatccaaaaagacctggtgaagtcaagcacaacgaggaggttcccacttctcaggatagagacacttgtacaacccaagaaacacagtactcagtgagaaaaataatttctgctgaagatgattttacagtcaaaaattacaatcatataaggaacaagttcactataccatccagaaaggggcagcaagcccacagagcctggctgaataaagccattcctcagccaatgccaacttcagcaacttctctgttagcagctcttgttagagctgcaaagcaccgaaatcaacagccccaagacttagctcagtcctcttctcatcacatctaccttttcatcacaattacatttggcagtcttcgtgattccgagctgaaaagcaaaagaggccctgaccctcagctgtcgctggagctcgagatggtggccaaggcgaaagcagtcaagccggagaactcccgaaggtggttctcaggtaaccagctgggctcaattataaacagcccaaagaaaggctctgctgtcctggagggcacctttcaagagaaacaaaaatgggacgctcgcttaacaaaaggggactgtttggccaccaacgtcctgaacagggtctga

SEQ ID NO: 1131 - DNA, 421 bp, Homo sapiens
  SIMILAR (364)..(89): 381254mologous to Caenorhabditis elegans proline- rich,accession number U39852,Smith-Waterman Score=124.
tttcgttgttgtcaagatggcggctgcagggttgctgccgccccatctgctattgcccggcgaggtcgccgctgcctcagctgccatcgccgctacaggcaccagtgccgctgcgcgggagctagggctgtcgaggccaacccttccgcgcccgtgacgcggggcctgagagacggagtgtagggaggggccgagcaggaggaggaggaagccggagctgccatgagggaggttctgggggcgagcagacaggcggcgctgaagtgaaagatgctggcggggaggcccggaacccggagcgcggtcggggaactgggcactgaatcattggacaacctcgacagagcccccctcggccctcgggagagcggcgggcatcaccgacctggctcttacctagatatgagaatccatctggaga

SEQ ID NO: 1132 - DNA, 703 bp, Homo sapiens
  SIMILAR (400)..(651): 351254mologous to Conus arenatus conotoxin scaffold VI/VII precursor,accession number AF215070,Smith-Waterman Score=72.
gaccgtatccatcaggaaaacaaagccattataagaattatgggactaaggtacttatcacaggaattacattttaccaaatataggagctgggaaaatgagggtctggaaaaggaaaattgaaggatcagagtatatggggcaagggataaaaatgtagcctgctctactgtggcgtgccagtcaggatcagagaaaggatgactgagcaggctgtttgaagcactggtgtgggtaaacaaattgaagcttgcagggaaatctgataatccaagcatgcccaagctgctgaagtggaactatgaagggggagcttgctggggaaatctatggaaactgccgaatgtggaacgactctgcttttctgaagctactgtcttcaggtctgcagcccagtgcctggtggtcggcctagggctgctgttggtcagcagggcctgtagtcatgaagatgctatagagtggagaggagactcttcagtagttaacattgtagaagatggatctaatgcaaaagatgaaagtaaaagtaatgatactgtttgtaaggaagactgtgaggaatcatgtgatgttaaaactaaaattacacgagaagaaaaacatttcatgtgtatcttccacaatgttcagtcactgggaacagtctgcggggagaaaggcattgatgtgaacaccatggtggatgcaggaggtacagcag

SEQ ID NO: 1133 - DNA, 828 bp, Homo sapiens
  SIMILAR (714)..(586): 461254mologous to Colobus guereza protamine P1,accession number AF119233,Smith-Waterman Score=73.
atgcccaagctgctgaagtggaactatgaagggggagcttgctggggaaatctatggaaactgccgaatgtggaacgactctgcttttctgaagctactgtcttcaggtctgcagcccagtgcctggtggtcggcctagggctgctgttggtcagcagggcctgtagtcatgaagatgctatagagtggagaggatgcaggctacactttgatccccttccccacgaactcccagatggacaaaggacaggggaccaggaaggcaagaaaatggccactaagagccactttcatcgctcaatagaaccctccacatacaccacccttcagtccgttcgtgtgatccaattcttcctccacaccggacaaggattcagcatgcactggagtacaaagaacatcctagaaattggagacaaaggggataagaaaacagagttaacttggaaagagaagacactcatctctgacaagactgaagatgattacacaacaccatcattgccaaccaagtcctttgggaatacaaaggccccgcgtcacgggcgcggaagggttggcctcgacagccctagctcccgcgcagcggcactggtgcctgtagcggcgatggcagctgaggcagcggcgacctcgccgggcaatagcagatggggcggcagcaaccctgcagccgccatcttgacaacaaccgacggcgcgtccttgacaacggaaacctgggaggagctacaggtcggggcgggacgatgtgcccgaagcagccaatcgcaggctccggcggcccctccagcttcgagcggcgggtggcaacccaagcatccctag

SEQ ID NO: 1134 - DNA, 1110 bp, Homo sapiens
  SIMILAR (781)..(1356): 281254mologous to Saccharomyces cerevisiae prolin rich protein,accession number D78487,Smith-Waterman Score=132.
atgggacttctgatatgtcttggagccttggatgccaggccggagcgggctccctcagcttgcggggaggtgtggagggagaggcgtgggcgggaaccggggctgcccacggtgcttgcgggccagcgcgagttctgggtgggcgtgggctcggcggccctgcactcggagcggccggctggccccaccaccccgggcagtaaggggcttagcacccaggtcagcagctgtggaggacgcacagggtcccccagcagtgccagcccactggcgctgcgctcgatttctcgctggggccttagccacctcccccatggggcagggctccggacctgcagccccgccatgcctaaacctccccactccgccgtgggctcctgtgccacccgagcctccctgatcagcactgccccccgctccagggcgcctggtcccatcgaccacccaagggctgagacctgccaacgcacagtgcaggaattggcaggcagctccacctgcagccctgtgcaggatccactgggtgaagccagctgggctcctgagtttgaagggagcgggccaaagcgcagagccaatgggcgcggggcttacggtctccgggatacgggtgtacacagcagcggcgtcgcggcccgcagccccgcggcggcggaaagatgggtgcaaggattccctaagcagaatgttcattttgtcaacgacaacaccatttgctacccttgtgggaattatgtaatatttattaatattgaaaccaagaaaaagactgtactgcagtgtagtaatggaattgtgggcgtcatggcaactaacatcccctgtgaagttgtggctttttctgaccggaagctaaaacctctcatctacgtatacagctttccaggattgaccagaaggaccaaattgaaagctgaccaggagagggacccctttttgtacctcttccaggttgctgaattcctgacgcagggctgccttcagatcagtgcattctctcccacatctcaacgctaccaggcactccttggtcaaatgtgggacctaatcagaggacacaggttctcagtggagaagtctgtggaaacttccagttcctgttctgcctga

SEQ ID NO: 1135 - DNA, 936 bp, Homo sapiens
  SIMILAR (1)..(936): 991254mologous to Homo sapiens unnamed protein product,accession number AK026597,Smith-Waterman Score=1642.
attgaaaccaagaaaaagactgtactgcagtgtagtaatggaattgtgggcgtcatggcaactaacatcccctgtgaagttgtggctttttctgaccggaagctaaaacctctcatctacgtatacagctttccaggattgaccagaaggaccaaattgaaaggcaacattctcctggactacactttactttcattcagttactgtggcacctacctggctagttactcctctctcccagaatttgaactggccctttggaactgggaatcgagtatcattttgtgtaagaaatcacagcctggaatggatgtgaaccaaatgtcttttaaccccatgaactggcgccagctgtgcttatcaagtccaagtacagtgagcgtgtggaccattgaaagaagtaaccaggagcattgtttcagagcaaggtcggtgaaattacctctagaagatgggtcattttttaatgaaacggatgtcgttttcccccagtcgttgccgaaagatctcatctatggtcccgtgctgccactgtcagccattgccgggctggtaggcaaagaggcagagactttccggccgaaagatgatctatatcctttgcttcacccgactatgcattgctggactccaacaagtgacttgtacattggctgtgaagagggtcatcttttaatgattaatggagacaccttgcaagtgactgtacttaataagatagaagaggaatcgccattggaagacagaagaaattttatcagtccagtaaccttggtatatcagaaggagggcgtgctggcttctggaattgatggctttgtgtattcttttattattaaagatagaagttacatgatcgaggattttcttgagattgaaagacctgtagaacatatgacattttctcccaattatacagtgttgctgattcaaaca

SEQ ID NO: 1136 - DNA, 663 bp, Homo sapiens
  SIMILAR (226)..(297): 911254mologous to Homo sapiens Human secreted protein clone dd119_4 protein sequence SEQ ID NO:108,accession number Y53051,Smith-Waterman Score=116.
tccttgtagttcttccccgcgttctatcctttatcttctagagaccttggtagttcccataggaatagtgctttacggagtctaatggtgatttcttaggtaaagacaggaaacatttttttcttttttacctacaagttccatatcaaaaaatgaatgtaaacttttcatgcagttttacacattgaaaatgcaggttattttaattccattccatttttcagaattctcaatcacaatcctctgacaactgttgaagatccgtatctctttaaattgccagcattaaaatatctgtaagtactatagtactctcatgagtcaagagatgatttatactctttttaaatttttcatcaaagattaagtattttgcatttaggctaaaatgtcataatttaaattttaactgagttattgaaaaaaagttattggcgaagaaaaaaattaagaggatgtataatggtcaagacagccagcaggggaaagagaacagtgttgaagaacccatatagatttggaacatgtagacacatggaggaatattacttaaccaagaaagcaaaggggaaaaggtgttcattattctaaaaaggaagaaaagagtaaataatcaagatgggtcaatccaatatgaaaatgagaagtaagataatggtaaaa

SEQ ID NO: 1137 - DNA, 647 bp, Homo sapiens
  SIMILAR (500)..(12): 771254mologous to Homo sapiens Human gene 46-encoded protein fragment, SEQ ID NO:371,accession number Y86456,Smith-Waterman Score=604.
cgccctgttccctcctgatgctaggccttcctacctctttgaagtgccttttctggatgctccttggggccaataaggactctcttcactctctgccggttttggcctacagtttgaatctttgccaggctgtttcctgtggttggcagtttaattaacggtagtaacagtgatttcacttataggttaaccgctgagaaataaggtaacatgcaacgtagtgtactgataaaatcactctcgtcattggtgtatagttgctcactcccaaagcctgacaagttgatgccagttctgtttgagggctcctttggctcaacaatcagctcagtgcttgtgtagttcttccgggcttgtaacaccttcatgaacgctccttatggattccctacctatgcttcttcagctgtcaaaaaagaagagactgctttgatcatgaaagatgatgggatgggatgcatcagtccatagctgtacaccccagtcacgcagagtaggagttcagcaaacattcgagttgcctttcagagagggagaaacacacacccaatcttaacccacaatgaggcagaaaagtatactcaaaatcattagtatttcagtcacaattaatgaaaagatgagttagtcagtatagccgtatcctg

SEQ ID NO: 1138 - DNA, 795 bp, Homo sapiens
  SIMILAR (193)..(339): 871254mologous to Homo sapiens Human secreted protein clone dd119_4 protein sequence SEQ ID NO:108,accession number Y53051,Smith-Waterman Score=215.
  misc_feature (1)...(795): n = a,t,c or g
atggcgccgccgctctgcccaccccgcgcaccccaggcggccgccgagcccgcgcgcgcgccctgtggagcgaggacgccggggacgcggccagggacgcgcgctgaaaaacagaatggttgtgtaggtcttcaaagtacagtttctgctgaatgcctatcacctttgcactattgtaaagttgaaaaaagaattctcaatcacaatcctctgacaactgttgaagatccgtatctctttaaattgccagcattaaaatatctagacatgggaacaacgctagtcccacttacaacacttaaaaacattctcatgatgactgttgaactggaaaaactaggaccgcctttcattgcattcagctgtgatggtagcacgaacacagctgaagaagcatcggtagggaatccagaaggagcgttcatgaaggtgttacaagcccggaagaactacacaagcactgagctgattgttgagccagaggagccctcagacagcagtggcatcaacttgtcaggctttgggagccacctgatgaagcttctcagtgggcagcaggaagtaaaggcatccaagatagaatgggatacggaccaatggaagattgagaactacattaatgagagcacagaagcccnagaatatgttgtcaccgaaggtcattacaagaagatgaagaaggattctcaaggggcattttcagatttctgccatggaggggatgctcttcgcgaagggagagtcagggacagcgaagccccaacggaggaggaggagagtgaagccctgccatag

SEQ ID NO: 1139 - DNA, 896 bp, Homo sapiens
  SIMILAR (370)..(1032): 931254mologous to Rattus rattus ribosomal protein S2,accession number X57432,Smith-Waterman Score=1051.
gctcggcgtgcattcaacttagggccaactgttaatcaatctgagacaaaatgggaatacaacaacgtgggcactgacctgtcccccgagcccaaaagcttcaattacccattgctctcgtccccaggtgatcagtttgaaattcagctaacccagcagctacagtcccttatccccaacaacaatgtgagaaggctcattgctcatgttatccggaccttgaagatggactgctctggggcccatgtgcaagtgacctgtgccaagctcatctccaggacaggccacctgatgaagcttctcagtgggcagcaggaacgtaaaggcatccaagatagaatgggatacggaccaatggaagattgagaactacacttaatgagagcacacgaagcccagagtgaacagaaagatgaagtcgcttgagttcacaaaagaacttccaggatatggctataccaaaaaaactcatcttggcgttaattgtgactggaatactaacgattttgattataacttttctgcctcattgtcatatgttgtcaccgaagggtcattacaagaagatgaagaagcgatcctcaaggggcattttcagatttctgccaaggaggggatgctcttcgcgacggcggagtcaggatggactttcctcatttggacagccgctctggtttaaagatatgtacaaacctctcagtgccacaagaataaataatcatgcatggaagctgcacaagaagtcatctaatgaggacaagatcctcaacagggaccctggggacagcgaagccccaacggaggaggaggagagtgaagccctgccataggaggagaacacagcccacctcaggcctcctgcaaaaatacatagaataaacaacaacagttactaa

SEQ ID NO: 1140 - DNA, 371 bp, Homo sapiens
  SIMILAR (26)..(97): 401254mologous to Drosophila melanogaster CG12675 gene product,accession number AE003578,Smith-Waterman Score=53.
ggcacgagattatataaaaaaagcatggaaactgggcattttaattagcaagtacagccttgacacaaataaaggcatggctttggttatgcagtgcatttatttggttttcttgaaataagaaaaaaagatatcttctccatcaccagagttgctgagtttgacagtgtgaatgagatgacctctaaggcctctacttatagatctgcacggttgggcctgggagctgtactacctcagctggtgggtgataacttactcacagtctgtgctgtgtcctgcactgtccattatctgcaggggtggtactgctgtccccagggaagagaatgctgtccacaaagagccagccatttatactcttaaaagaa

SEQ ID NO: 1141 - DNA, 654 bp, Homo sapiens
  SIMILAR (601)..(503): 411254mologous to Homo sapiens Human secreted protein, SEQ ID NO: 6918,accession number G02837,Smith-Waterman Score=68.
atgaccagcgagagtcctgaggtcaagagctgtgagcccaccacaaaccacagggaaactatcagggtagatgagcagagaaagaaaagcagcagaccaaccactacagatttcagccaacacaaatttctccccggtgacaatgccacatggaactgtgagtccatcaaatctctttttgttgataaattacccagttttgggtatgtctttatcactagtgtgaacacagacaaatacatcctggatgagcctggtgggcctaatgcaattaaaagggtcattgtaagagggaagcaagaaggtgacaaatcacacaggaatcccagtgggtgtgtggcactgagaggcttcgggcagggctatttactaaataatgtagaattatttgatattacaacaccaggatacagccactctggcagtataaatggctggctctttgtggacagcattctcttccctggggacagcagtaccacccctgcagataatggacagtgcatgacacagcacagactaacacacacaagcacgtcctcagagaaagacgtgggtgcttctttatgtggcttcttaagtccaccacttgtgctcggcaaagtcactgcactgagcattgtgaatgaacgatcaatttcacgaaatacttag

SEQ ID NO: 1142 - DNA, 3294 bp, Homo sapiens
  SIMILAR (523)..(786): 971254mologous to Homo sapiens deleted in oral cancer 1 (doc- 1, alias DORC1),accession number AB006077,Smith-Waterman Score=438.
atggggatctgcaaagacgatctggcaccttcattaggtcgtgccgatgaagtcttcctgctgcaaccggcgcatattccgtggcaggtggcagaagtggcagaagcctgcgttcagcctgcacactggagtggcgatgtggatacgctggcagatatggtggtgaaaaccgctcagcctggcgaccatattctggtgatgagcaacggcggttttgtgacctttcgggctagcttccagtacctgtaccggcagcggcgaatcgaagctggtacggcggctgatattcactttcccaaggcgcaggaagagattcaccggaccctgaatacgcacgaaattgtccggataagatctcccaattggcacattgaccattctacaattttttatcccattgaacattatgagaatcgcgatgtttcggtcgatggtgcggaaaagcgcggcgtgctctactgccgcattgtgccgccgatgaccggaaaagcgattcatgtgatcgcacttgcgatgctcgccgaatgggtgaatgagctaccggacggcgaaccggtattggtggcgggtgatttcaatgactggcggcaaaaagctaatcatccgttaaaagtgcaggccggactggatgagatttttacccgcgcccacggacgcccggcgcgcacgtttccgtgcggagattcatttatgaaatgtagctggcgcgaaggcaataagatccagttgctggaaaacggcgagcaatattatcccgcggtgtttaaggcgattggcgaggcacaagaacgcatcattcttgaaacgtttatctggtttgaggatgacgtcggcaaacaactgcatgcggcactactggcagcagcgcaacgcggggttaaagcggaagtcttgctggatggctacggttcgccggatctcagcgatgagtttgtcaatgaactgacggcagctggcgtagtgttccgctactacgatccccgccctcgcctttttggtatgcgcaccaatgtgtttcgccggatgcatcgcaaaattgtggtgatcgacgcgcgtatagcctttattggcgggctgaattactccgccgagcatatgtccagctacggtccagaggctaaacaggattacgcggtacgccttgaagggccgattgtcgaagatattctccagtttgagctggaaaacctgcctggacagagcgcggcacgacgctggtggcgacgtcatcacaaagcggaagagaaccgccagccgggagaagcgcaggcgaacggatatgccgttgtcagattcggtcgcctttctggatactatctggttaaaggcggcgttcaggtttttgagtaccgccgccgcccgctccacggcaaagtggcattgatggacgatcactgggcgacagtagggtccagtaatctcgatccgctcagtttgtcactgaatctcgaagcaaatgtcatcatccacgatcgtcattttaaccagacgctgcgcgataatctgaacggcattattgccgcaggattgtcagcagcaaagaagatcctcacctggctgttttttatcgcggtgattgtgttgctggtggtctacgccaaaaaagtggactgggaagaggtctggaaggtcatccgcgactacaatcgcgttgcgctgcttagtgcggtcgggctggtggtcgtcagctatctgatttacggctgctatgacctgctcgcacgcttttactgcggtcacaactggcgacgcctttgcatgcctgtccggtcgactctgcttgatccccagagagtggacactgattggccttgtattgctcagcttagtgaagtcattaatgctactgcggttggtctgctggcagtttcgctaatgctggccctgcacgttgtgccttggaaagacattacccgctataacagcgcatggaacacactggtcaacctggcaactctggttgtgatggctaacggcctgactcgttctggttttattgactggttcgccggtaccatgagtacgcacctggaaggattctcaccaaacgcaacggtgattgtactggttctggtgttctactttgcacactacctgtatgccagcctgtctgcgcacatcgcaaccatgctgccggttatttctgcatcaagcgcgcgccaccgaatgtgttcatcgccggaaaccggattatcactggaaacggccgctaaactaagtgaagtcatgccaggagctggcggacgttcctgcctggaacgctacgaatatgccaaacacggtgcctgctttggttttgatccggacgcatacttcggtacgatggtacgcctgaatcaagaaattaaagagagcgaacgcggaaaattccttgcggataattacggtaaaacagtgagccgccgtgactttgacgccgcctttgccaattttaaaggttattattggtataactttatggagtatattgaaaacattaatgcgtgtgatgatgttttttctgagtattgttttgatgatgaaaatataagtgtccagccagagcggataaatacgccgggaatatctgatttggattctgacattgatttgtctgggatatcttttattcagcgtgaaactaaccaggcattaggattaaaatatgctcctgtagatggcgatggatattgtctgttaagagctatactggttttaaaacaacatgattattcatgggcgctggtcagttataagatgcaaaaggaagtttacaacgaattcattaaaatggttgataaaaaaacgatcgaggctcttgttgatacggcattctataatctcagggaagatgtaaagacgttatttggcgttgatctacaatctgacaaccaaattcaggggcagagtagtcttatgtcatggagctttctgttttttaaaaaacaattcattgatagttgcttgaataacgaaaaatgtatcctgcatttacccgagtttatatttaatgataacaagaacttgcttgctttagataccgacacgtcggataggattaaagcggtgaagaattttcttgttgttctttcagatagcatttgctcattatttattgttaatagtaatgtggcatcaatctccttggggaatgaatccttttcaacagatgaagatcttgagtatggttatttaatgaacactggcaatcattatgacgtttacctccctcctgaactttttgctcaggcttacaagttaaacaataaggaaatgaatgcgcaactcgactatttaaatcgttatgcaatttaa

SEQ ID NO: 1143 - DNA, 862 bp, Homo sapiens
  SIMILAR (277)..(384): 801254mologous to Homo sapiens PRO1546,accession number AF116638,Smith-Waterman Score=174.
tgcggagattcatttatgaaatgtagctggcgcgaaggcaataagatccagttgctggaaaacggcgagcaatattatcccgcggtgtttaaggcgattggcgaggcacaagaacgcatcattcttgaaacgtttatctggtttgaggatgacgtcggcaaacaactgcatgcggcactactggcagcagcgcaacgcggggttaaagcggaagtcttgctggatggctacggttcgccggatctcagcgatgagtttgtcaatgaactgacggcagctggcgtagtgttccgctactacgatccccgccctcgcctttttggtatgcgcaccaatgtgtttcgccggatgcatcgcaaaattgtggtgatcgacgcgcgtatagcctttattggcgggctgaattactccgccgagcatatgtccagctacggtccagaggctaaacaggattacgcggtacgccttgaagggccgattgtcgaagatattctccagtttgagctggaaaacctgcctggacagagcgcggcacgacgctggtggcgacgtcatcacaaagcggaagagaaccgccagccgggagaagcgcaggcgaacggatatgccgttgtcagattcggtcgcctttctggatactatctggttaaaggcggcgttcaggtttttgagtaccgccgccgcccgctccacggcaaagtggcattgatggacgatcactgggcgacagtagggtccagtaatctcgatccgctcagtttgtcactgaatctcgaagcaaatgtcatcatccacgatcgtcattttaaccagacgctgcgcgataatctgaacggcattattgccgcaggattgtcagcag

SEQ ID NO: 1144 - DNA, 1447 bp, Homo sapiens
  SIMILAR (218)..(1285): 1001254mologous to Homo sapiens 3-ketoacyl-CoA thiolase beta- subunit of trifunctional protein,accession number D16481,Smith- Waterman Score=1820.
ctactccgttggaggtagccacggacgtcccagcgccgatccctgtacgccatgttcattcagatagcgatccagctcgaccattcccgtccatcgattttcgcaccacagcggagcaagcagcgtcgggcgacgggcgctggcggaaatgcggtggtagatcacttccggtggcgtatggcgaatcatttctccggcagtgagcgtgtaatcctccagttcaataccgttcaaacgccccgcttcccaggctttcgccataatgctgcctttcacaatatgcagcggatgcagctttatgccgtccacgccggtttcaaccactcgctccagcgtttgcaaacattcagcctgcccttcgccaggcaggccgacaattaagtgggaacacaccttcagcccgcgctgacgtgccagctgggttgtacgctgataacaggcaaaatcatggccgcggttgatgcgatgcagagtttcgtcgtgggcggtttgtagccccagctccagccacacttcgtaaccctggtccttatattcgcaaagcagatccagcaccgcatccggcacgcagtccgggcgggtacccacacacaaaccgacaatatcggcctggctcaccgcctgctgatacatagaacgcagcacctgaacttccgcaaaggtgctggtatacgcctgcaagtaggccagaaagcgttcagcgcggttaacacaacaccaaccatagaggatccccgttttggcgttatcccaataatgggtattcggtaccacgaccagtttttcattgactacgcgctctttaagaacataagcgccattgccgatcagatttccgggtttcgtccactctttaccgctttctacgttggctttttgcaccgggaagaaggcaaagttagcggttaaattcacaaaccacggcaacggtttatcaagctgaattttcaaagtatgggcatcaactgcggtgacgccaagctggtcaggcgtagctttaccatcaataatcgcctgtgcgttgttgattcccgccagcgcggcaaaccatgcaaatggcgacaatgtttttgggtccaccagacgttgccagctgtagacaaaatcttgcgccgttaccggtgtgccatccgcccattttgcgttatcgcgcagggtaaaagtccagatacggttgtcattacttttccactgagtcgcaacgccggggacaatctccccctttttcgttctgattcaccagaccttcaaacagatcgcgaatgacctgaatctctggcaggcccacggctttagcgggatccagcgacgcaggctcatctttaatgtggcgcaccagctcctgcttctctgccagtactgtgccgctcggaacttctgcagcatacgaaagagaaatgctgctgaccaacagcgcacaacacgtgactgaaacagagtgcttcat

SEQ ID NO: 1145 - DNA, 930 bp, Homo sapiens
  SIMILAR (16)..(333): 951254mologous to Escherichia coli SmtA protein,accession number D90730,Smith-Waterman Score=510.
atgcaccggctcgcgttggataatctggcggaaatgggcccgcaaaaactgcgtgtgctggatgctggcggtggagaagggcagaccgcaatcaaaatggccgagcgtgggcatcaggtcattttatgcgatctttctgcgcagatgatcgaccgcgcaaaacaggcggcagaagcaaaaggtgtgagcgacaacatgcaatttatacattgcgccgctcaggatgttgcttcgcatttggaaacgcccgttgatctgatattgttccatgcggtgctcgagtgggtggctgatccccgcagcgtattgcagaccctctggcgggaatgccgaaaaagaaaaaacggacgctttcgccagattatccacgcgacccggcgcaggtttatctgtggctggaagaagctggttggcaaattatggactattgctactggttcggaacgtattgtattaagcattcgacttgatctcctagagttacgttgcacaattaaacatcggacgatttgttgccaggcttttacacctgttatggccttcccgggcttcgttattgtttgtggtggaacttgtgagcgggataaccaatttttcgacaacaggaaaaccaaggcttatggaccccattggatttaccggaatttccgagcttctggcttccagtactatgggtccgcgccctctgttcgtctcctccctcgtttctttcgtctgcccgtctttttttctgtctttgtcggtcgcgtcttcgctcgcttcgccgtggcgccgggcgctctggccgtgtcggtggcgtctctgcgggtgctcgttggctgttcggtttctgtggtggtgctggttgctgtcgttgtgcttcgaggcaatgttgttcagggtcaattggcccgtattgtgtttgacgggtgtatcctccacatcgcttga

SEQ ID NO: 1146 - DNA, 3969 bp, Homo sapiens
  SIMILAR (26)..(526): 431254mologous to Homo sapiens Human secreted protein, SEQ ID NO: 4800,accession number G00719,Smith-Waterman Score=159.
atgtctggcgtggatggagtgtcgattgctacctgcgactttgcgcaagaagaatacgacacgctgtttggcgaagtagtatcagcagcgcagacgcacgggtatttgtcgaaggccgctggcagtttgatgatgataactcaatacgttgcatcatttaggttctttatcaagcctcccatttggggcgcgatttcggcatcccagatagcttgccaagttctggttgaatctgctagtatgacgcaactgcattatcgaagctgtgctctaactgtatcagcattgacgagaatctttaagagcgtggacgcccgagaaccggcgtgccgtctggcgtcatcgggcgcagaccagtcagaaagtcgcctgctcgacatgaccgccgcgtggatagagatcgcgaacaccatctccagcgtttcacgacgcggttgcaacagctcggtattaaaacaacaatctccgtcattccggcaacacgaatgcggttatcgaaacgggtatggcgattttgtaggtttcatcaagaatggtggataccggggcaccatctcctgcgcaatgggaatggccgcccgtcagttttgcgccacttctgccagcgcgggctccacttccgccaggcggctggattcagcagctgatacggtacgccggcatcttccagcacggcgatatcgcggtcgcattttcatactgttgttcggatgtacagattcgttgaaggcttatgacatcaatctgacggacctgctggaagaaggatcgacccggcgctgggtaacggtggtctgggacgtctggcggcgtgctcctcgactcaatggcaactgtcggtcagtctgcgacgggttacggtctaactatcaatatggtttgttccgccagtcttttgtcgatggcaaacaggtgaagcgccggatgactggcatcgcagtaactacccgtggttccgccacacgaagcactggatgtgcagcatggcatcaatgcggaaaaactgaccacagttcctatccaaacgacaaccatactgccggtccaaagctgcgcctgatacagaatacttccagtagtgcctgttcggtaacggatactccgccgcaaccagaatcagcaatatcggcagaatcatcacccgccagcggcccactgttttcggtagctgacgcgaggctgccacggccctgtcagcagttcccttccgtggtaatggcgggcagagctgtaacgtcaggcgttcagcgtctgcgccagcccatgctgatagcttttccggtgcatgccgactacgataacccgttgcgcatcgcaagccataaacccacaggaatggacatccagtccggcgcgacggtagcgcgggtgatgccgttttctgcaaccactgcgcaatgttgcgcatatgctgttggtgaatcactgctcggttgccagttgctggtcgatattcaacggggcgaaatgcaggtcatcatatcctgcttcagctcctcttccacgttcctgtccacgaatcatagccgctattttctcgccaatcataattgtctggcgttcaaattcccggtgataatcttcggcataatcgacgcatccacacacgcagcccttctaacccgtgtacgcggccttcgccgtcaaccacggcatctcgtcgtaacccattttgcagttaaacagaatcgccggatgctggtgcgggtccgggatttaatccgcacatgcccacggctttgcgagcgcattgagccgagtggcactggaaaccgtgctctttcactgcattcgagccgttatagttatcgctactggcaggaaatggtactgaatattcggccacgcaaattcctccggctgcgaataaatccacctgcttcaaagtggttgctggcaccaacgcagtgccgccaaacagccactccgcaccgattttcggctggttccaccacgcagggcaggggcaggcagtcaggtagctccagttctccagaccgggttcttgcgcccagttatcgagatcagcgcattgccacggatgtagcacatgccgttgatcagcgacgatccaccagacctttaccgcgtccgcactccatgcggcggttattcataaacggtcaggttccgtttcataggcccagttgtagcgtttaccctgtagcgggatgccagggcagcgggcatctgggtgcggaagtcaaagcgatagtccgggcgcccgcttcaagcagcagcacggagcagcttcatgctgtagtgactctagaggatcccccggtggcccggctcaggatttcaccacctttaaagatggtcagacggcgatgtctatcctgtatgcaggctgagcgcgaactggtgcaggactgccgctcactggcgcttttgcgctgcgtggtattccggcgctaccggctggcggtgcgcatattgcgtgacgttccaggtcgatgccgacggtcttttgagcgtgacggcgatgagaaatccaccggcgttgaggcgtctattcagcgaaatcgcttcgatgatcaaagactcaatgagctatccgagcaggacgtaaaagcccgaatgctggcagaacaaaaagtagaagcgcgcgtgtgctggaaagtctgcacggcgcgctggctgctgatgccgcgcgttaagcgccgcagaacagagcgtcgttatcgatatttcgggaacgttcgtgaattggtgttccgttcactatgtaatcgtacctctttcgcctttgcgggtatgacgcctgccatggcgaagctatgcgaccgtcgcagatgctgtatattcagcttttccagaacaagctttcgcaatggtaaatttgatccagtaagcacggttttggccttttcgccattctgttggctcggtattagcatcaacagctttgtaatagcgtctgccccgattacgctgaactcacgtgagatcgtcgaaggactgcgattcagcgcagtagctatcgcacaatgctcattttggctgacaaaccagctcgtatctcctcgcgctcagacgtgtcaggaaggagtgtcgttaaactcaggctacctcaggaaaaaccgtcctgaaaaaccagacggcgacgggctgtattacgcagtcagtcccaacatccgggcgaactggcgtgtttcattagcccgtagcatgaaccattatccgtcagccactccactggagacgacggaagatgttgccgaagcggcgttccaccgctcccagcatgacgtcctgtactgttcactgttgaagccgccgcgaactcgaacccgtcagagcaccatcgctgattgctttctttcacggccctctgcctgtatgtgcccgtttcgatggcggtacagcaggttttcgctcagcaacagcgcattctggcgcatgatccgctctccgataacatggtgtatacggagagcacatccgtatcatcagtgtgacgactgcggcggccatccatccagtatcggttcgtctgagaatgacgtgcaactgcgcacgcgacacccggagaaacggctgactaagcttactccccatccccgggcaataagggcgcgtgcctatccacttttttgcccgtccatattcaacggcttctttgaggagttcttttccatcgttttcttgccgagcaggcgctggagttctttaatctgctcatggcggcagcaagttcagaggcaggaacaacctgttctccggcggcgcagcagtaagacttccttcctggctacgcgtcagcccggcggtcatccctgcctgatgaaaaagctgtctgccatcacgaacagatgtttcagcccacgcgtttgcgttgctgtccgcaactgctcaccgagcccggaccgcaaagcgtcaccggtgaacgctaaatgtttttacccgttgcagattcagggtatcgaacgcctgaagagcgcggtctgcaattcattttgcatatag

SEQ ID NO: 1147 - DNA, 4173 bp, Homo sapiens
  SIMILAR (123)..(1): 851254mologous to Homo sapiens Human secreted protein, SEQ ID NO: 7217,accession number G03136,Smith-Waterman Score=175.
atggagctggggcgcgggattaaaggactgatcggccatacccagtcgtgtcgtctggcggcaagaacagtggcgaaccgtattgcggaagatctgaaacacggagccgggcggttgcatcggttacaaagtgcgtttcagcgatcaccggaagaagacacaaacgtcgtgagacataacgtccctggggctgcacacagtcggacgcggttcagaacgttctccggtattgctggcggctggattacaacccaactggcgataaagaagcgccagtgtacgcgtgcctgcatcaaacagactgcgtttatggactcgatgaagtcggacatgggcggcgcggcaacggttaccggggcgctggcatttgccattacgcgcggactgaacaagcgcgtgaagctgttcctctgctgtgcggataacctgattagcggcaatgcgttcaagctgggcgatatcatcacctatcgcaacggtaaaaaagttgaagtgatgaacactgatgccgaagggcgtctggtgcttgccgatggtctgattgatgccagtgcgcagaaaccggaaatgatcattgatgcggcgaccctcaccggggcggcgaaaactgcgctgggtatcgcttctatgcactgctccgccaacgttggtgagaaaggcgatgttgcggtgttcttcggcctttccggcaccggtaaaaccaccctttccaccgacccgaaacgtcgcctgattggcgatgacgaacacggctgggacgatgacggcgtgtttaacttcgaaggcggctgctacgcaaaaactatcaagctgtcgaaagaagcggaacctgaaatctacaacgctatccgtcgtgatgcgttgctggaaaacgtcaccgtgcgtgaagatggcactatcgactttgatgatggttcaaaaaccgagaacacccgcgtttcttatccgatctatcacatcgataacattgttaagccggtttccaaagcgggccacgcgactaaggttatcttcctgactgctgatgctttcggcgtgttgccgccggtttctcgcctgactgccgatcaaacccagtatcacttcctctctggcttcaccgccaaactggccggtactgagcgtggcatcaccgaaccgacgccaaccttctccgcttgcttcggcgcggcattcctgtcgctgcacccgactcagtacgcagaagtgctggtgaaacgtatgcaggcggcgggcgcgcagggcttatctgggttaacactggctggaacggcactggcaaacgtatctcgattaaagataccgcgccattatcgacgccatcctcacgagagcgacacgccgcacccaggcgagcagtaccacggggagacaacgacccaagcggagagagaaacacaccgccccaaaccacaaccgacaaagaagccgaaaaaagcaggcggccccacacgacagagcaaggacagaagaccgaagctaaagccgacagcaacaggaaagtgcggcaccagacacgcagcaaagccagcccaagatgacgccacagaggccgagcacaagcagacaacagtcgaacacacgacacggaacccgcgaaatgcgcggcagacaccccccgacaatgccccacataatcatcaggaaggcacgacgtgggctatcgcgttttaccggttcttccggcgtacgcaaatagcgataggtctgaaaacgcggatccagggttggaccaacattcagggtggtttaacatggcccgattctgatcatagtcgagatcaaaggccggaccgacggcctgtaaattttccagtcgagcctgaagcattggacgcccaagcaggaacatttctgaatcaggtaattcctcggcagcgcctgctcaatgctgttcatccggcggtcgtagatggctttcgccacctcttcctgacgcttcacctgagcttcatctggatggtacgcgcggccatgcgcctttcacctcatcatccgatgggtggctggacgctggctggaaaagcaaatactgagttacaggcagatgaccactggcaagactttgcagcgtcatcagcggatcggtcagcggacacgcgtgctcgcaatacacaggctactgtctgtagattgcacgtgcacagatccacacaccaaaccatggaccgctcaaaaacatccccagcacgaagaactgacaaaggcgacgtaacaccagccaacgcacgcatacttcctcgcactaccgcaccggtcaggctcctgatgccgggtcatgtttatcgcgcgctttatccttgcccgctgcacggcataagcgaggatgacgctatcgccagcatccaccggatcttcaaaaatgatgccgcgccggaagatatcgccgccatccccccaccagctggtcaccacggaccatttgcaatggtgaacaatatgaccgacttaaccgcgcaagaacccgcctggcagacccgcgatcatcttgatgatccggtgattggcgaactgcgcaaccgttttgggccggatgcctttactgttcaggcgactcgcaccggggttcccgttgtgtggatcaagcgtgaacaattactggaagttggcgatttcttaaagaaactgccgaaaccttacgtcatgctgtttgacttacacggcatggacgaacgtctgcgcacacaccgcgaagggttacctgccgcggatttttccgttttctaccatctgatttctatcgatcgtaaccgcgacatcatgctgaaggtggcgctggcagaaaacgacctgcacgtaccgaccttcaccaaactgttcccgaacgctaactggtatgagcgtgaaacctgggatctgtttggcattactttcgacggtcacccgaacctgcgacgcatcatgatgccgcaaacctggaaagctgaccaaagccaaacaggatctggagatggaagccctgaccttcaaaccggaagagtgggggatgaagcgcggcaccgaaaacgaggacttcatgttcctcaaactcgggtcgaaacgaccggtggcgcacgggccatccggaatcgggggaactcgaatgggaagacatggcgactggtacaaaaatgggtcacccccggcggccgccacagtggaacaccagcatgcacgacaacccgtctggcggttgaaacccgcgcggccacgcgggttaacagcggaacagaagcagtgttgagatcgacgccaacggcgtttacgcagtcttctactactgcgtccagtttgctgggccagttgcgtctggctgacgtcatgctgatactgacctacgccgatagatttcggatcgattttcaccagctccgccagcggatcctgcaaacggcgggcgatagacaccgcgccacgcagcgaaacgtcgagatccgggaactcctgtgcagccagctcggaagccgagtaaaccgacgcgcctgcttcgctgacgattactttctgcgcggtcactttcgggaactgcttctgcacatcgagatagaaacgctcagtttcgcgggaagctgtaccgttaccgatcgctaccagttcaacgttatgttattcacacagcgcagcaacggtcatcgctgcttttgcggcctgtccggtgtgcgggtaaatggtgtcggtcgccaccagtttgccagtggcatcgaccatcgtcacttttaccccagtacgcagacccggatcgaggcccatcgttgcacgccgtccggcaggggccgccatcagcagatcgtgccgttacgggcacgacgtgatgctctctcacatctgattcagccaacctttattacggaatatccggcagaagtgtccccgctggcacgccgtaatgatgttaacccggaaatcaccgaccgttttgaattcttcatcggtggtcgtgaaatcggtaatggttttagcgaattaaacgacgcagaagatcaggctgaacgtttccaggaacaggttaatgctaaagctgcaggtgacgacgaagccatgttctatgacgaagattacgtgactgcgctggaatatggtctgccgccaaccgctggtctgggtattggtatcgaccgaatgattatgctgtttactaacagccatactattcgcgacgttattctcttcccggcgatgcgcccacagaaataa

SEQ ID NO: 1148 - DNA, 2187 bp, Homo sapiens
  SIMILAR (173)..(48): 831254mologous to Homo sapiens Human secreted protein, SEQ ID NO: 7115,accession number G03034,Smith-Waterman Score=188.
atggcctactcgtggggcgggtatgaatcgttgatcctggcaaatcaaccagaacatatcgccgccattcgcccacaaggcgagatcgattttagcgggaccttgattcgcctgcatattggtctggaagatgtcgacgatctgattgccgatctggacgccggtaaagtgccgtcagctatccacgtaacaccagaagcctacgatggcgggctgctggcaaaagtgcgcgacggggacatcattcgtgtgaatggacagacaggcgaactgacgctgctggtagacgaagcggaactggctgctcgcgaaccgcacattcctgacctgagcgcgtcacgcgtgggaacaggacgtgaattattcagcgccttgcgtgaaaaactgtccgacgacaaatttgtaatcaggcgagagaaaactctgatgaaaaactggaaaacaagtgcagaatcaatcctgaccaccggcccggttgtaccggttatcgtggtaaaaaaactggaacacgcggtgccgatggcaaaagcgttggttgctggtggggtgcgcgttctggaagtgactctgcgtaccgagtgtgcagttgacgctatccgtgctatcgccaaagaagtgcctgaagcgattgtgggtgccggtacggtgctgaatccacagcagctggcagaagtcactgaagcgggtgcacagttcgcaattagcccgggtctgaccgaggcgctgctgaaagctgctaccgaagggactattcctctgattccggggatcagcactgtttccgaactgatggtggggtccggtaaatcacaaacacggcaacggtttatcaagctgaattttcaaagtatgggcatcaactgcggtgacgccaagctggtcaggcgtagctttaccatcaataatcgcctgtgcgttgttgattcccgccagcgcggcaaaccatgcaaatggcgacaatgtttttgggtccaccagacgttgccagctgtagacaaaatcttgcgccgttaccggtgtgccatccgcccattttgcgttatcgcgcagggtaaaagtccagatacgaccttcaaacagatcgcgaatgacctgaatctctggcaggcccacggctttagcgggatccagcgacgcaggctcatctttaatgtggcgcaccagctcctgcttctctgccagtactgtgccgctcggaacttctgcagcatacgaaagagaaatgctgctgaccaacagcgcacaacacatggcctgatttatatgggcaataatggcgaagagctgaaagcgttcaatgttcgtgacggttatggcattcgtgtgcgctcacctctgatattgaagtcgctatcattaccgggcgaaaggctaaactgcgatctgctggaaaaactggcgattgccccggaaaatgtggcttatgtcggcgatgatctcatcgactggccggtaatggaaaaagtgggtttaagcgtcgccgtggacgatgcgcatccacaggcgctgaatattgcccgccagttcggctgtagcgacgatgcgtttatccatcgcgccgaaatgttcctcaaagagctatggatgccagaaattcagcccgacggcgttttgccgcaggatgattcgtttatggctaagccggcgattaatctggcgaaatacaaagcggcggcggggaagcaaaccatactgctggattattcacgcgcagaagtgaacgagatgcagatcctcaaacaagctgatgtggtgatgctcaattacatgctgccggagcagttctcagcggcatcgtgtcttgccaatctgcaattttatgaaccgcgcactattcacgactcgtcattaagtaaagcaatccacggcattgttgccgcacgctgtggcctgctgacccaaagttatcagttctggcgcgaggggactgaaatcgatcttggtgctgatccgcatagttgtgatgatggtatccatgctgccgcaactggcgctatctggctgggggcgattcagggttttgccggggtgagcgtgcgtgacggtgaattgcatctcaatccggcgttacctgagcagtggcaacagttgtctttccctctgttctggcagggctgcgaattacaggtcactcttgacgcgcagcgtattgcgattcgaacttctggcgccgtttcactgcgttga

SEQ ID NO: 1149 - DNA, 1418 bp, Homo sapiens
  SIMILAR (17)..(238): 351254mologous to Oncorhynchus keta pre-pro- polypeptide,accession number X17328,Smith-Waterman Score=81.
atgattgcagccacccagggggctgaacgtcacgcctgggttacagggccgctgggcgagaaagtgaatgccagttgggggatctccggcgatggcaaaaccgcgtttattgaaatggcggcggccagtgggctggagctggtacctgcggaaaaacgcgatccactcgtgaccacttcacgcggcacaggcgagttaatcctgcaggcgctggagagcggtgcgacaaacattattatcggcattggcggcagcgctacaaatgatggcggcgcaggcatggtacaggcgctgggggcgaaattatgcgacgccaacggcaatgaaattggttttggcggcggtagtcttaatactctgaatgatattgatatttccggcctcgatccgcgcttaaaagattgcgtcattcgcgtcgcttgtgatgtcaccaatccgctggtgggcgataacggcgcatcgcgcatctttggcccacaaaagggagccagtgaagcgatgattgttgagctggacaataacctctctcactatgccgaggtcattaaaaaagcgctgcatgttgatgtgaaagatgtccccggtgcaggagctgcgggtggtatgggcgcggcgctaatggcgtttcttggtgcggaactgaaaagtggtattgaaatcgtcactacggcgctgaatctggaggaacatattcacgattgtacgctggtgatcaccggtgaagggcgtattgacagccagagtattcacgggaaggtaccgattggtgtcgcaaacgtggcgaagaagtaccataaaccggtgattggcattgcgggtagcctgaccgatgatgttggcgttgtacatcagcatggcattgatgcggacttcagcgtattgaccagcataggtacgttggacgaagcattccgcggggcttatgacaatatctgccgtgcttcacgtaatatcgccgcgacactggcgattggaatgcgcaacgcggggtgacaagggcgcgcaaaccctctatactgcgcgccgaagctgaccacacagtcgccgcttcgtcgtcgtcctctttgagggagacttccggaggggaggaaagtccgcccttcttaggacgggttgcctggtgtgcctggccgctaaaacccaccaccagtactctctttcagtcacccgccctgtgccccggcggtgcaggttcgcatccaagcgacgcccccccgtcgtcagtctgcaaatagaccgctcagaggcactcgctcagtcggtcacaaccttgcctctacgccctccttcgcagcgctggcgaggctggccatcacgaatcagttgctccgcacgaccgatgcgctcgtcccagtcacctctgttcccatcttttcgggctcgcccccgcactatgagccccgcgtctcgcttcggcg

SEQ ID NO: 1150 - DNA, 1241 bp, Homo sapiens
  SIMILAR (1989)..(4): 761254mologous to Homo sapiens putative p150,accession number U93569,Smith-Waterman Score=2443.
atgggcgcgcacgaagttcatccgctgcatgtggaaaactggcccgatacctcgcactacgagtttctcgccgacactatgtggagcgattttgcctacggtcgcaatgccgtatacccggaaggcatcacggcaacgccgtactgtcgcgttatcccattgaacattatgagaatcgcgatgtttcggtcgatgcgcggcgtgctctactgccgcattgtgccgccgatgaccggaaaagcgattcatgtgatgtgcgtacatctgggcctgcgtgaggcgcaccgtcaggcgcagcttgcgatgctcgccgaatgggtgaatgagctaccggacggcgaaccggtattggtggcgggtgatttcaatgactggcggcaaaaagctaatcatccgttaaaagtgcaggccggactggatgagatttttacccgcgcccacggacgcccggcgcgcacgtttccgtgcggagattcatttatgaaatgtagctggcgcgaaggcaataagatccagttgctggaaaacggcgagcaatattatcccgcggtgtttaaggcgattggcgaggcacaagaacgcatcattcttgaaacgtttatctggtttgaggatgacgtcggcaaacaactgcatgcggcactactggcaagcaagccaaacgcgggggttaaaagcggaaagtcttgctggatggctacggttcgccggatctcagcgatgagtttgtcaatgaactgacggcagctggcgtagtgttccgctactacgatccccgccctcgcctttttggtatgcgcaccaatgtgtttcgccggatgcatcgcaaaattgtggtgatcgacgcgcgtatagcctttattggcgggctgaattactccgccgagcatatgtccagctacggtccagaggctaaacaggattacgcggtacgccttgaagggccgattgtcgaagatattctccagtttgagctggaaaacctgcctggacagagcgcggcacgacgctggtggcgacgtcatcacaaagcggaagagaaccgccagccgggagaagcgcaggtattgctggtctggcgcgataacgaagaacatcgcgatgatattgaacgccattatttgaaaatgctcactcaggcgcggcgggaagtgattatcgccaacgcctacttcttccccggctatcgatttttacacgcttgcgtaaagcggcacggcgcgggggtcggatcaaactga

SEQ ID NO: 1151 - DNA, 2170 bp, Homo sapiens
  SIMILAR (1)..(1065): 991254mologous to Escherichia coli K12 putative periplasmic binding protein,accession number AE000488,Smith-Waterman Score= 1765.
cgccgcaggctggcgtttgatcgagcgaagcatcgccgggcagagatgttagcgcaacgtgcgcgtggcgaagaggaagcgcatcatcacagtagcccggaaggagcaattgaagtcgatgaaagcgaagtcgatctcgatgccatcagtgcgcaatccttgcggctggtgcgctcaattttgatgttgatcgccctgctttctgtcattgtgctgtggtcagaaatccattccgctttcggcttcctcgaaaatatttcgctgtgggatgtcacctccacggtacagggcgtagaaagtctggagccaattaccctcggtgcggtgctgattgccattctggtgtttatcatcaccacgcagctggtgcgcaacttgcccgcgctgctggaactggcgattttgcagcacctggatttaacgccgggtacgggttacgccatcaccaccatcaccaaatatctgctgatgctgattggcgggctggtcggcttctcaatgattggtattgagtggtcgaaattgcagtggctggttgccgcgctcggtgttggtctcggttttggtttgcaggaaattttcgccaactttatctctggtctgattatcctgttcgaaaaaccgattcgcattggcgatacggtgacaattcgcgatctcaccggtagcgtgacgaaaattaacacccgcgccaccaccatcagcgactgggaccgtaaagagataatcgtgccgaacaaggcgtttattaccgagcagtttatcaactggtcgctctctgactcggtcacgcgcgtggtgttgacgataccggcccctgccgatgccaatagcgaagaagtgacggaaatcctgctcaccgcagcgcgtcgctgctcgctggtgatcgacaacccggcaccggaagtcttcctggtggatctgcaacaggggattcagattttcgagctgcgtatttacgccgctgagatgggtcaccgtatgccgctacgccatgagatcccacagctgattctggctggcttccatgcccacggtatcgatatgccatttccgcccttcagatgcgtctggaaagcctcaacggtaaacaaacggggagacggagaacgtcgtccgctctcctgggtggttggcgatcagggcgtttatcgcgccaatatgcaatcagagcgcgaaccaagcgcggtgaacgcattgcctcaccacggaccatttgcaatggtgaacaatatgaccgacttaaccgcgcaagaacccgcctggcagacccgcgatcatcttgatgatccggtgattggcgaactgcgcaaccgttttgggccggatgcctttactgttcaggcgactcgcaccggggttcccgttgtgtggatcaagcgtgaacaattactggaagttggcgatttcttaaagaaactgccgaaaccttacgtcatgctgtttgacttacacggcatggacgaacgtctgcgcacacaccgcgaagggttacctgccgcggatttttccgttttctaccatctgatttctatcgatcgtaaccgcgacatcatgctgaaggtggcgctggcagaaaacgacctgcacgtaccgaccttcaccaaactgttcccgaacgctaactggtatgagcgtgaaacctgggatctgtttggcattactttcgacggtcacccgaacctgcgacgcatcatgatgccgcaaacctggaaaggtcaccgcgctgcgtaaagattatccggcgcgcgctaccgaattctcgccgtttgagctgaccaaagccaaacaggatctggagatggaagccctgaccttcaaaccggaagagtgggggatgaagcgcggcaccgaaaacgaggacttcatgttcctcaacctcggtccgaaccacccgtcggcgcacggggctttccgtatcgttttgcaactcgatggcgaagagattgtcgactgcgtaccagacatcggttaccaccaccgtggtgcggagaaaatgggcgaacgccagtcctggcacagctacattccgtatactgaccgtatcgaatacctcggcggctgcgttaacgaaatgccttacgtgctggcggtagagaaactggccgggatcaccgtgccggatcgcgtaacgtcattcgcgtatgctctcctccaatgctccgcataa

SEQ ID NO: 1152 - DNA, 1903 bp, Homo sapiens
  SIMILAR (129)..(314): 641254mologous to Homo sapiens retinitis pigmentosa GTPase regulator,accession number AF286472,Smith-Waterman Score=184.
  misc_feature (1)...(1903): n = a,t,c or g
atgcgtactgtcagaatcgatgagtggcacgcaggccacaatctcatcgccatcgagttgcaaacgatacggaaagccccgtgcgccgacgggtggttcggaccgagtagcgttcgggaacagtttggtgaaggtcggtacgtgcaggtcgttttcgccagcgccaccttcagcatgatgtcgcggttacgatcgatagaaatcaatggtagaaaacggaaaaatccgcggcaggaatccttggacaacgccagaattgcagccggatttcggttgctggcgtttgaactcatgcaaacgttgaactggaattatcgaaaatcgcctgtggattgtcctcaataccgtgatttatccaacagagccgccagtgccgggttgcactgtttgacccagcgacgtggggtaataccgttggtgacgttatggaatttgttcggccatagctggtgatattccgggaacagatctttcaccaccagatccgagtgcagcgccgcaacaccgttcaccgcgaaaccgccaaccacacacaggcacactggagtattgctgcatcaggcgcagctttttaccggcagtatggttgtcgtttgatagagaactttggtcagtttttccgcattgatgccctgctgttcggccgcaagaaatcaccgtcgttaaatttactggcaacgtctggtggtaccaaaaacattgtcgccatttgcatgtttgccgcgctggcgggaatcaacaacgcacaggcgattattgatgtcattcatctaggcagcaatcgctcactggctcaagcagcctacccgggttcagtacgggccgaccttatgaacccctatttggccttgctccgggtggagtttaccgtgcccggactgttaccagccgcgcgtgtcgcggcgatattcgtgaagcacggcagatattgtcataagccccgcggaatgcttcgtccacgtacctatgctggtcaatacgctgaagaccgcatcaatgccatgctgagtacaacgccaacatcatcggtcaggctacccgcaatgccaatcaccggttatggtacttcttcgccacgtttgcgacaccaatcggtaccttcccgtaatactctggctgtcaatacgcccttcaccggtgatcaccagcgtacaacgttggccaaccagcgtgtttccggcgcttctggtccagggcaggtttttccaggcttcaaaaccgagggaatatccttggacaaatcgggcccttcaaagcggtaccgggtaacccctgttttagccttctggaacgtaagctggaacatatgcctcggcggagtaattcagcccgccaataaaggctatacgcgcgtcgatcaccacaatttgcgatgcatccggcgaaacacattggtgcgcataccaaaaaggcgaggcggggatcgtagtagcggaacactacgccagctgccgtcagttcattgcaaactcatcgctgagatccggcgaaccgtagccatccagcaagacttcgctttaaccccgcgttgcgctgctgccatcattgaaatcacccgccaccaaatacggtcggcgtcggtagctcattcacccatcgggagcatcgcagctgcgctgacgtgcgctacgcaggccaataccatcaacgacaacacgccgcctggacgcaacactgaccagagggtctgcaatacgctgcggggatcagccacccactcgagcaccgcatggaacaatatcagatcaacgggcgtttccaaatgcgaagcaacatcctgagcggcgcaatgtataaattgcatgttgtcgctcacaccttttgcttctgccgcctgttttgcgcggtcgatcatctgcgcaaaaagatcgcataanatgacctgatgcccacgctcggccat

SEQ ID NO: 1153 - DNA, 684 bp, Homo sapiens
  SIMILAR (683)..(492): 871254mologous to Cloning vector pZC320 SopB,accession number U26464,Smith-Waterman Score=280.
agttagagctgaagaagctggcaacctggaaaaagctaacgcacacaaaggaaaaaaaaaaaagagagaagaaggggtagaagaaggaggaggaggagaaggaagaggaagagagaaaggaagaagaggagaagaagaggagctattctcctatgccactgccctggtgacggggcacatggccgaagggagcgcagcgtccgggccagggaccaagccccgcggcgtccggcccgcgcccttcgccgaccgggcgccccctgaccgtcaccacgaaagcagcgcaggagacaaagcccgggactcgggttcagagtccccggcgcagcgcaaagcccgcgccttcccgccagcccgccgccgcgctccgccgggcagccgagggctccgcacgccgcgcctctggcccgcgctgccccggccgcagccgccgggaacatcctccgcctcctcccgctcctcccctcgcgctctgcgcccgccgccgccggcaccgccgacctccccgcgccgctggcgccggccagcgcagaaatatttccagcaaattcattctgcaatcggcttgcataacgctgaccacgttcataagcacttgttgggcgataatcgttacccaatctggataatgcagccatctgctcatcatccagctcgccaaccagaacacgataatcactttcg

SEQ ID NO: 1154 - DNA, 442 bp, Homo sapiens
  SIMILAR (167)..(442): 1001254mologous to Homo sapiens BimEL,accession number AF032457,Smith-Waterman Score=497.
attcttgcagccaccctgcgaaccctgccacactgcgatcgcatcatcgcggtattcggttcgctgcgttcccgccgccaccgcctcggcgccctttcttggcccttgttcccccaaatgtctgactctgactctcggactgagaaacgcaagaaaaaaagaccaaatggcaaagcaaccttctgatgtaagttctgagtgtgaccgagaaggtagacaattgcagcctgcggagaggcctccccagctcagacctggggcccctacctccctacagacagagccacaaggtaatcctgaaggcaatcacggaggtgaaggggacagctgcccccacggcagccctcagggcccgctggccccacctgccagccctggcccttttgctaccagatccccgcttttcatctttatgagaagatcctccctgctgtctcgatcc

SEQ ID NO: 1155 - DNA, 1848 bp, Homo sapiens
  SIMILAR (405)..(1085): 931254mologous to Homo sapiens IGF-II mRNA-binding protein 3,accession number AF117108,Smith-Waterman Score=1061.
acagagttcctcggggacaggaactgtcatcctcacacctcagaactgagcgcagcgtccgggccagggaccaagccccgcggcgtccggcccgcgcccttcgccgaccgggcgccccctgaccgtcaccacgaaagcagcgcaggagacaaagcccgggactcgggttcagagtccccggcgcagcgcaaagcccgcgccttcccgccagcccgccgccgcgctccgccgggcagccgagggctccgcacgccgcgcctctggcccgcgctgccccggccgcagccgccgggaacatcctccgcctcctcccgctcctcccctcgcgctctgcgcccgccgccgccggcaccgccgacctccccgcgccgctggcgccgggtgcccgcgttcccaattggtccgcgcgcggtcgctccgcgccgcagccaatcggcagccgcggtgggggcggcgcctacgggtcaggccgccaaaggcgaggcgattgttgacaaactcgcctccgagcgctgctctggccgtggtcgtggcggctgccgcttcgtcggaggatttgagggccggctggcccggccaccctgcccatccctgtgctccttccggacacaagccttagcagctcccgccgtcctggacagccagtcacctggagacaaagcaggacttgcgccgcgcccggacccgcagggccatccccaggcccagtcctcgccacttgtccttgttttggcccgtcgggggcagaccctaacggccgtcaccgccctggctgtggcaactattctcctccaacaacttcctctctctcctggtgcgccgcagacacgagtcaaagccgaagagccacccctggccgcggacgcgcacgtccgcgaccatcgagtaaattcacaccctccgccctggcgtccgtcgggccctccaccagcagcgccaaccctggggcaacaggtcccagagggcacggcgccgccagcctgcaccgcgaaccgggtcgggtggtcaggggaggacctagatttctcgctgccagggaatcgtgcggatggcacaggccgcaggactcctgcagagcaagcaggggccccagggcgccggagccggcggcgagactttccagctgggcgcacagcccgatactacgagcaggtcctcagctcccgggccggcgccgaaaggcacgcgctgcctctcctcctgcccggacctacgacccttcaccaggcccgcgcgcagcatcccgtcccaagccgcacttcggccaagagcctgcaggttccgcgtgaacgacttttctttaaagagaacctgcccgagagggaacccgatccacacggatccccacctcccgccggcgacaagcggcgccgatgcaagcgtctccgctcgcacgtgcacgggaagcgggcagtaggtggtgccgttcgggctccagcgctagtcttccttcggtgccaggcccgcgccccgggatttggaggtatttaccttgcgtttctcagtccgagagtcagagtcagacatttgggggaacaagggccaagaaagggcgccgaggcggtggcggcgggaacgcagcgaaccgaataccgcgatgatgcgatcgcagtgtggcagggttcgcagggtggctgcaagaatcaagtggtggtagtggcggcggcggcggcggcggcggcggcggcggcggcggcggcagcggcagcggcgctggacgcagagctccaacaaactgcagaccaggcggctgcgcggagcgaagtgaaacctgcgcggccctgcagcccagctctggctggcggccccgctcctacgcccaatcactgcggaccccgcccccgctag

SEQ ID NO: 1156 - DNA, 433 bp, Homo sapiens
  SIMILAR (286)..(534): 371254mologous to Plasmodium falciparum glutamic acid-rich protein,accession number J03998,Smith-Waterman Score=155.
atgcttttaccgctgttccttctcattcacaccggaatcgggccaagctactcagccagcgaccgcgcagagccgaggccctcgcctgggggcagattgactgctcgaatttggatcaagggtgtgaaggaggatggagggaccatgcaaggggctgtcgactggggagagggggttgaaagatgcgcaggacgcatcactgcgagccataaggttgcagacaaatggcattcgtcacggaattccctgggtggttcgcccgagcctggaacgccagcccctggaccgtgggtgggtttctgccatccttgcctgcccgcctccccgttgtcctggactgcgaccggaacggcggccacgcatgcgcagtgtgcggagagggtccacaacctctgtcgcagggcaaagccaagttgagcaaggaggatgttga

SEQ ID NO: 1157 - DNA, 198 bp, Homo sapiens
  SIMILAR (1270)..(1413): 851254mologous to Homo sapiens protein phosphatase 2A B'alpha1 regulatory subunit,accession number U37352,Smith-Waterman Score=202.
atgcaggctggactcgcccgggccatggtcctggctgctggctggtctagggtggcctcggctggggcagctggcgacaccagtcctgttccaagagccttgtctgatcttcgaatcacccagaagtgtggtctccttgtccccaaggctgtttcctggaagagcctctttctgttccccatcaccgtggaactataa

SEQ ID NO: 1158 - DNA, 504 bp, Homo sapiens
  SIMILAR (216)..(503): 1001254mologous to Homo sapiens HT015 protein,accession number AF223466,Smith-Waterman Score=506.
caagaattcggcacgaggatttttttttgtttgttttgtttttaaacattcaaaagcaattaatgatcagacataggagaaaccctgaatagaaacaaaacttttgaatgctggattcaaaaaaaaaaaaaagttatctggacagcttctttgagactatttaaaaactggtacaacaggtctctacaacgccaagatctaactaagctttaaaagggatagctgggagtatggccaccctgctccacgatgcggtaatgaatccagcagaagtggtgaagcagcgcttgcagatgtacaactcgcagcaccggtcagcaatcagctgcatccggacggtgtggaggaccgaggggttgggggccttctaccggagctacaccacgcagctgaccatgaacatccccttccagtccatccacttcatcacctatgagttcctgcaggagcaggtcaacccccaccggacctacaacccgcagtcccacatcatctcaggcgggc

SEQ ID NO: 1159 - DNA, 488 bp, Homo sapiens
  SIMILAR (189)..(476): 631254mologous to Homo sapiens HT015 protein,accession number AF223466,Smith-Waterman Score=259.
ggacagcttctttgagactatttaacaactggtacaacaggtctctacaacgccaagatctaactaagctttaaaaggtcaagaagttttatggctgacaaaggactcgcgcaacgcagaaggcctttcccaccttaagcttccggggatctgggaattttacccccattctcttctgtttgtctgagtctcatctctctgcaaggatagctgggagtatggccaccttgctccacgatgcggtaatgaatccagcagaagtggtgaagcagcgcttgcagatgtacaactcgcagcaccggtcagcaatcagctgcatccggacggtgtggaggacgaggggttgggggcttctaccggagctacaccacgagtgaccatgacatcccttcagtccatccacttcatcactatgagttctgcaggagcaggtcaaccccccggactacaacccgcataaaacatcattcagggggtgccgggcctgc

SEQ ID NO: 1160 - DNA, 769 bp, Homo sapiens
  SIMILAR (281)..(3): 531254mologous to Homo sapiens mitochondrial solute carrier,accession number AF155660,Smith-Waterman Score=165.
gcggccgcggcgagggcccgcggccagcccgcctgagatgatgtgggactgcgggttgtaggtccggagtggggttgatctgctcctgcaggaactcataggtgatgaaagtggatggactggaaggggatgttcatgttcagctgcgtggtgtagctccgggtagaaggccccccaacccctcgggtcctcccacaccgtccggatgcagctgattgctgtaccggtgctgctgagttgtacatctgcaagcgctgcttcaccacttctgctggattcatctaccgcatcgtggagtcagggtgggccatactcccagctattccctggcaaaacaaacttccagaaaatttacccttttgcgattcgggtgttctcaggaagttcctgggaacctaaaatcagacggaacccagggacttagctttctaaggaagcaaaatgtacttaccagctccgcccagggtgaggcactggactctttaaaaccctggaagtgatggtggaaatatggataaaaatgggggatgggttaattttagggcacattcaaccacatttttaatcttgcaaaaacatggttttctttcttgtaagtcaaccctgggaaaaagctaaacctgcaagtgtttggtggttcccagaaaccacacaccatggctttttccactgtctagatgttaactctctcttgtccctcgcctttgtctacacattaactcactttgcccttaagctggggccctgaaaggagatatcatatctacag

SEQ ID NO: 1161 - DNA, 1548 bp, Homo sapiens
  SIMILAR (691)..(1149): 551254mologous to Homo sapiens mitochondrial solute carrier,accession number AF155660,Smith-Waterman Score=340.
cattaaaaccctgagcctaaggtaccacagatagtctcattgggctattggcctgtgaactccacttacaatgtcattgaacttgggcagacataattctagtgtctgttccaaacgcactgtgtcacagaagctagaattaccattagaggcacaaacccctgagaatacacaagggggcacgcttccagtagatgtgttggggaaggaggagagcacgagcgggacagcgggacatggatgtcagcgtttgtaggtgggtccatgagggttcctaccaggggtagccaggatctgggaaacagatcagcgactctagtctgaagtggctgcctggttcgggggctgccttcagcaagattcaggcaggagagacggtaatagccaccttccaggcgtgagtcctggagataaaaatggattttaacctaggaactgccgggagctggccctacgcgggctgctcagactagggctgtgtgtgcctggctctcgcctgtttccggtgtctaactggcttgtttctctttatggcttggcttcattccgacctggggtggggccacatccaacccactgcccactggctgtccgtctggccttgccccgcggttccaaccacagtggtgaagcagcgcttgcagatgtacaactcgcagcaccggtcagcaatcagctgcatccggacgggtgtggaggaccgaggggttgggggccttctaccggagctacaccacgcagctgaccatgaacatccccttccagtccatccacttcatcacctatgagttcctgcaggagcaggtcaaccccccccggaccctacaacccgcagtcccacatcatctcaggcgggctggccggggcctcagccgcgcgccacgacccccctggacgtctagtaagacccttctgaacactcaggagaacgtggccctctcggtggcgcaacatcagcggccggctgtccgggtatggccaatgccttccggacggtgtaccagctcaacggcctggccggcctacttcaaaggcatccaggcgcgtgtcatctaccagatgcccttccaccgcccatttcttggtctgtctatgagttcttcaagtactttcctcacccaagcgcccagctggaaaaatcgagctcccatactaaaaggaaagggatccatagaaatctttttcttaaagtccattctctgccttgcatcccagcccccttgccctcttccttcacacgtaggatcattattttttttttgcaggggtgctgcctaatgggccctctggttcccaattgccttagaaaagaggagggcgacggcacggcgcatacaccggaaggctgtgtgcggggacaaccgaagttgttggttggaaagaaaggactttgggaaggggaccgagaaaatgccttttccccgcctccccggggaaaatgtaggcttttccggttcaatgtggcaagctcctcccactgatccttagatcccagaggagggaagaaaatttgcagtgactgaaaacagtaaaaaaaaaaaaaaaaaa

SEQ ID NO: 1162 - DNA, 540 bp, Homo sapiens
  SIMILAR (227)..(12): 301254mologous to Mycobacterium leprae antigen 43L,accession number AL008609,Smith-Waterman Score=73.
atggcgcggctcgggagcgcgccgcggccaatcaggagcggcgggagcggcgccgggagccggcgggcgcagagcgagctcgagtctggagccggcgtcggcgctgcggccgggagggatcgtggcgagagcagtgcggccggtgatagtttgaccaatccaaatggaacttctgctttggcagaagccacagctatggaaagccagcaacctgaattatgggctgatgtctccatgtgcttccgatgcttggagagggatgcccatgaaagaactctcctcacacagtccacaccaccccgtgctctgtctggtgttcctcccaggaaaactgagcaaaatgaaagccaattcaaagaagaaggaattaagtacataattgtgcagatgatacatggaaatgctcggtacccagactgtacaagaagcatggcagcagcatctgcttttgaccagtccgagagctcctccggggagaaccatgtggtggatggaggctctcaagaaccattccactcggagcaggatgactcctcttga

SEQ ID NO: 1163 - DNA, 472 bp, Homo sapiens
  SIMILAR (266)..(382): 411254mologous to Homo sapiens Human secreted protein encoded by gene 59,accession number Y36282,Smith-Waterman Score=61.
taatcaaaccaggcaccaaaatgctaacactccttcctggagaaagaaaggctaatatttattttactcaaagaagagctccatctacaggcattcaccagagaagcattgcttccttcttcaccttgcagccagatgtgtgagcttttaatctctggctgatcttaacccacatcagcctaagcttgggatgattactcttgacccttttttttcagtgattagcaaatctccccacaacccaggtgtggagagaagagaggtagaatggtgctagtttcctattttatttttgtggtaactgtacagcactttaaagttatatactctatgtttaaatatctcccttaaaaagcctgagctgtacaacaatctggatgtgactctgttacccttttcccacaagataggagggaatcccctttgtaaaactatgaatccaaataaatgtttacaaagtgaaaaaaaaaaa

SEQ ID NO: 1164 - DNA, 1384 bp, Homo sapiens
  SIMILAR (1156)..(1028): 411254mologous to Leishmania donovani topoisomerase I,accession number AF234993,Smith-Waterman Score=74.
gttcgagaccctagtcagtgtggggtaattcgcagcctgcgccggcgtcctgccggcttcgtctcctcagcggccatgaggcggacaggccccgaggaggaggcctgcggcgtgtggctggacgcggcggcgctgaagaggcggaaagtgcagacacatttaatcaaaccaggcaccaaaatgctaacactccttcctggagaaagaaaggctaatatttattttactcaaagaagagctccatctacaggcattcaccagagaagcattgcttccttcttcaccttgcagccaggaaagacaaatggcagtgaccagaagagtgtttcatctcatacagaaagtcagatcaacaaagagtccaagaaaaatgcgacccagctagaccatttgatcccaggcttagcacacgattgcatggcatcccctttagccacttcaaccactgcagacatccaggaagctggactctctcctcagtccctccagacttctggccaccacagaatgaaaaccccattttcaactgagctatctttgctccagcctgatactccagactgtgctggagatagtcataccccactggctttttccttcactgaggacttggaaagttcttgtttgctagaccgaaaggaagaaaaaggggattctgccaggaaatgggaatggcttcatgagtctaagaagaactatcagagtatggagaaacacaccaaactacctggggacaaatgctgtcagcccttatgcaagactaaattggaaagaaaggtgtctgccaaagaaaacaggcaggcccctgtcctccttcaaacatacagggaatcctggaatggagaaaacatagaatcagtgaaacaaagccgtagtccagtttttgtgttttcctgggccaatgaaaagaatgacaaggactcctggagtcaacttttcactgaagattctcaaggccagggggtcattgccccccaccatagaggttccttttcaagatgtaaccaataactggaattgggacttagggccgtttcctaacagtccttgggctcagtgccaggaggatgggccaactcaaaatttgaagcctgatttgctttttacccaggactttgaaggtaatcaagttatcagacaccaattctaaatgtttgaagctttgtttctaaaagtaccttgaaatgatagagatgtaggaaaatatagttgtgggtggagagaggagtgagtttgtttaggtgggaaggtggcatgggatgaagttgtcattactgagcatcttctctgtgtaaataaagggcagtaccattgttaagacagtgattagcaaatctccccacaacccaggtgtggagagaagagaggtagaatggtgctagct

SEQ ID NO: 1165 - DNA, 1344 bp, Homo sapiens
  SIMILAR (906)..(4): 821254mologous to Homo sapiens p40,accession number U93564,Smith-Waterman Score=1296.
atggcccccagtccaaactcctggatcccctccatgagagaggggctccccctggaacagaagctctcatccccaggcccagtgcacaagaccaccagcagagacccaccgcccttcctggcagagcaccacttcctggcagtgcagctccgaggcaccactactgtcctccccttccctccagagcaagacaagaaacaagaaacagcgaagaggcaaacgaaaaacgggaaagagaaagagaagagagaacaaagaagaaaaacaagcagcccgagcacccgaacacaagacacggcagggccaccggcggcagaacaccgggcacagagaaacacacacgaccaagagcagagagcacgcagcagagaccaaacacgacaaccgaaaaaggcgcacggaaagaacgagaaaagcgaccgcggcgcgcaaaggtgcccacgtctggcggttttcaagcagctacctggacagcctggatcggattggggccgcgactaccagcccaccgagcaggacatctccgaaccagggtcaaaaccactggcatccgtagaaacccacttcacattcaagaacctccacttcaggctgtttgacgtcggaggccagcgatctgaacgcaagaagtggatccattgcttcgaggacgtcacggccatcattttctgtgtcgcgctcagcggctatgaccaggtgctccacgaagacgaaaccacgatggtgacaatggtagaatggaccaccgggctaaaagctgtaaaagtgcctgtacacaggaatcatcactcagtgaatagctcctgtggctacaacattcagatgccatggctagagaaccgcatgcacgaatccctgaagctttttgacagcatctgcaacaacaaatggttcacagacacgtccatcatcctgtttcttaacaagaaggacatatttgaagagaagatcaagaagtccccgctcaccatctgctttcctgaatatacaggccctgtgtcctgccacgaggacatgtgctgctggcggctggtcacgagtgtgctggggaagcagcaccctggtgacaatcagtataacagcccatgtgttaacatttgcacggatggtgcaaaagtagcagcagcagatacaatcgtggtctccttagccagaagccaggcgccggcgctggactcggcgccgggctgcagagctgccattgcactccctaccaccatgcatgccaagaaagcaaatgctggctggactgaagaatgtcgttgctcccagagggcttggctggtgcccacccaggggaaccggcattaccgtgttgatgctggtagtgtttacatgcggcag

SEQ ID NO: 1166 - DNA, 1094 bp, Homo sapiens
  SIMILAR (1)..(1062): 1001254mologous to Homo sapiens guanine nucleotide-binding regulatory protein 1,accession number M60165,Smith-Waterman Score= 1840.
atgggatgtactctgagcgcagaggagagagccgccctcgagcggagcaaggcgattgagaaaaacctcaaagaggatggcatcagcgccgccaaagacgtgaaattactcctgctcggggctggagaatcaggaaaaagcaccattgtgaagcagatgaagatcatccatgaagatggcttctccggagaagacgtgaaacagtacaagcctgttgtctacagcaacactatccagtccctggcagccatcgtccgggccatggacactttgggcatcgaatatggtgataaggagagaaaggctgacgccaagatggtgtgtgatgtggtgagtcggatggaagacaccgagcccttctctgcagagctgctttctgccatgatgcggctctggggcgactcaggaatccaagagtgcttcaaccggtcccgggagtatcaactcaacgactctgccaaatactacctggacagcctggatcggattggggccgccgactaccagcccactgagcaggacatcctccgaaccagggtcaaaaccactggcatcgtagaaacccacttcacattcaagaacctccacttcaggctgtttgacgtcggaggccagcgatctgaacgcaagaagtggatccattgcttcgaggacgtcacggccatcattttctgtgtcgcgctcagcggctatgaccaggtgctccacgaagacgaaaccacgaaccgcatgcacgagtctctcatgctcttcgactccatctgtaacaacaagttcttcatcgatacctccatcattctcttcctcaacaagaaagatctctttggcgagaagatcaagaagtcacctttgaccatctgctttcctgaatacacaggccccaatacctatgaagacgcagccgcctacatccaagcacaatttgaaagcaaaaaccgctcacccaacaaagaaatatattgtcacatgacttgtgccacagacacgaataacatccaggtggtgttcgacgccgtcaccgacatcatcattgccaacaacctccggggctgcggcttgtactgacctcttgtcctgtatagcaacctattttg

SEQ ID NO: 1167 - DNA, 1499 bp, Homo sapiens
  SIMILAR (807)..(1628): 691254mologous to multiple sclerosis associated retrovirus polyprotein,accession number AF009668,Smith-Waterman Score=947.
atgggcagaggcaggagggcggcccggggcagcacctgctctgctctcacctactctgcgttggacattaaaggctgtggctgcctcagacggagcacatatcttcctgggcaaggccacttcagctgtggtctagacccctctaccaggccctgtcagccgtccagggagctctcggcacaggctgacgccaagatggtgtgtgatgtggtgagtcggatggaagacaccgagcccttctctgcagagctgctttctgccatgatgcggctctggggcgactcaggaatccaagagtgcttcaaccggtcccgggagtatcagctcaacgactctgccaaatactacctggacagcctggatcggattggggccgccgactaccagcccactgagcaggacatcctccgaaccagggtcaaaaccactggcatcgtagaaacccacttcacattcaagaacctccacttcaggctgtttgacgtcggaggccagcgatctgaacgcaagaagtggatccattgcttcgaggacgtcacggccatcattttctgtgtcgcgctcagcggctatgaccaggtgctccacgaagacgaaaccacggcagtgatgtcagtcaccagcccagtcttgatgctgagtggggcaagggtggatgcgcttcctgggccgtgcttggacccagactcactgaccacccaaagcccagccgccctgtccgctgcatcccgggagcccgagagcctggtcctggcctcgtacctgctctcagcaccgcccagccgggcctgcggctgccacagcttctccactaccacggtcgcctccactgcctgcagggccttatcttgccaaaccaaggccaaaaccagttctgagagaccctccaagcccggaaggcccaggatggccatggcccctaaccgcatgcacgaatccctgaagctttttgacagcatctgcaacaacaaatggttcacagacacgtccatcatcctgtttcttaacaagaaggacatatttgaagagaagatcaagaagtccccgctcaccatctgctttcctgaatatacaggccccagcgccttcacagaagccgtggcttacatccaggcccagtacgagagcaagaacaagtcagcccacaaagagatctacacccacgtcacctgcgccacggacaccaacaacatccagtttgtctttgatgctgtgacggacgtcatcatcgccaaaaacctgcggggctgtggactctactgagcccagccgccctgcccggcacccttgccctgcctggcctgccgcccccccttccttggaaccaggctccaccactctcagaccactctttgcacttgaggaagaagacctcagaggctggcaccaagggagggaggagggagcatcctccacccgcaccccccaacagaacttgtggtaacgcaggggcggggcggggctgctgatgtcatgctgcaaggccaggagactccaaa

SEQ ID NO: 1168 - DNA, 1809 bp, Homo sapiens
  SIMILAR (386)..(793): 581254mologous to Homo sapiens ANG2,accession number AF024631,Smith-Waterman Score=298.
atggccgccgggcccggcctgcaatgcctggtctctggctcggcgggtccagctcacgctccctctccattggcctgtgcactcctgccccctgggaccagctggctgctggagagagctttctggaagcagcacccctacctgctgcgcaccatggctgttatactgattgtcaccagggtgctgcttccccagcacactcgtgacagccgccagcagcacatgtcctcgtggcaggacacagggcctaatcaggggagatttagctcaacgcagaccactcgactgggctggagaagggtgcttcacttctgggaactggggctctgctgcgtaaaacaagagaaaaaagccacaaaggcagagagggcagctgcccagagaacaggactgggcagagaggagcgggcaggccttcactgccacctggagcggtcactgctgtctctcctgcagaactgcctgggcgggagcacgcatgagttttctaaagaagtcagctctagccgtctgccccgcgtaaaataccacaggccagacctggtatcttcatccattcaggctaccatagcagaatccataagctgggtggcttatacacaacagaaatttatttctcacagttcggaagctgggaagttcaagatgaaggtgctggcagatcactatcaggtgctccacagatctacagaaaccatgaaggagggcccaaagaaggaagagttggaaaactcttgccaggtccaccaccccattcctcagatgggaaagtaccccaagattgcccgagacggagcacatatcttcctgggcaaggccactcagctgtggtctagacccctctaccaggccctgtcagccgtccagggagtctcggcacaggctgacgccaagatggtgtgtgatgtggacggccccacaacaaagagttacgtggccccaaacatccatagtgccaagattaagaaccctgatctacgcaatgccaatggacagaggctgaggccaatgttcatcctggacatttccacgggccacatggcagccaacagactagggacttggcaaggccgggagcggcttcccatttctgcacacctagattgtccagaggcaaatgccgaagtcctctacctggacagcctggatcggattggggccgccgactaccacccaccgagcaggacatcctccgaaccagggtcaaaaccactggcatcgagaaacccacttcacattcaagaacctccacttcagcgcccaaacatcatcctgccccagggaacctgcggctggggcaggcagctagatactagaaggaacctgtctgtgtttctgcaaggctgtttgacgtcggaggccagcgatctgaacgcaagaagggatccattgcttcgaggacgtcacggccatcattttctgtgtcgcgctagcggctatgaccaggtgctccacgaagacgaaaccacggccttatcttgccaaaccaaggccaaaaccagttctgagagaccctccagcccggaaggccccagcccttcacagaagccgtggcttacatccaggcccagtacgagagcaagaaaagtcagcccacaaagagatctacacccacgtcacctgcgccacggacacaacaacatccagtttgtctttgatgctgtgacggacgtcatcatcgccaaaacctgcggggctgtggactctactgagcccagccgccctgcccggccccttgccctgcctggcctgccgccccccctcccctggaaccaggctccccactctcagaccactctttgcacttga

SEQ ID NO: 1169 - DNA, 442 bp, Homo sapiens
  SIMILAR (28)..(414): 311254mologous to Leishmania major probable proteophosphoglycan,accession number AL390935,Smith-Waterman Score= 116.
gcgactggcatgacccgcaatctgcacagcagcagcggccctctgtcccgcgaagccgaatccttctcctcccagtcggaggtgtccagggcctcccgcgtcaccaggcatcggacactgtgggtcccgtcagacacaagcagcgtggccccgacgtcggacgtatcaggggcgtgggatgggcccgcgaccgcggcctcggcgtcctgtagtacctcaagcagctgcccggctcgtggactggagggtgtctctgaccccagaatcagctcccgaatccagggccgtaggaccagcctccccgaacctgccatccccacggctacacccagcggatgcaacgggcccgggcccaaaagtccgaacacgcgtccgcccacgcgtccgaccacgcgtccgcggacgcgtgggtcgatccgggaagttccttcacaaacgttaa

SEQ ID NO: 1170 - DNA, 407 bp, Homo sapiens
  SIMILAR (2)..(394): 831254mologous to Homo sapiens Human secreted protein cw976_1,accession number W69430,Smith-Waterman Score=566.
  misc_feature (1)...(407): n = a,t,c or g
gcacctgtaccactgcagtcgcctcctgctgaaactgggcacatttgggcccctgcgctgccaggaggcatgggccctggagcggctgctgcgggaagcccgagtactggaggcagtatgcgagttcagcaggcggtgggagatcccggccagctctgcccaggaagtggtgcagttctcggcctctcggcctggcttcctgaccttctgggaccagtgcacagagagactcagctgcttcctctgcccggtggagcgggtgcttctcaccttctgcaaccagtatggtgcccgcctctccctgcgccanccaggctttggctgaggctgtgtgtgtgaagttcctgggaggatgccctggggcagaagctgcccagaaggccccagccagggncttgagagcagct

SEQ ID NO: 1171 - DNA, 391 bp, Homo sapiens
  SIMILAR (380)..(105): 341254mologous to Mus musculus proline-rich protein,accession number X63005,Smith-Waterman Score=94.
gcgcccgcgggaaacccggacccgatgtatccgttgggtgtagccgtggggatggcaggttcggggaggctggtcctacggccctggattcgggagctgattctgggggcagagacaccctccagtccacgagccgggcagctgcttgaggtgagcccccattcagggcccggagaccgaagcggaggcccggaggggtgggaatgactccgctcgccgccgacaggtactacaggacgccgaggccgcggtcgcgggcccatcccacgcccctgatacgtacgacgtcggggccacgctgcttgtgtctgacggcacccacagtgtccgatgcctggtgacgcgggaggccctggacacctctgactgggaggagaaggaagttcggctt

SEQ ID NO: 1172 - DNA, 698 bp, Homo sapiens
  SIMILAR (3)..(695): 1001254mologous to Homo sapiens PAR-6A,accession number AB043634,Smith-Waterman Score=1202.
aagggctcttgctgcggccagtggcacccctgcgcacccggccacccttgctaatcagcctgccccaagatttccgccaggtttcctcagtcatagacgtggacctactgcctgagacccaccgacgggtgcggctgcacaagcatggttcagaccgccccctgggcttctacatccgagatggcatgagcgtgcgtgtggctccccagggcctggagcgggttccaggaatcttcatctcccgcctggtacgtgggggtctggctgagagtacagggctgctggcggtcagtgatgagatcctcgaggtcaatggcattgaagtagccgggaagaccttggaccaagtgacggacatgatggttgccaacagccataacctcattgtcactgtcaagcccgccaaccagcgcaataacgtggtgcgaggggcatctgggcgtttgacaggtcctccctctgcagggcctgggcctgctgagcctgatagtgacgatgacagcagtgacctggtcattgagaaccgccagcctcccagttccaatgggctgtctcaggggcccccgtgctgggacctgcaccctggctgccgacatcctggtacccgcagctctctgccctccctggatgaccaggagcaggccagttctggctgggggagtcgcattcgaggagatggtagtggcttcagcctctga

SEQ ID NO: 1173 - DNA, 527 bp, Homo sapiens
  SIMILAR (3)..(131): 1001254mologous to Homo sapiens KIAA0633 protein,accession number AB014533,Smith-Waterman Score=231.
taggaaagacattttgcttttttattttctgtaaaactctgtaaataaaatacaaaaccaagggatgtggctgggcagcggcagggtggccaagccccagacactgatttgtggcaagggatgtgctgagccgaggctgggaggcacttgactgcaggcactgactctccaaccccaggggcaacagaagaatatattagattttcattgctaggaatctgtgggggaggggtatctggagccagcccttaccctccctgccagtgcctggtgagccctgaaagtggggggaaaggggcaccaggaacccatgggtgaatagtttagaatgctgtgctggccatgctgccaggcccaaagatgcggggcaaggccgtccagggactcctccagccgtcgatgggcagactgtccctcttctccacactgctgtaggctttgccgggcagcttccctcacagcttctgtgtcagtttggcagaggtacaccaggggctcaatgccctcgggagccttgatgcagccta

SEQ ID NO: 1174 - DNA, 1258 bp, Homo sapiens
  SIMILAR (3)..(170): 891254mologous to Homo sapiens Polypeptide identified by the signal sequence trap method,accession number Y02377,Smith-Waterman Score=255.
atggaaggtgatgcagtcgaagccattgtggaggagtccgaaacttttattaaaggaaaggagagaaagacttaccagagacgccgggaagggggccaggaagaagatgcctgccacttaccccagaaccagacggatgggggtgaggtggtccaggatgtcaacagcagtgtacagatggtgatgatggaacagctggaccccacccttcttcagatgaagactgaagtaatggagggcacagtggctccagaagcagaggctgctgtggacgatacccagattataactttacaggttgtaaatatggaggaacagcccataaacataggagaacttcagcttgttcaagtacctgttcctgtgactgtacctgttgctaccacttcagtagaagaacttcagggggcttatgaaaatgaagtgtctaaagagggccttgcggaaagtgaacccatgatatgccacaccctacctttgcctgaagggtttcaggtggttaaagtgggggccaatggagaggtggagacactagaacaaggggaacttccaccccaggaagatcctagttggcaaaaagacccagactatcagccaccagccaaaaaaacaaagaaaaccaaaaagagcaaactgcgttatacagaggagggcaaagatgtagatgtgtctgtctacgattttgaggaagaacagcaggagggtctgctatcagaggttaatgcagagaaagtggttggtaatatgaagcctccaaagccaacaaaaattaaaaagaaaggtactcgtcctcacaagtgcccagactgcgacatggcctttgtgaccagtggagaattggttcggcatcgtcgttacaaacacacccacgagaagccattcaagtgttccatgtgcgattacgccagtgtagaagtgagtgttcagctttttgttgagtcccagaacctgccaaagcagccccctctgatgctcgccctgggccaggcatctgagtgtctccggctcatggcccgagcaggcctgggttcttgctcctttgccagagttgatgactacttgcactagctgactgtgctggctggctctggctggccctccactggccccagggctggagctgccctgccctccatgggcaactggtgcagggactgggaaaccatagacagagtccactcctcctgcctggcctttccccctctccctttccttccttccttcctttctctgcccacgccgagccctatgcagtctc

SEQ ID NO: 1175 - DNA, 535 bp, Homo sapiens
  SIMILAR (3)..(503): 641254mologous to Mus musculus B cell antigen receptor Ig beta associated protein 1,accession number AF006465,Smith-Waterman Score=542.
aggtccagggcacggtccactgcttccccatcagtgcccggcttggcgagtggcaggcagtgctgcagaacatggtttcatcttacctcgtgcatcatgggtattgtgccacagccacggcttttgctcgaatgactgaaaccccgattcaggaagaacaggcgtccataaagaacagacaaaagatccagaagctggtgctggagggccgtgtgggcgaggccatcgagaccacccagcgcttctacccagggctgctggagcacaaccccaacctcctcttcatgctcaagtgccggcagtttgtggagatggtgaatgggacggacagtgaggtccgaagtttgagctcccgaagccccaagtcccaggacagctaccctggctcccccagcctcagtccccgacatggccccagtagttcccacatgcacaacgcaggagcagacagtcccagctgtagcaatggcgtcgcgtccaccaagagcaaacagaacccctgtattgcggccgctctggaggatacgagcaaggc

SEQ ID NO: 1176 - DNA, 401 bp, Homo sapiens
  SIMILAR (145)..(372): 401254mologous to Homo sapiens Glutathione-S-transferase and hTRT fusion protein 5,accession number W47005,Smith-Waterman Score= 95.
tatttttcttttttttttttttttctgtgtacaaaatgtttaattctgacaaagctgttaaaaggctagggtggcccttctgcagccactggtgactgggaagagtgctctagggacactggccacccccctgctcctgtcttcagacctctgctctgggattgggtccaaccctgtcctttgcagccatgtggcgatcctcagaatggagctccttgccactgtcccccaaaggggctcagtcgtccatcttcacgaagactttgggccgagaaaagatcttgatggcctcctctacctgcaccagcttccggtccagctcagcacggtggctctgggctctcagtgagtctgccccagcagagcaggccttggagccatcccagggactaacacagatc

SEQ ID NO: 1177 - DNA, 1006 bp, Homo sapiens
  SIMILAR (14)..(601): 331254mologous to Homo sapiens spiceosomal protein,accession number L21990,Smith-Waterman Score=145.
atgccggtcagcctgggtagccgagcctcgggtccaagcctgcgtctgctgcgcgtccggcggctgcgcgtgtggggagatgcgtttgtggtacccccagccttgccgcaggaagggaatgggctcagtgcccgcgtggacgagggcgtggaggaattcttctccaaaaggctgatccagcaggatcgcctctgggcccccgaggaggacccggccactgaggggggcgccactcctgtcccccgtacactgcgaaagaagctgggcaccctctttgccttcaagaagcctcgttcaacgcggggtccacggactgatctagagaccagccctggggcagctccccgaacccgaaaaactacatttggcgacctactgcggccgccaacccgtcccagccgtggtgaggagcttggtggggctgagggggacaccagcagccctgaccctgccggcaggagccgacctcgctacacaagagatagcaaggcctactcgatgatactgctgcctgccgaggaggaggcaacgctgggtgccagacccgacaagcggcggcccctggagcggggagaaacagaactggctccatcctttgaacagcgggtacaagtaatgctgcagaggataggcgtcagccgaggcagcgggggtgccgaaggcaagaggaagcaaagcaaagatggcgagatcaagaaagctggctcagatggtgacattatggacagttccacggaggcccctcccatctcgatcaagtcccgcacccactctgtgtctgctgacccttcctgcagacctggcccagggagccaggggcctgagtctgccacctggaagacactggggcagcagttgaatgcggagctcaggagccgtggttggggccaacaggatggtccaggccctccctcccctggtcaaagcccaagtccctgcagaaccagcccctccccagacagcctgggcctcccagaggacccttgcttgggccccagaaatgaag

SEQ ID NO: 1178 - DNA, 975 bp, Homo sapiens
  SIMILAR (3)..(236): 791254mologous to Homo sapiens Human Hydrolase protein-15 (HYDRL-15),accession number Y71117,Smith-Waterman Score=284.
ttccagcccctccaaacactcagaccccaccctcccaggcactgactcccttccctgtagtcccccagtctccaattcctacactcaggcagaccctatggcccccagaactccccacccaagtcctgcccattccagtaggaaacccctcacaagccctgccccagatccctcagagtctacggttcagagtctaagccccactccctcacccccaacccctgcaccccagcattcagacctttgcctggccatggctgtccagaccccagtcccaacggcagccggagggtctggggacaggagcctgggaggaggcactgggggccctaatggctgccctgggatgactaccgtggccagtttcctgagctgcagggcctgggagcaggaggtgacccgccttagaaagtcttgttcatgcagaggacaaaggtctgacttcgcagccgggcctccagtctcagcatcactgtggagcatgccttggagagcttcagcttcctcaatgaagacgaagatgaagacaatgatgttcctggggacaggcctccaagcagcccggaggctggggctgaggacagcatagactcacccagtgcccgccccctcagcacggggtgtccagctctggatgctgccttggtccggcacctgtaccactgcagtcgcctcctgctgaaactgggcacatttgggcccctgcgctgccaggaggcatgggcccctggagcggctgctgcgggaagcccgagtactggaggcagtatgcgagttcagcaggcggtgggagatcccggccagctctgcccaggaagtggtgcagttctcggcctctcggcctggcttcctgaccttctgggaccagtgcacagagagactcagctgcttcctctgcccggtggagcgggtgcttctcaccttctgcaaccagtatggtgcccgcctctccctgcgccagccaggcttggctga

SEQ ID NO: 1179 - DNA, 3468 bp, Homo sapiens
  SIMILAR (811)..(1548): 951254mologous to Escherichia coli 37KD protein, similar to YI22-ECOLI,accession number D85613,Smith-Waterman Score=1244.
atgcccagcattcagacctttgcctggccatggctgtccaaccccagtcccaacggcagccggagggtctggggacaggagcctggaggggcactgggggccctaatggctgccctggatgactaccgtggccagtttctgagctgcagggcctggagcaggagcagagacaaggtcgactcgcagccgggcctccagtctcagcatcactgtggagcatgccttgagagcttcagcttcctcaatgaagacgaagatgaagacaatgatgttccggggacagaaactgggcacatttggcccctgcgctgccaggaggcatgggccctggagcggctgctgcgggaacccgagtactggaggcagtatgcgagttcagcaggcggtgggagatcccgccagctctgcccaggaagtgcacgagagactcagctgcttcctctgcccggtggagcgggtgcttctcacctctgcaaccagtatggtgcccgcctctccctgcgccagccaggcttggctaggctggtgagtgggctgcttcctccttccacccttgctcagattcccatgacaggaagctcggggaagccagtgtgtgtgaagttcctggaggatgccctggggcaaagctgcccagaaggccccagccagggcctggagagcagctcacagtctccagttctggagttttgtggaaaccttggacagccccaccatggaggccacgtgactgagaccgctgaggagggccctcctgtgttcctggaccagctggaggatgaggacgctcccgagggcattgagcccttggtgtacctctgccaaactgacacagaagctgtgagggaagctgccggcaaagcctacagcagtgtggtacccccagcttgccgcaggaagggaatgggctcagtgcccgcgtggacgagggcgtggggaattcttctccaaaaggctgatccagcaggatcgcctgagccgacctcctacacaagagatagcaaggcctactcgatgatactgctgcctgccgagaggaggcaacgctgggtgccagacccgacaagacccttcctgcagacctggcccagggagccaggggctgagtctgccacctggaagacactggggcagcagttgaatgcggagctcggagccgtggttggggccaacaggatggtccaggccctccctcccctggcaaagcccaagtccctgcagaaccagcccctccccagacagcctgggcccccagaggacccttgcttgggccccagaaatgaagtacctgacggcggcgagcgcgtcaatcccaccaccccgggcctccgcctcggtctccgggccctgaagggggctcacctcaagcagctgcccggctcgtggactggagggtgtctcgaccccagaatcagctcccgaatccagggccgtaggaccagcctccccgacctgccatccccacggctacacccagcggatgcaacgggcccgggtttccgcgggcgcccaggccccgcctttcctcggaagaggaagctccttcgcgggcggggccggaggaggaggccccgcccacgtacaccccgcgcctgcgacgagggcgtcctgctcgggggcctgtgtgcagactcccgctggtccacccgctgtttgacccgagttccgacgcttcgcgctgcctcgcgcttcggtgagcggcttccagagttctcgcggttgctgcgggcggtgcaccagatcccgggcctggacgtgctacttggctatacggatgctcatggcgacctgctgcccctcaccaacgacgacagcctgcaccgggccctggccagcgggcccccgccactgcgcctactggtgcagaagcgggcagaagctgactccagcggcctggcttttgtctccaactctctgcagcggcgcaagaaagggctcttgctgcggccagtggcacccctgcgcacccggccacccttgctaatcagcctgccccaagatttccgccatgtttcctcagtcatagacgtggacctactgcctgagacccaccgacgggtgcggctgcacaagcatggttcagaccgcccctgggcttctacatccgagatggcatgagcgtgcgtgtggctccccagggctggagcgggttccaggaatcttcatctcccgcctgcctgtggcgatcctcagcatggagctccttgccactgtcccccaaaggggccagtcgtccatcttcacgaagactttgggccgagaaaagatcttgatggctcctctacctgcaccagcttccggtccagctcagcacggtggctctggctctcagtccctgcgctccaacaagctgtggtacacaggctcagagttgatgacccgagggcagagaactcagatcagggtacagttgcctgttggccaacaaatggataatacttctggctccctgaagcaggtacctggagctgggccttacccgggactccaccttgtcgtacttggaaagagctccctgacctctccaactaccttagaccctacacacacttccctcatcaccgtgttcccttcctcatgtagttgggacaaacattcctatggttaccatggtgatgatgggcattcgttctgctcctcggggactggccagccctatggtcccacattcaccacaggagacgtgatcggctgctgtgtcaacctcatcaatggcacctgcttctacaccaagaatggccacagtcttggtatagccttcacagacctcccggccaacctctaccccaccgtaggcctgcagacacctggggagattgtggacgccaactttgggcagcagcccttcctgtttgacattgaggactacatgcgggagtggcgtgccagagatccagaagctggtgctggagggcctgtgggcgaggccatcgagaccacccagcgcttctacccagggctgctgagcacaaccccaacctcctcttcatgctcaagagcagacagtcccagctgtagcaatggcgtccgcgtccaccaagagcaaacagaaccacagtaaataccctgcacccagctcctcatcctccgtcctcctcctcctcctcgtcctcttccccatcctcccgtcaattactcccgagtccaactcaacagactccaccaagtcccagcaccacagcagtaccagtaaccaggagaccagcaacccatggctacagcttgaaaggaggcccaccaggctgctccaaccacaccccctgggccaactcccacctcaacccctcccacagcgacagtgagatggagatggaggcagagcactaccccaacggagtcccagaacctgccaaagcagccccctctgatgctcgcctgggccaggcatctgagtgtctccggctcatggcccgagcaggcctggttcttgctcctttgccagagttgatgactacttgcactagctga

SEQ ID NO: 1180 - DNA, 676 bp, Homo sapiens
  SIMILAR (98)..(433): 261254mologous to Synechocystis sp. penicillin-binding protein 1A,accession number D64000,Smith-Waterman Score=97.
  misc_feature (1)...(676): n = a,t,c or g
gagcaaggttcggaaatgaagtcgggagccgggctggaagcagagtctgtgccgatggccgtcatcattggggtggccgtaggagctggtgtggccttcctcgtccttatggcaaccatcgtggcgttctgctgtgcccgttcccagagaaatctcaaaggtgttgtgtcagccaaaaatgatatccgagtggaaattgtccacaaggaaccagcctctggtcgggagggtgaggagcactccaccatcaagcagctgatgatggaccggggtgaattccagcaagactcagtcctgaaacagctggaggtcctcaaagaagaggagaaagagtttcagaacctgaaggaccccaccaatggctactacagcgtcaacaccttcaaagagcaccactcaaccccgaccatctccctctccagctgccagcccgacctgcgtcctgcgggcaagcagcgtgtgcccacaggcatngtccttcaccaacatcttacaggcaccctgagcggccaggggccctncttacggacttacggggcagcggttttgttgttggggcatggggcagcttcgttccatcgagtttttgttgaggcggggagttttccaggaggagggttcccttcaggcggacagaggtttcntttcctgggggacaaggcanttttnaaacagg

SEQ ID NO: 1181 - DNA, 959 bp, Homo sapiens
atggagctgatggaccggggtgaattccagcaagactcagtcctgaaacagctggaggtcctcaaagaagaggagaaagagtttcagaacctgaagctgttcacccctgagtttgctccctaccaggttgctcccttcctcctgttttccctcttccctccccgcataaggggacgggctcagcctggaaaccccagccacgctcagtggagactccaccaggtgacgctcctcttcctctcgcccatccaggaccccaccaatggctactacagcgtcaacaccttcaaagagcaccactcaaccccgaccatctccctctccagctgccagcccgacctgcgtcctgcgggcaagcagcgtgtgcccacaggcatgtccttcaccaacatctacagcaccctgagcggccagggccgcctctacgactacgggcagcggtttgtgctgggcatgggcaagctcgtccatcgagctttgtgagcgggagttccagagaggctccctcagcgacagcagctccttcctggacacgcagtgtgacagcagcgtcagcagcagcggcaagcaggatggctatgtgcagttcgacaaggccagcaaggcttctgcttcctcctcccaccactcccagtcctcgtcccagaactctgaccccagtcgacccctgcagcggcggatgcagactcacgtctaaggatcacacaccgcgggtggggacgggccagggaagaggtcagggcacgttctggttgtccagggacgaggggtactttgcagaggacaccagaattggccacttccaggacagcctcccagcgcctctgccactgccttccttcgaagctctgatcaagcacaaatctgggtccccaggtgctgtgtgccaaaggtgggcgggtggggagacagacagaggctgcggctgagtgcgctgtgcttagtgctggacacccgtg

SEQ ID NO: 1182 - DNA, 145 bp, Homo sapiens
  SIMILAR (60)..(1): 501254mologous to Bacillus anthracis VrrB,accession number AF238891,Smith-Waterman Score=57.
atgaggctctttctgatgaagatgaatgtgtttcccatggaaagaataatggtgaagatgaggacatggattaaagatgaggctctctctgatgaagatgaatgtgtttcccatggaaagattattggtgaagatgaggacatgg

SEQ ID NO: 1183 - DNA, 453 bp, Homo sapiens
  SIMILAR (322)..(1074): 281254mologous to Ureaplasma parvum serovar 3 multiple banded antigen,accession number L20329,Smith-Waterman Score=149.
ttcgtcgaccctagtccgtgtggtgcaattccatcctgtgggagtgcctcgtgggctgccccagagttcaccccacactcagcagcaccaatggtgaagatgacaagatcgaagactttccaggcatatctgccctcctgccaccggacctacagctgcattcactgcagagctcacttggccaatcatgatgaactaatttccaagtcattccaaggaagtcaaggacgagcatacctctttaactcagtagttaatgtgggctgtgggcctgcagaagagcgagtgttgctaacaggactgcatgcagtcgcagacatttactgtgaaaactgcaaaaccactctgggctggaaatacgaacatgcttttgaaagcagccagaaatataaagaaggcaaatacatcattgaactagcacacatgatcaaggacaatggctgggactgattg

SEQ ID NO: 1184 - DNA, 1050 bp, Homo sapiens
  SIMILAR (655)..(783): 461254mologous to Mus musculus Similar to pale ear,accession number BC002172,Smith-Waterman Score=96.
atgaaagaattggattgggaatgtgagagattagaacgggtgaggtgtacattgtattatggaggtgtggttagaggggtacggtcagtgcggaagtggagagcgagacagtatgaggacaaggtcttaattgacaccctggagggcagatatgcctggaaagtcttcgatcttgtcatcttcaccattggtgctgctgagtgtggggtgaactctggggcagcccacgaggcactcccacaggatgggtcgcacgggaaacaccggaagacacagggttgtggcattgtaggaagtaagaaggtgctgggcgaggtgttagagccccggcatcgaaaagtggtcaacccgctgtctgagattctaaaccttggttctcttggtcattcacgcattcaaccaacaaatacttatccagtgtctactccacaccaagcattttcagcagcaagcaagacagagaagctctcaagcttccgtgtcggcaaacagctaagactgaaggcagaggtagcaatcttccggacaagaagtccagaagaacaggtgtcccccacccccgcacgcccccaagaccggagaaaagcccaccactccgggaaagacaccagaggaggtcggcggccaagcagggtgaactggaagtggcgaaagaattcagatattcctatactcttcagtctacaacgtgtcctgctcattcttggccttttcttcactggcctcttgccctttgtgcccattcgagaacagttttttgaaatcccaatgccttctattatactgaacttactaatgaggaaagctttgtttgaccacctaactgctcgaggcattcaagccgtgatacggctgtacaatgatgaacaaattcccaaaagcttggtctggtcctgcttctgtgttgagaacccctggcagctgggggctgaaaattcttccctcagctacttgctagagctcaggacccggtgtctggagttccagaacctccttcaggttcaggaagtgatccacatgacaatcagtggaagaaaagtcattccttaa

SEQ ID NO: 1185 - DNA, 496 bp, Homo sapiens
  SIMILAR (2269)..(3162): 831254mologous to Escherichia coli transfer RNA-Cys synthetase,accession number M59381,Smith-Waterman Score=1286.
  misc_feature (1)...(496): n = a,t,c or g
ngatggcccngnnaatcgagacccatcgtagaccactaggccagtgcggtggaattccatcacttacaccccggggacctgcgagctgctcagagtgatgatgaaggaatccaaactgacgaacatccagcagcgccacatcatggacatcatgaaaagggatttggagaaggagaaacaaagactccaaaatatctttgccacggggaaggacatggaggaacggaaaagaaaggcccctcctgcacgacagaaggctccagcccctgagctagaccgatttgaagagctggtgaaggaaatccaggagaggaaagaattcctggctgacatggaggccctgggacagggcaaacagtaccgaggaatcatccttgctgaaatctcccagaaactccgggaaatggaagacattgaccacagaaggagtgaggaacttaggaagggtcttgccaccacttaatctgtctccagagacgggcagggtagcccaagc

SEQ ID NO: 1186 - DNA, 490 bp, Homo sapiens
  SIMILAR (2614)..(4473): 941254mologous to Homo sapiens putative p150,accession number U93572,Smith-Waterman Score=3044.
tttttttttttttttttttaacagagggcagaaattttattaaaccagcaaaaattcttatcatacagctaatatagaaggataacaataaaataaaatatatagaattttaggtggtcgtaagtgctatagaaaaaacgaagcaggaaagatagagaaggcatgctcagtgcagaatggggctaggatgtagggttttaaatttcagtagggtgtcaggtgaaggcattccgcctgcagcccaagaggcctcatagaatgctttgtcgtgcagtgatgatgaaggaatccaaactgacgaacatccagcagcgccacatcatggacatcatgaaaagtaacggggcagtccacagaggcttcctgggacagagggatctggggccacacttttaatgcttctccatgttaagggagagaggacctcatataaaaaaaacaaagacagccgggcacgtggctcatgcctgtaattccaacactgggaggc

SEQ ID NO: 1187 - DNA, 1744 bp, Homo sapiens
  SIMILAR (1)..(1821): 851254mologous to Homo sapiens putative p150,accession number U93563,Smith-Waterman Score=2589.
ggatccgtgggtgtcaggagccagaggggagggggacagatgtgctgtgtacaggacaaggtgtcaggtgactccttcccagcagggcctcgcagatgcacaagcacggagctggtgggttttgcccaagaaaggtcacgcggcacatgcagggattggaactcccaggccagggctctaggtcgctcccaccttttcatgtttctttctgtggccatgggtatagtggaaagacataaagctaaagccaacttttaatcctgaatgcactgcttgccaggtaaatgcccttggttgtggtatcttgttgagacttagttttcacagagggataatgaacccgttgcagaggtttattgagatcattaacagagtggaattcaagcacccgccacagcagccagccatggggtgcccaagaggttggttcccgttgccacttgaaatatgcaaacaggtagctagaaaccatctgggcttgacaaagtctaatgccttgaacaaaataagcttattcctctgaaaacaaaatggtgcttgtaatgacccacgttaaatatgttttattggccagttaatcattgtggttgaatacttgcctaaggcgggtaaagaaatcaaattaagtaaatcctaaaacaggaagaaaggaatcattattgcattcctgaattcagaaaactaaatgaaacagggcacaggtcagaagtggtgggaagcaggcccagtggatacctttagacacatgtcctagtagggatgctcgggctttgcttctctgcggacggggctgtgagtctcagaggctccatctgcattccgggggcagggggcatggctgctgagtatgccttaaaatactgcagggcagtgctatgccaccacctgacgtggcaaaaggctggtaggatgggctggcctgaggatggccctgcctggcagagtgagtggactccagtgggtcgagcttgggctaccctgcccgtctctggagacagattaagtggtggcaagacccttcctaagttcctcactccttctgtggtcaatgtcttccatttcccggagtttctgggagatttcagcaaggatgattcctcggtactgttctgccctgtcccagggcctccatgtcagccaggaattctttcctctcctggatttccttcaccagctcttcaaatcggtctagctcaggggctggagccttctgtcgtgcaggaggggcctttcttttccgttcctccatgtccttccctgtggcaaagatattttggagtctttgtttctccttctccaaatccctggtggcttgaggcttgaactgctcccggctgtaggccccattggcttgacacatgttggcaggccggaggtggggacgggctgcgaggatgggaggcaggtagatgggcgaggctatttgcttggaaggtaagactctctggctggatgttgggctgcactgtaggggcaaagcatctcctcttttcatgatgtccatgatgtggcgctgctggatgttcgtcagtttggattccttcatcatcactccgtcagtggaaaaattgtcttccacgaaaccggtccctggtgccaaaaaggctgggatcgctgctttaacggactgacctctgagcagctcgcaggtccccggggtgtaagtgatggtcttggggcggcgccggaacccagttcctttggtcactacctccatctgcttctgtgaagccatgggaggact

SEQ ID NO: 1188 - DNA, 346 bp, Homo sapiens
  SIMILAR (325)..(2): 321254mologous to Arabidopsis thaliana En/Spm-like transposon protein,accession number AC006283,Smith-Waterman Score=85.
atggagaggaggctccagatgggagccctggagcacctcaatgtcaggggccacgaggagaaggagctgaatacagacatgatggggaatcaccctccatatcaggttttaagggaacaccatggcttccatctggacgctgctcgcagataccgctctggggaagccagctactaccaagctgtgagctgctctgtggaacgggccatgtggcatggaactgaggccttctgtcaatagccacgcgatgaggtctcaagacaattgccagtgtggctggcagtggaaggcagtcaccttgacgaggggaggtggagggagcaaggtgacagctgactgtaagtga

SEQ ID NO: 1189 - DNA, 1053 bp, Homo sapiens
atgtccaccctggcccagctgtgcctcctggggacatgctgggaagggttggcctttttaggcatctttacatcttggtcctgtcctgagctctatacctgccctgaattggattacaggttaacaccctgccatgcacgtctacagacatacccacacccacacctgcacaagcttgtgtctaaaccttgcttcaggaacaagccagaagagttttgggctctaaggtgcacacctcccccagaggctgcagccaagacgggcatcccacatcagagggatgaatggcagaaagcagcagagactcagacggcggagcctggaggagcccacgcagtctgttcccggcacccggtgcgtgtgaagggacttgagggcagcgagatggaatcagcaagagaaaacatcgaccttcaaataaacatagcaaccgttgccaaccttcagccttcactcaacttcatttcctctcttgcacttgagcctagaggagtcagaaacaagctcaaaggcttgttgatcaaggggacctcggctgcaggggaaacctgctcatcagtccttaacacggccactgcgctacgtaaaagcctagtactcagatggtttagagccaaggcctccaatggcctctcagagctctcagagagccctgttcaggtgcagaaaaactggtctcgtgtattctccatgggtccccacaaacaacagattatcagaaaggatgtggccaagatgcttggtgctgcagatagtctcccggaagagaggggcttacacattcttggcttcttagattttggaagaccagatcagcaaaagacagcatgcactcaggtggaatattgcaaaggtagacatcagctcaaggctagcttctctgggcagctggtgcaaggaagactcctcatagagatctcagagtacatacgaaggggaaacatccacacccagttttccctggtggaaaggtgtgacacagaggcctgccagaggctcatggccccttctccacccagagcagcatctcagctcaacctggggatccagtaa

SEQ ID NO: 1190 - DNA, 404 bp, Homo sapiens
  SIMILAR (37)..(333): 1001254mologous to Homo sapiens deleted in oral cancer 1 (doc -1, alias DORC1),accession number AB006077,Smith-Waterman Score= 498.
cggccgcccctgcgccgcacccggggcctgggtgagaatgccgctgggagtgtccactcgccttccaccagcatggcaacgtcttcacagtaccgccagctgctcagtgactacgggccaccgtccctaggctacacccagggaactgggaacagccaggtgccccaaagcaaatatgcggagctgctggccatcattgaagagctggggaaggagatcagacccacgtacgcagggagcaagagtgccatggagaggctgaagcgcggcatcattcacgctagaggactggttcgggagtgcttggcagaaacggaacggaatgccagatcctagctgccttgttggttttgaaggatttccatctttttacaagatgagaagttacagttcatctcccctgt

SEQ ID NO: 1191 - DNA, 1604 bp, Homo sapiens
  SIMILAR (235)..(417): 801254mologous to Homo sapiens Human secreted protein clone fy356_14 protein sequence SEQ ID NO:112,accession number Y94953,Smith-Waterman Score=238.
gcccccaccatcaaggggaagaaagtgctcttcggattccggttcgccctggcctcccgcagccgccgcgggaccggcccccagcacacccccggggcgccgggcgcggggcagccgcccggacgcgcgcgggcctcaggcgccgccgggaccccagccccccaaactttggcaagttgcgggcgccgagcgcacccggaggcgcggggcgcggccgcaggcggagccgccccctgacgccgggccgccccctcccggccccggccgccccgccggctccgcggaaagtttgcggccgcccctgcgccgcacccggggcctgggtgagactgcggcggcggcagggcgcggacggccatatttgccggcgcggcccgagccgccgacaacaaaaagtgcgcgggcgctcggcgggcgctcggacgggcgcggggctgcagcgctaccgcccggcctcgccgccgccgccgccgccctcgcggcctggccccgccgcgcccggcgcgcccgccgcccggggggatgtcttacaaaccgaacttggccgcgcacatgcccgccgccgccctcaacgccgctgggagtgtccactcgccttccaccagcatggcaacgtcttcacagtaccgccagctgctcagtgactacgggccaccgtccctaggctacacccagggaactgggaacagccaggtgccccaaagcaaatacgcggagctgctggccatcattgaagagctggggaaggagatcagacccacgtacgcagggagcaagagttccattggagaggctttaagcgcggcatcattcacgctagaggactggttcgggagtgcttggcagaaacggaacggaatgccagatcctagctgccttgttggttttgaaggatttccatctttttacaagatgagaagttacagttcatctcccctgttcagatgaaacccttgttttcaaaatggatacagtttcgtttttcctcccatggttcacttggctctgaacctacagtctcaaagattgagaaaagattttgcagttaattaggatttgcattttaagtagttaggaactgcccaggttttttttgttttttaagcattgatttaaaagatgcacggaaagttatcttacagcaaactgtagtttgcctccaagacaccattgtctccctttaatcttctcttttgtatacatttgttacccatggtgttctttgttccttttcataagctaataccactgtagggattttgttttgaacgcatattgacagcacgctttacttagtagccggttcccatttgccatacaatgtaggttctgcttaatgtaacttcttttttgcttaagcatttgcatgactattagtgcttcaaagtcaatttttaaaaatgcacaagttataaatacagaagaaagagcaacccaccaaacctaacaaggacccccgaacactttcatactaagactgtaagtagatctcagttctgcgtttattgtaagttgataaaaacatctgggaggaaatgactaaaactgtttgcatctttgtatgtatttattacttgatgtaataaagcttattttcattaacc

SEQ ID NO: 1192 - DNA, 366 bp, Homo sapiens
  SIMILAR (177)..(278): 471254mologous to Mycobacterium tuberculosis pra,accession number AL021897,Smith-Waterman Score=80.
ttccgctgcctgtctccattacaacagaattcctgggagctgcacagcaaagatggcaggactccattttgcagtaaggaagaggtgaagtgatttgcccaaactcacagaggtggaatgacagacagctcaagatttctgactcctgtccagtcctgtgactactggagtatgttcatgaagaccctccaggatgatggcgagcagggagtgggcattctggtccccctcccccagactcacaagttcaaatgcctggagagactccccaaccaggtctccggctatatctcagttaaatttgtaacccctcagttcctagctcaatgcctctcacagattaagagaccaacagatgtgcattga

SEQ ID NO: 1193 - DNA, 423 bp, Homo sapiens
  SIMILAR (126)..(49): 381254mologous to Gallus gallus T-cell receptor gamma,accession number U78272,Smith-Waterman Score=66.
atgcctgaagaagtgatatgccatgttgctgcccagtttcacactggaagagatcctgtgcaaagatccagcggcctgctttgggttccagtaaacacaaaagtacgtactggcactctgcggattacagactcactgacaacttcatggattcatagatcaagttttgttacattgatccaagctaataagtcaaatgtagaacaaagagaaggctgcatttgttcaggaaactgtaaatctgtcccatttgatcacaatcctgttgaaaggaagaagccttacgaggacagtgtgtttgctacaatgctgagccgtgacagctgcagcagcggctcctggagcacagggctgctggcatgggctcaccaccctcacagccatttgtctggcggcttgtattcagatgtatttgttcagtaa

SEQ ID NO: 1194 - DNA, 686 bp, Homo sapiens
  SIMILAR (31)..(237): 311254mologous to Homo sapiens PRO1310,accession number AF116657,Smith-Waterman Score=66.
atgaggagcaccaaagctttacaccccagctatgtgcatttggggctggggctgcctgggaagagctcgtcctcagcccaaagcctgcaacagctgggatcagggcttacctctcacagacggggctcagcaactttctgcgggatgaggacacaagcccacttgacctggaacgtctgaaacctcctggccccgtggaagatgggaagaaacactcctcttcctctcagttttacaaccgagtggtcctcgggctgcttgtgagcaccggacgaccgaccgagcaggctgcagccaatcagctggcacagggctccgaccgaaaatcatcttggctggtgccacagaatcggcctgaaaacaggatactgcctagagcaaggcacccaggggagccaagcaggaaaatgtaatgaattgactttaagtagctgcagctgtgattagagtatttttagccacaggactcaaccagctttcaaaacctgctaataagagccccaccgtagccagcgcaaaaatttagttttcagtttaacaccaggaatctgcttagctaggagctggcttagaaggcacatcaggagagaacatcttctactgaaagttgaagatttttcattaactagctgaattatgacaaagggagattgtattcggccctcggaggatcacgcatcgttgct

SEQ ID NO: 1195 - DNA, 1665 bp, Homo sapiens
  SIMILAR (685)..(1419): 951254mologous to Homo sapiens putative p150,accession number U93574,Smith-Waterman Score=1281.
atggcggaaggtgaaggggaagccagcacatcttaccaaggtggagcaggagagagagagagagagcaaaggggaatgccctatacctttgaagaaacagatctcatgagaattcaaagctgtgcttcagggtctatggcgtgggacggcgaccccgccctgcccgtgctcccccagcgcctgaagcaggatggagatgccctggtctgcccccggccaggctccctggaccctttgggatctgcggacacagggcctggactggccacatccctgctcccagacagagcacagaccccgctggggcccgccctgggtgtccgcatagggagggggctggagacctcccctccgctgcagcctctctggcctcctgtgaactgcttggctgttcctaagccttggtccctggaaaatcccagttccagctcagcgcccacatccaggcaagtggcaggaagtggcccacaggcttccaagctgcgggagcagactgagcaagcagcaggaagagctgagagtcctgggaacagtggagcctgcatggagggtacaggaaaggggatggagtccggggcagcagtgagagacccagaggacgagagacctggagacacctgcagccctgggagacgccctggcagccagggctcaggaaaagccatcgacagaggagacacaccagcatgggagagagatggtgctgatgaagaggacaacacggggctgtctgcagagcacctgccacgcgccaggctctgtgtccacaagcacggcggctgctcccacatgacagagctcgtgtggcagctccaggactgtctggtgccagagccccagctctccgccagccccaggccactgtgcgaggccctcagtgaagagggggccgtggctttgactgcaggatgcacgggctcgggcttctcagaggagtcagttcacaacgagcagaacagcttcctggagaatcctccacacaggagagctcgaaaaacacgtctaaaacctcgtgaataccatcaaagaggtaacaagccactgtccagccgtcttaaggacacagtcaagaatatgaacaaagatagtgtttgcaatggttttcatggtagaaaagacctgactgccacagggaagactgatagggcctctgaggtggctctgaagtggggggccactcagacgcctgaatgccaactggagggaatgcgccccaggagtgggacgagcccaggtggaggaacatcaggcgtcacctgtccagggcttgcacactggtgccctgggcagttcgtggtgcacacctgtgtgtatgcggagcctgtttgcccccaggtcctgcagcccctcatcctaccctggagctgtgtctttgtggtccctcgtaaacgtggggccccttgtgatacctggggcagcccctcctcactgtcgccagctggcccctgggctcccgccacagtctcctccttcctggactccatcctttcccatacaacaggacaagtgaacattcccgaagtgcagaaaacagggaagttcatctacaagggtcatgaactaagaaggcaggaggtttctgtccccggcaccggcgaatcccggacccgagaaaggagctacgggcgcacggaagcgggcggccccggctctcgcggggcttaa

SEQ ID NO: 1196 - DNA, 816 bp, Homo sapiens
  SIMILAR (448)..(552): 401254mologous to Murinae truncated Pax-1,accession number S76901,Smith-Waterman Score=77.
atggaatggcttttcctgggcagcctgctccaggaagtcccagctcaccttgctcttctcaaagctgttccaaatctcccactgtcccagagtgtggtagcgtctggaggtggccaaatcttcgaatctagccaagaggatcaagaattgcttctggccatgcaaatcttggacctgctcctgtttgcacacttctgcctcttctctgaagctctggtgagggaattaagaacaggatgttgttcccttccgggtgatggattttctaactctcagagcaaagtcatcttttcaaatgagaaacctgaccggcttccttccctcgccctgactcacaggtgccagagctggaacttagccagggctccagggctccagagctcgggggctcgccgcggatccaagcactctggcgtctggcacgttcgttgccggcatcagaaacgctcttacccctaccgccgccagcatgggcttttctctggttgggctgcagggcacaagccgagcactccacgctggtccccgccgcgcagacgccccatcacccccgcgctctcccctggggcgcggaccctctacatctgtggggaaccaggagcctctgagatcctctgcaccccaccgcgcaggaagaaggtaggggaaaagacagacggagcccaggagacgcgtccgaaaccacatttcccgcagacctccgctcagcgcctgaaagcgacttcgcagcctttccgcgtttttagaccgcagaagatgtccgtgaccttctctcctgcccagattgtttcagcgccctgggaccttaggggttaa

SEQ ID NO: 1197 - DNA, 660 bp, Homo sapiens
  SIMILAR (37)..(234): 331254mologous to Homo sapiens p8 protein,accession number AF216972,Smith-Waterman Score=78.
atggaaccaaatgctctgaggagccccagcaccgtgcctcgacctcaccggattctggtcctcactgccgcccgggcctttccgcttcttcaccaaggcggacaggctgacgcactaccacgccgcgcgacagcgaccgcgcgcaaagcgccaggaaccccccctactgcccgccccgcgctggcgaagcgcgacccgtcccgccccgccccgccctcggcacagcgtcagaggcggggacgcgcgctggtctatttttgggcatccggatggcgactgcgggaaatcgagttctcatgctggggcgaaaggaccgtccgcccgctcggaagaggcgaatctcccacggcagacgtctgggtgtgcgaatgccagttgagcggggcctcgaggacgcgtcacacacagcgaggatttgaggagggaagcgccttccaggtagaacggtttctgggttcagagaacggaaagttcagtaaagctgcacaagatctgattgtcaaaaagatcccggcacctcccttctctctctctttcctcgtctttccaagtgaagcctgctacccctcttccccttctgtcatgggtggaagcaacctgagtccctcaccagaagaagatgctggtgccatgcttcttgtacagcctgcagaaccatga

SEQ ID NO: 1198 - DNA, 454 bp, Homo sapiens
  SIMILAR (59)..(97): 531254mologous to Homo sapiens T lymphocyte receptor beta chain V beta 14, J beta 2.7,accession number U41097,Smith-Waterman Score=43.
gggcatccggatggcgactgcgggaaatcgagttctcatgctggggcgaaaggtgtgtctgcaggagccaaatccaaatgagcagtccaggtacttcagagttttaacctgagcgaaacaggaatgtctcgggtcttaacaggaccgtccgcccgctcggaagaggcgaatctcccacggcagacgtctgggtgtgcgaattccatttgagcggggcctcgaggacgcgtcacacacagcgaggatttgaggagggaagcgccttccagagcttcagagaagaggcagaagtgtgcaaacaggagcaggtccaagatttgcatggccagaagcaattcttgatcctcttggctagattcgaagatttggccacctccagacgctaccacactctgggacagtgggagatttggaacagctttgagaagagcaaggtgagctgggacttcctgga

SEQ ID NO: 1199 - DNA, 567 bp, Homo sapiens
  SIMILAR (28)..(318): 801254mologous to Homo sapiens unnamed protein product,accession number AK000542,Smith-Waterman Score=368.
atggctttcgtcaagaggcaaagggtattattggaagcgctggtgtcatttcttgatttctcggataaggaggccaacactgctatgggactgttcacagacttggctctggaagaaagtgagaccccagggatgcccctgtgtgacatgaagctatctggttggttcgtgggccttttgaagacagatcccaaggtaagcagctcctcggctctgtgccagtgcattgccatcatgggaaacctcagtgctgagcccactacccgaagacacatggcggcctgtgaggaatttggggatggctgcttgagcctcctggggaatttcataaacaggtccataggaggctatgatctctctgtgtcccgtggccacatgtctggcagtagacctgaggttgagcttggtcagaaggatgctgacggtcagctgaacttgcgtggaggagagcaaagcatgggacctggaggctacaccacagcagggcagagcaccacagcagggctacaccacaccaatgctggcttatacattgctccctatggagacttcatgactgggttctaa

SEQ ID NO: 1200 - DNA, 801 bp, Homo sapiens
  SIMILAR (1281)..(478): 481254mologous to Homo sapiens keratin 18,accession number BC000698,Smith-Waterman Score=378.
atggctttcgtcaagaggcaaagggtattattggaagcgctggtgtcatttcttgatttctcggataaggaggccaacactgctatgggactgttcacagacttggctctggaagaaagtgagaccccagggatgcccctgtgtgacatgaagctatctggttggttcgtgggccttttgaagacagatcccaaggtaagcagctcctcggctctgtgccagtgcattgccatcatgggaaacctcagtgctgagcccactacccgaagacacatggcggcctcggcatctgctagctcgtctacccctgttccattgtctccaccagatagttacctgaatcaagtagatcttcaggaaaaagcagaccttcaagaaaaggaagcccacgaactgctggattcaggaaagaacacagccgtgaccaccaagaacctcctggagaccctttccaagcctgaccagatccccttgttctatgctggggggattgagatcctgactgaaatgataaatgagtgcacagaacaaactttattcagaatgcacaatggatttagtatcatcagtgacaacgaggtcataagaaggtgtttttccacagcaggaaatgatgcagttgaagaaatggtctgtgtgtctgttctcaagctctggcaagcagtgtgcagcaggaacggaaaaagtttgaccctggacagaaacactgaaaatggggataatgatagctatgtctccttttcacagggctactgtggggagccagcaatagagcttgtgaatgcagtttgcatactctga

SEQ ID NO: 1201 - DNA, 177 bp, Homo sapiens
  SIMILAR (93)..(31): 501254mologous to Gallus gallus alpha(IX) collagen- proteoglycan,accession number M28658,Smith-Waterman Score=53.
ctacccttcccagagtaccgcgggagctcgggctcctgagggcgacggtcctctgatggcagatgcgggagaaactctggcgtcaggcggccctcgcgtggagcacacgaagtcgtggcttattctggcttcagtatgtggggtggagaaggcgatccacgcagctgcgtctatttc

SEQ ID NO: 1202 - DNA, 705 bp, Homo sapiens
  SIMILAR (118)..(216): 361254mologous to Lactobacillus acidophilus acidocin A,accession number D37881,Smith-Waterman Score=63.
tgaaaagaagaggggaagtagaaggaaaacagagctgcctccaggctctgctggggaagactgggtgtgtagcagtgccttcctcctggccgagaatgtaggaagagaaataggtaaggaggaaaagatagttttttaactcacagtgtccacattcaaaatggaactctctggtcaaaagttgaatataaatctctgtaggctaagtccatttgtgacatcccaacatatgttttcaaaaataacatacacactaaatcaagccatttaagcgtaaactggggaaatttcctaaaatttacatgctaaaaaatcaccatttttcatttattactttcatggagcaactttgaatctatggttacagcaggtgaggcaccttgtataaaataaagctaatacatgaaataaaaccatttaaaattctattgttctcagagaatggagaaagcaattgaagccatgggtgtggaggtgactgccctgagaagctgtgtatatggaagagaagggggaaggaaagagccacagagacatgtggccacagaagaagggtccatgggatgcaaggttgctaatggtgagagtggagaagagcccaaagccaaaaaatgcaggcagactccagaatgtggaaaaggcgagaaaaaagatcccctagagcctctagagatgaaggtagcctttccaccacctagattttag

SEQ ID NO: 1203 - DNA, 455 bp, Homo sapiens
  SIMILAR (425)..(237): 841254mologous to Homo sapiens Human PRO1268 (UNQ638) amino acid sequence SEQ ID NO:214,accession number Y99399,Smith-Waterman Score=270.
actacaaaacatattttattacaaagcactaaatacaatgcggataatcccagactcaagacgtaattattccaacacatatcctccagcagaagcagtttccgaggggaaaaccgaagcctatgccttccttcttccaggaatacgaagcggcccttgcccctgtaggcttcgtccttaggttcccgtcatgaaggtaatcagaagggtttctttttcagcccaaagacggtgacgaataaagccatttcagtgacagctggaagggcatgaatgtcctgcttgtcatactcctcgggggtgaacgtgagaggcaggcaggcctgtatgttgctgtcccgggaccagaataaggtgatgacgaccaccagatgcgccaggagcgtcaggaagcgagagggcacaagccctgagacccggcccatggccctcggggacaagggcggcggtctctg

SEQ ID NO: 1204 - DNA, 757 bp, Homo sapiens
  SIMILAR (107)..(535): 481254mologous to Homo sapiens Human PRO1268 (UNQ638) amino acid sequence SEQ ID NO:214,accession number Y99399,Smith-Waterman Score=205.
ggaattcgaggcgttcgtctagatttgtcggcttgcggggagacttcaggagtcgctgtctctgaacttccagcctcagagaccgccgcccttgtccccgagggccatgggccgggtctcagggcttgtgccctcttacttgctgacagctccttgcgcatctggtggtcgtcatcaccttattctgggccccgggacaacaacatacaggcctgcctgcctctcacgttcacccccgaggagtatgacaagcaggacattcagctggtggccgcgctctctgtcaccctggggcctctttgcagtggagctggccggtttcctctcaggagtctccatgttcaacagcacccagagcctcatctccattgggggttcactgtagtgcatccgtggccctgtccttcttcatattcgagcgttgggagtgcactacgtattggtacatttttgtccttcctgcagtgccccttcccagctgtcacctgaaatggctttattcgtcaccgtctttgggctgaaaaagaaacccttcctgattaccttcatgacgggaaccctaaggacgaagcctacaggggcaagggccgcttcgtattcctggaagaaggaaggcataggcttcggttttcccctcggaaactgcttctgctggaggatatgtgttggaataattacgtcttgagtctgggattatccgcattgtatttagtgctttgtaataaaatatgttttgtagtaacaaaaaaaaaaaaaa

SEQ ID NO: 1205 - DNA, 382 bp, Homo sapiens
  SIMILAR (335)..(102): 341254mologous to Homo sapiens Human normal uterus tissue derived protein 48,accession number Y59885,Smith-Waterman Score=85.
gaggacgacgaggaggagaccaccgcgtccacgctgcggggcaagcgccaggccgccgcccgtctcggcgcagtccgccttcagctacatcccgccgcggcgcctggaccccacagagcacagctactactaccgcccggcgcgggaacaggagaggccggctggagtgctgacgtcttctgtctatgggaagcgcatcaatcagcccattgagcccctaaaccgggactttggccgtgccaaccatgtgcaggctgacttctacaggaagaacgacatccccagcctcaaggaacccggctttgggcacattgctccatcctgaagcatacccgtggcccacagggcatgtccgataccctgtggcctggcaagtttgcac

SEQ ID NO: 1206 - DNA, 804 bp, Homo sapiens
  SIMILAR (257)..(105): 451254mologous to Mus musculus retinoic acid receptor- beta 1 isoform,accession number X56569,Smith-Waterman Score=73.
tttttttaccaaggggaaacaaagttttcattttattcaggtgctcacaatgaatcgggctccagattcatttgatcaaaaataattccagctgaaaatcatcacatcagagactcttcacatgtactaaaggtgttgttggtcaggctcctaacccagcaacctgagggggggctgctaacgtgttcatgtgtcccactgtagagatgcaacacaggcatagccaagctccttaggcgttatgagaaggggaaaggaggctccagatgccaccttctcgctgtgcaaacttgccaggccacagggtatcggacatgccctgtgggccacggggatgcttcaggatggagcaatgtgcccaaagccgggttccttgaggctggggatgtcgttcttcctgtagaagtcagcctgcacatggttggcacggccaaagtcccggtttaggggctcaatgggctgattgatgcgcttcccatagacagaagacgtcagcactccaaccggcctctcctgttcctcttcgttaacatgaagtcccaggctttttgcatgttctctgtcatctcggtgcaacttctgatcataatctaggcgcctcttaaaaatacaatcatagagggaaataattcctgtccgcgccgggcggtagtagtagctgtgctctttggggtccaggcgccgcggcgggatgtagctgaaggcggactgcgccgagacgggcggcggcctgggcttgccccgcagcgtggacgcggtggtctcctcctcgtcgtcctccatgccgccaccgtccaagcgccc

SEQ ID NO: 1207 - DNA, 588 bp, Homo sapiens
  SIMILAR (160)..(408): 921254mologous to Mus musculus basic helix-loop-helix transcription factor OUT,accession number AF142405,Smith-Waterman Score=406.
atgaccttaatcaagacatctgaagatactgtagaagtagaaatctctgaagaattcatgaagcccagacaagtgggttttcccctagtgcagcacacccccttcaccaagggacagccaaagagcttcattaaactggtcctgcttcctgtgtcacccaactggaaagcaacaaaatcagcatcaaaaaaagtccccacaaaaacctcactgaagggtcagattgaaactagacaaactcatgaagatgagaaagaatcaacaaaatccactgaaactccaaaaggccagagtgcctcttcttctccaaatcattgcaacacttttccagcaagggtgcagaatgggatggaggatgagatggatgaattgacagaaataggcttcaggaggtgggtaatagcaaactccaccgaggtaaaggagcatgttctgacccaatgcaaagaagctaagaaccttgataaaaggttacaagagctgctaactagaataaccagtttagagaggaacataaatgaccttatgagctgtaaaacacagcacaagaacttcatgaagcatgcacaactatcaatagctgaatag

SEQ ID NO: 1208 - DNA, 532 bp, Homo sapiens
  SIMILAR (121)..(249): 391254mologous to Agrobacterium tumefaciens ORF2,accession number X55075,Smith-Waterman Score=67.
  misc_feature (1)...(532): n = a,t,c or g
gtcggggtaanaactacgggtgtgtcactggcacggttttcactgacactgacgtttccaggaaggcacccagtatataaatctagagtcgctcatgctgtgatttgatcagaacttcaccagaagttgttcgccatgagaacacgacttcctgatgacgaacccgcgcctggcaccgagtatggtgacatccggccgcactctgagctgtcactcacagccaacctgtgcagagatgcaagcaccgcctgcacagcctctcgccacggggccgtcctgctggtgctttgcgaggtgaagccactgacgctgcatgacaaattcccttcctctcactcctgaccaacgttacattcacattcttcactaacatgacatgannnnnnnnnnaaattgtggggcaggttttattatctataatttcagaatccttgaagggcctttacaaagtacagtcatgtacctcatacatacggtcaacaacagaccacatatgatggcggtccagagaattcatcctctctgaactgtg

SEQ ID NO: 1209 - DNA, 488 bp, Homo sapiens
  SIMILAR (212)..(475): 351254mologous to Homo sapiens unnamed protein product,accession number AK000013,Smith-Waterman Score=93.
ggcgggagcttctcgctggcaggtttttctgtacctgcgcttatcttttcacttaccttcgccagttcgcggaaacgtgactgaaagcaacgcgttatgggcaaggtggtggggacttattcgttacctcctccaggctcgctctcttccaattcattatctttagctctcgggtcctggaagcgcggagcctctctggccttgagccccgagggcatggccctgtgatgtcacaaggtggcgtgacagccgggacgaaccccgacccccagcgcggcatccttcccgcggccagcgaccaccgcctcccgggaaggtggctgaccacagccgcaagccgctgcgcgcccggcaagccgaatggaaggacggcgcgggcaaacgaacgcccagtgaggtccagagaagagagggaccttccgagggtcttctagtcgatctcggacaggcttttgagtgccttttaagcattccaaaattttcaggag

SEQ ID NO: 1210 - DNA, 1394 bp, Homo sapiens
  SIMILAR (2000)..(2449): 881254mologous to Homo sapiens immunoglobulin lambda light chain,accession number X57821,Smith-Waterman Score=681.
aatttcgtccctgcgatgcagatctgtggatccagcgtagcatctgtagcagctgggacatcattccaggttttgggcccggtgtgttggcaacaactggatctgaagatggcagtcagggtgctttggggtggtctcagcctgctccgagtgctgtggtgtctccttccgcagacgggctatgtgcacccagatgagttcttccagtcccctgaggtgatggcaggacacactgccacctcatctcccggggaagcccctcctgccctctgcactctgagctcccctgccgctcggtgctcttccccctgacaaatcctcaaaatcctacgagcagctcaaactgcacccgtctgctctgggaggagctggggccgtggcctggcctggtgagcggctatgcgctgctggtggggcctcgactcctcctcactgccctttcctttgctctggacggggccgtgtaccacctggccccgccgatgggggcggatcgctggaacgccctggccctgctgtctggttcctacgtcaccctggtcttctacacaaggaccttctccaacaccattgagggactcctcttcacgtggctgctggtgctggtatcctcccatgtaacgtggggccctacacgcaaggagccggcgccgggtccacggtggcgcagctggcttcttggaggcattgtggctgctggcttcttcaaccggcccacctttctggcctttgctgtggtccccctctacctctggggcactcgtggagccacaaaccctggtttgaagtctctgacccgggaggccctggtgctgctccctggggcagccctcacagcagcggtgtttgtggccacggacagctgtccacagacgcagcctgtgccttggaagggcactgtggtcctcttcaacgccctcggtgccctcctcttcggctgcctgcatcaggggggcctggtgcctggcctggagtacctggagcaggtggtccatgcccctgtgctcccaagcacacccacccactacacactcctcttcactcacacctacatgcccccccggcacctcctacacctcccaggcctgggggcaccagtggaggtggtggacatgggggggactgaggactgggccctgtgccaaaccctgaaaagcttcaccagacaaccagcctgccaagtggctggtgggccatggctctgccgcctctttgtggtaacccctggcaccaccaggcgtgccgtggagaagtgcagcttccccttcaagaatgaaacacttttatttccccatctgaccctggaggatccaccagccctgtcctccttgctgagtggggcttggagggaccacctcagtcttcacattgtggagctgggggaagaaacctga

SEQ ID NO: 1211 - DNA, 702 bp, Homo sapiens
  SIMILAR (512)..(381): 701254mologous to Homo sapiens Human secreted protein encoded by gene 66,accession number Y36289,Smith-Waterman Score=139.
acagaagagaagtttcatgatctcagatcacagccctatggaagctcttgtcaaacactggggaagcctaactctaataaaagtgttcccatgggaagtccaacacagctctcattctgaatgacctgtattgttggtccaagcagggatacatcaaagagactggtggtttattagcattacccagaaggtcagtgtctcctctcgggaaggagatatgaagtccccacttccaagttcttaccccagagagagaggctgctgctctgcttgtggatttactactcatctacccagacatgctactccctccccacaaagtctcccgtcagcttctcaagcagactctgctgccagcttgtcctccagcccacacatgcgggagttttaccctgcccatcaccctcaggggactggaagaactcatctgggtgcaacatagccccgtctgcggaaggagacacccacagcactcggagcaggctgagaccaccccaaagcaccctgactgcccatcttcagatccagttgttgccaacacaccgggcccaaaacctggaatgatgtcccagctgctacagatgctacgctggatccacagatctgcatctgttgaggataacagttgttggttatcacgatgtaaattataatatattcaactgtctgaacaaactgaaaatggatctgtcatttctcgaa

SEQ ID NO: 1212 - DNA, 6429 bp, Homo sapiens
  SIMILAR (5687)..(3357): 981254mologous to Homo sapiens dJ268D13.1.2 (seizure related gene 6 (mouse)-like (KIAA0927) (isoform 2)),accession number AL023513,Smith-Waterman Score=4157.
tttttttttttttctttttcatctgttttattagcatcaatatatacaaagtggaaaatgacttaatttcattattctagcttagaaagtttgttttgctttttattttgtttggcgataaaatggaaatgaaaatttcccaggagaatgcctacctttgggggtgctgaacaactcaaataatatctgacctcaaatgactcgtcatgcctagtcaaggacataggaagatcatgcccttcggattcactcgaagggcatttttgcctgaggccccgtgcctcagcctaaagctacccacatatttgccaaatcactacttgttatacaaccctcctgattatgcaggatgctttgcttccttctggggctgtttgggcaggtcttcaaaggctatcagcctgaggggttctgtagggggctctccaaggggtgagcttcaaaggatcatagttaaagcacatctatgaaactaagtaagaatggccatcaggtagcaatcagaatacttatgttagctaaataattctacaaaaaaaaaaaaaaavaaaagcaaaaagctgagctccaagctaaagagggttgagtgtgtgcatttttaaagcacagggtggtagctgacagatacagcttatatgaattagcatgtaatacacaccatcacatgcattctctgaagctcacaatctctgtaaacgtatttccccactgttttaaaaacaaagagtggcttgtaggaaggctcagtccattctcgagtttctcaagagtgtatcctattcaaaaatatttaatcccaatgggttttaatattgatcttataaaaacagacgtacatgagctgtaatgagatgccttgcacatttttggcactatttttttttacctttacgtattacaaatacacattcagatattttaaaaagaaaaatagacaccaacctgtcttttcaatcacactgtacattgttgaactcgtatgatctgtctctaggctaaaacaaacttttaaaacacggttacgggtgtggtactactaagacagaactgagacactggtcttctgaaaaaaacaacaatgacaacaacaacaaaaaaacaaaaaacacaacgccttttctatcttcccaatagtcaataagaacatctggggtgtggcctggctagttttggggatagggttagaataaagatttatattttgtcagtctttataaaaggcaaatgtttagttttcacataaccataacacgttgtaaaatcaaatattattcatagagttcttcattccaggtgacccagggttagggttagaataagcatcaaataaaatggattgagttctgccttttaaggaaaggttacattatttgtgttgttatctttctccaaacatgacattgtccactaatggcctagaacacttctctggttcttgcattaaatggggctttgggtcctggaaagcagcctttagctatttcttgccatggaccacacactcatgccttcaggagtatatgtgcaagattcttttctggcagaaggaaaatattctggtcttagacccccaagattgaagtctgagttcctgctgtcaaggagggtacatgtgtgcctaaaatcaactttccctatcttgcttaagatgtttccaatgtaaccaccaaaacatagactccctgctattctccctatggccagaaaggtcttttcttgtttgaaaaccagcagacttgaaacaattccagagagaatgggagggcaccaaagagggttccaaatgccactgtgcccgtctgtctgtccaagccattgactgtcaccaccatgtcaccggtcccaggaaggtgaatctgcttcacacatagtatttcttccatgcacccgcaccctccaccttctctttatacctgtatttagaaaagaatcttcccaagagttacacactcaccggtttcactgggttgggggaaaacagaccctgataaaataagaggaatgcccgtgtgactagatgtggggctatggaatcctttctgaatgaaattcctctctctgtcttcattgatgttcagatcagatgatacaggattccactggatggtctgctgtgatttaaaatcccctgcccctgttctctgcacctcctcagtcagcattcacaccaccctccaacatccagacagctttggagaatagaaaaatagtttcttctcatgggaccctcccgccccctgaaatacttgatggcaagtatattctgaagatgacaccttttagagaatcagtgcacttgagtctcctctattttgagggctgagatattccagaaccccaggagaaaccagagctcacccctgcatttccaaacatggcacctcctttttcccatcacaaatccttgtcactgtatgagtggggccgctggtgcctcccaagcctgtgtgtttattaccacagcttgagagtggcttgctgaacatggtgatcgattctggcacttgtagcataaattacacgctctttcatcattgaaagagtgtcaaagaaaagaacattttaacccaattcccttacccaatgatccccctcacccaattcttcattggaactctcaaatctctcatttgtctctgaaaaattgcctttggtcgtttatcacctttctagaaagaaaacgttttcttgttttgtcactgtccagcgaggccagagtggtaaaagacaatgtttatataacacctttgctaccttcagaagaaccgtgagagggaggggctgtggaaaaacctttcagaagctggcaaaatgggaagagaggacacagaatttgtttaggagcacagctctccaaatgggtttaagtacccatgctaaattccaacccaaactaagccaacaagaaataccctttccaacctaatcttgggacttagatttgtactgaaaacatcatgggcatggttcccaaagatgcatgcaattcaatgcagccttagcatggcattgctgatgggagaaactccatctgctgttttgtgtttttgctgccgcggtttgccattttgcaagtcttccacctgccttcagaattgaggctgtaacatgaatttggctgaggccgcgaaacatccaaacccacacctatttcacttttaaatataataaatacagggaagaaaacagtaaacctttgataaagagtctaaacaaaagacagtcgacattctggggtttcaatcaagtgccacatggtctctggatgaatgtctcgaggagattgtggttgagttcacaagtccccttctcaagtgtagctctctttagatagaaacctcatactctctggtttcccctgtctcgtaaatggggttgtcaaactcggtttccacggtgatctggctgtaggggtgggagtacatcagaggcaggcggaggttggaatagtagcgacatcttgtgatgtaaatgtaggctcctcccagcagtaaggagatgatgaggaccgggatgaagatagccagggccatgttccccccttccagcgacgtctctgctgccgcttctgctactttacacacgggcaggggcccgttccagtgggatggctgtcccaggatgcagcggatggtcacttcacccatgagctcaaagccttcgtagcacatgaaggtgagggactctcctggcaggtagagtcgcttgtacaggatttggtatccattttcaggcagccctgggttgtcacatgccagggactcctccgaaacgcagtggggcaggcgagacgtccagatgggagtccctgtttcacggctgtagcaggtcagaagagaactcccttcaagcacaaaaccggggttgcaggtgtattggatggtggtccccaccagcagcacaggatccgaaattaagcgggtcgagtgatccacctctccggggtcggtgcagtacataattttctcacaaaatggggggtcgctgctccagctgaggtcccactggcaggtgagggtgtcactccccacgatgtcatagccggggtcacactggtaggtgattctggctccccgcaccaactccgtgtgagaagtggttttccagccattctggatctcgggtaaatccgagcaggagtcattccttgatacctctatgtagttcatgataaatccctggccctttccaaagatgaggccagcagggtccgaatggaactggatggttaagtctggcgtggaggagtacagtttctgggggccactgttcccaaggtactgccccaagatgtggggcatgacctcgtcgccatcgtagatggtcaagatgtcactgttgctcagattcaggaactggatatctaagaagatccgtttctcttctcccacgtggatcttccagatacaatcttcaccttccacgtagggctcgggccagtttggggacaataccaccccagccacagcagagagctccccaccacacatggctctgcacaggggctctgtgtcattccagtatgggtcccgcacattgatgcattcgatgatggccgggccctgctccagggagtggccggggtcgcaggtgaactccactatagtcccaatgttataggtcgggtcggatgtagtgaagttcccattctggatgtagggctcatagcagtggcctttctcaaacgcttcaaatcggatgttgaaggtggaggccgcccgggcctggtcggacgtgaactcgatgcggatggtgttgccttcgctcagcaggccctcaaaagggacactctcggtttgaagggagtcgtagagaagagctgacttgttggtctgcccgctgtgaaccgtcatcctgtccttgtcatgcagcaacagcctctcaaagtgcaggtgcagcttctggccctctggagcttcaatcgtccagatgcagaattggctcccattggtgttttcagggtaacttggggagaggacgcggccgatggtggcattgtgcactgcccctccacaaggagctgagcagatgggctcctggctgctccagtgcggcttggaggcattgatgcatgtcagcatcttagcgccctggagctcatagcccaggtggcagtgaaagtgggccaccccacctgagtgcaggtccatcaccgtgacatccccagagtcaggccggcggggaaagttgcagctcagcatgaaggcctggtagtgaagctggaaggtcccaaggccgtcgtcctggaaggtccggaagtagacggagatggtgttggtggggcttcggattacctgcccctccaccaggagtgtctggttggccaggacggtcagggtagggccgtccaccccgcggatggagagcagttccccatcggacaggttcacactcttcacctggagctccaccccatagccagtgtagactgtcacgttgtatgtgcactccagaaagttgttgaggggcagcagtgggtagtcgctggagtcaatgtacccctcaggattggagaagctcacactgcagagagctggtgcctgctcggtggtgatgaccgtggtggtgataatggtggaggtagtggtctcctggctctcctctgaggctgacccagtcagctcattctcacctttgtccatcagggccatggggctggtgtcctcctggggggcctcctgggccatgtcaggcccaggctccccgggttctggcctctgggggagtgtgtgggccacatagggctgcgaagtgaagggggagatttgcaggggtgcgggtgttgtagggaccgcactctcctttcggtccagccaaaggggcacttctgatgcctcctcggaggccacgatggggtccgggtcccccggtgggccaggcttctccgtggaggaggagaggagatctaggccctgggacgctggctgggaccctgccctttggacagtggctgcggaggtggccttgggcctcagctgcttcctggcagagttcacctgcttgagcgaaggcagtttcttcttggggggcaaggcgtgcttggggcgggcctcctctggaagcagcggtgacagggctgggatgtcgtgatgtgcagagggtgcggtcccatccagcaccagctcgcccagcacttccgccgactgtgaggaactggggggcgctgttaccactctctcttcagggtgctctttgccaggactgcctctctccggggctcctgagggcaggaggtaaggacccaaagggctagcatctccctcgggaagagcatcttggaagaggagaaaagacaccagttagtttggggagatttaggaccttcacctgctgtcagactctgagggtggccctcctaagggcggtgcccaaagctcgtccggctggcctctaaaccaacttctcctttctccctccctcccttccttt

SEQ ID NO: 1213 - DNA, 1306 bp, Homo sapiens
  SIMILAR (998)..(1222): 241254mologous to Caenorhabditis elegans F47D12.6 gene product,accession number U22831,Smith-Waterman Score=72.
atgaagaaatctaaagaagggtatgaggtggagtgtgactggggtatcgtattccagggagtagtggagactggagcagaatctctatcaggaaatcacagggttggaaaaaaagatgcttggccaaactacatcgcagctgaaccagggtcttcattctgtgacagtggaccagcttcagagaagttccttccaactgattcacgtattttgctggtcctgaaagatgggacgctgtgtggggcaaagggttgtctcatggcccccaggacgacggtcctaattcattctctggcgaaacttttatctgaagtcatctgtgcgtttcttatggcaaagcttatctgcatttctgtctgttatctgcattttaaaccaaacccagttttaaatattctcctgctggactgtgcccaaactgaggggatgagagaggttcggggaagctgctctcacgcgtggcctgctgcccaggtagaattatcacccggtgcagagccaagaagcctcggtcaaatcagctgtccagcagttcatagaaattaaccactcagataaaggacaaagtggccgcagtttacagaaaatccctgcagggtggcatccagtgctccctgactccatgcatgaggtgtcatgtggtcagtggccgcatgggttaaaccccagaaggccagacctggaggagagatccagctccagcccatctgggaagtccctgatcgggggtgatgatggtgacaaaggtcaacatgaggctacttgtttgtttttgcaaaatcgggtatcagtacaaaggcaggaggaggtagaaggagctgttaatacctatggatgcgaggtcgtggatttaaaaacatctcttagcttcatcttagctccaggtaaactcacgagctactgcagaaaacatgccgaatgccggggcactgagacggctacatacagtcacggatgggactctgccacggtcctcagtcacatttacccaaatgacacattgtgggatgatgccgcacacaaccgccagctaccacactacttccacccaaatgcaaggatgctcattctaatgaagtcacaaactctgcttagtagcctgctgatgtgtgttacatgtgcatgcttctctcagaaaaagagaatctcaaagcatctggttaacaatcataggaagaaacttcgctttgtaaaccccctacgcaaagtatcacgggggccacgcatcaaggccagtgctgatctgggtgcctcattaaaaataaaaaccaaaaatgacataaatataattaaaagggatgaatga

SEQ ID NO: 1214 - DNA, 333 bp, Homo sapiens
  SIMILAR (145)..(282): 841254mologous to Homo sapiens Human secreted protein sequence encoded by gene 10 SEQ ID NO:63,accession number B25674,Smith-Waterman Score=203.
atgccaatggtgcaggtgctgggcaggggctcctgtgagggacgtccctgtcacaacaatctccttggagcttctcctcctcccactcgcctccctgatgccatcgacctcaggccacattcccacatttccctctcccgtggttccaggaggctctgccacatctccaggcgatggattctgccctgggattcccgccagctcctgagatgtgtgactcccagggagggccttgctctgaaggcaccggagtcttcatggatggccacagaggtggcattaagtgggctgtgggtctacacgttccggacgtgttgctccatccagttgtga

SEQ ID NO: 1215 - DNA, 249 bp, Homo sapiens
  SIMILAR (145)..(26): 351254mologous to Caenorhabditis elegans weakly similar to repeat region of merozoite surface protein CMZ-8 (SP:MSP8_EIMAC, P09125),accession number U23411,Smith-Waterman Score=63.
atgtggcagagggaaaatgagtgctcaaaggctgaacaaggcaggaaagagcagcaggccagtgtggctggaacacagcgagcacgggccaatgtgatcagagaggaaccaggtaacctagagctgcagggcttgctaccgcccaatcatctaggctctctttggctccacagacaagtttctatgaagaagtcctatgtcaacggttccaaactttcttggctcaaagaatctttagtgtctcagtga

SEQ ID NO: 1216 - DNA, 249 bp, Homo sapiens; identical to SEQ ID NO: 1215
  SIMILAR (145)..(26): 351254mologous to Caenorhabditis elegans weakly similar to repeat region of merozoite surface protein CMZ-8 (SP:MSP8_EIMAC, P09125),accession number U23411,Smith-Waterman Score=63.

SEQ ID NO: 1217 - DNA, 482 bp, Homo sapiens
  SIMILAR (1)..(126): 611254mologous to Homo sapiens Human secreted protein, SEQ ID NO: 6403,accession number G02322,Smith-Waterman Score=113.
gtcactaaaggtttcaggcacagaactgtatatccaataatagtgaaatggatcccactaattatgacagaaatgatgatacatttaaatgacttggatgttttataggttggcactcatgatgagccgctgttctcattctgcaaatggtgaagctctctattgtcctgaccccacagttcctgtcgcatgaccagagccagctcaccaaggagctgcagcagcatgtaaagtcagtgacatgcccatgcgagtacctgaggaaggttatcaatagtctggctgtctatcgtcatcgtgagactgactttggtgtaggagttcgagaccaccctgggccaacatggcaaaaccccatctccacaaaaattggataatttgataattatcattattggggttctgaggacggtacaacatttaacattctcttctgcaacaagttgcctttgtgtgtctttcctgaggacttatcttctggg

SEQ ID NO: 1218 - DNA, 714 bp, Homo sapiens
  SIMILAR (1)..(132): 1001254mologous to synthetic construct chloramphenicol acetyltransferase,accession number A02739,Smith-Waterman Score=249.
atggtgaagctctctattgtcctgaccccacggttcctgtcccatgaccagggccagctcaccaaggagctgcagcagcacgtaaagtcagtgacatgcccatgcgagtacctgaggaaggttatcaatactctggctgaccatcgtcatcgtgggactgactttggtggaagtccttggttacttatcattactgtgtttctgagaagttataaatttgccatctccctctgcacaagttacctttgtgtgtctttcctgaagactatcttcccgtctcaaaatggacatgatggatccacggatgtacagcagagagccaggaggtccaaccgccgtagacaggaaggaattaaaattgtcctggaagacatctttactttatggagacaggtggaaaccaaagttcgagctaaaatctgtaagatgaaggtgacaacaaaagtcaaccgtcatgacaaaatcaatggaaagaggaagaccgccaaagaacatctgaggaaactaagcatgaaagaacgtgagcacggagaaaaggagaggcaggtgtcagaggcagaggaaaacgggaaattggatatgaaagaaatacacacctacatatcaccccttctgcaagaaagcctctttgcaaccgggtcagaatggcggcagcggagcatcgtcattcttcaggattgccctactggccctacctcacagctgaaactttaa

SEQ ID NO: 1219 - DNA, 1587 bp, Homo sapiens
  SIMILAR (286)..(831): 901254mologous to Homo sapiens putative p150,accession number U93564,Smith-Waterman Score=882.
atggtgaagctctctattgtcctgaccccacagttcctgtcccatgaccagggccagctcaccaaggagctgcagcagcatgtaaagtcagtgacatgcccatgcgagtacctgaggaaggttatcaatactctggctgaccatcatcatcgtgggactgactttggtggaagtccttggttacatgtcattattgcatttccgacaagttataaagttgtcattaccctctggatagtttacctttgggtgtctctcctgaagactatcttctggtctcgaaatggacatgatggatccacggatgtacagcagagagcctggaggtccaaccgccgtagacaggaagggctgaggtccatttgtatgcacacaaagaaaagagtttcttcctttcgaggaaataaaattgtcctgaaagacgtcattactctacggagacatgtggaaacaaaagttagagctaaaatccgtaagaggaaggtgacaacgaaaatcaaccatcatgacaaaatcaatggaaagaggaagaccgccagaaaacaactctctcaacattcaatttctcatgtgttggctttttcagatccccccttctgcaagaaaggctctttgcaactggctccaccctcagcagatgataatatcaagatacctgctgagcgtctgcggattccgcttccaccatcagccgatgataatctcaagacaccttccgagcgtcagctcactccccttccaccctcagctccaccctcagcagatgataatatcaagacacctgccgagcgtctgcgggggccgcttccaccctcagcggatgataatctcaagacaccttccgagcgtcagctcactccccttccaccctcagctccaccctcagcagatgataatatcaagacacctgccgagcgtctgcgggggccgcttccaccctcagcggatgataatctcaagacaccttccgagcgtcagctcactccccttccaccctcagctccaccctcagcagatgataatatcaagacacctgccgagcgtctgcgggggccgcttccaccctcagcggatgataatctcaagacaccttccgagcgtcagctcactgcccttccaccctcagctccaccctcagcagatgataatatcaagacacctgccgagcgtctgcgggggccgcttccaccctcagccgatgataatctcaagacacctcccttagctactcaggaggctgaggcagaaaaaccacgcaaacccaagaggcagagggcggctgagatggaaccacctcccgaacccaagaggcggagggtcggtgacgtggaaccgtcacgcaaacccaagaggcggagggccgctgacgtggaaccatcatcacccgaacccaagaggcggagggtcggtgatgtggaaccgtcacgcaaacccaagaggcggagggccgctgacgtggaaccatcatcacccgaacccaagaggcggagggtcggtgacgtggaaccgtcacgcaaacccaagaggcggagggccgctgacgtggaaccatcattacccgaacccaagaggcggaggttgagctga

SEQ ID NO: 1220 - DNA, 458 bp, Homo sapiens
  SIMILAR (279)..(148): 931254mologous to Homo sapiens Human secreted protein, SEQ ID NO: 7217,accession number G03136,Smith-Waterman Score=213.
  misc_feature (1)...(458): n = a,t,c or g
ggaattccaacgccaagagggaaccctagtgtagcccttccagcgctgtggactctgggtgacagttttgcgttagggtagcttcatggattgccgtactctatgagggatgttgctggtggggaggctgtgcctgtcggggcagggagtacatggcagctgtatnnnnnnnnnnnnnnnnnnnnnnnnnnnnnnnnnnnnnnnnnnnnnnnnnnnnggcttcttgttttagtcacttactaagaaaagaagtcagtgaaagattttgtccttgaattaggatcccaagaggaggagctggtggagaagaagaggacatgacaccacagtggccatagcagaagggtcgagggtttttctaatgagcccgtttaggggccataagctgatggccctactcttaaaaagcccaggtcagttaaccgcagcaggaaagatagcggcccattattgaaagg

SEQ ID NO: 1221 - DNA, 509 bp, Homo sapiens
  SIMILAR (244)..(501): 901254mologous to Homo sapiens Mouse novel secreted protein isolated from clone BD407_li,accession number W54454,Smith-Waterman Score=413.
ccccctgactgtaacgtatgatctcgtgaaaccttgagagaaactgaatgacgaatgaaactattgttcctgtttcacacagaagaaaactgaggttggcactcatgatgagcccctgttctcattctgcaaatggtgaagctctctattgtcctgaccccacagttcctgtcgcatgaccagagccagttcaccaaggagctgcagcagcatgtaaagtcagtgacatgcccatgcgagtacctgaggaaggttatcaatagtctggctgtctatcgtcatcgtgagactgactttggtgtaggagttcgagaccaccctggccaacatggcaaaaccccatctccacaaaaattggataatttgataattatcattattgggtttctgagacgttacacatttaacattctcttctgcacaagttgcctttgtgtgagtatactaactttctgtagaggtatacttgtaatcacaaataagaataaattatataaaacaaaaaaaaa

SEQ ID NO: 1222 - DNA, 1611 bp, Homo sapiens
  SIMILAR (1)..(1161): 851254mologous to Homo sapiens putative p150,accession number U93572,Smith-Waterman Score=1691.
atggtcctggcctctactgtgaagcccctgagcgtagaggaggccttggcgcccgcagatgaggtcgcaaggaccaaccagtgcctacccgcccatgctcccccgaaactgggaactgacagcccagcccctccaaagccccttcctccagcttcagctgccaggtcagcaagggcactgggctccctctgctccccgtgggccgctccccgcgtggggccactgcccccggcccccgccatggtgcggatttcaaagcccaagacgtttcaggcctacttggatgattgtcaccggaggtatagctgtgcccactgccgcgctcacctggccaaccacgacgacctcatctccaagtccttccagggcagtcaggggcgtgcctacctcttcaactcagtggtgaacgtgggctgcgggccagccgaggagcgggtgctgctgaccggcctccatgctgtcgccgacatccactgcgagaactgcaagaccactttgggctggaaatatgcctctgtggctgctggctctgggccccgcagtttcctcttcacacgggcgtctcgctccctggggaacagtggtggtgatgatgatgatgatggtgatggccatggtgatggtaacagtacttacccggtgccaggcatttcaccctcccagggaccctgtcagatgcagaaactgaagcacacactgccttcagctctggagggcctcatgtccacccacaggacgagggcattggtgaaggacctgaaaactaggctcctgaaggtggcgagcctgacggccctggagagggcaaggtgcaggcagacagtgctgctttcagaggccaagtgggctgcagcaggggaaggggtgggcagccttggggctgccacaaagttcctgtcccatgaccagggccagctcaccaaggagctgcagcagcatgtaaagtcagtgacatgcccatgcgagtacctgaggaaggtgaattgcacaggtgagagtgctcagattagggctggacgttgtaaccattgctcccaactgacagtgcccgtgtcggcatgtttcgggcatttctgggctaaactcttccaaaatcggggccgaatcccccgtgcacaggccggggagaaaggcgccaagaacgaaccaaaggccttaaaatctctgcaaaatcaggaaggaactatttacactgactccaagtattttggagtagtccatacctttggaaagatctggactgaacgaggcctcattaatatcgcaatccccatcttctccgacgcggaccaagaaaagttaaaaagaataggagctaaggaaagctcagagggaagctggactgccgccatggaactcagcgccgaatacctccgcgagaagctgcagcgggacctggaggcggagcatgtggaggtggaggacacgaccctcaaccgttgctcctgtagcttccgagtcctggtggtgtcggccaagttcgaggggaaaccgctgcttcagagacacaggctggtgaacgcgtgcctagcagaagagctcccgcacatccatgcctttgaacagaaaaccctgaccccagaccagtgggcacgtgagcgacagaaatga

SEQ ID NO: 1223 - DNA, 639 bp, Homo sapiens
  SIMILAR (43)..(444): 571254mologous to Homo sapiens p40,accession number U93569,Smith-Waterman Score=412.
atgaaacctgaagtggttcctaagcccaaagatgtggagcctcggaacatgcagtcacatacacacagaggaagtgcggaagcccagcagtggccagcgcttccaggagaggccgagagccgggaagcgtgtctaagtacatacctaaaaattcatacatccgttgtcctgaagaagccatgggttatgccagtccttgtctcagaaactgttgccagcacagcttgggggcttggcaatgccattagctcagtactgagccatgaaagcagaaatcagatctccaaagggaccgtgcatgagagaatctccgagatgctctggaagaacaatggccaagcaaaattctcccggaggacagagtctgtggcagtctttctgggtgaccagggacactggctccagtgttcagtcacctgcccaagatgcctaggcctgcaggagggaccagaggcagatgatgtagacaatgatgatgtcacaaagagaatcatttatgctcctgtcttccgtggaggaagtctggtagtatctccccgggacactggctcaaatttccagccacctgcccaagacagatgggaccaggggccagatgatgtggacaatgatgatgtcacaaagagaagtaagaaataa

SEQ ID NO: 1224 - DNA, 948 bp, Homo sapiens
  SIMILAR (7)..(1065): 1001254mologous to Cloning vector pSacBII SacB,accession number U09128,Smith-Waterman Score=1866.
atggcatacgcctataccacctgtgatcaccgggattgtcgactgttcacggcacagtttatgcaaaccagcgccaccacgcgggatcagcatgtcgatgtatttatccatacgcagcatttcactgaccagcgcacggtcaggattatcaatcgcctgcacggcacccgccgcgttagtgcgacacgtttctttgccaccgcgcaggatcaccgcattaccggttttcaggcacagcgaagcgacatcaaccgtcacgttcgggcgcgcttcataaatcacgccaataacccccagcggtacgcgacgacgctcaagacgcaggccgctgtccagtacgccgccatcgattacctgccccaccgggatcggcgagacccgggaatatccacagccaattatccgctgagattgcacataagagcgtctgggaagccttttcgctacgacataggacgtccgaagaccggaaacaatgaattaggtcaaaatgggccagctcaccaaggagctgcagcagcatgtaaagtcagtgacatgcccatgcgagtacctgaggaaggctctgcagcagccgcccccacctgtgaaatgttaagagctcatggccatgatgacctctactttaaatgggaaccttgtgcctcctcccaagctatcactgtgctcccgaaacacagcggaactggtggaagccgacagggccctgccgtggcccaccccgcagccccctttcccaaggtgcgaggtggagagggtacgtactacttgcacctgtccgtcttctccgatctggtggatctgcacctgctgcacgttggccagcgcgtagtgcagggcctgcggctgcggctgtggctgcaggagctctctggcaggaggtggggtgctcatcatcggctctgtgggggcaacaggtgtgaacggggtgaacgagaagtttcttag

SEQ ID NO: 1225 - DNA, 1020 bp, Homo sapiens
  SIMILAR (545)..(874): 331254mologous to Crypthecodinium cohnii Dip1-associated protein C,accession number AF255446,Smith-Waterman Score=123.
gtaggtttcaggcacagaactgtatatccaataatagtgaaatggatcccactaattatgacagaaatgatgatacatttaaatgacttggatgttttataggtatgatctcgtgaaaccttgagagaaactgaatgacgaatgaaactattgttcctgtttcacacagaagaaaactgaggttaaaaggggtaaagtaattttgcatggcatgaagtagaaattcaaagtacaggaatttgaacttggttctgtccttttctgaagcccttgaccactatagactcaaacatcaccttgtttttccactcattcaacactttttttttaaattatctaataggttggcactcatcatgagcccctgttctcattctgcaaatggtgaagctctctattgtcctgaccccacagttcctgtcccatgaccagggccagctcaccaaggagctgcagcagcacgtaaagtcagtgacatgcccatgcgaatacctgaggaaggtctggaaccagacagagcctgaacctgccgccaccagcctgctgagcctgtgcttcctgagaacagcaggggtctgggtgccccccatgtacctctgggtccttggtcccatctacctcctcttcatccaccaccatggccggggctacctccagatgtccccactcttcaaagccaagatggtagctgccatccctgggagcctggaaccaggcaatggtgacaacggcaaaccatccaccctggtgttgactgactttaacaaggttcagttcacagagattgagggcagaaaaaggaaacggcctcaaaaggacacctgtggtgacttgctggtgactctacagtccctgagccgccagggtgagaagcggagcctccagctctccggcaaggtcaacgccatgactttcacctttgacaacgtgctcctggaaaatacaaaactaaacttcccacaggccttctgcccgatcacacagagtgtgcccaaactctctcaggcctctggcagctga

SEQ ID NO: 1226 - DNA, 5471 bp, Homo sapiens
  SIMILAR (1)..(1659): 1001254mologous to Homo sapiens KIAA0220,accession number D86974,Smith-Waterman Score=2884.
caggacacgaggaaactgttaatgacttgggctttggaagtagctgttgtaatgaagaagtccgaaacatatgcacctttattctgtcttccgtctttccataaattttgcaaaggccttttagccgacactctcgttgaagatgtgaatatctgtctgcaggcatgcagcagtctacatgctctatcctcttccttgccagatgatcttttacagagatgtgttgatgtttgccgtgtccaactagtgcaccgtggaacttgtattcgacaagcatttggaaaactgttgaaatcaattcctttaggtgttttcctaagcgataacaatcacacagaaattcaagaaatttctttagcattaagaagtcacatgagtaaagcaccaagtaatacattccacccccaagatttctctgatgttattagttttattttgtatgggaactctcatagaacagggaaggacaattggttggaaagactgttctatagctgccagagactggataagcgtgaccagtcaacaattccacgcaatctcctgaagacagatgctatcctttggcagtgggccatatgggaagctgcacaattcactgttctttctaagctgagaaccccactgggcagagctcaagacaccttccagacaattgaaggtatcattcgaagtctcgcaggtcacacattaaaccctgatcaggatgttagtcagtggacaactgcagacagtgatgaaggccatggtaacaaccaacttagacttgttcttcttctgcagtatctggaaaatctggagaaattaatgtataatgcatacgagggatgtgctaatgccttaacttcacctcccaaggtcattagaacttttttgtataccaatcgccaaacttgtcaggactggctaacgcggattcgactctccatcatgagggtaggattgttggcaggccagcctgcagtgacagtgagacatggctttgacttgcttacagagatgaaaacaaccagcctatctcaggggaatgaattggaagtaagcattatgatggtggtagaagcactatgtgaacttcattgtcctgaagctatacagggaattgctgtctggtcatcatctattgttggaaaacatcttctgtggattaactcagtggctcaacaggctgaagggaggtttgaaaaggcctctgtggagtaccaggaacacctgtgtgccatgacaggtgttgattgctgcatctccagctttgacaaatcggtgctcaccttagccagtgctgggtgtaagagtgccagcctgaaacattgtctgaatggtgaatccagaaaaagtgtgctgtccaaaccgactgactcttcccctgaggttataaattatttaggaaacaaagcatgtgagtgctacatctcaactgccgattgggctgctgtgcaggaatggcagaacgctatccatgacttgaaaaagagtaccagtagcacttccctcaacctgaaagctgacttcaactatataaaatcattaagcagctttgagtctggaaaatttgtcgaatgtaccgagcaattagaattgttaccaggagaaaatatcaatctacttgctggaggatcaaaagaaaaaatagacatgaaaaaactgcttcgtaacatgtgaagtccagatccaagggaacctcagaaatccattgaagttccattgttaagaagttctgtttgtttggcaactgctttaaacccgatagaacaagatcagaagtggcagtctataactgaaaatgtggtaaagtacttgaagcaaacatcccgcatcgctattggacctctgagactttctactttaacagtttcacagtctttgccagttctaagtaccttgcagctgtattgctcgtctgctttggagaccacagtttctaacagactttcaacagaggactgtcttattccactcttcggcgaagctttacgttcatgtaaacagcatgacgtgaggccgtggatgcaggcattaaggtatactgtgtaccagaatcagttgttggagaaaattaaaggtatgatctcgtgaaatcttgagagaaactgaatgacgaatgaaactattgttcctgtttcacacagaagaaaactgaggttggcactcatcatgagcccctgttctcattctgcaaatggtgaagctctctattgtcctgaccccacagttcctgtcccatgaccagggccagctcaccaaggagctgcagcagcatgtaaagtcagtgacatgcccatgcgagtacctgaggaaggttatcaatactctggctgaccatcatcatcgtgggactgactttggtggaagtccttggttacatgtcattattgcgtttccgacaagttataaagttgtcattaccctctggatagtttacctttgggtgtctctcctgaagactatcttctggtctcgaaatggacatgatggatccacggatgtacagcagagagcctggaggtccaaccgccgtagacaggaagggctgaggtccatttgtatgcacacaaagaaaagagtttcttcctttcgaggaaataaaattggcctgaaagacgtcattactctacggagacatgtggaaacaaaagttagagctaaaatccgtaagaggaaggtgacaacgaaaatcaaccatcatgacaaaatcaatggaaagaggaagaccgccagaaaacagaaaatgtttcaacgtgcgcaagagttgcggcggcgagcagaggactaccacaaatgcaaaatcccccttctgcaagaaaggctctttgcaactgggtcagaatggcggcagcggagcatcgtcattcttcaggattgccctactggccctacctcacagctgaaactttaaaaaacaggatgggccaccagccacctcctccaactcaacaacattctataactgataactccctgagcctcaagacacctcccgagtgtctgctcactccccttccaccctcagcggatgataatctcaagacacctcccgagtgtgtgctcactccccttccaccctcagcggatgataatctcaagacacctcccgagtgtgtgctcactccccttccaccctcagcggatgataatctcaagacacctcctgagtgtctcctcactccccttccaccctcagcggatgataatctcaagacacctcccgagtgtctgctcactccccttccaccctcagctctaccctcagctccaccctcagcagatgataatctcaagacacgtgccgagtgtctgctccatccccttccaccctcagcggatgataatctcaagacaccttccgagcgtcagctcactccccttccaccctcagctccaccctcagcagatgataatatcaagacacctgccgagcgtctgcgggggccgcttccaccctcagcggatgataatctcaagacaccttccgagcgtcagctcactccccttccaccctcagctccaccctcagcagatgataatatcaagacacctgccgagcgtctgcgggggccgcttccaccctcagcggatgataatctcaagacaccttccgagcgtcagctcactccccttccaccctcagctccaccctcagcagatgataatatcaagacacctgccgagcgtctgcgggggccgcttccaccctcagcggatgataatctcaagacaccttccgagcgtcagctcactccccttccaccctcagctccaccctcagcagatgataatatcaagacacctgccgagcgtctgcgggggccgcttccaccctcagcggatgataatctcaagacaccttccgagcgtcagctcactccccttccaccctcagctccaccctcagcagatgataacatcaagacacctgccttccaccctcagcggatgataatctcaagacaccttccgagcgtcagctcactccccttccaccctcagctccaccctcagcagatgataatatcaagatacctgctgagcgtctgcggattccgcttccaccatcagccgatgataatctcaagacaccttccgagcgtcagctcactccccttccaccctcagctccaccctcagcagatgataatatcaagacacctgccgagcgtctgcgggggccgcttccaccctcagcggatgataatctcaagacaccttccgagcatcagctcactccccttccaccctcagctccaccctcagcagatgataatatcaagacacctgccgagcgtctgcgggggccgcttccaccctcagcggatgataatctcaagacaccttccgagcgtcagctcactccccttccaccctcagctccaccctcagcagatgataatatcaagacacctgccgagcgtctgcgggggccgcttccaccctcagcggatgataatctcaagacaccttccgagcgtcagctcactccccttccacactcagctccaccctcagcagatgataatatcaagacacctgccgagcgtctgcggggagcgtctgcgggggccgcttccaccctcagcggatgataatctcaagacaccttccgagcgtcagctcactccccttccaccctcagctccaccctcagcagatgataatatcaagacacctgctgagcgtctgcgggggccgcttccaccctcagcggatgataatctcaagacaccttccgagcgtcagctcactccccttccaccctcagctccaccctcagcagatgataatatcaagacacctgccgagcgtctgcgggggccgcttccaccctcagcggatgataatctcaagacaccttccgagcgtcagctcactccccttccaccctcagctccaccctcagcagatgataatatcaagacacctgccgagcgtctgcgggggccgcttccaccctcagccgatgataatctcaagacacctcccttagctactcaggaggctgaggcagaaaaaccacgcaaacccaagaggcagagggcggctgagatggaaccacctcccgaacccaagaggcggagggtcggtgacgtggaaccgtcacgcaaacccaagaggcggagggccgctgacgtggaaccatcatcacccgaacccaagaggcggagggtcggtgatgtggaaccgtcacgcaaacccaagaggcggagggccgctgacgtggaaccatcatcacccgaacccaagaggcggagggtcggtgacgtggaaccgtcacgcaaacccaagaggcggagggccgctgacgtggaaccatcattacccgaacccaagaggcggaggttgagctgagaagaggccagtgcactcaagcctgagcaataagaataaaaccgagtagaacaaaataaaaaattcaaaaaacaaaacaaaacccacactccaaaaactaacaaagaataaataaataatataaaaat

SEQ ID NO: 1227 - DNA, 1386 bp, Homo sapiens
  SIMILAR (187)..(2667): 901254mologous to Homo sapiens putative p150,accession number U93563,Smith-Waterman Score=3843.
atgggtctgtgctacagtctgcggccgctgcttttcgggggcccaggggacgacccctgcgcggcctcggagccgccggtggaggacgcgcagcccgccccggccccggccctggccccagtccgggcggccgcaagggacacggcccggaccctgctccctcggggcggcgaagggagcccggcatgcgctcggcccaaagcagacaagccgaaggagaagcggcagcgcaccgagcagctgagtgccgaggagcgcgaggcggccaaggagcgcgaggcggtcaaggaggcgaggaaagtgagccggggcatcgaccgcatgctgcgcgaccagaagcgcgacctgcagcagacgcaccggctcctgctgctcggatcccaagaggaggagctggtggagaagaagaggacagacaccacagtggccatagcagaagggtcgagggttcttctaatgagcccgtttaggggccataagctgatggccctactcttaaaaagcccaggagcccgctctgtgccaggtgcttctctgggtgatgtggagattccacaaggcagagagcacagcctcagccctggaaaagttcactgtgttgttgaagagaaaggacaagaacctaagagaaaaataccagtccgagcctgcacgtgctcggagataaatggcaacagtttcctgtcccatgaccagggccagctcaccaaggagctgcagcagcacataaagtcagtgacatgcccatgcgagtacctgaggaaggaaaagggtgaaaatgacttgatggtcccagtaaattacagtcgaattaaagcatggtcaaggtgtggtggtcaaacgcagaaggcagtctgtggagtggggagttctgcaggctggggcccctctgtctgctgtgctctcgctgtgcagggctctggaagggagacctgggccactgggaccccagaatcttcatttggagcaacagttcttcacaaagctgtctatgaaacagcttctgccccactctcacctgggatgcttgattttggaactcagccagattctgggtgggagccaagcagctgtgtggaggggccttggggatgggtgttccagcccacagctgctgtcagtctccagacagagagaatctccgagatgctctggaagaacaatggccaagcaaaattctcccggaggacagagtctgtggcagtctttctgggtgaccagctctccgctcttccagtcatttatgctcctgtcttccgtggaggaagtctggtagtatctccccgggacactggctcaaatttccagccacctgcccaagacagatgggaccaggggccagatgatgtggacaatgatgatgtcacaaagagaagtaagaaataa

SEQ ID NO: 1228 - DNA, 361 bp, Homo sapiens
  SIMILAR (15)..(317): 501254mologous to Homo sapiens protocadherin alpha 7 short form protein,accession number AF152485,Smith-Waterman Score=200.
ctggtgtccaccttcaagaatactactcattggtgctggacagccctctggaccgcgagagcgtgtcggctatgagctggtgcgtgtccgtggaggtggccgacgtgaacgacaatgcgccgcattctcgcagtccgagtacacaggtgttcgtgaaggagaacaacccgcgggctgccacatcttcacggtgtctgcgcgggacgcggacgcgcaggagacgccctggtgtcctactcgctggtggaacggcgggtgggggagcgcgcctgtcgagctacgtgtcggtacacgcggagagcggcaaggtgtacgcgcgcagccgctggaccacgaggagctagagctgctgcagttccag

SEQ ID NO: 1229 - DNA, 481 bp, Homo sapiens
  SIMILAR (329)..(451): 971254mologous to Homo sapiens nuclear distribution protein C homolog,accession number AF130736,Smith-Waterman Score=199.
  misc_feature (1)...(481): n = a,t,c or g
atgcgatgtttggttttcagagaaggggattgggcaccccacgactacagctctggcttctcctcctcgaattctgggaggtggggagcggccagctccactactccgtctcggaggaggccaaacacggcaccttcgtgggccgcatcgcgcaggacctggggctggagctggcggagctggtgcagcgcctgttccgggtggcgtccaaaacacatggggaccttctggaggtaaatctgcagaatggcattttgtttgtgaattctcggatcgaccgcgaggagctgtgcgggcagagcgcggagtgcagcatccacctggaggtgatcgtggacaggccgctgcaggttttccatgtgaacgtggaggtgaaggacattaacgacaacccgccggtgttctcgctcagagaacaaaagctgctgattgcggggnttccccgcacgttactcagtntctcagttnnnnnnnncgcccc

SEQ ID NO: 1230 - DNA, 532 bp, Homo sapiens
  SIMILAR (96)..(236): 481254mologous to Homo sapiens helix-loop-helix protein,accession number M97507,Smith-Waterman Score=88.
  misc_feature (1)...(532): n = a,t,c or g
cccgggtcacccacgcgtccgacaaaatacattgtgtggtgatgcatagaaagctcataattggaacgagattgagatggtatattcccggagaggaagtctgggatcccggctcctgctgctctggcttctcctcgcctactggaaggcagggagcggccagctccactactcgatcccggaggaagccaaacacggaaccttcgttggccgcatcgcgcaggacctagggctggagctggcggagctggtgccgcgcctgttccgggtggcgtccaagggccgcggggaccttctggaggtaaatctgcagaatggcattttgtttgtgaattctcggatcgaccgggaggagctgtgccggcggagggcggagtgcagcatccacctggaggtgatcgtggacaggccgctgcaggttttccatgtggaggtggcagtgaaggacatcaatgacaatccgcccaggttctccagacaagaacaaagattattcattntagaggcaagaatgccagattcgcggtttcgn

SEQ ID NO: 1231 - DNA, 2360 bp, Homo sapiens
  SIMILAR (450)..(4): 651254mologous to Gallus gallus regulatory factor 2,accession number X95478,Smith-Waterman Score=477.
cgtgtccgtggaggtggccgacgtgaacgacaatgcgccgcattctcgcagtccgagtacacaggtgttcgtgaaggagaacaacccgcgggctgccacatcttcacggtgtctgcgcgggacgcggacgcgcaggagacgccctggtgtcctactcgctggtggaacggcgggtgggggagcgcgcctgtcgagctacgtgtcggtacacgcggagagcggcaaggtgtacgcgcgcagccgctggaccacgaggagctagagctgctgcagttccagcgccgcttctggacccacagcgcctgccgacgccctcgacgaagcctgtggcgcttggccgctctccaccagcgacaacagcaccgttgccgtggccgtcagcgcgggctcaccgtggtccttcaccagcaccagaaggcggtggtgcggcgcgtccacctcgtccagagggcgcgtcgtgctgatctcgccagtgtacagccccacgcggaacgggatgcgcgcgccgaccgccgccaggctgcaattcatacgaaagccacgcattgtagcccgaatcggcgtccaccgcgcgcaccttcgccaccacgtggcctgcacccaccgaccgcggcatcagctcgctcactgcgccagcagcggtgccacccactcgaggcaccagcagcgccggcgcgttgtcgttctcgtccagcacgaacacctgcagcgtcacgttgctgcccagaggcggcacgcccgcgtcgcgcgcgctcacctggaactgcagcagctccacttcctcgtggtccagcggctgcagcgcgtacaccttgccgctctccgcgtgcaccgaaacgtaactcgacagcgggcgctcgcccacccgccgctccaccagcgagtaggacaccagggcgttctcctgcgcgtccgcgtcccgtgcagacaccgtgaagatgtggcagcctggcgggttgttctccttcacgaacacggtatactggggctgcgcgaacgccggagcgttgtcgttcacgtcggccacttccacagacacgctggcggtggcccacagcgaaggcgagcccccgtcccgcgcggtcaccaccagctcatagaccgacacgctctcgcggtccagggcgctgtccagcaccaacgagtagtaattcttgaaggtggacaccagcttgaagggaacgtggggcattagggagcaggtcacctgcccgttggcacctgagtcacggtcagacacgctgatcagagcaatgaccgtgctgagtggagcgtcctctttgacaggcaggaaaagggtggttatggccatctctggggtattatcattcacatccaggagtttcactactactttacagtgtcctgataatgggaatgtacttttatccatggcatcaatattaatttcatatgagttatagtcttcataatccagttccccgttaacttttatttcaccagtattagaattaattataaatttggactttacatcgtcaagaacaagattactaaagaaatacactatttccttattgatgccctcatctgcatctgaggcgttcagtttaataactaatgtcccacttggtgcattttccaacaatctgacattataaatggatttatcaaattctggggcgttatcattagcatccaatacattgatcaacaactgaactgtacctgttagttcgggttttcctccatcagttgcaatcactaataaacggtgttcttgtgtttcttctctatctaaggatttcctcaaaaccagctctaaaaagttcgtttcttcttcatttgttttaacatctaagtcaaaatattcgtttggatttaacctgtatctcaattgtgcatttgctccaatatccaaatccgacgcgccctctagcggaaaccgcgaatctggcattgcttgactctaaaatgaataatctttgttcttgtctggagaacctgggcggattgtcattgatgtccttcactgccacctccacatggaaaacctgcagcggcctgtccacgatcacctccaggtggatgctgcactccgccctccgccggcacagctcctcccggtcgatccgagaattcacaaacaaaatgccattctgcagatttacctccagaaggtccccgcggcccttggacgccacccggaacaggcgcggcaccagctccgccagctccagccctaggtcctgcgcgatgcggccaacgaaggttccgtgtttggcttcctccgggatcgagtagtggagctggccgctccctgccttccaggctgcgaggagcagaagcaagagtagtagtcgccaggatcccagacttcctctccgggaatataccat

SEQ ID NO: 1232 - DNA, 645 bp, Homo sapiens
  SIMILAR (2)..(91): 831254mologous to Homo sapiens reverse transcriptase,accession number L27428,Smith-Waterman Score=125.
atgctcaacatcactaatcatcagggaaatgcaaatcgaaaccacaatgcgataccaccttattcctgcaagaatggccataatcaaaaaacagtagatgttggcagggatgtggtgagcaggaaacacttctacacagctggaagccacagccacgtggaggagctcctcaggtacagccagggagaggcagtttctgcatccccttttgttaaaggcacggatagaaattaccccaccagagtcattggcagttctgaagattccaatggaagggacatggatggagctggaagctgttatcctcagcaaactaacacagaaacagaaaaccaagcactgaatgttatcacttacaagtgggagctgaactatgaaaacacgtggacacatgggggacactggggcctgttgggaaggctgcccatgatggggggagctttcatggactcgcccaacgaggacttcagcaccgagtactccctgtttaactcctctgccaatgtccacgcggctgccaatggccagggccagccggaagatcctcctcggtcctccaacgacgccgtcttgctatggattgccatcatagctacgctggggaacatcgtggtggtgggcgtggtgtatgccttcaccttctga

SEQ ID NO: 1233 - DNA, 690 bp, Homo sapiens
  SIMILAR (349)..(729): 1001254mologous to Homo sapiens 04-OCT-1995 Human protein ubiquitin ligase pub3 cDNA,accession number T47042_cd1,Smith- Waterman Score=694.
gttggctttggtaggaagacggctgctagcagtttcccatttatagcctatcaggtgcccttgtgcagtgcacaactttcagaatcatacatggaagacttgggtagttccattcattacctgcctgtgatggagccagcttccttgcctgtgacaaagtctgggagtcccaggctgcccctcacagaggctcgtgatgaccatgagtgtaaagtacctggaagagacatcacccaaagggaccagtcgtactcactgagactccttagagtacagctggttccctcccaagatctggagccagaagcccagagacagccgagtgcgccgtgcggtctccggacgctcgctgctcagcccgatccccgccaactgtgcaggcggctgacccgcagcggcagcggcagcagcgaggactcgagcgctggctgcagcgacaccatggatctctcctttatggccgcgcagcttcaagaaatgatgggcccggctaagacacagaggggaatggctaaagggctgggctgggttgaagaaggtgcccagcacgtagtaggtcctcaagtatttattagaggattggatgaggacaagatgtatgttcatgaaaagacattaacaggagaagatggtgaattcaaagtgtcaaatgccaatgccactgaacagctgtcatcatcaggactttga

SEQ ID NO: 1234 - DNA, 969 bp, Homo sapiens
  SIMILAR (1716)..(4): 921254mologous to HERV-H/env62 envelope protein,accession number AJ289709,Smith-Waterman Score=2697.
tttcgtgccgagtgcgccgtgcggtctccggacgctcgctgctcagcccgatccccgccaactgtgcaggcggctgacccgcagcggcagcggcagcagcgaggactcgagcgctggctgcagcgacaccatggatctctcctttatggccgcgcagctgcccatgatggggggagctttcatggactcgcccaacgaggacttcagcaccgagtactccctgtttaactcctctgccaatgtccacgcggctgccaatggccagggccagccggaagatcctcctcggtcctccaacgacgccgtcttgctatggattgccatcataactacgctggggaacatcgtggtggtgggcgtggtgtatgccttcaccttctgaggacggcacaccctgcaccaccatggggtgaggcttggcacgtagctctgacttgctgtcggcctttggcttctcctgtgttctagaaccaggagttttgaccaggggcggcggccgtccttctggaatttctccccagcagccctgatttcaaatatcccatgttgtggtcaagctgagtcagaagacatggaagtatgggcctcctgcccctagaggcatgacggggcaaggccttcagagggcagattggggatccttgaaactacattccaggaacatgggaccagatgagacagctagttaagtttaaaacatagacatgatttgatgatcgcttgctggtggtaaataatcactcgtgtgtcttgtttttatgcaaacttatcgaacctagggcgtggggtgctggggcaagagcagccctcagaacttcagtgttcctgacccaattctggtttcacattcagtcccttggccatctagtagggccattggatgttcctagtttgactttgaaatggcacctttgccaccagacacctggtcccttccaagacccaagtgcattgggagacccagggatg

SEQ ID NO: 1235 - DNA, 568 bp, Homo sapiens
  SIMILAR (183)..(473): 981254mologous to Homo sapiens Human secreted protein encoded by gene No. 118,accession number Y27684,Smith-Waterman Score=487.
  misc_feature (1)...(568): n = a,t,c or g
agcgacgttganacantanaannnncttcgatcactatccgtgggtgaattcgcttttctctgctctcctgaaccttaggcttgtctcggcccatttgaagaccaggaagttgatcaattctgaggctgctgagagacggtggcgcgattgggacagtcgccagggatggctgagcgtgaagatgcagcgggtgtccgggctgctctcctggacgctgagcagagtcctgtggctctccggcctctctgagccgggagctgcccggcagccccggatcatggaagagaaagcgctagaggtttatgatttgattagaactatccgggacccagaaaagcccaatactttagaagaactggaagtggtctcggaaagttgtgtggaagttcaggagataaatgaagaagaatatctggttattatcaggttcacgccaacagtacctcattgctctntggcgactcttattggttggaatctacatttctgaaggaacccactcaacagaagaagacatcaataagcagattaatgacaaagagcgagtggcagcttgcatggaacacn

SEQ ID NO: 1236 - DNA, 730 bp, Homo sapiens
  SIMILAR (976)..(2304): 881254mologous to Homo sapiens putative p150,accession number U93574,Smith-Waterman Score=2191.
tccttcgagctactccgtctggccccgccttttctctgctctcctgaacctttaggcttgtctcggcccatttgaagaccaggaagttgatcaatcccgaggctgctgagagacggtggcgcgattgggacagtcgccagggatggctgagcgtgaagatgcagcgggtgtccgggctgctctcctggacgctgagcagagtcctgtggctctccggcctctctgagccgggagctgcccggcagccccggatcatggaagagaaagcgctagaggtttatgatttgattagaactatccgggacccagaaaagcccaatactttagaagaactggaagtggtctcggaaagttgtgtggaagttcaggagataaatgaagaagaatatctgggttattatcaggttcacgccagcagtacctcattgctctttggcgactcttattgggctgcgcttaagagtaaaacttcaagcgatgtttaccatttaaacataagttggaaatctacatttctgaaggaacccactcaacagaagaagacatcaataagcagataaatgacaaagagcgagtggcagctgccatggaaaaccccaacttacgggaaattgtggaacagtgtgtccttgaacctgactgatagctgttttaagagccactggcctgtaattgtttgatatatttgcttaaactctttgtataatgccagagactcatgtttaatacg

SEQ ID NO: 1237 - DNA, 792 bp, Homo sapiens
  SIMILAR (64)..(879): 781254mologous to Homo sapiens putative p150,accession number U93574,Smith-Waterman Score=1058.
actaaaggaaaaaaactttcggccgcgcttttttttttttttttttttttttttttttttttcaagaacgagtgatttaagaacagccctcccatcttagcaatgtcccggggtggctggagccacggtcacttcttggtcctggtccagaactgtcggtagcagctccacatgcaagtcatcactgagctcctgctcgtactccttcctcagactggagctgagcctcacgcttccgcagcctgggcccggcgctcctcaggagacagggtgtccagatctatggggcatcgcaagcatgcgccagtggctcccctgtagcggaatgtggatggtgggagccattctggctttcaccaagcaagcacggggggtaaaagtccgtgcataagctgcgttgggtgctgctgcgctgcagcccacgacgtcactggcaggcgctgcgtcgcgcggtatgacgtgttccatggcagggagaggcaagagtgggcggtgagacacgaagatatacgccccgggaggaccagggcgggccggcgaggtcgagggggacccgcgggtcagatagtcttcttcatttatctcctgaacttccatataactttccgttaccaattccagttcttctaaagtattgggcttttctgggtcccagatagttcgaatcaaatcataaacctctagcactttctcttccatgatccggggctgccgggcagctccccactcaaagaggcccgagagccacaggattctgctcagtgtccaggaaagcagcctcagctctgccat

SEQ ID NO: 1238 - DNA, 504 bp, Homo sapiens
  SIMILAR (176)..(502): 1001254mologous to Homo sapiens unnamed protein product,accession number AK000248,Smith-Waterman Score=574.
ggccataggaaaaggcccggcgtccacgcctacctacagccctgcacccacccagccggcccctagaatcgcgtcagccccagagcccagggtcaccctggagggaccttctgccaccgccccagcctcatctccaggcttggctaagccccagatgcccccaggtccctgcagccctggccctctggcccagttgcagagccgccagcgcgactacaagctggctgccctccacgccaagcagcagggagataccactgctgccgctagacacttccgcgtggctaagagctttgatgctgtcttggaggccctgagccggggtgagcccgtggacctctcctgcctgccccctccacccgaccagctgcccccagacccaccgtcaccaccgtcgcagcctccgacccccgctacggcgccctccacaacagaggtgcccccacccccgaggaccctgctggaggcgctggagcagcggatggagcggtaccaggtggccgc

SEQ ID NO: 1239 - DNA, 1416 bp, Homo sapiens
  SIMILAR (1)..(162): 611254mologous to Mus musculus endonuclease/reverse transcriptase,accession number AF016099,Smith-Waterman Score=170.
atgcacaagaggaaaggacccccgggacccccgggcagaggcgccgcggccgcccgccagctgggcctgctggttgacctctccccagatggcctgatgatccctgaggacggggctaacgatgaagaactggaggctgagttcttggctttggtcgggggccagcccccagccctggagaagctcaaaggcaaaggtcccttgccgatggaggccattgagaagatggccagcctgtgcatgagagacccggatgaggatgaggaggaggggacggatgaggacgacttggaggctgatgatgacctgctggcggagctaaatgaggtccttggagaggagcagaaggcttcagagaccccacctcctgtggcccagccgaagcctgaggcccctcatccggggctggagaccaccttgcaggagaggctggcgctctatcagacagcaattgaaagcgccagacaagctggagacagcgccaagatgcggcgctacgatcgggggcttaaaacactggaaaacctgctcgcctccatccgtaagggcaatgccattgacgaagcggacatcccgccgccagtggccataggaaaaggcccggcgtccacgcctacctacagccctgcacccacccagccggcccctagaatcgcgtcagccccagagcccagggtcaccctggagggaccttctgccaccgccccagcctcatctccaggcttggctaagccccagatgcccccagcctcccctccaaagacccctcgtccccatcccccgctcatgtgggtcgtggcctcgctgtccctcatctgggcgccaatcccctcgctggctcgagggctctcagatcctgggcagggagggggaccctgcccctcgccccagggacccccaggtcccagcagagtcggggggagacccccacccccaccccaggcccgccctggaaatgccattcttgtgtgtagctgctcagaaggccatgtgaactttgccgagccctcatttaaagtaatagatttaaacagtctccataagcagctgctggctttgaagcggagccggggctgccccgcgggacccgaggagcgcgatgccggggccggggccgcgcgtggccggggccggcccgaggcgctgctggacctcagcgccaagcgggtagccgagagctgggccttcgagcaggtggaggagcggttctcccgggtgcctgagcccgtccagaagcgcatcgtgttttggtcgtttccacgcagtgaacgggaaatatgtatgtactcgtcgctgggttacccgcccccagagggcgagcacgatgcccgggtgccctttacccgcgggctgcacctgctccagagcggggccgtggaccgcgtgttgcaagtggtgctgggattacaggcgtga

SEQ ID NO: 1240 - DNA, 355 bp, Homo sapiens
  SIMILAR (149)..(39): 971254mologous to Homo sapiens ubiquitin-conjugating enzyme isolog,accession number AB032931,Smith-Waterman Score=197.
  misc_feature (1)...(355): n = a,t,c or g
aggtcaccacagttncgatgttgagggatggtctcacaagcaccttttggtggcaatttgagaacatccagacaaatccttccagcagaatcaatgtttggatgatnaattggagtgagaaatcggatctgaggaggttcaaatgggtacgagctcgcaggtcatccatttggtctttatcttgccaacatgtgatgcctgggggtggctctgtggctaacatgtgcagctctctcttcaggacgcgaagctctctgcatgatccccaagtagaaggaaccacacacagttcactgctccacactaagagctgcctgggatgcactgagctgacacccctcacaacgcagcaacg

SEQ ID NO: 1241 - DNA, 1008 bp, Homo sapiens
  SIMILAR (2)..(679): 971254mologous to Escherichia coli glutathionylspermidine synthetase/amidase,accession number U23148,Smith-Waterman Score= 1193.
  misc_feature (1)...(1008): n = a,t,c or g
tttttttttttttttttcaacattaaatgactatttatttttcaggtttaaaagatttcaaaatacatatgtacaagataaataaactccccaaaaattatgtcatcaaatatatttaaaaaaaaaattcagggggggcaccttaaattaaccttggaaaagaacaaattaactaagatgaaccaggacaagtcccctaaacatcaggatgaaatttcttttctattgcctactaactgactggccttccttttttgtggtggggtggggtactctggagtcaccaggcctctggtaagattatcaagcatctcttcctcatcagccttttgtttctgtcttgcatgcttctctggtccactgtctgggcattcttggaggaagggctgggctttattaatattttaaaattctgagggatatgtcaacccatgaacggggtccatccagggtggggtcctgaacatgaagcaagctgaaataagaggtcaaacacagttgccgaatgtttgaagggaagggtctcccaaagccacctttttggtggccaatttgagaaacatcccagacaaatccttcaaccaaaattcaatgttttggattgataaaattgggagtgagaaatcggaatttgaggaggttcaaatggggtacctcctcaggaatgataacttctagcttaaaaaacaccttctctcataagttgtgtggcctcaacctaatatttgagctccgcaggtcatccatttggtctttatcttgccaacatgtgatgcctgggggtggctctgtggctaacatgtgcagctctctcgttcagacgtgaagctctctgcatgatccccaagtagaaggaacgacacacagttcactgctccacactaagagctgcctgggatgcactgagctgacacccctcacaacgcagcaacgcgcggaccaacggggtaccagcgcctgcgcgacctctacgaattccaccacactgactatgactcgaanncccgc

SEQ ID NO: 1242 - DNA, 706 bp, Homo sapiens
  SIMILAR (635)..(528): 421254mologous to Mus musculus cAMP response element binding protein-related protein,accession number AB010266,Smith-Waterman Score=65.
atggctgagcgggctgctgggggccagctgccaagccagggtccagtccagctcccatccacacggaaggaaaaggatgaacaaactgaaaatcaacaactcttcttcatccgtcagagaactgagtcaccaggcaaagcacggcccccaaatctggagacacagacaagcgggttccaagaacctcagctgacaggagcagaacctctgcggggccaatgccacggacttgagctgcccctcatgaatttctggagatgccacctggacaaaactaacttacgattaaaagaagagttgaaggcagagaagaaatctggattttgggacaatttggttttaaaacagaatatacagtctaaaaaaccagatgaaattgaaggttgggagcctccaaaacttgctcttgaagacatatcggctgaccctgaggacaccgtgggtggccacccatcctggtcaggctgggaggatgacgccaagggctcgaccaagtacaccagcctggccagctctgccaacagctccaggtggagcctgcgcgcggcagggaaggctggtgagcatccgacggcagagtaaaggccacctgacagatagcccggatgaggccggagtgaggggggctgcgtggcaagtgtgcccccgacatggtggccttttatgagtataccatgtagttgttgagtcttttccgcgttagaaa

SEQ ID NO: 1243 - DNA, 1337 bp, Homo sapiens
  SIMILAR (40)..(216): 391254mologous to Rattus norvegicus hairy,accession number L04527,Smith-Waterman Score=89.
atgggcacaacggtagaagcggcagcacagagattcagacccgggtctgcgggacacaccccaggctctgagccttgtggtcttggccaaatcaccgggcctgctgtcttttctgtagagagaagggctgctcggttctcatttggattcaacctttccaatgcagcatttaaacacggaggagggatttttttggttgtcacaaggactgggggaccctgctggctaaatatcctccaatgtgtgagacagttgcaccctaaatgccagtgtgcccctattgagaaacatcctctctataacagtcctttgaacgagccctttacatctctctacacatacatgatgtttgctggtggaggccttatagataggttgttgagtcagatttatgagtttgagaaagagatgctttggatgcaaaggacctttggtgagtttgcagaagccctggactcaaatctaccaccactcagaacagtgaatgccagaaaattcctggaaaagggcatctctttgctgaatgaccctagtaatctactcattccccaggtgtcaagaatctataatgatgatgatgatggcaaagacaatgatagatacctttttaaaacttactatatgccaagcactgtcctaattcatatgttcccaacagcaatgctaagtgggccagcatcagggagggaggaagaggacagggacaacaatcagcagggcccgtgtaagcatacacttcttatggatgactcctctgacaaccacacggggaggctcgtgtggtccctgtttgtcatccagtcaatacggccatcagcttctggccccagacacctttcctctgcactgtggcacagaggagcagactgctttggagggcagcttcctgggagctccagggaccctggccaggcggccactgccactgacttcctcggctcactgagcccgtgcctgcagctctcgtgtttcctctgtgctgcagtggacgcttatcttcccccgatggcacatttctttgtcacagacaggaccctcactggcagtcggagaacatcagccaagcatggtgctatagaaataactcctatcttggctgttcctgagacaggaagctctgaacacttcaagacatgcttagaaggccccccgatgtcagcagaaaaggggctgctaatgtcatctcagaaaccaagttatccccatgcaacaaaatcaatcacgtatcaaaacatgatggagagacagcctgcagaagtcagatggttcccggagcactacaggataaaaaggaccttgaaatacagaagacaaagtacaggctcatgaatgtctga

SEQ ID NO: 1244 - DNA, 330 bp, Homo sapiens
  SIMILAR (33)..(197): 341254mologous to Hantaan virus G2 glycoprotein,accession number U37729,Smith-Waterman Score=82.
atggctcggcgggctgcggaactggccaacgcaaggggcctgggtctccagggagcttacaaaactgctgtgttcaagatccctgccaggatctcggcgtgttccaccaaggacctcatgtttgttcttttaattcactatcatgaattgccaattcatcctcaaagcatgacaaaagccaggcccaatgcagagttcccagaagctgaaaagctcagtagaagtggaaagcaggaagaacttgcagaggtttctgccacacaaggttggcagtcagaccagctaatcttggcaaggccattaagaattacttcttttgcagatatttag

SEQ ID NO: 1245 - DNA, 5100 bp, Homo sapiens
  SIMILAR (595)..(2109): 891254mologous to Homo sapiens putative p150,accession number U93563,Smith-Waterman Score=2297.
atgggcaaatttgatgaaggtaaactgcccaccgatccacacctgatgctccgactggccattgaaactgttgctcatgactatgatgtcatagttattgacagcgcgcctaacctgggtatcggcacgattaatgtcgtatgtgctgctgatgtgctgattgttcccacgcctgctgagttgtttgactacacctccgcactgcagtttttcgatatgcttcgtgatctgctcaagaacgttgatcttaaagggttcgagcctgatgtacgtattttgcttaccaaatacagcaatagtaatggctctcagtccccgtggatggaggagcaaattcgggatgcctggggaagcatggttctaaaaaatgttgtacgtgaaacggatgaagttggtaaagctgccccgatggtggattcgttaattgcgcgcgtaggagtaatggctcgcggtaatgccattactttgcctgtatgtggtcgggatgtgaagtttactcttgaagtgctccggggtgatagtgttgagaagacctctcgggtatggtcaggtaatgaacgtgaccaggagctgcttactgaggacgcactggatgatctcatcccttcttttctactgactggtcaacagacaccggcgttcggtcgaagagtatctggtgtcatagaaattgccgatgggagtcgccgtcgtaaagctgctgcacttaccgaaagtgattatcgtgttctggttggcgagctggatgatgagcagatggctgcattatccagattgggtaacgattatcgcccaacaagtgcttatgaacgtggtcagcgttatgcaagccgattgcagaatgaatttgctggaaatatttctgcgctggctgatgcggaaaatatttcacgtaagattattacccgctgtatcaacaccgccaaattgcctaaatcagttgttgctcttttttctcaccccggtgaactatctgcccggtcaggtgatgcacttcaaaaagcctttacagataaagaggaattacttaagcagcaggcatctaaccttcatgagcagaaaaaagctggggtgatatttgaagctgaagaagttatcactcttttaacttctgtgcttaaaacgtcatctgcatcaagaactagtttaagctcacgacatcagtttgctcctggagcgacagtattgtataagggcgataaaatggccaattataggcagagcatcgacaagttgaagtacagctcggtgactgacaccccacagattgttcaagccaaaatcaatgcccagcagctgagtcatgtgaattaccgtgctgactatgagaaaaataagttgaattacacattgccccaggatgttcctcagctggtgaaggccaaaaccaatgccaaactcttcagtgaggttaagtataaagaaggctgggagaagacaaaggggaaaggatttgagatgaagctggatgccatgtctctgctggccgccaaagcctctggggagcttgctagcaatattaaatataaagaagaatatgaaaagacaaaaggcaaagccatgggaacagccgactctaggcttctgcactccctgcagattgctaagatgagcagtgaggttgaatataagaaaggctttgaagagagtaagacccggtttcacctgcccatggatatggtaaacatcaggcatgctaagaaggcccaaactctcgccagtgacctggactacaggaagaaactgcatgaatacactgtgctgcctgaagatatgaagactcagtgggccaagaaggcctatgggctccagagcgagctgcagtacaaggctgacctggcatggatgaagggagttgggtggctgacagaggggagtctcaacttggaacaagccaagaaggctggacagctggtcagcgagaaaaactaccggcagagggtcgatgagctgaagttcaccagcgtgaccgacagctcccagatggagcacgccaagaagagccaggagctacagagcggggtggcctacaaggcaggaaatgagcagtctgtccatcagtataccatcagcaaagacgagcctctcttcctgcaggcccgagccaatgctgcaaatctcagcgagaaactgtataagagcagctgggaaaaccagaaagcaaaagggtttgagctgcgtcttgattccttgaccttcctggcagccaaagccaagagggacctggctagcgaggtgaagtacaaggaggattatgagagatccagagggaagctcattggggcaaaagatgtacagggagattcgcaaatgagccactcactgcaaatgtccaagctgcagagtgagctggagtacaagaagggattcgaggacaccaaatcccaatgccacgtctccctggacatggtccacctcgtgcatgcccgcaaagctcagcatttagccacagacgtaggctacaagacagcggaacatcactttacggctttgcccacagacatgaaggtggaatgggccaagaaggcttatggcttacagagtgataaccaatacagggcagatgtgaagtggatgaaaggcatgggctgggtcgccaccgggtcattaaatgtggagcaggcgaagaaggcaggagaactcattagcgagaagaagtaccgtcagcatccagatgctttgaagtttaccagtattaaagacactccggagatggtccaggccagaattagttatacccaagcagtggatagattatacagggaacaaggagaaaacataaagcatcattacacaccgactgctgacctccctgaagtcctgctggccaagctgaatgccatgaatatcagtgagtacaaatacaaagaggcatttgagaaaatgaaaggacagatgcttggttcccggagcttggaagatgatatcagccttgcacattcagtgtatgcgacctcactgcagagtgatgtgaattacaagaaaggctttgaacactcaaaggcgcagttccatctgccgttggacatggccgccctggtgcatgccaagaaggctcagaccctggccagcaatcaggactacaaacatccactgccccagtacacttccttggcagaagacctgaggctgagctgtgccaagaaagctcacaaattgcagagtgagaatttgtaccggtcagacctgaactttatgcgaggtgttgcatgtgtcattccaggcacgttagagattgaagggaggaagaaagcatcggaactcatcagtgagagtaaatatcggcagcatccccactcattcaagtacacagctgtgacagacactcccaacctccttcatgcgaaattcagcaaccagataacgaatgaggtaaaatctcctgatggctttggaatggtctttttaaaaactgctcgattgttaaaaatacacgtgaatgtgtttgggcgcctctataaagcagctggagaggatgcaagacacgagtatacaatgaccctgggtctgcccgagttcatccgagcaaaaacgaatgcagccaacctgagtgacgcaagatacaaagagtcctggcgtaatcttcgtgctcaaggctacaagctgacaatagaagcgctccccttccaggctgcccgggcctctggagatatagccagtgattttctctacagacatgactttgtgaaggagcgagggaaactcatagggccccagagtgtaagagacgacccccggatccagcactgccggcgcatgggccagctgcagagcgagcttcagtacaggaggggggcgaccagcagccaagcccagttccatctgcccatggacatggtgcacctggtccatgccaagaatgcccaggctctggccagcgaccacgactacaggacacagtatcacaagttcacagcactgcccgaggacctgaagatggcctgggccaagaaagcccatgccctgcagagtgagttgcgctacaagtcagacctgatcggcatgaagggcataggatggctggcgctgagatccccacagatggagagtgcaaagaaggctggagaactcatcagcgagaccaagtaccgtaaaaaaccagacagtatcaagttcaccacagtggttgactccccagacctggttcatgccaagaacagctatatgcactgcaatgagcgcatgtatagatctggagatgcagaatccctgcacagatacaccctgatccccgaccatcccgatttcacccgagctcgcctcaatgcgctgcatctgagtgacaaagtctacagaaactcctgggagcagacccgggctggcagttatgacttcaggccggatgccatccccttccagactgcccgggcatctagggagatcgccagtgatttccggtacaaagaggctttcctgcgggaccgaggcctgcagatcgggtactgcagtgtcgacgatgacccaaggatgaagcatttcctcaacgttggcaggctccagagtgacaatgagtacaagaaggactttgccaagagtcggtcccagtttcacagcagcaccagacccagcccggccttctttcaggccaaagaggaattcagcagctggccagtgatgtgcactacaggcagcccctgccccagcccacctgcgacccggagcagctgggcctcaggcatgctcagaaggcccacccagctgcagagtgatgtccaagtataaatcagacttgaacctgaccagaggtgttggctggacccctcctgggctccttacaaagtggaaatggctcggcgggctgcggaactggccaacgcaaggggcctgggtctccagggagcttaccagcggggggcagaagcagtggaggctggagatcatcagagtggggaggtgaacccagatgccactgagattctgcacgtcaaaaagaagaaggccctgctgttgtgagccatgtccaccctgattcctgagaggccagagaggaagtttgttcaccagagacaggcttacagatggctttgatttcggcaagctggaatggcccaccagcccatcccagatcttcctttattaaaataataactctgaaagcaa

SEQ ID NO: 1246 - DNA, 1574 bp, Homo sapiens
  SIMILAR (975)..(1337): 901254mologous to Homo sapiens Human transmembrane protein HTMPN-47,accession number Y57923,Smith-Waterman Score=596.
atggggggtacaaagaacaaaaaaaacttggtccctattccccaggagtttacagctcagtggtggagacaaacgtgtacacaaatccttacaataggagcgtccacaggcggcggagcggccacaatcacagctccgggcattgggggaaccgagccggctgcgccgggggaatccgtgcgggcgccttccgtcccggtcccatcctcgccgcgctccagcacctctgaagttttgcagcgcccagaaaggaggcgaggaaggagggagtgtgtgagaggagggagcaaaaagctcacccctaaaacatttatttcaaggagaaaagaaaaagggggggcgcaaaaatggcctggggcaattatagaaaacatgagcaccaagaagctgtgcattgttggtgggattctgctcgtgttccaaatcatcgcctttctggtgggaggcttgattgctccagggcccacaacggcagtgtcctacatgtcggtgaaatgtgtggatgcccgtaagaaccatcacaagacaaaatggttcgtgccttggggacccaatcattgtgacaagatccgagacattgaagaggcaattccaagggaaattgaagccaatgacatcgtgttttctgttcacattcccctcccccacatgggagatgagtccttggttccaattcatgatgtttatcctggcagctgggacattgcctttcaagctaaacaaccaaatcaggggaaaatgcaggaagtctccatgggacgtttccctggcttaccgtgatgacgcgtttgctgagtggactgaaatggcccatgaaagagtaccacggaaactcaaatgcaccttcacatctcccaagactccagagcatggagggccggttactatgaatgtgatgtccttcctttcatggaaatttgggtctgttggccataagttttaccttttaaacatccggctgcctgtgaatgagaagaagaaaattcaatgtggggaatttggggaggataaggatatccgggttggtggggatccaccaaaatggaggcttcaccaaggtgtggtttgccatgaagaccttccttacgcccagcatcttcatcattatggtgtggtattggaggaggatcaccatgatgtcccgacccccagtgcttctggaaaaagtcatctttgcccttgggatttccatgacctttatcaatatcccagtggaatggttttccatcgggtttgactggacctggatgctgctgtttggtgacatccgacagggcatcttctatgcgatgcttctgtccttctggatcatcttctgtggcgagcacatgatggaatacaggttaaccatcagagaatgtgggcctggctctttccagctggcaatgtgtccaggtggcctagtaacccctattactctgaaatacagaccttcccggtctcctcagtttgcacagacaccaaatcatatttcaagagggattgaaggatcagcacgagcggaaccacatcgcagggtattggaagcaagtcggacccattgccgttggctccttctgcctcttcatatttga

SEQ ID NO: 1247 - DNA, 426 bp, Homo sapiens
  SIMILAR (1)..(486): 801254mologous to Homo sapiens peptidylprolyl isomerase,accession number X52851,Smith-Waterman Score=687.
ggcttgtgggtctttgagacccgaaaattgagagcgttttcgcactctaggggctgctcctggcggctctgcggccgtcaccatgccacagaatgaatatattgaattacaccgtaaacgctatggataccgtttggattaccatgagaaaaagagaaagaaggaaagtcgagaggctcatgaacgttcaaagaaggcaaagaaaatgattagccttcagaccaatcaaaagaatgatgaaaagacaccacagggagcagtacctgcctatctgctggacagagagggacaatctcgagctaaagtactttccaatatgattaaacagaaaagaaaagagaaggcgggaaaatgggaagtccctctgcctaaagtacgtgcccagggagaaacagaagtattaaaagttattcgaacaggaaagag

SEQ ID NO: 1248 - DNA, 1256 bp, Homo sapiens
  SIMILAR (502)..(1116): 961254mologous to Homo sapiens TGF beta inducible nuclear protein TINP1,accession number AF077615,Smith-Waterman Score=1007.
ctcgacgccagcctaggcaaaaggcaatgtatctaaacgaaaagaaaataggctttctccgctctaccgcctcgggcagccacacctccacacttccggcggtgtaccggccaaatgccgcctgccagcaacttccgtcctcctagctaaaagcggaaaacagaggctcggaaccgctgcgtggttcttgctcttcactcggccgttttaaagggtgactctttcctgtcccggcctgcgtggtgtgggcttgtgggtctttgagacccgaaaattgagagcgttttcgcactccagcggctgctcctggcggctctgcggccgtcaccatgccacagaatgaatatattgaattacaccgtaaacgctatggataccgtttggattaccatgagaaaaagagaaagaaggaaagtcgagaggctcatgaacgttcaaagaaggcaaagaaaatgattggtctgaaggctaagctttaccataaacagcgtcatgctgaggaaaatacaaatgaaaaagactatcaagatgcattgaaaagaggaaacacccaaacaaaaaggattggttgaaaagacaccacagggagcagtacctgcctatctgctggacagagagggacaatctcgagctaaagtactttccaatatgattaaacagaaaagaaaagagaaggcgggaaaatgggaagtccctctgcctaaagtacgtgcccagggagaaacagaagtattaaaagttattcgaacaggaaagagaaagaagaaggcatggaagagaatggttactaaagtgtgctttgttggagatggctttacaagaaaaccacctaaatatgaaagattcatcaggccaatgggcttgcgtttcaagaaagcccatgtaacacatcctgaactgaaagccaccttttgcctaccaatacttggtgtaaagaagaatccctcatccccactgtatacaactttgggtgttattaccaaaggtactgtcattgaagtaaatgtgagcgaattgggccttgtgacacaaggaggcaaagttatttggggaaaatatgcccaggttaccaacaatcctgaaaatgatggatgtataaatgcagtcttactggtttgacagcaatttcatatataattattgaggactacacaccaattgaagaaactgccattactgtgatgtttctgaatactaccaaacagccatacatgtctgcaatgaagagatttattaaattgtaaacattaaagtgg

SEQ ID NO: 1249 - DNA, 453 bp, Homo sapiens
tccattaaagagcagaaagttagtacattattctgtccttctgttcatcgtctggatgtaattgtctgtgtactcacctgactgctctgtaatctttaataagatttttaaaagtatgtggaagcgtaggccgtgactctcatgagcatgacgggtgacaatggtcctcatggagacatttgccaaagctcaattaacaagacatttggtagagaactgaggtcccccaacaggcgtggtttgatgttcatggagacttttaggggctcggctcaagaacttcacacatatactcttactgtgcaatggagggttgatttcaattgactgtctttgccttgttcactgctgagttgcaatggcttttctttaactactttcaaccttgcccatccaaatccatttctggtccttttgcaaagctccactttcatgctgaggcggactgccaca

SEQ ID NO: 1250 - DNA, 237 bp, Homo sapiens
  SIMILAR (193)..(74): 391254mologous to Anisakis simplex serine protease inhibitor- 1,accession number U94496,Smith-Waterman Score=75.
atggccagagtgagactggccttggtggctgcctgggagctagcggtgaagagaagaactaccactcccgaagtggagcgcaggccgccgccgggcggctgcgggaagctgggccaggcggccgcagatccccacaacatccgggagccggcgaccacttccagttgctatggttacgagttgcaacctccagaaagaattcgtggtttcacccgggaaaacagctccccggattaa

SEQ ID NO: 1251 - DNA, 330 bp, Homo sapiens
  SIMILAR (298)..(86): 291254mologous to Rattus norvegicus FSH beta- subunit,accession number D00577,Smith-Waterman Score=58.
atgcagttgagttcagctgttgaaagtttggttaacatgtcagttgagccaccaaatggaataacagttgtaactctcttatgttttctctactgtcctcaaaggaatagcatgagaacaaagcaattagcatacattcaggagttgcataatgatgttttggacaatgacagactgcagataggacgagggtaccataagattataatggagctgaaaaatctctatggcctagtgacatacagctgtagtaacactgtagcacaatgcatttctcacatgtttttggtggtgctggtgtacaaacctactgtgttgccagttgtataa

SEQ ID NO: 1252 - DNA, 450 bp, Homo sapiens
  SIMILAR (2)..(253): 1001254mologous to Homo sapiens hepatocellular carcinoma- associated antigen 67,accession number AF243495,Smith-Waterman Score=421.
gctagaagctcattctgaaatggggagcactgaaattttggaaaaggagaccccagaaaatctcagtaatggtaccagcagcaatgtggaagcagccaaaaggttggccaaacgcctttatcagctggacagattcaaaagatcagatgttgcaaaacaccttggcaagaacaacgaatttagcaaactagttgcagaagaatatctgaagttttttgattttacaggaatgacgctggatcagtcactcagagtctcgctctgtcacccaggctggagtgcagtagcaccatcttggctcactgcaacctccaccttccaggttcaagcagttctcctgaatcagcctcccgaataactgggactacaggaaaatgaatctacattgtcaagtgagggtcatctggattcatctcaaataaacagtgctcttagtgactccgagtaaaa

SEQ ID NO: 1253 - DNA, 605 bp, Homo sapiens
  SIMILAR (872)..(1285): 661254mologous to Gallus gallus neuronal tetraspanin,accession number AF206661,Smith-Waterman Score=446.
  misc_feature (1)...(605): n = a,t,c or g
accccagaaaatctcagtaatggtaccagcagcaatgtgnaagcagccaaaaggttggccaaacgcctttatcagctggacagattcaaaagatcagatgttgcaaaacaccttggcaagaacaacgaatttagcaaactagttgcagaagaatatctgaagttttttgattttacaggaatgacgctggatcagtcactcaggtatttctttaaagcattctctcttgtgggagaaactcaagaacgagagagagttttaatacacttctcccaatagatatttttattgtaacccagataccattgcttcacaagatggagtccattgccttacctgtgcaataatgcttcttaataccgatctacatggccacaatattggaaagaagatgacctgtcaggagttcattgcaaatctgcaaggggtaaatgagggtgttgatttctccaaggatctgctgaaagtgttgtgggattggagaagatgctgaaaccaaatgggcacctgtcctcagagatcacagactactgagaaatattggaggtgtctttctccataaaataaacagttattccatgttgaaataaaagtataagccaaaa

SEQ ID NO: 1254 - DNA, 1314 bp, Homo sapiens
  SIMILAR (7)..(1311): 1001254mologous to Homo sapiens hepatocellular carcinoma- associated antigen 67,accession number AF243495,Smith-Waterman Score=2272.
aagaggagcaaactagttgcagaagaatatctgaagttttttgattttacaggaatgacgctggatcagtcactcaggtatttctttaaagcattctctcttgtgggagaaactcaagaacgagagagagttttaatacacttctccaatagatatttttattgtaacccagataccattgcttcacaagatggagtccattgccttacctgtgcaataatgcttcttaataccgatctacatggccacgtgaatattggaaagaagatgacctgtcaggagttcattgcaaatctgcaaggggtaaatgagggtgttgatttctccaaggatctgctgaaagctctgtacaactcaatcaagaatgagaagcttgaatgggcagtagatgatgaagagaaaaaaaagtctccctcagaaagtactgaggagaaagctaacggaacacatccaaagaccatcagtcgtattggaagtactactaacccatttttggacattcctcatgatccaaatgctgctgtgtacaaaagtggattcttggctcggaaaattcatgcagatatggatggaaagaagactccaagaggaaaacgaggatggaaaaccttttatgctgtactgaagggaacagttctttacttgcaaaaggatgaatacaagccagaaaaggccttgtctgaagaggacttgaaaaacgctgtgagtgtgcaccacgcattggcatccaaggccacggactatgagaagaaaccaaacgtgtttaaacttaaaactgccgactggagggtcttgctttttcaaactcagagcccagaggaaatgcaagggtggataaacaaaatcaattgtgtggcagctgtattttctgcaccaccatttccagcagcaatcggctctcagaagaagtttagccgcccacttctgcctgccactacaacaaaactgtctcaggaggagcaactgaagtcacatgaaagtaagctgaagcagatcaccaccgagctggccgagcaccgctcatatccccccgacaagaaggtcaaagccaaggacgtcgatgagtacaaactgaaagaccactatctggagtttgagaaaacccgctatgaaatgtatgtcagcattctcaaggaaggaggcaaagagctactgagtaacgatgaaagcgaggctgcaggactgaagaagtcgcactcgagtccttcgctgaacccggatacttctccaatcactgccaaagtcaagcgtaacgtgtcagagaggaaggatcaccgacctgaaacaccaagcattaagcaaaaagttacttag

SEQ ID NO: 1255 - DNA, 1341 bp, Homo sapiens
  SIMILAR (67)..(570): 501254mologous to Mus musculus Pro-Pol-dUTPase polyprotein,accession number Y12713,Smith-Waterman Score=449.
atggggagcactgaaattttggaaaaggagaccccagaaaatctcagtaatggtaccagcagcaatgtggaagcagccaaaaggttggccaaacgcctttatcagctggacagattcaaaagatcagatgttgcaaaacaccttggcaagaatgtgagaagtgtcataagatgtttcacggtgcaactggagggagaccatagatgggaaggcatccatgaaggcttcatgaaggaggtagcaactcaagtgggctttgaaggacagaaaatacttcaacagaaagagaccacactccacataggtgtcactggatggaaaaatatcaagtggaaacattggggtatgaaggaattctggctggacaggcccaacctatttcttgctaaagagaggccaaggtgtttggacgtcatctatgggatagtggatgaggaacctgatcagatatcgagggcgaagggttcacgttacaatgacttagcaggatccttactaaaattggataacgcagaaacaaacacagaaacccaaaagttagagcctaggtgcatagcacggcattcggaagacagttctgcatctactatcaagtgcttcatcaaaaaggacatgaacagccttaacgttacgtgttctcagctcctcgagggctccaaggttgctttcagctgttcctgggctgctccccagagattgcaccaggcagcttacatctcatctgtgaacgttttccgtgctctgggagtcatttcccaggaggacacagaacacaggcacaatgcaacttgtttaaaagaacaacagaaattatcttctgtcattcaaagcagaggagcagatatcaggatcagcgaacaagaggagcacgttaagggggaagatgaagacatccttgggcctggatatacggaggactccaccgacgtgtacagctcccagtttgaaaccattttggacaacacttctttatactacagtgcagagtccctggagacattatactcagagcctgatagctattttagctttgaaatgcccctcactccaatgatacaacagcgcattaaagaaggtggtcagttcttggagaggacatcagggggaggacatcaggatatcctgagtgtgtctgcagatggtggcatcgtgatgggctattctagtggcgtcaccaatgggctgaatgatgccagcgactccatctacacgaaaggcaccccggagattgctttctggggaaggtactcgtcccattctcattcatttcatgctggtggtttttgtaggatttcttttctgggaaatctgagtgtggaatatatatttaaatcatttggg

SEQ ID NO: 1256 - DNA, 653 bp, Homo sapiens
  SIMILAR (652)..(266): 791254mologous to Homo sapiens hepatocellular carcinoma- associated antigen 67,accession number AF243495,Smith-Waterman Score=482.
tttttttttttttttttaaaagatttttttttattcacctgccatgggaaccatgtaaagaatgggaaacggggaggcaaaaaataaatgtgtttgaacataaaagcaaaaataagcccgacatgttttggatctaagtttcacaaatccacacttacgtggccattgtagatcggtattaagaagcattattgcacaggtaaggcaatggactccatcttgtgaagcaatggtatctgggttacaataaaaatatctattggaggaagtgtattaaaactctctctcgttcttgagtttctcccacaagagagaatgctttaaagaaatacctgagtgactgatcccagcgtcatttcctgtaaaatcaaaaaacttcagatattcttctgcaactagtttgtaaattcccttgttctgccaaagggggttttgcaacatctgatcttttgaatctgtccagctgataaaggcgtttggccaaccttttggctgcttccacattgctgctggtaccattactgagattttctggggtctccttttccaaaatttcagtgctccccatttcagaatgagcttctagccgtgttgttttcactccagcattgcttccccagaaagcaatctccggggtgcctttcgtgtagatg

SEQ ID NO: 1257 - DNA, 444 bp, Homo sapiens
  SIMILAR (329)..(96): 341254mologous to Marchantia polymorpha rpl21,accession number X04465,Smith-Waterman Score=73.
caactctataaaaaataacattaaatgctctttatgaactaacatttccaaagtgttgagtagacattttttgaatgtcagagttaaattattattttgtggccatatttcatccttgtagtctccctgcctatcatattaatcatgtttcgatcaacgtatgttgaaatgtttaacacccttcccttcactctgcaacattatggttttgctattgctcgagcttttaggtatgagatagtcaggaataagattgaagaggcgatgatgagaatcctgtatattgctaataagttggaactttgttctgaaatcagtggctggagagtaggagcaaggacttgggatgagaggcaaagactgtgttccagaaaaacagattctgactcggttattgacacagaagtcagagacatgtatggaaaattaaagtatgaagactag

SEQ ID NO: 1258 - DNA, 657 bp, Homo sapiens
  SIMILAR (262)..(405): 721254mologous to Homo sapiens envelope protein precursor,accession number AF072506,Smith-Waterman Score=164.
atgagaacgaaaagaaaacctcgcctcaccccaagttcccgagccggggctgaggacttttcgaaggaaagggtccgcctagccctgagtcaagcggtcttactgtaccgccgtgtgcattccctcatacgagctccacacagtcctacagcgttccaccatgtaaaatcaggccttcattttgaacttggaaatctccccactcgcaggcagtggcaatgccagcaagccacaggccacggacccgtgaggaaccaggccacacagcaggagatggaccatttagttgcaagaataccagctcagggtcccactgattctacattacgaaaggcctatcctcttactcaaatttccttgacaccaattttccagtcatgtttcttccacatccctgaccatccagcaaaatcattgtctatggcccgtaaattggtatatcattgtggtctggctgtatctccttctaagcaaaatgcacaaccaggaaatttcaaaattcatgcctttgtggatgttgctatatgtagtaaatggtctgtaagctcgttgcctgatgaccacacaccccataaaagtgagttatgcactggtgcccgtgaggtagcagtggaacaaagggagctgctgctggcagtcaatgaccatgttggttaa

SEQ ID NO: 1259 - DNA, 401 bp, Homo sapiens
  SIMILAR (21)..(227): 301254mologous to Aplysia juliana myoglobin,accession number AB003277,Smith-Waterman Score=74.
  misc_feature (1)...(401): n = a,t,c or g
accacctntncncgcgtctaggccttctgtcctggagaagaagctatagtcgttctccctcgctgcctcccggcgacccgcagctcatcgctctcatcgtggagcagctcaagagccggggcctttttgacagcttccgccgggactgcctggccgacgtggacaccaagccagcttaccaaaacctgaggcagaaagtggataattttgtgtcaacacatctggacaagcaggaatggaatcctacgatgaacaaaaaccagttgcgaaatggtctgaggcagagtgtggttcagtcagggatgttggaagctggagtagacaggattatttctcaggtggtggatccaaaacttaaccacatcttcaggccacaaatagaacgagcaattcatgagttc

SEQ ID NO: 1260 - DNA, 418 bp, Homo sapiens
  SIMILAR (369)..(301): 391254mologous to Homo sapiens Human secreted protein, SEQ ID NO: 7052,accession number G02971,Smith-Waterman Score=47.
tctccaactgccgaacttgctcccctttcaaatctggtcactgcccatggtcaaggttgaaatcttgagatcagtgacgaccttggcctatcttcagtctgaagttgcactcttatgtaaccgaatccatttcttcaccaaaaattagctttcaaaaggtgtctggcgtatttgaaccacactctgcctcagaccatttcgcaactggtttttgttcatcgtaggattccattcctgcttgtccagatgtgttgacacaaaattatccactttctgcctcagggttttggtaagctggcttggtgtccacgtcggccaggcagtcccggcggaagctgtcaaaaaggccccggctcttgagctgctccacgatgagagcgatgagctgcgggtcgccgggaggcagcgaggccgggtt

SEQ ID NO: 1261 - DNA, 528 bp, Homo sapiens
  SIMILAR (3039)..(2242): 901254mologous to Escherichia coli K12 putative transport protein,accession number AE000362,Smith-Waterman Score=1237.
atggcggacgcggcggcggcgggggaactggcgcggtgggcggcggcggaactagccagcctctgccggggcagcgactggcgctactggggccagcgggggcggtgccccatcaacccggcctcgctgcctcccggcgacccgcagctcatcgcttcatcgtggagcagctcaagagccggggcctttttgacagcttccgccggactgcctggccgacgtggacaccaaggccttccccgcccactctctgctcacttcccattcatcaacacgtcccagcagtgcccgattataacagtcatctgtggagctgataaaagtatagattaccagaattatttcttaaagatttttatccagtattacgggtcgagacctagcaatctgtgcttcagcatgcactcccacgtcctcttgaacaacatgttccgggaaattccggaaacagtggaacagtcaaattctattgttcagaaatttaggtcaggtcgcaaggaagcactggttaccaagtcgcagacctga

SEQ ID NO: 1262 - DNA, 1706 bp, Homo sapiens
  SIMILAR (1292)..(1567): 351254mologous to Arabidopsis thaliana glycine-rich protein,accession number AL161577,Smith-Waterman Score=118.
  misc_feature (1)...(1706): n = a,t,c or g
ttttttcggagtaaaagtatcaaataattttattatgaaagataagccatttattgaccattcacttttctaaaaaaaacacaaatgtgagaataaaataaacatacctaagactcactggcccctccaggacaggaagcagccctgggacagagagcctgcaaactgagtttccttatgcctaatgtctgaacttctcatacattctaggatttcatgttttcgttacaaagggaaagggaaactgggctaggaagattcatgtacaagaagggccacaactttaaaggctttctgacggctaatgacttgtacacatctggtttgcaaactctgagagaccagtttccaaattaagccactggcaaagactactcccgagctaatcctttactgtcaatttttctttggaaattgggctttcgggactgggctaatgttccccccggtagcttccggttaatcccacagcacaaaccctaaagtcccatggtgcagtctccatgttcaaagtataaaaagtctgtttcaaggacaaacccgggttgctgtaagtgtttctctctctgtaagtgtcttacttggtgtccatgccctttggacaggctggccaaatggcagcacaaatgcagggggtgacacggtcaaactctcccactgccgaacttgctcccctttcaatctggtcactgcccatggtcaaaggttgaaatcttgagactcagtgacgaccttggcctatcttccagtctgaaagttgcaactcttatgtaacccgaatccatttcttcaccaaaaaacnanaatttagctttcaaaaggtgtctggcgtattccttaggaaagtgtcctgagattggagcttggagggtcctggccttcgggcttcttggagggggtgctggcacagctgcttttttctgggcccgccaaggaactcatgaattgctccgttctatttgtggcctgaagatgtggttaagttttggatccaccacctgagaaataatcctgtctactccagcttccaacatccctgactgaaccacactctgcctcagaccatttcgcaactggtttttgttcatcgtaggattccattcctgcttgtccagatgtgttgacacaaaattatccactttctgcctcaggttttggtaagctggcttggtgtccacgtcggccaggcagtcccggcggaagctgtcaaaaaggccccggctcttgagcatgctccactgatgagagcgatgagctgcgggtcgccgggaggcagcgaggccgggttgatggggccaccgcccccgctggccccagtagcgccagtcgctgccccggcagaggcctggctagttccgccgccgcccaccgcgccagttcccccgccgccgccgccgtccgccatggctgcgccccgggcccacaagggagaacgactatagcttcttctccaggacagaaggcctagaacgtgtagaggtggggggttgaagggggcggtgaaggaggagggccccaaggcggcagcggcggaggtggcgatggcggcaggggcggtggtggggggcggcggcggcgaaggccccctctgatacagcagaggttgtggtggacgcggcagaaacggcctgctcgattccaggcgcaccccagatggcgtcaacgttgacctttgcattgtggggcgggaagttttctgtggccat

SEQ ID NO: 1263 - DNA, 478 bp, Homo sapiens
  SIMILAR (43)..(126): 391254mologous to Chironomus pallidivittatus giant secretory protein sp-Ib,accession number K01694,Smith-Waterman Score=63.
  misc_feature (1)...(478): n = a,t,c or g
gggctgaccgcctgaggaanncgctgatgaccctataggaatgccgctcgagaggcaatccacagcagctgcccctgcaaatgtcagcgccagcccagtcaaaagagcttgaaacctaccaagccggaggactgtgctgtgcctctctcgcccacattttccccaagcactctcaggaacctggcaacagactgagagaaaggaatgaaaggatggaagaattacaagatcaggcactgctgtctgtctgttccacggatgtaaccacagcacacgcgtggctcacggtactagtgtgataaatgcttgttacatgaaggcgtgaacagggatgagaagagacttcctggagaaacaaaaggactaacaatcaggaaggggaggtgatcggggcaggagtaaagtggacacctcagcnnnnnnnnnnnnnnnnnnnnnncctnnnnnnnnnnccgggccccaaattccccttataggg

SEQ ID NO: 1264 - DNA, 403 bp, Homo sapiens
  SIMILAR (217)..(8): 301254mologous to Homo sapiens Human secreted protein sequence SEQ ID NO:130,accession number Y87091,Smith-Waterman Score =61.
ccacagcagctgcccctgcaaatgtcagcgccagcccagtcaaaagagcttgaaacctaccaagccggaggactgtgctgtgcctctctcgcccacattttccccaagcactctcaggaacctggcaacagtgtccccttgtggccaagcctggaacatcacatctgtacgttgcaatctgtggatcagctacgagactgagagaaaggaatgaaaggatggaagaattacaagatcaggcactgctgtctgtctgttccacggatgtaaccacagcacacgcgtggctcacggtactagtgtgataaatgcttgttacatgaaggcgtgaacagggatgagaagagacttcctggagaaacaaaaggactaacaatcaggaaggggaggtgatcggggcagg

SEQ ID NO: 1265 - DNA, 757 bp, Homo sapiens
  SIMILAR (109)..(234): 331254mologous to Homo sapiens Human C1qRp cytoplasmic tail,accession number Y32356,Smith-Waterman Score=65.
atgtctggcctagagatctattcaactgatagcagccgcctcttctggggagagcagatctttcagaaagcactggctgcgctgctaatcaaacgcaacattgttctcagcaaggaggaagaatggaaagaactacagccaaacaatgcgcaggcaatccacagcagctgcccctgcaaatgtcagcgccagcccagtcaaaagagcttgaaacctaccaagccggaggactgtgctgtgcctctctcgcccacattttccccaagcactctcaggaacctggcaacaggacacagacaagaccctttcaataaatccagctcagaaacacctattgttcaaaatcttcaactcgccacaggctaccaccactccctatggctttgcaaaattaaagatttagaagaaggatggggcggtggaagctatgaaaagaggcaggaaaaaagttcctttgacccgatgctgtcagagagcgtgcatgaagaagaaagttaatggtatttccatttatataagaaagcgcctaagaaatgcctgtgacgttcgtgaactagtgattgtgaattccaaatttgatgccaactttatgtgtaaagaagctaactcctgccaacatcgtggctgaatgaacagctgggactatgcttaacccattcccagcttataaaagccccatggcagctgcagtgaagcatcagaaaagtatagtaagaagaaactgaatttgaagtggattcttacaaaggaaaaagaa

SEQ ID NO: 1266 - DNA, 753 bp, Homo sapiens
  SIMILAR (591)..(544): 371254mologous to Homo sapiens Human 5' EST secreted protein SEQ ID NO: 284 from WO 9906553,accession number Y12619,Smith- Waterman Score=44.
atgggggaacccccacatggcatagaaacatctgtggttgtatccacacgcacagtgcactggggtctcacagctaataacacaaaatttcaaccccaatctacagaaattcaaagctcgtctgcgctttctaatccaccaacaactgtacatgctcaaggatcaaccaacaaaaccacctactggcattttgaaatgcatattgccagtgccgtggggcatcgcatttacaagaaggaggaggcccacttactcctgaaagcttttcaaattaaaggccaggcagatatttttgtaagcaagttcgaaaatgacaactggggactagatggttatgtgtcatctggacttgaaagaggaggatttacttttcaaggtgacattcatggaaaagactttggaaaatttaagctagaaaggcaaggatgggtcacaatattcttgagcctatttcttcatcttaaatctcagtatagaagttcccaaggttgttacgagattgagaggccacaaatagtcaatggcattttaaagaaagatgaagggatcaaggctgaggaactgcacaggaggaagctgtctccaccaggagctggatcagatgctgcttgctgtctacctattgttgacgtcctccttcccacgtggatgcaacgtgagcagtcagaaagtcaaacttcacggaacgacagaggtgccaaaacggcaactccaccacctgtccgaagatctaagagaacaccagctgtctga

SEQ ID NO: 1267 - DNA, 227 bp, Homo sapiens
  SIMILAR (108)..(161): 661254mologous to Homo sapiens No similarities to any reported proteins,accession number AB006623,Smith-Waterman Score= 63.
accaggagagctgatgtttcagttccagtccaaaggccagcaggctcaagacagaggaagagccagtgtttctctttgaagtctgaaggcaagaaaaattctccctcagtcaagggagggtcagcctttttgttttatgttggcctagccgcagtttgcccaactgcaaaatggaaagagatgaagcaggaattaagatactctaggagctcgcccacagctgattc

SEQ ID NO: 1268 - DNA, 227 bp, Homo sapiens
  SIMILAR (106)..(225): 351254mologous to Homo sapiens spectrin beta IV,accession number AF311856,Smith-Waterman Score=56.
ttgggcaaactgcggctcagaaagataaagaacttctccggagcgaaaaagctgctaagaatgtatccaaaactccgcacgacttcaaagagaaacactggctcttcctctgtcttgagcctgctggcctttggactggaactgaaacatcagctctcctggttctcaggccttcaggcttggactggagctacaccattggctctcctgggtctccagctcagtga

SEQ ID NO: 1269 - DNA, 2550 bp, Homo sapiens
  SIMILAR (95)..(880): 1001254mologous to Homo sapiens osmosis responsive factor,accession number AF023244,Smith-Waterman Score=1344.
tcgtgccgcctttgcccgcttctgtggactgttcgaacgcccaggggtgggccaaacccgtttcttaggaaaccaggaatccagggaaggcagaatggcttcctttgggtggaagaggaaaattggtgagaaggtctcaaaggtcacttcccagcagtttgaagctgaagctgctgatgagaaggatgtagttgacaacgatgaagggaactggcttcatgccattaaacgtaggaaagaaattcttcttgaaggctgtgctgagaaaagtaaacagctgaaggatgaaggagccagtttggctgaaaataaaagatatcgggaggcaattcagaagtgggatgaagcactacagttaactccaaatgatgctaccctatacgagatgaaatcacaggtgctaatgtctcttcatgaaatgttcccagcagtacatgcagcagaaatggccgtccagcaaaatccacattcatgggagtcttggcagactttgggacgtgctcaacttggtttaggagagataatcctggcaattcgaagttttcaagtagcccttcacatctatccaatgaaccctgaaatatggaaagaagacctctcttgggcaagaacgctccaggagcagcagaaggtagcacagaggattaaaaaaagtgaagcaccagctgaagtaacacacttttcaccaaagtcaattccagactatgactttgaaagtgatgagattgttgctgtttgtgcagctattgctgagaaagagaagacagtttcagcaaataaaacaatggttattgtgtctgcttctggggccatagagactgtaactgaaaaggaggatggtgctacaccaccagatggctctgtttttatcaaagcccgatgaagcagtatgcataggattatttgaatctgtctttttgattgcctcttgaagttttgacatagagacatttactctggagatagataggagaactcctggttgtaaaatatgtttttcagatgaggcatataaaaactaaaatggcaggattattgtatagtgtttggaatatgctttgataagttatgatttatatttctcaaggttaaaattctgagtaaaatggtctttgattaataaacttagtttaatctgaatatgtaaatgaatacattttaaagacaaaacttgaaaaatgtattcttgaatagtgaataatttgatcaatgttactgaaatgctgtctcaacttttgttttatgataaaggaagtgtgtgatttccctccctctgagaaatatactgcgcttaatatttgctgtctttttcttgcttcattagagtaagtctgtcagaaagcttgaatatttttgacattcattttgattcaaagttgtcatttggttatatgtggaatctttgaaagtttggctgaaaatgcacacaaatgtgtacattctgaacattttctgaagtttctcttaattctgatttgtgtttctgttttgactttgaagttgtaacaatgatagttgtctccttcagtatttggtaaaagtgtaaagtattgataaatatgagaatgatggttttattttttaattgttacagtaagtaatccttaccacaaatgagctatttttaaaatatgcatttttaaatgaatggcttttacagataggttaatgacaattgtactgctatattatcccagtcaaaaccaatactttcttttctttattttacaaagctttaaaaaccctggaaacaacttacttcttgcttgtgtctttccatttgatgactgggaattacttttctagataactttttttgaaactactcagtgaaatgaaaaataattacaattttaaatagctaattatatctttctaaaaataaaaaagtagggctgttattagagtgccaatgaataaataacttaagcacaaaatacatagaaattggaatgtgatttatagtacaatctcatgagtatgaaaaggctatattaaaaaaaattttattgaaagtccacagtcatattcacaaaccaatactgtcattgctaatctgaactattatttttatactatatattgtagtacaataatatagaactgttgggttctgttacttctgacactcaggaagatactattggtgtattaattttatctttcttagagatgaaagtagcccgctttatgttaaagatcttactactgttggagcttataagtaatgatctacattttttatgaagatggtttttaaaacttttgttttattggaatgcatatctcttttcagggttggagaaattagcacttgccttgaaaagatattatttccttaagttatatcatcagaaaattagctctggttagagaggttagtttcagagtgctccaaaaaatatgttaattattttattttgtttaataaagaacattctcaaaacgtaaataggtatctagagaagtgagtactcaacatttggtatattgttttgagtaatggatgtttgttttttgtgtaatttgtgaataaatagtttttttctg

SEQ ID NO: 1270 - DNA, 891 bp, Homo sapiens
  SIMILAR (848)..(219): 301254mologous to Leishmania major proteophosphoglycan,accession number AJ243459,Smith-Waterman Score= 107.
atgtttactatatggacctttactatgccaccccttgctctagagaccaaagaccttcagccccttcctcaaaagctgtcaaagactcctgaaacctcaaacatccaggttcttaaggtccctctgctaaacgtagaattccgcggatcctctccctatacgacctctcgcagggaaagtcagcgtcggccaaaagcctccgggatcggaatgaggaggctgctggagaagttgctttctcctaaaagggattatcccaggcgcacacggtcattacacgccggggacgctcagtcggaagtgcttccctgggcggaagcttctgagcgtgatatagcggaagtgccttctcttccggtctttctggtctcggccgcagagcgaagagaagttttaaaacatgagaatacagtacctcctcaatctatgggggcaagcagtaattcagaagatgctttttctcctggaataaaacagcctgaagcccctgagatcacagtgttcttcagtgagaaggaacacttggatttggaaacctctgagtttttcagggacaagaaaactagttatagggaaacagctttgtctgccaggaagaatgagaaggaatatgacacaccagaagtcacattatcatattcagttgagaaagttggatgtgaagttccagcaactattacatatataaaagatggacagagatatgaggagctagatgattctttatacttaggaaaagaggaatatctaggatctgttgacacccctgaagatgcagaaaccactgtggaagaggaggtttatgatgacccagagcacgttggatatgatggtgaagaggacttcgagaattcaaaaacccagagttctctggtgaagaaccagttatga

SEQ ID NO: 1271 - DNA, 1323 bp, Homo sapiens
atgacatcagagaagagacacttgaggctttctggaggacttaagcttgaagaaaacttagccaggcttaaaaagcttccaccgccgaccgggcagccccagttacccgataacgctcccaaggccccgtgtttacattctttcccactggaagcagaaattatacgcccaaattcctacctgccttccctggattcctggtttcctaagaaagggtttggcccacccctgggcgttcgaacagtccacagaagcgggcaaagaaagacgactcagtctttcccctccgccaatctcttctccgggaccacaatcccagaatcagggccacgcggctgggcgcgccctctagcagcagccctggtgaccgcagcgcacgagcgcgggaaaatgaggctgcgcgggctgaagacgcaccgagaggagccgcccccgcggtaccgcgcagcctcgcgtcccgtagtggggaacaagggctgccgtaacaatgtcacagactcaatgacttacagcaaagaaaattattctttgccagtactggagataggatctagatgcaacagcactccagaaacaatgagaaacctagcactgaatcttggtttctattaccattctccaataaaagcatcgggactccttggagaaatggctgattctaaaactagggcaggggataacaaaatgggtctggagcatcttgtagtggcagaaaggaaagtagcgtcggccaaaagcctccgggatcggaatgaggaggctgctggagaattgctttctcctaaaagggattatcccaggcgcacacggtcattacacgcggggacgctcagtcggtgcgggcccgacgaagactcgcccatccggtcgccagaaaactgggagtccgcccgcctttccggcactgaaacgcgatcggccctgcctgacgaagggaacgtcatctttggaaagcgtcgcaataagacgcacacgttgtgccgccgctgtggcttaaggcctaccaccttcagaagtcgacctgtggcaaatgtggctaccctccaagcgcaagagaaagtgcatggattccgtgaaggaacaacacctaaacccagagggcagctgttgcagcatccagttcatcttaagaatgtcaacgattgtcatgcaataaatgttctggttttaaaaaatacatatctggttttgcctcaaagcacagcagtcaatgctcaagtcaaacatgtcacattccaagatgcattggtccagtcacaagggtggtccttatccactggcaacactttcctgccttcatcaacattctgtcatcaagggtaa

SEQ ID NO: 1272 - DNA, 618 bp, Homo sapiens
  SIMILAR (71)..(283): 391254mologous to Homo sapiens ribosomal protein L37,accession number L11567,Smith-Waterman Score=94.
cagaagcgagatgcacgaagggaacgtcatcgttctggaaagcgtcgcaactgaagatcgcacacgttgttgccgtcgctgtggctctaaggcctaccacccttcagagagtcgacctgtggcaaatgtmmgctacccttgccaagcgcaagagaaagttataaacttggagtgccaaggctaaaagaccgaaataccaccgggaactggtcggaatgagggcaccttaaaatttttttaccagcagattcaggcattggtttccgttgaaggaacaacaccttaaacccaaggagggcagttttttgcagcattccagtttcatctttaagaatgttcaacgattagtcatgcaataaatgttctggttttaaaaaatacatatctggttttggagtttggattcataatacaagagaagcacagggcaaagacactgcattaacctccaagaactaaggaatgggaggactgggccaggcctgggtgggtgcacacctggtaattcccagctacttcaggaggctgaggcgagagaatcgcttgagccttggggggcagaggttgcagtgagctgagagaacggcgggcggcagagcgagactccatctcaaaaaa

SEQ ID NO: 1273 - DNA, 449 bp, Homo sapiens
  SIMILAR (58)..(540): 841254mologous to Escherichia coli adenylate cyclase,accession number X01653,Smith-Waterman Score=678.
  misc_feature (1)...(449): n = a,t,c or g
acgacgggagctgcatgaaagccgaagttatggaccgctagcatctgtcactggccaccggtttccgggagtaaagaaaccaagtggaagagtgtttcctcctctggccgtaaagcagctgtccccgccctactccggaccgccccaaagactccatgggatggacctgagtcagccgaatcctagccccttcccttgggcctgctgtggtgctcgacatcagtgacagacggaagcagcagaccatcaaggctacgggaggcccggggcgcttgcgaagatgaagtttggctgcctctccttccggcagccttatgctggctttgtcttaaatggaatcaagactgtggagacgcgctggcgtcctctgctgagcagccagcggaactgtaccatcgccgtccacattgctcacagggactgggaaggcgatgcctgtcnggagctgt

SEQ ID NO: 1274 - DNA, 402 bp, Homo sapiens
  SIMILAR (402)..(334): 911254mologous to Homo sapiens Novel retinoblastoma interacting protein 115392*,accession number Y06604,Smith-Waterman Score=114.
tttcatctacaacacatttatttgtacaatccagaaactagcaggaccaaaattagcagcaatgctgagacatttactggcagctttgccttctaccctaaggtcaaagtacttgagacattgcctgtgtgcctaaggaggcatcacacaaggaaagccccaccccctacttccttcatctgagcaaaggaacctgtttacatgcacagtgcttagtgggtgggactctccaaagcagtggaaattcagatttaacctaatgtatacaggtctgcgtcatgatggcaaattgaaggtgtcatgatttagctggtttctctggaacattcctaggtatacatccttgcctcctttcctaggtatgggctccagtaaccaccctgggtttgaaatcacagtcag

SEQ ID NO: 1275 - DNA, 884 bp, Homo sapiens
  SIMILAR (200)..(538): 981254mologous to Homo sapiens Novel retinoblastoma interacting protein 115392*,accession number Y06604,Smith-Waterman Score=577.
ggtaaagaagctaagtggaagagtgtttcctcctctggccgtaaagcaggtactctctgcagcaccagctgtccccgccctactccggaccgccccaaagactccatgggatggacctgagtcagccgaatcccagccccttcccttgggcctgctgtggtgctggacatcagtgacagacggaagcaggagaccatcaagggactgggaaggcgatgcctggcgggagctgctggtggagagactcgggatgactcctgctcagattcaggccttgctcaggaaaggggaaaagtttggtcgaggagtgatagcgggactcgttgacattggggaaactttgcaatgccccgaagacttaactcccgatgaggttgtggaactagaaaatcaagctgtactgaccaacctgaagcagaagtacctgactgtgatttcaaaccccaggtggttactggagcccatacctaggaaaggaggcaaggatgtattccaggtagacatcccagagcacctgatccctttggggcatgaagtgtgacaagtgtgggctcctgaaaggaatgttccagagaaaccagctaaatcatgacaccttcaatttgscatcatgacgcagacctgtatacattaggttaaatctgaatttccactgctttggagagtcccacccactaagcactgtgcatgtaaacaggttcctttgctcagatgaaggaagtagggggtggggctttccttgtgtgatgcctccttaggcacacaggcaatgtctcaagtactttgaccttagggtagaaggcaaagctgccagtaaatgtctcagcattgctgctaattttggtcctgctagtttctggattgtacaaataaatgtgttgtag

SEQ ID NO: 1276 - DNA, 400 bp, Homo sapiens
  SIMILAR (213)..(275): 471254mologous to Agrobacterium tumefaciens Probable virB7 gene,accession number AB016260,Smith-Waterman Score=53.
ggcacgagatcaacgatgtgggctcagcagccctggagtaggagctgggaaggtcagtgccttggtggcggcagggccagggcactgagagtattggcagggcacagcaggggaaagggaagagaagcagagggtgggactctccctctgtgctggaagagggctaacaccagcccggactctccactctggctaggccaagggggccctctgtcctctgtgttgccctagggctcggtgacctctgtcatagcactgaccacatggtatcctgcctgtgccttcctctagctgtacccgccctactccggaccgccccaaagactccatgggatggacctgagtcagccgaatcctagccccttcccttgggcctgctgtggtgctcgacatcagtgac

SEQ ID NO: 1277 - DNA, 445 bp, Homo sapiens
  SIMILAR (444)..(265): 1001254mologous to Homo sapiens Novel retinoblastoma interacting protein 115392*,accession number Y06604,Smith-Waterman Score=314.
ttcatctacaacacatttatttgtacaatccagaaactagcaggaccaaaattagcagcaatgctgagacatttactggcagctttgccttctaccctaaggtcaaagtacttgagacattgcctgtgtgcctaaggaggcatcacacaaggaaattcatctttaacctaatttatcacaggtctgcgtcacgatggcaaattgaaggtgccatgatttagctggtttctctggaacattcctttcaggagcccacacttgtcacacttcatgccccaaagggatcaggtgctctgggatgtctacctggaatacatccttgcctcctttcctaggtatgggctccagtaaccacctggggtttgaaatcacagtcaggtacttctgcttcaggttggtcagtgcagcttgattttctagttccacaacctcatcgggagttaag

SEQ ID NO: 1278 - DNA, 1045 bp, Homo sapiens
  SIMILAR (579)..(902): 961254mologous to Homo sapiens Novel retinoblastoma interacting protein 115392*,accession number Y06604,Smith-Waterman Score=536.
ggagctgtatgaaagcggaagagttatagaccgctaacacctgtcactggccactggtttcccggagttagcggcaacgaccttgcagcctggacactagccaggcgctccctcttctcacagcggcccacgtctccttgcttgggagcccatcgtcctggctccggtggcctcgctgggtctcggggaagcagaggactgttcattcctgtggcgaaaagccggagtcggccctagacacccacgactcgcagggtccatggttccggaggccgtgagacctgccggggctgacaggtgccagggcccatgctgcgggagcctgtgtgctcagccttcttgcggacggtaaagaagctaagtggaagagtgtttcctcctctggccgtaaagcaggtactctctgcagcaccagctgtccccgccctactccggaccgccccaaagactccatgggatggacctgagtcagccgaatcccaacccccttcccttgggcctgctgtggtgctggacatcagtgacagacggaagcaggagaccatcaaggctacgggaggcccggggcgcttgcgaagatgaagtttggctgcctctccttccggcagccttatgctggctttgtcttaaatggaatcaagactgtggagacgcgctggcgtcccctgctgagcagccagcggaactgtaccatcgccgtccacattgctcacagggactgcgaaggcgatgcctggcgggagctgctggtggagagactcgggatgactcctgctcagattcaggccttgctcaggaaaggggaaaagtttggtcgaggagtgatagcgggactcgttgacattggggaaactttgcaatgccccgaagacttaactcccgatgaggttgtggtgctggacatcagtgacagacggaagcaggagaccatcaaggctacgggaggcccggggcgcttgcgaagatgaagtttggctgcctctccttccggcagccttatgctggctttgtcttaaatggaatcaagactgtggagacgcgctgg

SEQ ID NO: 1279 - DNA, 2431 bp, Homo sapiens
  SIMILAR (1)..(1107): 1001254mologous to Homo sapiens Human WAR-1 amino acid sequence,accession number Y98147,Smith-Waterman Score=1920.
  misc_feature (1)...(2431): n = a,t,c or g
tgaagtcacaggccactaatggccattaaaagttgccattttttaatgagaaacacatttttggtcttaataaagaaaaacaaaattccatggaaataaataataaacaatttaaatgagaactgttgtctgtgttttttttaaccttgtatattatatacatctcattggcagaaaccaggggaggctggaaatcctgtccaagacaggctttggtccccattgtccttgtttatttggagaagcagcattttcacacactcagcaaaggatgttgctaggaagtgtcgaggccaagcccaggaagacctggtcccctgagattggcctgctggtcaggagaaagaatagacgcctgattccggcaatatcttcctgtatcttcaaacaggagattgtttcctcatgggtccctcccaatgttgccaggaagtgtctggtcagcagctcagcatccctagcctagcatccaggggcctccaaagaggcccacttgaaagtcaggccaccccatctgccatgggatgtacaaccaccataacatcctggctcagaagagaagggccactgcagtcaatacctggggggaaatgcccatcatcctcatggataacaactagaaactttgctaaatcaccaaaaaaaaaaaaawattactacaaaataaaacaacactactgatcacatttccaagttaacctcactctactagagctgtattttggatgtattgctaggataggaagtagctgtgtgatgcaggtaacacacatgcttcagaaactgacagacactttcagaagagtgagagtaacctgaaaggacagacagctgctctaagtctgacgtcctcttcatcctggatgagtcggttgattaacggctagtcactaccaggcaaacattcagtgccaggtcccagactttctgtattgtcgcctggatgctagttacacatttgatgagttttgaccagaacaaatcaggggaaaacatagaacaaagcctcaaacactaaccagtcatctacaacacatttatttgtacaatccagaaactagcaggaccaaaattagcagcaatgctgagacaatttactgggcaggtttgcccttctacccctaaggtccaaaagtacttgagacattgcctgtgtgccttaaggaggcatcacacaagggaaagccccaccccctacttccttcatctgagcaaaggaacctgtttacatgcacagtgctttagtgggtggggactctccaaagcagtgggaaattcagatttaacctaatttatacaaggtctgcgtcaacgatgggcaaaattgaagggtgccatgatttagctgggtttctctgggaacattcctttcagggagcccacactttgttcacactttcatggccccaaagggattcaggtgctctgggattgtctacctgggaatacatccttgcctcctttcctaaggtattgggctccaggtaaccacctgggggtttgaaatcacagtcaggtacttctggctttcaaggttggtcaagtgcaagcttggattttctaagttccacaacctcatcggggagttaagtcctcnggggcattgcaaagtttccccaatgtcaacgagtcccgctatcactcctcgaccaaacttttcccctttcctgaagcaaggcctgaaatctgaacaggaattcatcccgagtctctccaccagcagctccccgaacagccatcgcccttcccagtccctgtgaagcaatgtggaacggcgaatggtaacagttccgctggctgctcaagccagaaggacccagcgcgtctccacagtcttgattccatttaagacaaagccagcataaggctgccggaaggagaggcagccaaacttcatcttcgcaagcgccccgggcctcccgtagccttgatggtctgctgcttccgtctgtcactgatgtcgagcaccacagcaggcccaagggaaggggctaggattcggctgactcaggtccatcccatggagtctttggggcggtccggagttagggcggggacagctggtgctgcagagagtacctgctttacggccagaggaggaaacactcttccacttagcttctttacctgtcagccccggcaggtctcacggcctccggaaccatggaccctgcgagtcgtgggtgtctagggccgactccggcttttcgccacaggaatgaacagtcctctgcttccccgagacccagcgaggccaccggagccagcgaggagacgtgggccgcggtgagaagagagagcacccggctcgtgtcagggctgtaaggccgctgccgcttactcccggaaaccggtggccagtgacagatgctagcggtccataacttcggctttcatgcagctcccgtcgtccctttcatgaggaacgtac

SEQ ID NO: 1280 - DNA, 1143 bp, Homo sapiens
  SIMILAR (2255)..(4912): 991254mologous to Homo sapiens dJ1009E24.1.1 (A novel protein similar to the mouse sialoadhesin, a macrophage sialic acid binding receptor, isoform 1 ),accession number AL109804,Smith- Waterman Score=4578.
atggtttcctgggccaggcccagagccccacttccctgcacagccttgggacactgttcccccacatcacagtcactccagctccagcttcaggtcagatacagctcagatacagatacagctctggtcactgcttcagagggtgcaagctgtaagtcttggcagcttccatgtgatgctaagcctgtgagtatgcagcggataagagttgaggcttgggagcctcttcctagattttggaggatgtatggaaaagtctggatgtccaggcagaagcctgctgcagggggagattcctcatggagaacctctattagagcagtacagaggggaaatatggggttgaagcccccacaaagattccactggggcactgtgatggttaatactgagtgtcaacttgattggattgaaggatgcaaagtattaatcctgggtatatctagtggtagatccactgacagctcagaccctgctcctggaaaagccacagacactcaacaccagcccatgagagcagttgtgggggctgaaccttgcaaagccacagggatggagctgcccaaagccttgggagcccatccctcacaccagtgtgcgctggatgtgggacatgaagtccaagaagatcagtttggagctttaagagcgattaaaaaaaagaagccagccttcctggtcccgattgttccattaagctttatcctcacctaccagtatgacttgggctatggaacccttttagaaagaatgaaagaattcatcactgtgtttcctctgggaagtatattacttctcctgaggaaaatgtttaagtgtgagattggggacatggctcatacggtgttagagcctgtcaaggaatatagcaatcaggctttgtcacaaattgctgatgacccctttgtcaccttgtgtatttctgtactttatttaaggaatcattttataaatgtggaaactgaagcacagataagcagcttgaacaaaggcagaagcacgcaagccaaatccaagaagttgctgcaggtcatccaatttggctgggccaaagccatacttggccagggcttggatttgaacaagtgtggctccagtggctgtgctctaaaaggccttgacaaggccttaactgatgcttaa

SEQ ID NO: 1281 - DNA, 540 bp, Homo sapiens
  SIMILAR (2)..(127): 711254mologous to Homo sapiens calcium channel alpha12.2 subunit,accession number AF238295,Smith-Waterman Score=136.
  misc_feature (1)...(540): n = a,t,c or g
cacaataggccatctgcaggctgaggagcaaggagagccagtccaagctccaaacttgaagaattcagagtccgatgttcaagggcaggaagcattcagcatgggagaaagatgtaggctgggaggctaggccagtctcgtcgttttcacatttttctgcttgctttatattctagccgcactggcagcgtgattagattgtgcccattcgggttaagggcgggtcttcctttcccagcccactgactcaaatgttaatctcctttggcagcaccctcacagacacacccaggatcaatactttgtatccttcagtccaatcaagttgacactcagtattaaccatcacagtaacgtacaaaaagcaacatatattagtaagatatctggatggcttttttaaaaatttcttaaaactttgtttttaatattactatggggacctttcattaaaaaggaatgggcaacatctggtttcacccttattcctaaatgtgccnttggggggtccttacttcagaccttggttttttttgaggg

SEQ ID NO: 1282 - DNA, 928 bp, Homo sapiens
  SIMILAR (379)..(906): 861254mologous to Homo sapiens p40,accession number U93567,Smith-Waterman Score=762.
ttcgacctacgcgtccgggtttgcgtaccggtcgcctggtcccggcaccagcgccgcccagtgtggtttcccataaggaagctcttcttcctgcttggcttccacctttaacccttccacctgggagcgtcctctaacacattcagactacaagtccagacccaggagagcaaggcccagaaagaggtcaaaatggggtttatattttcaaaatctatgaatgaaagcatgaaaaatcaaaaggagttcatgcttatgaatgctcgacttcagctggaaaggcagctcatcatgcagagtgaaatgagggaaagacaaatggccatgcagattgcgtggtctcgggaattcctcaaatattttggaacttttttttgccttgcagccatctctttaaacagctggagcgattaaaaaaaagaagccagccttcctggggcccgaatgttccattaagctttatcctcacctaccagtatgacttggggctatggaaccctttttagaaagaatggaaaggtggaagctggagggacatactggaaacagaaaagagtaaattgcagctgccaagaggaatgatcacttttgaaagcattgaaaaagccagaaaggaacagagtagattcttcatagacaaatgaaatcatgcttaccaatcaaatctcaaagcacagaattattgacttgaatcatggtttttacagttttttaaatgctcaagattttgatattatagattttattttaaaatattaaaatgcaagatagttttgagctattttaaaataaaatttataacattcaacacaaaatcatggaggtgctttaaataacttttagatttcctctctctgtgtgcattaccaatatctaagtgtaaaattaataaattgttttgaattcctggaaaaaaaaaaaaaaaaaa

SEQ ID NO: 1283 - DNA, 694 bp, Homo sapiens
ccagagcgtgctccactcccctcaccagcctcccgcgcctcttcaaggaagtcttcctgcctctaggacctaagagcttatttggttaggggcaaggatgcttgaagccgccaggtttgttggcaggatcctcatatgcagtagtaaaaacgaaggttcacactcatggatccttacaatgcactccgctgggctctgccttaattctcatgggccccctccatcctgccccgaccccgggcagcaagtcctactatcttccagttttacaaacgagcaattgaggctttcagactttgccaagattatattccaaatgaggggattcaaacccaggctgtcagcctccgcagtgcaggctttcttcaccagcatcatcacacatggtgataactcccaaggttcacagcttgtctgttcactatgcatcgtgctgaggggtttccatgcacttcctccattcccgctcacaacagtatcgtcaggttacaggtatgggcctgtggaggcacggcccctcctcacaacgacaagcaagtggcaatggccaatggaagcccagcaacttgtttcagtccacccccaaagtagcacttctgttccactggaatgggccctaattgtatttctggaagactgccagctttccagacagacacttgatctgagtattcattgacaggccttgcgtctt

SEQ ID NO: 1284 - DNA, 486 bp, Homo sapiens
  SIMILAR (23)..(61): 461254mologous to Homo sapiens Leu1,accession number Y15381,Smith-Waterman Score=43.
  misc_feature (1)...(486): n = a,t,c or g
tagactgggagctctttgaaggaaggactgtatctggtcaccattgtatctacaaccaccagcatggccttactcacagcagtnnnnnnnnnnnnnnnnnnnnnnnnnnngaaaatcgatatatttcaggtttctgtaactggtgctttagtttcccaactagagggggaagatacgaatccatcatgaccccagcagatgaaagcctccttgtgggctactcactgaatgcctgcggctctctgtctactgggcctaaggtaggactgcacatcctggcctccttgtaggtggctgggacttctggttagctcaagccagtgagttgtgagctgaagtaatgtgtgtctctctctggctaagaatttatttgttaatgctagccacttgaggactcgcttttctctctggtacagcggctggcaatgtcgtgctcgtgcggaattcctcagcgcggagtcagcaggcgggcaaaggggcccaccc

SEQ ID NO: 1285 - DNA, 732 bp, Homo sapiens
  SIMILAR (304)..(642): 271254mologous to Arabidopsis thaliana putative senescence- associated protein 5,accession number AC005170,Smith-Waterman Score =83.
atgaccccagcagatgaaagcctccttgtgggctactcactgaatgcctgcggctctctgtctactgggcctaagtcgcaatgggcagaggtacaaggggagaagctgcagacggcattgttgccatatgatggagtcactgtttgcatatttgtgctgggtagtcttgaggcctctggaggacctcctttttcttatattaattcccaatgcacccacttgccgagcccagccttaccgcctcgcttttcagcacagttcccacacatgtcaaagctttacagactgcccggtagccaggcaggagcagctggcaaggctccccagaatggagcctggaccacccagctagaactcagagttgagcatgggaatgatctggaaaataaacacaatgtgaaaagtgctctgacagagtacactaaatgtatggaattatcctctctcacagtcagcacacctttgttgctgtcacgagatagaactcgcagactacagaaagctgttctgtgtcaggtctctgagaaatgtagaggtctcagttatattgcagattatgagctgccagggatttgggaaattaccttcatcctcctacttgaagatgccagaagatgggaatatgatgggaaagaacacatgatcaccattcctgactcagagcccctggaacaggtctggtcaccaccacaatcacagttgcagtggacggtgaaaaagcacttggtgtga

SEQ ID NO: 1286 - DNA, 287 bp, Homo sapiens
  SIMILAR (84)..(200): 471254mologous to Homo sapiens Human secreted protein, SEQ ID NO: 6076,accession number G01995,Smith-Waterman Score=92.
tcaattttcatttgccaaagtttcagacccaaagtttacgcctatcagacctacacagaaaatcgcatctttggagaggaatagtcagcatcaccttgattgaagggagagacctcaaggccatggattccaacgggttgagcgatccctacgtgaagttccggcttgggcatcagaagtacaagagcaagagctctcatgttttagatggccacaaggttgctcagcttcggctgacatttatcagccatccttgcaagggctataggtcggaaggcataaattga

SEQ ID NO: 1287 - DNA, 420 bp, Homo sapiens
  SIMILAR (101)..(244): 311254mologous to Neisseria meningitidis MC58 hypothetical protein,accession number AE002424,Smith-Waterman Score=65.
atgctggctgaacttagggctctacccctaaaggaaggatcatcaccaacctgggctctagcattaacagggtgtggacaagacattctggtaacaagcacggaaacccacccaaacacattcaaaactgaatacacaaaaacactaacacagctggggggacaatggtttattgatcaagagaaattatttctagcaatatctcacttccgcgagttcacaaatatgacaactgcagatgaggataaagaatccacccgtgaatcaggtaccagttcaactcccttattggttcagaatcccctcacgaatcctaggaacaacggtgctgataacataagggacaagcaccctctccaggcctttatcctgtccttagctgccctgacacctcatcagacaaccagcagaacaccctga

SEQ ID NO: 1288 - DNA, 648 bp, Homo sapiens
  SIMILAR (115)..(510): 781254mologous to Homo sapiens Amino acid sequence of short human FAIM,accession number Y41256,Smith-Waterman Score=481.
cattgcgacccctcgcaccgccctgcaggaattcggcacgagctacactgaaggctccagatacatttgctctttgagttctaccatggtttttagagtttttcttttccctcacttttatctgtcatttatctctcccattactgtgcctacctctaggaagctttctctaatttgccctggggttgggaaattgtgtaactgcatactatatgttgaataagagtagagaggatttgaatgaggttttgagaggctgttctagcaataaaaatgaatgtactttgctacattgacttggtgacattatttcagtggctcaactctcttcccctaacttacttctttatcctcatctgcagttgtcatatttgtgaactcggcggcaagtgagatattgctagaaataatttctcttgatcaataaaccattgtctcccccagctgtgttagtgtttttgtgtattcagttctataatgtgaaacttaagaggattaaaactcaaaaaatgatcaggccaaatttttatgtgggatgaagtgtttctgattcagtgttattgtgatataaagctataaattagttgtttacctatgaaattccttccggcagtcattctgaaataaagttgttacagctgaaaaaaa

SEQ ID NO: 1289 - DNA, 594 bp, Homo sapiens
  SIMILAR (1)..(591): 1001254mologous to Homo sapiens Human Factor 8 Homologue,accession number Y70539,Smith-Waterman Score=1039.
atgaagcagtttcttcctgcaaaagcagtggaccatgaggaaaccccagttcgctatagcagcagcgaagttaatcacctgagtccaagagaagtcaccacagtgctgcaggctgactctgcagagtatgctcagccactggtaggaggaattgttggtacacttcatcaaagatctacctttaaaccagaagaaggaaaagaagcaggctatgcagacctagatccttacaactcaccagggcaggaagtttatcatgcctatgctgaaccactcccaattacggggcctgagtatgcaaccccaatcatcatggacatgtcagggcaccccacaacttcagttggtcagccctccacatccactttcaaggctacggggaaccaacctcccccactagtgggaacttacaatacacttctctccaggactgacagctgctcctcagcccaggcccagtatgataccccgaaagctgggaagccaggtctacctgccccagacgaattggtgtaccaggtgccacagagcacacaagaagtatcaggagcaggaagggatggggaatgtgatgtttttaaagaaatcctttga

SEQ ID NO: 1290 - DNA, 4617 bp, Homo sapiens
  SIMILAR (40)..(279): 501254mologous to Homo sapiens protocadherin alpha 5 short form protein,accession number AF152483,Smith-Waterman Score=172.
atgaacgtgaaactgaaaagcaaagtaataccatcaacacttggcaaaatagaacctctccgctgtcagcgccagaaatacttacctgctgagaaaaggaaaagcacaacactgactttaccccgcgacgcttttaaaaaatccaaaatacccagcgcgatggggatgggattgcatcaaagctctcagagcacagctgcaaagggtaaagcaaagctagagctctactctggacctatcactctagacagtttctctgtgaggggcagttttatacacatttcaggtggcagaataaattcaatccttgtttctccatcttatcgagtagtagaagttagttacattctctttgaactcatcatgaattccatgaagactgaagaaaacaagtcatttagcgctatggaagatgaccagaggactagacctgaagtttcaaaggatactgtcatgaagcagacacatgctgacacacctgttgatcattgtctatctggcataagaaagtgtagcagcacctttaagcttaaaagtgaagtcaacaagcatgaaacagcccttgaaatgcagaatccaaatttgaacaataaagaatgttgtttcacctttacgttgaatggaaactccagaaaattagaccgtagtgtgtttacagcatatggtaaacccagcgagagtatctactcagccctgagtgctaatgactatttcagtgaaaggataaagaatcagtttaataagaacattattgtttatgaagaaaagacaatagatggacatataaatttaggaatgcctctcaagtgcctgcctagtgattctcattttaaaattacatttggtcaaagaaagagtagcaaagaagatggacacatattacgccaatgtgaaaatccaaacatggaatgcattctttttcatgttgttgctataggaaggacaagaaagaagattgttaagatcaacgaacttcatgaaaaaggaagtaaactttgtatttatgccttgaagggtgagactattgaaggagccttatgcaaggatggccgttttcggtctgacataggtgaatttgaatggaaactaaaggaaggtcataagaaaatttatggaaaacagtccatggtggatgaagtatctggaaaagtcttagaaatggacatttcaaaaaaaaaagcattacaacagaaagatatccataaaaaaattaaacagaatgaaagtgccactgatgaaattaatcaccagagtctgatacagtctaagaaaaaagtccacaaaccaaagaaagatggagagaccaaagatgtagaacacagcagagagcaaattctcccacctcaggatctaagccattatattaaagataaaactcgccagacaattcccaggattagaaattattacttttgtagtttgccccgaaaatataggcaaataaactcacaagttagacggaggccgcatctgggtaggcggtatgctattaatctggatgtccaaaaggaggcaattaatctcttaaagaattatcaaacgttgaatgaagccataatgcatcagtatccgaattttaaagaggaggcacagtgggtaagaaaatattttcgggaagaacaaaagagaatgaatctttcaccagctaagcaattcaacatatataaaaaggacttcggaaaaatgactgcaaattctgtttcagttgcaacctgcgaacagcttacatattatagcaagtcagttgggttcatgcaatgggacaataatggaaacacaggtaatgctacttgctttgtcttcaatggtggttatattttcacctgtcgacatgttgtacatcttatggtgggtaaaaacacacatccaagtttgtggccagatataattagcaaatgtgcgaaggtaaccttcacttatacagagttctgccctactcctgacaattggttttccattgagccatggcttaaagtgtccaatgaaaatctagattatgccattttaaaactaaaagaaaatggaaatgcgtttcctccaggactatggcgacagatttctcctcaaccatctactggtttgatttatttaattggtcatcctgaaggccagatcaagaaaatagatggttgtactgtgattcctctaaacgaacgattgaaaaaatatccaaacgattgtcaagatgggttggtagatctctatgataccaccagtaatgtatactgtatgtttacccaaagaagtttcctatcagaggtttggaacacacacacgcttagttatgatacttgtttctctgatgggtcctcaggctccccagtgtttaatgcatctggcaaattggttgctttgcatacctttgggcttttttatcaacgaggatttaatgtgcatgcccttattgaatttggttattctatggattctattctttgtgatattaaaaagacaaatgagagcttgtataaatcattaaatgatgagaaacttgagacctacgatgaagagaaagcccggcccaggccagcctaccggcgactaggatgctttcgctttcgctctcgctttccaatactcgggactggggaaaccgggagaatagaagcaggcaaggaccgccgtgggcacggggtcagtgagacagggtcctgctcgcggcgtcaaggaggagcgctgtgggtgtccccagcgcagccaatcggcttccgaagtagctggagctctggagcctttgcttcctcaaatacgagcgggaactgcgttgagcgctggattccaggccgagtgctggcgaggcgcgcagctgtcagaaaagagatagaaactcaccaaggccaagaaatgcttgtgcgtggcacagaaggaatcaaagagtacataaaccttggaatgcccctcagttgtttccctgaaggtggccaggtggtcattacattttcccaaagtaaaagtaagcagaaggaagataaccacatatttggcaggcaggacaaagcatcgactgaatgtgtcaaattttacattcatgcaattggaattgggaagtgtaaaagaaggattgttaaatgtgggaagcttcacaaaaaggggcgcaaactctgtgtttatgctttcaaaggagaaaccatcaaggatgcactgtgcaaggatggcagatttctttcctttctggagaatgatgattggaaactcattgaaaacaatgacaccattttagaaagcacccagccagttgatgaattaaaaaggcagatactttcaggttgaggttgagaaaagaatggtccccagtgcagcagcttttcagaatcctgagtcagagaaaagaaacacctgtgtgttgagagaacaaatcgtggctcagtaccccagtttgaaaagagaaagtgaaaaaatcattgaaaacttcaagaaaaaaatgaaagtaaataaatggggaagcataatttgactcgcatagaacaacgtttgggaaagtaacaaaaaattcttcttcgattaaagtagtgaaacttcttgtacgtctcagtgactcagttgggtacttattctgggacagtgcaactacgggttacgccacctgctttgtttttaaaggattgttcattttaacttgtcggcatgtaatagatagcattgtgggagacggaatagagccaagtaagtgggcaaccataattggtcaatgtgtaagggtgacatttggttatgaagagctaaaagacaaggaaacaaactacttttttgttgaaccttggtttgagatacataatgaagagcttgactatgctgtcctgaaactgaaggaaaatggacaacaagtacctatggaactatataatggaattactcctgtgccacttagtgggttgatacatattattggccatccatatggagaaaaaaagcagattgatgcttgtgctgtgatccctcagggtcagcgagcaaagaaatgtcaggaacgtgttcagtcttaaaaaagcagaaagtccagagtatgtccctatgtatactcaaagaagtttccagaaaatagttcacaaccctgatgtgattacctatgacactgaatttttctttggggcttccggctcccctgtgtttgattcaaaaggttcattggtggccatgcatgctgctggctttgcttatacttaccaaaatgagactcgtagtatcattgagtttggctctaccatggaatccatcctccttgatattaagcaaagacataaaccatggtatgaagaagtatttgtaaatcagcaggatgtagaaatgatgagtgatgaggacttgtgagaattcagtctactggatttaagggaatggcttatggagttgttatttcataggcattgaaaatggttttctaaactccaaaatggtcatcttatcaataataataatattgaccatttcctatctgccaggcatttttctaagcacatgaagaaattagtcctaacaacactatgagatggactataacttgcccaaattttttttttttttttttgagactgagtctcactctgtcgcctggggctggagtacagtggtgcgatctcagctcactgcaacttccacctcccagggttcaagcgatta

SEQ ID NO: 1291 - DNA, 531 bp, Homo sapiens
  SIMILAR (267)..(175): 451254mologous to Homo sapiens Human presenilin I mutant protein fragment 9,accession number Y20863,Smith-Waterman Score=62.
atggcaaggaatgagtgtgttgatgggcagcccggtcacctagttgattttacttgcttagtcacatacagagtttcaggagaatctagggcaccccatcccatggcagagcttttcctggtcatttatcacatggaagagaagttggagacacacataccccgcaagcaagagagagtggaggagaaggggccatgcatctgtaaggcactgtccccaaattctgttaatcagagagatgcaagagagaaagagatgttgcagcagctgcaaaacagagatacaaagcaggtgctgccttccaaagcttctgctcatactccactggacaaagcacatcacacagctaagcctgatggcagtggtggtgaaaaggattttcttcacacaaggactacccccccgcccctgctccagggaagagcagggaatatttttaacaataaaacagtctaccgtagcaacactatcatcactataggcagatgggtattgagggccattgaactcaggcccaaagacaacaactga

SEQ ID NO: 1292 - DNA, 780 bp, Homo sapiens
  SIMILAR (3)..(335): 861254mologous to Escherichia coli alternate gene name srlQ,accession number U29579,Smith-Waterman Score=469.
atgagcaacaaaagaaaaatagacaaattggacatcaaaattaaaaacttttgtgcttcaaagtacgccatcaagaaggtgcttaaagaagtaactattctgaagtgttctagttctttgaggaatgctgatgtatggataaagtatggtggagcaaagaacactggaccagaagttggggaggtcgccttagctccaccactgtgtctcaccgttaaattcatctacagaccagggtcgtgtctgtttacttcatttccagtgtcaaatctgtcatctggaaagggtgtgaaattcatcctgaagaattcctatcagttggatgttggacctgctagaacaggagtaagcaagttttttggtaaagggccagagagtaaacgtttcaggcttgtgaacactaaggcggtcaagacgctgacaggaaacatccattcttctgcaccaatgttgaaaagccacgaatcacacagaaaaattaactttgataatatccttgaggctatgaggctcactggtctccagaaatgtacctctgtgtgcgggaatgttccagaaggccacactgtctacagggccattgcttcactgcagattagatgtcctcccagaaccttccagggcactaattgcctaaacagctctggtaagaagatcagcaagtattttagactagaaaccaagttcagtgtcaacaacctagaacaccaacagtgccttagcttctttgtcaaggatggatttgggtctgaaaatatctatatcctgcccaaagcatga

SEQ ID NO: 1293 - DNA, 249 bp, Homo sapiens
  SIMILAR (186)..(49): 341254mologous to human herpesvirus 1 thymidine kinase,accession number AB047366,Smith-Waterman Score=79.
atggccaggaaccgaggttttttatcagcagtgttttgtttcactgccccaagtggaaccgatgagcggggtgctactgtgtggttgcccccacatctgactcacctcagtgcccaggatgggagcaaagcacaggaaacccactggacaagggaggaggtgttgatctgtgaggggcagccagcaaccactctcactgtggggaacttggcagaggacagccccaggtattcaccagatcgactgtaa

SEQ ID NO: 1294 - DNA, 239 bp, Homo sapiens
  SIMILAR (583)..(1707): 1001254mologous to Homo sapiens G protein-coupled receptor,accession number L31584,Smith-Waterman Score=1914.
atggataccctgctgaggctgagctctggggctggccttggagacttcggcagggcgggcgaggtcgtcttcaaaggatggcggggacaactcatggagcccacggcgggcagcccgggcagcccggaggagagtgtgggtcagcacagccaccagaaccagggtgcccgagccgaggatggaagcagctgctgcgcctgtctcgatctcgaaaagtagcaaggcatagatggacagtg

SEQ ID NO: 1295 - DNA, 156 bp, Homo sapiens
  SIMILAR (1)..(105): 911254mologous to Homo sapiens Human secreted protein encoded by gene 14 clone HSNBL85,accession number W75070,Smith-Waterman Score=161.
atgagcggcggttggatggcgcaggttggagcgtggcgaacaggggctctgggcctggcgctgctgctgctgctcggcctcggactaggcttgctctcgcagagactggggtcacaagttgaatatacccccgtggacgtgttcgccctggcctaa

SEQ ID NO: 1296 - DNA, 463 bp, Homo sapiens
  SIMILAR (179)..(463): 981254mologous to Homo sapiens 8D6 antigen,accession number AL365455,Smith-Waterman Score=457.
cgggacagcgcgtggccggcgccgctgtggggacaacatgagcggcggttggatggcgcgggttggagcgtggcgaacaggggctctgggcctggcgctgctgctgctgctcggcctcggactaggcctggaggccgccgcgagcccgctttccaccccgacctctgcccaggccgcaggaaccaatgagatcctccctgaaggggatgccacaaccatggggccccctgtgaccctggagagtgtcacctctctcaggaatgccacaaccatggggccccctgtgaccctggagagtgtcccctctgtcgggaatgccacatcctcctctgccagagaccagtctggaagcccaactgcctatggggttattgcagctgctgcggtgctcagtgcaagcctggtcaccgccaccctcctccttttgtcctggctccgagcccaggagcgcctccgcccactg

SEQ ID NO: 1297 - DNA, 1089 bp, Homo sapiens
  SIMILAR (97)..(261): 751254mologous to Homo sapiens 8D6 antigen,accession number AL365455,Smith-Waterman Score=192.
ctagaattcagcggccgctgaattctagcagggataagagagcggtctggacagcgcgtggccggcgccgctgtggggacagcatgagcggcggttggatggcgcaggtttgatgcgtggcgtacaggggctctgggcctggcgctgctgctgctgctcggcctcggactaggcctggaggccgccgcgagcccgctttccaccccgacctctgcccaggccgcagagaacgcgaggtctctcccccccatgctactgcaggctctcgcagaactggggtcacaagttgaatatacccccgtggacgtgttcgccctggccaagaggggctcagtacaagcagccgccagtgtggttcctatatcccgggacttcgcctgtctctgcggatcacagccagtgactactgtgctcttggagaaaggtccagcctcagcttcccaggcttcatttgcatccatctcgcaggccccagctcaggccgtgcccacccaccaagttccagtgccgcaccagtggcttatgcgtgccctcacctggcgctgcgacagggacttggactgcagcgatggcagcgatgggaggagtgcacggtgctcagtgcagcctggtcaccgccaccctcctccttttgtcctggctccgagcccagggcgcctccgcccactggggttactggtggccatgaaggagtccctgctgtgtcagaacagaagacctcgctgccctgaggacaagcacttgccaccacgtcactcagccctgggcgtagccggacaggaggagagcagtgatgcggagggtccccgcgtccccgagaaggctgtggccaagggatcgagcccagcctcccgcccgggtgccgagctccggcctcgaacccggggccggcccgcggctggcgtcctccggccctacctgcaggcccgtgcctacctgatccgcggcgggccgggcggccgcacaggcccctcggttcgcctcggcccgggtcccgcccggcccggcccgtcggcgccactagctccgctccggccggcacctggtccgggcaccgcccgccgagccgacagcgccgcggaccaatag

SEQ ID NO: 1298 - DNA, 454 bp, Homo sapiens
  SIMILAR (374)..(291): 461254mologous to Nicotiana tabacum TA20,accession number U73164,Smith-Waterman Score=65.
cccctttactgagatcactatccgtgtggtggaattcagaggctgctttttttcattgtgcatctttctgtaagacgtgaatttataccatgtacaccaattacttaaataataagagcatgtttggacttccagtttctggtgatggctggttatgaaaacttgaagaaacaaaataatggctttttttaagtgaagaactaaaaaaacattgaacttccaggccagtttttggataaaagtctataaccagggagggaaatggaatactggaacaaaaagctgcctgtgctgagacagcagttgctgataccacaaacacttgtctgctgtttctgtggcctggctgagccaagaaaacatgttaaagcacagagcccacgcaagacagtgtgcttgcaggagaccctaccaacaggaatcggataacaaggagctaaaggggtgataatga

SEQ ID NO: 1299 - DNA, 1016 bp, Homo sapiens
  SIMILAR (495)..(641): 851254mologous to Homo sapiens putative tyrosine phosphatase,accession number AF007118,Smith-Waterman Score=216.
ttttttttttttttatgttgttcttacttttattagaacattgactcctagagctggaattgtatcttggatttttggttccgctggtagcacaccgtgctcaataaaaattaatccatcaatcaacaggacagaaaatcccatcctgccagaagcaatacttcctgtttgtcccatacaaagccaattagagtgttaggatgttgtaatggagacagaaactaaggaaagcggcaaaaataaaaaaattcccccaaaacatcaaatagaaaatgtaggggtagggggattgggggcacaagatgggttgaaccagatagggaagattcccccagtgttgtcctgctcccagtccaggtttgggacaatgccggcagcgtttccctgtgtctttcccccacaaagtctccaagtctctcctcaaatgagctccaaggcttgggagaaacaatctcttcctctgcccgggttgcgtggatctccagtggaaaggaagaaccggaactatgatttgtgccttccttattgcctccgaaatatttttaactgcagaggaaagcctgtattattttggagaaaggcgaacagataaaacgcacagcagtaaatttcagggactagaaactccttctcagtagagacaaggtttcaccctgttggcgaggctggtctcaaactcctgacgcccagtgatctgcccacctcggcctcccaaagtgctgggattacaggcgggagccaccatgatggccaacttttgaattctgaaccagttgattgagtaccagagctcttcaataccttgaagaaagattcaggggagagccgttgtgaacagcttgccccagggaaaggacaaggctgagagaattccagggcttccttgagaaaacagaattgaggaaatgcaaagtgaagaattctagcatcaggaacaagagaagaatgatggaaaacctgctactgagatatgttggatattttgcacaagtgaaacatctctacaactggaatct

SEQ ID NO: 1300 - DNA, 1278 bp, Homo sapiens
  SIMILAR (345)..(190): 671254mologous to Homo sapiens Human secreted protein, SEQ ID NO: 7678,accession number G03597,Smith-Waterman Score=141.
atgttggcagttcacacagaagacaaactgagaagggagagcaggcacgaattactcatctgtccagagatgtgctgtgtctggaatttgtgggttcttggtctcactgacttcaaaaacgaagctgcctggaccctcgtggtgagtgctacagttcttaaaggcggcgcgtccgaagtttgttccttccttggtctcactgacatcaagtatgaagccgcagaccctcgcagtgagcgttacagttctttaaggcggcgcatccagagtttgtccggagttgtttactcctaccggtgggttcgtggtgtcgctggcttcaggagtgaagctgcagacctccgcgatttaaaggcagtgcggacccaaacacccttgggtggtcgatgggaccgggcgccggccgcgctcctgcgggacgctcgtgctgcgcaggagccaactgaggcgggagagctcagacatggcgggctgcagtgctgggattacaggcatgagccaccgcacctggccaaggaagacactttagatggtgccagagttgaggatttggcctgcgacttattgcagttgccgcactgcagtttccacactgtggccttagaagagtcttatccagacctgaaatcccagtgccttggaaacatcaggactggtcagaaggacatctatatgtctccacaggtgagtgcctttagggctttttctttgacagtgaccttggacagtctggggtgtggctgtagagcatgctgggtagggtcttttggctttgcttctgtagccctaatgcacttctgccagcaggttttatattgggtgtgtggtttgacctacaagccagtagatggcgccatggtccaggtttgggacaatgccggcagcgtttccctgtgtctttcccccacaaagtctccaagtctctcctcaaatgagctccaaggcttgggagaaacaatctcttcctctgcccgggttgcgtggatctccagtggaaaggaaagcctgtattattttggagaaaggcgaacagataaaacgcacagcagtaaatttcagggactagaaactccttctcagaaacattttgttatggaaaattttaatcatatacaaaagtccagagcatcatacaatatatccacatatagtcgtcacattgctgcaacagtcatttcagccggcagccagccacatttcatccgttctttcccactccactcacacccctcaaccccactctccactcttgctttccctaaatctgagttattttaa

SEQ ID NO: 1301 - DNA, 339 bp, Homo sapiens
  SIMILAR (260)..(54): 401254mologous to Diploglossus bilobatus NADH dehydrogenase subunit II,accession number AF085608,Smith-Waterman Score=79.
atggacacaaaccttgatgttattgaatgtgggatgtgttggaaaagggcatgtgtgtcagaagccagtggcagccaagcagtgagtgttaggagtgaagtcttatcagttgttagcaattgccatgcaaacgtacaaggtgctctatccaagggagatgagagttctatctgtaagcccctgaatggagctgctggatttcctgcagagatgccttgcccagtactttgtagacctagtaaagaggagaaaacaaggagagtatgtatgagcttgcaaatagaggaagccaaggtgcttcagcaacatcgaaacaagtttgagaaccgctcaacttga

SEQ ID NO: 1302 - DNA, 541 bp, Homo sapiens
  SIMILAR (236)..(469): 1001254mologous to Homo sapiens nuclear RNA helicase (DEAD family),accession number Z37166,Smith-Waterman Score=402.
tcctgaagaaatccagtggtttgcagacaaattttcattccacttaaaaggccgaaaacttgaacaaccaatgaatttaatcccttttgtggaaactgcaatgggtttgctcaattttaaggcagtgtgtgaagaaaccctgaaggtcgggcctcaagtaggtctctttctagatgcagtcgtttttggaggagaagactttcgagccagcataggtgtcaaagacatctctctctctctttttctgtgtgtgtgtgtatatgtgtgtatatattttttctttgcccctcaaggatggacatttacataacaatgtatatttgccaaccatgacaatggtttttcatgacaatggaatggacactacttcctgataatttagggctcctcatagctgccctgcttctagagcactgcattattacttctgttcatttataaaagacacgagcaatagaaagcctgttgcagccccaggcatgctcaggaatatatggcatctcctttgctcctaataaatatattatgtgaacagcctcaa

SEQ ID NO: 1303 - DNA, 888 bp, Homo sapiens
  SIMILAR (326)..(496): 381254mologous to Halobacterium sp. NRC-1 citrate (pro-3S)- lyase; CitE,accession number AE005011,Smith-Waterman Score=84.
atggctccctgtgctggcagccatgattgggctgcttcactggagacatgctgcatgccatcagccttcaactttgagggccacaggctggggcttcatggaagtggtggggagcctgaacgtgcgctgcggatagggttttacttcctgctacccatcaaccatgggataatgcctgacaaagatgcgaatgaccccggaaatgcagtgtgtgaagaaaccctgaaggtcgggcctcaagtaggtctctttctagatgcagtcgtttttggaggagaagactttcgagccagcataggtgcaacaagtagtaaagaaaccctgggatattctctacgcccggcaaaagattgttgtcatagcgaaagcctttggtctccaagccgtagatctgggtgtacattgactttcgagatgggagctggggcttgcttaggacagttcacggaggaagggagccgccatgggcttcactggtaagcaggtgattcagcctagaccaaattgccgtggtccaggagcagttttctccttcccctgaaaaaattaagtgggctgaagaactgattgctgcctttaaagaacatcaacaagtaggaaaggaagtttgtattctctgttttccagggggcctttactttccaagggagtatgatcgaccatgccattactgaagcaggcccagaacactggttacgcttgccacctccatcaaggaaaaatgatctgttaaatgaagctgtcatcaggctaaagggtattgaagctgcagagggatcaacttgtgcttgccagaggacgccaatgaagtttgaaacaccaacaatcagcagattctgtttctgttcctcattaaatcatgagcttttgtgccgaaaaaaaaaaaaa

SEQ ID NO: 1304 - DNA, 701 bp, Homo sapiens
  SIMILAR (176)..(325): 961254mologous to Homo sapiens GK004,accession number AF284752,Smith-Waterman Score=251.
aaataattgctcatctgttaatgctgatctgaggcgagtgagaggcgcagctgcaggatcagtgggtcctagggcttcctgaaacgcagtcttgaggctcctgtaggaaattttctccctctccccgcaggcatggcttttgtacgagacggaatgaatgtcaagctcaggttcaactcgcgctttggaacccaggaggtatcctcagcgaggcctgatggaggacaggaggggctggccgagggtggagagcgaagggatcgccggagcggagcgagggtctcatcccccctgcaggaccctggcagacccacacgttccctcctttcgcacaagtcggttgctgccctctaccctttggcagggcataagaatgacttccgccgcggagatccagcgcttccttccattttgcctcctggcccctcctggagaccgcagccggtttcttggcagcttcgcgccccagagcaggaagggaccgggacgcggtcacatttcagctttggtggctgcgcccgcgcccccgtactccgggcaggagatctgggctgcgggcgccaggcagagctggcatcttccgggacctggatggttgttgcggaggggctcccaagctaagctggtgtaggagctctcaaaactccctttctggcatcccacggaaaaacacatgaatcagaaacgaaatcgtcgacccg

SEQ ID NO: 1305 - DNA, 273 bp, Homo sapiens
  SIMILAR (211)..(56): 321254mologous to Pseudomonas stutzeri TniQ,accession number U81032,Smith-Waterman Score=71.
atggatcggattctggtgcagagaggaaggttgagagaaatggaggaaggtgaaaccaacaagaagtgtccggacacgctagcaggatttcagcatacagagctaacaagatgcgggggtgagatacacatacaagctggagagaatgggggcatgggcaaagatgacagtctcctggaacaagccaacaatgccattggagactactttgctgatcgacaaaagtggtatgtaacttacctggagctcctcaagcattcatgcaacacttag

SEQ ID NO: 1306 - DNA, 977 bp, Homo sapiens
  SIMILAR (690)..(815): 521254mologous to Mus musculus Pro-Pol-dUTPase polyprotein,accession number Y12713,Smith-Waterman Score=104.
cctgctgcaagtctgacggtaccaaattacatatatatctgtcaaaatgatgtaggacctaaagtctctctgtaagttgatccttttgaccccatgattaggagcttcacaatgtggtaccacacctggaaacctccagaacaagatctcaaggaaacacaggaaattcctgaaacagcaaaaccccctatgtgaagacgtctgttattcctttgtgtatcaggagcatcactgttaattaactgttgatacacttaaaacagcttggttggcaatgtcctttttgaataaagaagagccaggtgtgtttttcaggatgaactagacaatgctgtcacaagtttgcctctacatcttattgccttggaaaaatttcctgcatatcgtggcacaagatggttggctctccaggcagcagttggcgttgtgaatcagtcatctcagcatgtgtctccaagatcccacagcagggggaaaaagaggtggagggtcacatgcctggtgttacatactttgaggcagaggtggtaggtgccatttctgctcacagctcatggaccagaacaaagccatgcatacctgagagaggaccataaaatattctgaagcagatggctatttggaaacacattgtagcacacagctacgtaaggacagtgagaaccagagctatcaggatggacacaggcaatgattttgccaaaactaccactggtagacgtatagaatgccttatccactgtcatgatatgccatacagcattgcttctgataaagaaattcacttcacagcaaaaaaggaaaagaagagatggaaggaaactgttgcttcattttctgttcatggaaggggagagagaatatctgagtttggtgggagcaggcacagacagcagaagagttcatctgttccacagtatcagcttactgagcaacgttatccagggagccctatacctctggccattgctgattag

SEQ ID NO: 1307 - DNA, 1424 bp, Homo sapiens
  SIMILAR (866)..(1150): 801254mologous to Homo sapiens Human signal peptide containing protein HSPP-97 SEQ ID NO:97,accession number Y87320,Smith-Waterman Score=322.
  misc_feature (1)...(1424): n = a,t,c or g
acagagcaagactccgtctcacacacaaaaaaatgaaagattggaatgccacccctttcctagcatgcacaacatatggcaggatcctgctcttctgtcccctgtagcgggttgtcccgtgttccccttaaggaagaaatcacagtttttgtcctcctggtgcttccggctggaggttcacctgctagtccctgatcctctttgcttagtgatgcacatgagtctactcatccccccaccactcccagcccccacttttttaagaataagaggtgataggcagttcggcggtcccgcgggtctgtctcttgcttcaacagtgtttggacggaacagatccggggactctcttccagcctccgaccgccataagatatcctctccgcttgcaacctccgggaccatcttctcggccatctcctgcttctgggacctgccagcaccgtttttgtggttagctctttcttgccaacccaaccatgagtctccaggattcgtcagaattatttccacccgacgttgaaggcaagcctgtctaacagccctggtcaaatttgtacctgcagggcctcccaccacctacctctctctggggtttctatttccgaccgcgatgatgtggctttggaaaggcgtgagccaatttctttcggcgaaattgcccgaggagaacgcgcgaggagctacgaggcgttcttcctgcaagatgcaaaaaaccagccgtgggcggaccgcgctccttttccaggacatcaaagaagccgagctgaaagatgagttggggtaaaaaccccagacgccatgaaaagctgccatggccctggaggaaaaagctgaacgcaggccctttttgggatcttcatgccctggggttctgcccgcacggacccccatgctcctgtgacttcctggagactcacttcctagatgagggaagtgaagcttatcaagaagatggngtgaccacctgaccaacctccacagggctgggtggccccgagggctgggctgggcgatgtatctcttcgaaaggctcactctcaagcacgactaagagccttctgaagcccagcgacttctgaagggccccttgcaaagtaatagcggcttgctgcctaagcctctccctccagccaataggcagctttcttaactattcctaacaagcctttggaccaaatggaaataaagctttttaggatagttaagaaagctgcctatgggctggaggcagaggctgcagtgacccaagattgtgccactgcactccaccctgggcaacagagcaagaccccatctcaaaaataaataaatatatataaaaaataaaaagctatttctagtttatttcactataaagttttgctttattaaaaagctaataaacagctattaatcacaaaaaaaaaaaaaaaaaaaaaaaa

SEQ ID NO: 1308 - DNA, 126 bp, Homo sapiens
  SIMILAR (106)..(585): 691254mologous to Homo sapiens p40,accession number U93569,Smith-Waterman Score=506.
ctttttctgtcacctctgggctacgagcctcgggatgcctgggtcatccctcctttcctcctccccagtagccctgccaagacacagagctgcacctttggcacaggatcccctggcctgacctga

SEQ ID NO: 1309 - DNA, 551 bp, Homo sapiens
  SIMILAR (543)..(406): 411254mologous to Pseudomonas fluorescens CrfX,accession number AF115334,Smith-Waterman Score=68.
tagcgacatgggtgagctggcagtcaccgctgttattagcaagaagcaacctgagaatggtgtcaggctggccaaagacacagaagttgccagaaacccaggtcctggacactttctggtgctgtgggccagccccacaaacgtcctggagccactcttcccttccctggctcctgaaaacatccacctcctctatgatgcgcagaaagttgccctaccacagaccacacagtctccttctggctccaagttgtgtgttcaccaaaaagtacacaagacatttataggattaagtaaatttaagtatgcaaagcacagaattagggctggcacgcacaaagtgctcaaacgcgagctgctgtcttaccggacacacgccaaaactagaccaaccgtttctctccctggagagttgtgggtggaaccgtgagggatgcccagccacagggcaggccccgtacaccacctgcagcccagcaggtcagccttaggaccctctcccctggacctgttcagaaacaagttaaacttttggccaaagcacactcgct

SEQ ID NO: 1310 - DNA, 438 bp, Homo sapiens
  SIMILAR (406)..(1062): 791254mologous to Homo sapiens reverse transcriptase homolog= pol {retroviral element},accession number S61070,Smith-Waterman Score=879.
atggaacaggaattaaaagaaattaaagaatgcataagcaaaaactcaattgtatgtagggaaaacccgaattccgtccatgaaggcacagagaaacgaggtggcagtcgccttttgaaagattcgacgtgccgtggtattttcgcgtcatgggcctcccaggtctcctcttggggccactcgtgtaaagtcctggtacgttgggtggcttgcggtcgccacgcgttccgtcttatagtaagattaccagtcgcggtcgctccagagcgctcccaagagattttaatcacccagctaaagccacactggttaacctccacgcacgcatttcattcatttcgtgtcccagaacgccaggagagcacgtccacatttaaagcccaacacggaatacgcgggcacgtacccaagtccgacccgctgttgcacggcgactag

SEQ ID NO: 1311 - DNA, 3312 bp, Homo sapiens
  SIMILAR (281)..(448): 981254mologous to Homo sapiens Novel retinoblastoma interacting protein 115392*,accession number Y06604,Smith-Waterman Score=303.
ttggctggtgcacctaaataatacatatatcctcctcaaccccatcggtctctctgattcctaaatcatccccaaacatttctggtggcccatatggggattggagataacagatttactgtctcctttgcccatgggactagggccctggggctgtggaagacctggcatccaaggcatgccatgggggagtttcacccggacggagactggctctccccgcatcctgcccagcagtgcaactgaacctgagatggggctgcaggatgacaccagcacttcaggaaccgcgttgcaggtgtcacaccttggattcaccatagctggctgaaactagcagcagcagtgactcccgactatgaccagtggattaaccaacaagaccctgattgccccacccgaatagacctacggcgaatcccaaccaccagtaagaaggacaactgccctgctctgaccacactggaggctggtcagtctacacatggctgaagcttgaagatcttgcaagctcttgctcttagtcacatctggaagctgactagtctacacacagccgaagctaagaggaccactctagataagtaaatgtagataaaatttataagcctagttataattgttctgttgttacattattactgcaaatgctgcaaatgtccatgcccagaggaaggtttgccattcctgtgtgtagtgtaagcatgtttctattacatacactaatgttgttaccatttctgcctatactagaaggggagaaatctctagaaggatgcccacactgtgtacatactacctgggtaaggaataccatagttaaaactctactgtaccatacctacagtacaggaaccaagttaggaacctgcacatacaaccagaccacctattcggtctgtgacccaggaaataatcagctatatgtatgttatgaccctaagctcttaccctatgaattctggtttgaaatacatattaaatcagagggagaaaaagaaggagagttatagctcgaacaaaagaagcccctccctcctgtaaagggcctatttccttgtactttgatgcctgctatgctgcatatgttcacaatcctaaaaaaaaaccagaagccagtctgcaatggtgtaacacaagagaggcttagcaggagcagccctaagcatctgtacaaagaaccacaaatcggatgcccagactgtaacattcagtggtccacactaacacaactccaatatttatattcaggaaggagtgctctgctaagtagtatgttaaccaaaccaaactgtaagacaagaacatgcaatcctttacattttactatcttaaagccagagatacctttctggtctacaggacagacagcactataacgacttgatagactaggagcaggccttggagttccactactaattgtcaaaaagactaaaaggactcaaatgcatccaaccccgcaattctgggtccataatcattctataagcatttggataagccagtgcctgagcttcccccaccaaccaaaaacttatttgctcaactagctgaaaacatagctggcagcttaggaatttcctcatgctatgtacgtggaggaactaatatggggaaccagtggccatgggaggcaaaggaattaatgccacaagataacttcacttcgcttaaccctgccagtgaaccaacagcctcagccagtgtttggttgttaaaaacctccataattggaaagtaccgtatcgccgttgggaaaggctttcacagaggcagtaggagaaataacctgcctaggcaacagtattatgatgagactaaaaacaaaactctatggagaagcacccagaattactcctacttaccagatccaaatcctttatctccattctctaccctaagccacacttggcatcaactagaggttccaaatgcttcgaaagcaccctctggcctatattggatctgtggagcatgggcatattggcaactgccagctaaatggacaggagcatgtgtgtagtaacaatcaagccattcttctttctaattcctctaaagcaaggggaactcttatggtatccagttgatgatgaaaataaaagaagaactagaagagcataatcacaaaaatagacacaaatgtcaaaaaggatgtggacataggagactggaaagataatgaatggcctcctgaaagaataattaaatattattggccagctacctgggtgcaagatgggtcatggggttaccacaccccaatctatatgctcaactgcatcataaggttgcaggcagtctttgaaattataaccaatgaaacatcaagggcactagatttattggcaatacaagcaacacaaatgagaaatgctatatattgaaatagattggcattagattatcacttagcctctgaaggaagagtatgtggaaaatttaatttaaccaactgttgcctagaaattgctaataatggccgggttgtcatggaaatcagagctagaatgcacaagttggcccatgttccaattcagacttggtcctaatggtccctggattctttgtttggaggatggttctcaacctttggaggattcaaaaccctcactggtgggtttttgtttattcttggcatctgcctcatcctcccttaccttttacccctgtttattaggaggattcagtcaactatagaggcagtaataactcaacacactaccgcacagttgatggcattaaccaaatatcagccactgccagtagaagaagctcagctctgtgaagaggtggcaaatagtggtgctttctattaacacctttgttataaaaagcaacaaaggggggaaatggaacaggaattaaaagaaattaaagaatgcataagcaaaaactcaattgtatgtagggaaacccaattcctcctgaggaagagaaagaggtggagtcctttaaaaattcactgcctgtttttccgtctgtagctagtgagccttatctctccctttcccaggcattgtgaagaccctgtttctccagctgtgcagctgcatggtcactagacagataaactcaagttgtaaaacatgtttttccttgaaaagtaagaaatgatgtaatacatgtctcaactgaataactgtctttgtttctcacttctgtagtaagcttccccctgcacagatctcccctctcaccccatgaaatgcttaaaaggtaacctgactctttgttcagggctcagtcctttggatgttaatctgactgggctggtgcacctaaataataaatacatcctcctcaaaa

SEQ ID NO: 1312 - DNA, 469 bp, Homo sapiens
  SIMILAR (205)..(468): 971254mologous to Homo sapiens 39k3 protein,accession number Y19062,Smith-Waterman Score=454.
  misc_feature (1)...(469): n = a,t,c or g
atctgaaatcatanggacntgcganacngcnaaggaattccagtgtcgacccacgcgttcgcccacgcgttcgaaaaaaaagaagacagattaagatttactcaatgatgcacaaagtaatttgaaccaaggctcaaaagtttttggagccgtgagggatacagcagtttggtcaatattgtcttaacatgcttcaaataaatcaggtatcattgcccagtgcctaagatcttttatgttcagctcactgtaggaaataatgaattttttggggaaggaaagactcgacaagctgctaaacacaatgctgcaatgaaagccctccaagcactgcagaatgaacctattccagaaagatctcctcagaatggtgaatcaggaaaggatatggatgatgacaaagatgcaaataagtctgagatcagcttaatgtttgaaattgctctgaagcgaaatatgcctgtcagtt

SEQ ID NO: 1313 - DNA, 2998 bp, Homo sapiens
  SIMILAR (12)..(584): 1001254mologous to Escherichia coli ferrienterobactin transport protein,accession number M29730,Smith-Waterman Score=962.
ggcacgagccaaaaacaaaaatcatatgatcagctcaatagatgcaaaaaaaaaaaaaaagctttggaggcaggcggggccgctctttgcgcactagctcgccggcgttcccaaggcccgcaggaatggccctcgcctgggggcccagctcgccaccgctagccccgcagagccagctgctgttggggcccccgcagccgccagggggcgggagaggcgtcgcgaacaatggccgcgctgggtcgcgggccggcgggaggcgtagtggagagacaagggctttagcttactttttaaagattgaagaaaaataaagaagaagaagacagaaaaagaagaactcaaagatacacaaagtaatttgaccaaggctcagaagtttttggagccgtgagggacacagcagtttggtcaatattgtcttaacatgcttcaaataaatcagcttctctccaagataaaattggcaaacccaaaagagaaaactgcaatgtatctggtaaatgagttagcccgtttcaatagagtccaaccccagtataaacttctggattaaagagggcctgctcattcaaagatgttctcagtgcaactgagtcttggtgagcagacatgggaatccgaaggcagcagtataaagaaggctcaacaggctgtcggtaataaagctttgactgaatctacgcttcccaaacctatttagaagccacccaaaagtaatgttaacaataacccaggctgtataacaccaactgtggaactgaatgggcttgctatgaaaaggggcagagcctgccatccacaggccattagatccaaagccattcccaaataatagagctaattacaactttcaagtcatgtataatcagaggtatcattgcccaatacctaagatcttttatgttcagctcactgtaggaaataatgaattttttggggaaggaaagactcgacaagctgctagacacaatgctgcaatgaaagccctccaagcactgcagaatgaacctattccagaaagatctcctcaggaatggtgaatcaggaaaggatatggatgatgacaaagatgcaaataagtctgagatcagcttagtgtttgaaattgctctgaagcgaaatatgcctgtcagttttgaggttattaaagaaagtggaccaccacatatgaaaagctttgttactcgagtgtcagtaggagagttctctgcagaaggagaaggaaatagcaaaaaactctccaagaagcgcgctgcgaccaccgtcttacaggagcttaaaaaacttccacctcttcctgtggtggaaaagccaaaactatttttttaaaaaacgccctaaaacaatagtaaaggccggaccagaatatggccaagggatgaaccctattagccgcctggcgcaaattcaacaggccaaaaaggaaaaggagccggattatgttttgctttcagaaagaggaatgccctgacgtcgagaatttgtgatgcaggtgaaggtaggcaatgaagttgctacaggaacaggacctaataaaaaggccaaaaaaaaaaaaaagtgttgcagtagcaatgctattacaacttggttataaagcatccattaatcttcaggatcaacttgagaagacaggggaaaacaaaggatggagtgatccaacgcctgggtttcctgaaccaacaaataatactccaaaaggaattcttcatttgtctcctgatgtttatcaagagatggaagccagccaccacaaagtaacctctggcactactctaggctatttgtcacccagagatatgaaccaaccttcaagctcttttcttcagtatatctcccacatcgtatagttcagtctacattcgccaggcatctccttatgaatggaacatcttctacagctgaagccataggtttaaaaggaagttctcctactcccccttgttcctccagtacaaccttcaaaacaacttggaatatttagcaagggattcaaggctttcagggcaggccttaagtgccttggaaacaatttttcttggaacaaggactgggatccaattcgatgggagcaatggattttcgaaaaaggttctcttgaaaaacaagccaagcatctgagagagaaagcggacaataaccaggcacccccgggctccatcgctcaggactgcaagaaatcaaactcggccgtctagcagctcccagaacccgcggctgccaccgcatccttataaacctgtcagcacgcatgagggtgtctgtgttcagggaaatgaatgactaataccattatttgagtcttatgtgaagacaacactattctaacacgagagataatatacatggtactgtttattcaactggggaaaaataaaactttgagcatttcccttggaactcgagatcagatcataactcatttgcctagaggcagcagaaatctgatcctgctactggagcttaaaataacaagtaaagaaaagtgttagaaacaaagctaaaattttaacatgattaataatagagaagttgggtttggttctgttgttatgattgttttgtcgtggtgcttgtgttcagttatattctctctctctctcatttcaaatactgcttgacaattcgaaaatgaaccaatgatgtgctgtggaatgtgatggttgtcttcatatagagtcacatggtttctctttttatgcagatatttataatcttcatcctatatcagtaggaataactataaggtgcactacaaaaagatgtatgcaaacaaacatgttttaaatcaggtcagatatctgatgaaaaatacgaactaatgttaagagcaagtagtttcaacatactccaggaactgagaaacaaaacaaagcaattgtgggttttgagctccatatactcttagcaagtaagggggcgtcttgcccctatatatcatcttcccggattccactccctgttgtgggaatcgcgcccacccccatccgtgtgttgg

SEQ ID NO: 1314 - DNA, 1813 bp, Homo sapiens
  SIMILAR (400)..(1098): 461254mologous to Homo sapiens nuclear pore complex interacting protein NPIP,accession number AF132984,Smith-Waterman Score=370.
ttcttagcatgtgcacggcacagagcaggcgctcagagtgccttcagtgaaggaataaatgaccataccaccaggcacagagtgaggcctttagaaaccctgagcatcatcggcattttgctgggtatgcctcctaaactgtgtgaacagaaaactttgattgcatcagaaactttaaaaacacagtctaccatgaaatatgtacagacgtgtgctgaaagcagctttagcataactgtgttacattcctcttctaaaggaaggcctaagccgcccctttggggaggaattcgcagctgtcttcatacagatgagaaaattgtctttaatgcacaaggtacagtagcagttttagaaagcatgattggtgagctcattagtcattctgagtgctttttttctctttccctgaatgtcacttcaagcatgctgctttcaaatgtttctgagacatttcataccacaactacagcagctgaagccataaccctactaagaaaccaaaagggagatagtgttttaggtgctggtgcctgtggtggtgttcctatcattttttctagaaacagtggactggtgtctattacttcaagggaaaatgtgtctatattggcagaagacttggaagggtctttagcatcttcagttgctggaccaaacagtgagggaggaagttttattttgtcttcatcaggaagccaactaattcggttgatacctgagagctcaggaaagattcatcagcatatcctgcctcaggggcaaggcatgctttcaggaattggtcgaaaagtttcttctctttttggaattttatctcctagtagtgatctcacactttcaagtgttctctgggatagagagagatcaagcttttatagcctgacgagttcaaacatcagtaaatgggaattagatgattcttcagaaaagcatgcatacagttgggatataaatagagccctgaaggaaaacattaccgatgctatttggggatctgaaagtaactatgaagctattaaagaaggagtcaacattcgatatttggacttgaagcaaaactgtgatgggctggtgattttggcagcagcatggcactcagcagacaatccatgtctcatctattactctctgataacaatagaagataatggttgccaaatgtcagatgcagttactgtagaagtcactcaatataatccaccttttcaggtctgaagaccctgattttgtgtcagttgacggtcccaaacttttcaaaccagactgcctatctgtataacgaaagtgctgtctatgtgtgctccacaggaactgggaaattttctcttccccagggagaaaattgtctttaatgcacaaggtacagtagcagttttagaaagcatgattggagatagtgttttagggtgctgggtgcctgtgggtgggtgttcctattcattttttctaggaaacagtgggactggtgttctatttacttcaaggggaaaatgtgtctatattgggcagaaggacttgggaaggggtcttttagcatcttcagttgctggaccaaacagtgagagtatgatttttgagaccactacaaagaatgaaactatagcccaggaagataaaatcaagttgctgaaagctgcctttctgcaatactgcagaaaagatttaggtcatgctcaaatggtggttgatgagctcttttcctctcactctgatttggattctgattctgaagtagacagggcagttacccaaatcagtgtagacctgatggatgactacacagcatctgacccacggtggggctgagtct

SEQ ID NO: 1315 - DNA, 495 bp, Homo sapiens
  SIMILAR (378)..(1130): 651254mologous to Homo sapiens bA13B9.1 (novel protein similar to a glycosyltransferase),accession number AL137067,Smith- Waterman Score=697.
atgcccatctatgaacaagaggtaggaactgaaaactttctgctgactttcttaaagttgcccaacaatctcagcacacgctgctgttatccccacatcagagctgccccagccattgatttcatcagggcctcccacactgtcgctgaagcctctctagtatctacttcccctctctgctctctgtatcgttctcctgtcctcttcccctactccctagactcctcagcgctcaagattgaggagtactcagagacagagacaagaaggcttgagaaccttgctctagaggacttcttagtctccagtttagagagcagcctagcagtgactcagggaagcaatcactgggggcaaggcaaggctccgaaagctgtgaaggacccaggaccatttcatcgagtgagtgctggtgcaagtaatgaaaatcccaactcagattggcttaagcaatggaaactttttggttcagataatggaagagttcaggagtag

SEQ ID NO: 1316 - DNA, 567 bp, Homo sapiens
  SIMILAR (641)..(27): 971254mologous to Escherichia coli YbaE,accession number D82943,Smith-Waterman Score=1048.
atgaatgtgaaacacaccctggaatgtgaagagcaccctggtgttgtggtgttggctggggatccctcaacagtggtttcaggatctggatggggaaaagagccctttaagtgttccagccagcaggcaacagatgaggaaactgaggttcgaagaagttgtgacttgctcaaggtcacaaagccagggcccggggcgctgtcagacggggcagcaaccaggagattccctgggcctgcaggaagcccttccgcggaccgaaagactaaacccaagagaataataaacactcaacaaactaagttattgatttcaccaaagagggagatgcatccattccatacattcattcaacatttgccaaacctaccgtgtgcaggccagtataccagggccttggagtccaaagataatgagatggtttctgtttttgaggagcttcagtctggagtaactttagcgcagaaagcatctcactggggaagtggaaaactagagccctgtgtgccattggccactaaccagctttacaattttgaacaaatttggaacaaacttttactatga

SEQ ID NO: 1317 - DNA, 361 bp, Homo sapiens
  SIMILAR (664)..(1083): 901254mologous to synthetic construct InsB peptide,accession number Z37515,Smith-Waterman Score=652.
tcattttgctttggggctgagatctggctttcttctcttcttcctccccttcatccatttcatccccttgaggctgctccatgtctttgtcttacttttccctttggcactcttcagatggacccattccttcttcacggatggtttatagtttctgtgagttcacagaccacagcctgctagcaaccttccatgacccgattcaaaggacagtctttccttgagacatctgcctctgtgggtgatgatctttttgagaccttgcagaagctgacggatgttcctgtcagtccctcgctcctttccttgtgtgccccaggtgtgaggagtgatctttggtagggtctaacatggccttgcc

SEQ ID NO: 1318 - DNA, 792 bp, Homo sapiens
  SIMILAR (691)..(617): 361254mologous to Escherichia coli ATP hydrolysis-dependent protease (capR),accession number M10153,Smith-Waterman Score=48.
atgaaacatcagggactaagggtcaaagaagatgtcaagagaaagctcttcctgaagtgcaggaccctaaatcacaaggacttcgcaggctgtgactcactgcaattccaaggatggcctaacagagacggcggatggtcagactcacttctcacataaaggaggccttgcacagcacaggatttccccaaaccttgtctggacatggacttgcatggtccatgtctagacaaggtggggaaatcctgctgctaagcacctggagatgtccacagtgtgcatgggctctcactgtggtccactcactcctcgccaaaaccctgggagcccctcggattctttccatcatcaccgctgcaaaacactgccagtctcccaaggctcagctcagatggagcctttatgacactgtagccagtcactgctcccactcctgcatctccgtgatattggacacttacagcatttcccacattttgctccaagagatagccatgtttgctccaagaggtttattggagtgtcctcatgacatggtggatgactcttcttagagtgagtgatccaagggaacataaggtggaagcctcagatgtccctatgatcaagctttgcttgatctccattgctgttgtcaccagaaggccagacatggccctgctggagaggaggctttcgggctaccctctggctttgttggacagcaggcttgaggaaatgggcaaaagcattgatcagtttgcatccttgggctccttcactcactgtccttcaggtgttgggaatgtttaa

SEQ ID NO: 1319 - DNA, 552 bp, Homo sapiens
  SIMILAR (541)..(720): 1001254mologous to Homo sapiens glutamate dehydrogenase,accession number M17697,Smith-Waterman Score=299.
atggacagatttggaaagtcactttaccaaagaagatatacagatggcaaattaagcacagagaaagctgctcaatatcatcagagaggaaatctggacacacaaagagacacaaggaatgcgcacacagaagaaaagaccacacgaggacacagcaagaaggcaaccatctgcaagagaaggcgagaggcctcagaagaaatgaaacttgctaacaccttgatcttggacttcaagcctccagaactgtgtccggcagccaaaccattttgctctgtgctccgctggcaaggacttgcggcatcgattgctcaggatgcaggcagcctgcagcaagtctctgacctcacaatctggaacctgagccaaaatagctcaactgcgcgcacaccccgtggccgaaaagaaaaatgcaagcagaataggaaaaacgggaaattcttgggaaggatttttgcagtttttcttgctaaaagaaatgcaaacacacacacaggagagtgccgtatcttcccatctaatagatctaaaagaagaaatcactggctctaa

SEQ ID NO: 1320 - DNA, 318 bp, Homo sapiens
  SIMILAR (69)..(1): 821254mologous to Homo sapiens Human secreted protein, SEQ ID NO: 7115,accession number G03034,Smith-Waterman Score=101.
ggagatatacttcccaattcatcagattataagtcctcactcatagcactgactgctcataattggctacttcgtatatcagcaactacgggaaaaatccttgagaaaatatatcttgcaccttattgcaaattcagatacttgagctgggacactcctcaagaagtcattgcagttaagtcagctcagaacagaggctcagcagtggcccggcagatttgttatgaaaaatctaatgatcttttatttctgaagcatgctgtaaaagataggattcacggcaacctggatgggatcggagaccattattctaagtga

SEQ ID NO: 1321 - DNA, 501 bp, Homo sapiens
  SIMILAR (259)..(360): 381254mologous to Homo sapiens Human secreted protein, SEQ ID NO: 6735,accession number G02654,Smith-Waterman Score=63.
tcagtgcttgtagacacaggctttcagtctcctgaagtgctgtggacactttgatcagagagggtcatggcttgtgaggatcaccacacaagaggaagtggcagctcaggtctgatgatgaagtttgtctgactccagacctttctggctcctaacccctaatagtctgtatccccgatccttagcacagggcttggcactgagttatgctcagtaaagatctatgaaatgcagctgaactgcatggcacactggagtcaggcccatcgtctgtggggacatctttttgaaattccaaaagctctggatgcaaaccccaaagcctctctgagtaaaaaagttgaagcagaaggtcagggacttgcccaaggtcatcagcagtcagtggccgaggtggagcttgaacccaggcagctggcctctggacgctatgctccgaaatccctcctctctttggagacagaagcctctgaaagtcttgctccccagccaggccgctga

SEQ ID NO: 1322 - DNA, 228 bp, Homo sapiens
  SIMILAR (7)..(111): 371254mologous to Neisseria meningitidis Z2491 putative cytochrome c,accession number AL162757,Smith-Waterman Score=57.
atgcattacaaggagatcatttctattctaacaagcagacagaaagagcagacagtaaaacaaagatgcactaagatagggaagctaaaagcagacttgggggatatgcctgcagctgcagaaagatttatgggaacagacacacaactctccctctcagataagcacaacaaagagacacagaagaagtccaagcctctaataaacttccctaccctaaatccttaa

SEQ ID NO: 1323 - DNA, 729 bp, Homo sapiens
  SIMILAR (25)..(120): 1001254mologous to Homo sapiens Human stomach carcinoma HP10408-encoded transmembrane protein,accession number W88498,Smith -Waterman Score=159.
  misc_feature (1)...(729): n = a,t,c or g
ggaattcggagcgcagaggccactatggggtctgggctgccccttgtcctcctcttgaccctccttggcagctcacatggaacaggaccgggtatgactttgcaactgaagctgaaggagggtcaagagaaggacacaggcttcaatggctggcatttcaaggaagtcacttctcttctaactacaagcagccagaaagagcagacagtaaaacacagacaagacagctgggacacagagggaggtggggggaaagtctcttgggtgactgccaaacttcaccctcatacaatgggccccagtaaaactgtgggccttaataagcacattcctttcccttcaggtgtactaagatagggaagctaaaagcagtcttggggggatatgcctgcagctgcagaaagatgtatggaaacagacacacaactctccctcccagataagcacaacaaagagacacagaagcagtccaagcctctgataaactctcccacccagaatccttaaaaactctcagtctgtaagagagtgtggctctgacctaattcagccagctgcccctctcaagtttatttaaaataaacctgtccctgttgactgagaagccaccattcgtgtctctctcctctttctttaattcttacannnnnnnnnnnnnnnnnnnnnnnnnnnnnnnnnnnnnnnnnnnnnnnnnnnnnnnnnnnnnnnnnnnnnnnnnnngcagttgtc

SEQ ID NO: 1324 - DNA, 456 bp, Homo sapiens
  SIMILAR (224)..(343): 451254mologous to Bromheadia finlaysoniana extensin,accession number Y13141,Smith-Waterman Score=69.
ctgagctcgatccccgaagcatctgaatatgactggcgaaactatcagccaagccagatgagtgaatccgagttacagatgctagcaagcctacggtggcaacaaaatgaagaactggaggatgctgggacctcccatggcctgagtgcctcccaggtggacaactgtaatgtcagcataagtaccagcagtgacgacacaacgcacctggaactcctgcctgccaccccctgtcaaccagggtcgccactatcagaaagaaatgaacccaccttctccttctaatccccgggactggttaaatatgttgagcccaccaatcgttcctcccagtcaacagccggctgagcagcgtccagattcctgtgaaagtttgagtgttcaaggtgggactatgaaaaacgatatgcataagaaaataaaaataatttactataaatagagagaatccaaaaa

SEQ ID NO: 1325 - DNA, 987 bp, Homo sapiens
  SIMILAR (859)..(1869): 881254mologous to Homo sapiens p40,accession number U93569,Smith-Waterman Score=1530.
gtccttctatatgatccactctttgactggaccatgaatcctttgaaagctttgtatttacagcagaggccggaagatgaaactgagcttcaccctactctgaatgcagatgaccaagaatgcaaacgaaatctcagtgatattgaccagagtttcaacaaagtagctgaacgtgtcttaatgagactacaagagaaactgaaaggagtggaagaaggcactgtgctcagtgttggtggacaagtgaatttgctcatacagcaggccatagaccccaaaaatctcagccgacttttcccaggatggaaagcttggtgtaaagcatcatggacaagtggacttcacaggcatttcaaagatgaaaaggacaaaaacacagaaaataattgtgacaaaacttccagaggaacgatcagacagcagcattcgcggttcatgaaaatccgtggttctgcagacaccgctgctgatacccagttgataagcaacttcagcaaagtctcaggatccaaaatcaatgtccaaaattcagaagcattcttatacaccaataccagacaaacagagagccaaatcatgagtgaactcccattcacaattgcttcaaagagaataaaatacctgggaatccaacttacaagggatgtgaaggacctcttcaaggagaactacaaaccactgctcaacgaaataaaagaggatacaaacaaatggaagaacattccatgctcatggataggaagaatcaatatcgtgaaaatggccatactgcccaagagagcatccactacagaagagacattaaacaaccagatgtataaggtgactttggcactgagggccagccaacatgctcttggccaccctagtgcttgtgcaattagctcatctacagaagagtctttatggcatggatggaagccaagcgcgcgaaatcatgggccttttctcagaaaaactaatctagctgcttccactgctgaatga

SEQ ID NO: 1326 - DNA, 1563 bp, Homo sapiens
  SIMILAR (1255)..(1599): 1001254mologous to Plasmid F Protein D,accession number M12987,Smith-Waterman Score=584.
atgaaactcatggacacacttaaccagtgcataaacgctggtcatgaaatgacgaaggctatcgccattgcacagtttaatgatgacagcccgaaagcgaggaaaataacccggcgctggagaataggtgaagcagcggatttagttggggtttcttctcaggctatcagagatgccgagaaagcagggcgactaccgcacccggatatggaaattcgaggacgggttgagcaacgtgttggttatacaattgaacaaattaatcatatgcgtgatgtgtttggtacgcgattgcgacgtgctgaagacgtatttccaccggtgatcggggttgctgcccataaaggtggcgtttacaaaacctcagtttctgttcatcttgctcaggatctggctctgaaggggctacgtgttttgctcgtggaagatacttcgttatcgacaccagctgccccgatggtggattcgttaattgcgcgcgtaggagtaatggctcgcggtaatgccattactttgcctgtatgtggtcgggatgtgaagtttactcttgaagtgctccggggtgatagtgttgagaagacctctcgggtatggtcaggtaatgaacgtgaccaggagctgcttactgaggacgcactggatgatctcatcccttcttttctactgactggtcaacagacaccggcgttcggtcgaagagtatctggtgtcatagaaattgccgatgggagtcgccgtcgtaaagctgctgcacttaccgaaagtgattatcgtgttctggttggcgagctggatgatgagcagatggctgcattatccagattgggtaacgattatcgcccaacaagtgcttatgaacgtggtcagcgttatgcaagccgattgcagaatgaatttgctggaaatatttctgcgctggctgatgcggaaaatatttcacgtaagattattacccgctgtatcaacaccgccaaattgcctaaggggtatcctctagaccaaacggcggacagaaccctcagctgcaggtctgttggagtttgctggaggtccactccagaccctgtttgcctgggtaccagcaggggtggctgcagaacagcagattttcatgaaccgcgaatgctgctgtctgatcgttcctctgggagttttgtctcagaggagtacctggccgttcaggcaccgtgtatgaaatctaacaatgcgctcatcgtcatcctcggcaccgtcaccctggatgctgtaggcataggcttggttatgccggtactgccgggcctcttgcgggatatcgtccattccgacagcatcgccagtcactatggcgtgctgctagcgctatatgcgttgatgcaatttctatgcgcacccgttctcggagcactgtccgaccgctttggccgccgcccagtctgctggggttcctctagactcaacgggattctgccacgaaaagaaaaggtccatcagtctattcaacctgtatataggtcagttcagcgaacatatccagaaaacctgtcaagaatggctatttatgtgaggcaaaagattggttga

SEQ ID NO: 1327 - DNA, 1185 bp, Homo sapiens
  SIMILAR (556)..(1182): 981254mologous to Cloning vector pZC320 SopA,accession number U26464,Smith-Waterman Score=1079.
atggctcttactgagctaaaagcaaggggtcatcaggcctgcattttttctagtggctctgtggaagaatttgtgttcttgcctttcccatcttttgggggcacaccacagtccttgcgtttccatcttccaagccataaatggaaaatgaacttaaatacaggtcaattgagattatccagtattgtgtccggagttggtgggttcttggtcttgctgacttcaagaatgaagccgcagaccttcatgatgagtgttacagttcttaaagatggagtgaagctgcagaccttcgcggtgagtgttacagctcttaaaggtagcgcgtctggagttgttcgttcattccggtgggttcgtggtctcgctggcttcaggagtgaagctgcagacctttacggaccctcagctgcaggtctgttggagtttgctagaggtccaatccagaccctgtttgcctgggtaccagcagcagtggctgcagaacagcggattttcgtgaaccgcgaatgctgctgtctcatggttcccctggaagttttgtctcagaggagtacccggccgtgtgagcccacttgctggccggggcttgacattattccttcctgtctggctctgcaccgtattgaaactgagttaatgggcaaatttgatgaaggtaaactgcccaccgatccacacctgatgctccgactggccattgaaactgttgctcatgactatgatgtcatagttattgacagcgcgcctaacctgggtatcggcacgattaatgtcgtatgtgctgctgatgtgctgattgttcccacgcctgctgagttgtttgactacacctccgcactgcagtttttcgatatgcttcgtgatctgctcaagaacgttgatcttaaagggttcgagcctgatgtacgtattttgcttaccaaatacagcaatagtaatggctctcagtccccgtggatggaggagcaaattcgggatgcctggggaagcatggttctaaaaaatgttgtacgtgaaacggatgaagttggtaaaggtcagatccggatgagaactgtttttgaacaggccattgatcaacgctcttcaactggtgcctggagaaatgctctttctatttgggaacctgtctgcaatgaaattttcgatcgtctgattaaaccacgctgggagattagataa

SEQ ID NO: 1328 - DNA, 819 bp, Homo sapiens
  SIMILAR (289)..(789): 991254mologous to Cloning vector pBACe3.6 levansucrase,accession number U80929,Smith-Waterman Score=870.
ctgtggttctttaagcacttctctacaaagtttctgaatgcagatctccatcttacagtctgtttcctggagaactggacctatgagaatagagaagggaaaggaagagaagggaaaataggaccctcagctgcagtactgttggagtttgctagaggtccactccagaccctgtttgcctgggtaccagcagtggtggctgcagaacagcggattttcgtgaaccgcgaatgctgctgtcggattgttcctctggaagttttgtctcagaggagtacccggccgtacaaaggccataaataccttgtattcgaagccaacacgggaacagaaaacggataccaaggcgaagaatctttatttaacaaagcgtactacggcggcggcacgaacttcttccgtaaagaaagccagaagcttcagcagagcgctaaaaaacgcgatgctgagttagcgaacggcgccctcggtatcatagagttaaataatgattacacattgaaaaaagtaatgaagccgctgatcacttcaaacacggtaactgatgaaatcgagcgcgcgaatgttttcaaaatgaacggcaaatggtacttgttcactgattcacgcggttcaaaaatgacgatcgatggtattaactcaaacgatatttacatgcttggttatgtatcaaactctttaaccggcccttacaagccgctgaacaaaacagggcttgtgctgcaaatgggtcttgatccaaacgatgtgacattcacttactctcacttcgcagtgccgcaaccaaaggcaacaatgtggttatcacaagctacatga

SEQ ID NO: 1329 - DNA, 5955 bp, Homo sapiens
  SIMILAR (161)..(859): 1001254mologous to Escherichia coli K12 orf, hypothetical protein,accession number AE000416,Smith-Waterman Score=1197.
atggaaaaaagaaaatcagcattaaacaaagttttggaatctttgtgcatacatcaccagcaacaagttttggctatgttgaaatttctagtccaagagcagaatgctgcttctctttgctgttgtaatacatcatgtgttgtgtcttcagaatctcaaaagcccttaatcgaagatgatttatgtggtctgttctgtagttgtgaatataggctggcagaaagaggttgtttacaaaacgaaaaacaaagccctggtttagaacctctgccagtctgtattaaagatttacattgtttatcttgccaaactgtaactgttgaacacgttaagccagtagtgaatagaggaattgcagacagttataattctcacaggtgctgttctggactgttaccaaacattcactctacaaaatcagcctttcgtagtcctcttttgtcaaaggaagtatgtgatctttcagtcactcttaaagatgcctgtagatctcgaagtccctcacccccaccattatcacctatagaaactgaaggatttgaaaaattgaaagacgtcatctcagagatttcagccttagaaaataacaaacttgaagcaaacattaaccagcctccatctctcacaccagcagaaatcagcagcaataagagtgatcatcaagataaaatacttaaaactaaaaaatccagtaactcttattctttactctcaaatgacagcaataattctactacaaatcatgaaaaaggtgaaactgctgtaatttttcaagatttaatggatcgcattaatgaaaaactaaaatcaatagaaaccacggatatgacaagccttgtaaaattatctagcagtgattataatacatataatgatttaaaattgggagatttcataacatctctcttgcataatgcaaaagccagtgattatagttttatggaattattgagtcaacatgataaaaaggtagaaaataaaattattcagacaagatttcgaaagcgtcaagaaactttatttgcaatgcgcaactcctctgattcacccatgtttagaaggcagtctttacagataaaaagagaacttgctagtcttgatgaaaattttacaagaaaaaaatacaccgaaaaaagttcaaggaaattgacacaaaacaatgagatatcttcatcagacaaaggagaattctatcatgaccaagggccttctttacaaaattctaaaagacttcaaggtaaaaatcatgctgaaacatcattttcaccaaattatgcattacagtcactgcaactacctcttcatagttcagaaactaacttgtcttttaatgaattttcagaaagctttaaaacaacttcccctgagaaaatgagcataagaaagccacaggagaaatctgcagatggaaaacaatttttgcaaaatgataggaaaaatccaaagttaggtaatactcaaactcttttgagaaatgatgtttctggacttttgagcagaactaaacgaaatattgtgcctccagggtggtattctgtatatgtaacaaataattatgtttttaaaaaatcccctaaagccaaaaaagtatccgaatccacaacaaaaaacgatccagtgaaaaatattcacattgaaagctcacacaatatagacctaaacaaaattgcaatgaattctaatttacaagtggttgtgaagcgtttggaagatacaataagtatagccaaaaaatcctggaataatcagccattatcagaaggatataaagcatccaagaaattgatagaaattgatggtaaagaccaacatgctgacagaaatatgactcttactctaaatagaatgacatgcaaagaacagagcttatcaaaatctgtggtagcatccggcaatattatcaatagtcactgcatgcctacagtggatttgaataacaaaagacttgaaaatctgaaaaagtcatctattttagatatgggtcgcttgatttccagtgttgaaaatgtaccagcaaaatatgaaggtactgaaagttcatctgtttccaactattctagtcctatcaaactcatgtttttatctgaggttaaaagtagtgaaggggtcaaatatactttaacttcagttggcacttcccattcaaatgttgttctcccttctgaaaaacctacaacccatcacgtaactgaagaaaaaacagaaacaaatgaggatatctcaaatgcgaactctgaaaattatcactccagtcattatgatactgatacttttcaaagagaactaaacaaattcagtcatgcaaaagaaactgcaggatcctctacaatgtttataggtgatataaatagtgataagccacaagaagaacctaaggacaattcaagcagtgctactgatccatcttttaaaagaaaaccaggtagaccaaaaaaaataggtccccaagttgtgaaacagattaagcgaccaattggaagaccaccaaagcctaaaattgatcaaacaaacatcactgtttgccagaatgagccctttagtgctggaaggaaaagcccagaatgtctcatatcagaagtaaaagaaggtatttataaaaagagtattacagtaactgttatttacggaaggtcaagaagaactaaaaggcatgtttctgaaggaagggtaaacataagcaaccttatgtctttaaacaataatgctggtgattttccaactgaatataatagtcccagaaatattagtgaagacaaaattgacttgggtgaaagaataagtgctgtagcaagcttgactactgaaagtgagatcttggggtctggctttgaatatgtgagacccatcaagaacaaatctgtgatacctcagccttccaagaacattattcgaccaaatcagaagcctttggcaataagtaggaagcctggtagaccggcaaaagtgaaaatctctggcatatctgtgactattaatagaacttcacctcaggaaagagaagtaagtattagcagctgcttgcctcctttagaacaggataatacgtcaggaaaaaatctgcctgaagaaaagtatgaccaacagtgcactcaaatggataaaataaggcacactgaagctgatatatttaaaaatggatcaaaacgtatgattgctactgtacctttgagacattctattagggatagaaaaccatctctgcatttcttacattcattagcatcttctagctcacttatttatagaaacgctctgctccataaatcatataaactgcatttgcagaaaaataaaagtcagaaggaaaaacataggcactcaaagatgaaaatagcttacaaagataccccaagaaacagactttcgcggaatgcaaaaaagtgtttggaagataataaattagtacctatttctgaagtatccttggatcctataatttcatcaaaccctttgctcaggtggtgggctacttctgcttcaaatgattccttattagaggaattaaacaatagatttgagcaaataacaaatgcttgggtgcaagtaagtggagatgaagctgaaaattgtattcataaaaaaagagaacacattgaaaatgatcatttcaaagtagcaagccctttggaaacttgtcttttagaacttgaagtttcacctgtaaaaatgctttttcagaaaaagtatgatttgaatgaactctgtacttggtttatgcaaacaacagaaacacagtctctttcactagttagaaaagcaaatgcccgaaaccctttggaagtaataaataccaggggaatcaaattagggaccaaatattctgactttaatgccagccccttcagaaagcactttaaaaaatttgcactctcttctccttcaaaatcagcagagaaattgcatatactgcataaagtggctaactctccactcttaaatgtgaaaagtaatttagcaatagctagattaaaaaggactgagtttaagaggttgcatcatgaaaggtggaaaagagagggaaagctgcacaaccatggaacagttgactggaactctaaaaggagaaacttaagatttttctgccagaaccaatttttaaataagactgagggagaaacaaatgctgacatcccactccaaggaaaaagcatagtagataatcagtgtgttttgccacctgagatcaggggtgacttgcagcagagggtagtaatgcctgacttcaaaatacatgctagttttgagaataaatttaagtcagaagcaaaagagaatggaacaaattgcagccaaaaagactttcaaaagggaccaagactagaaaatgtatgtcctaatagttggaggtcaaaaaccttaaaagactgtagaatatttttgaggaagctcaactgtcttgaacacagaaatacttttaagctaaatacaatcatttactctcctgaatctactgacagtggaaatactcatcagactcatatggaagaatcaaagcgctttactttaagatctcattctgctaggcaaaattcttttaaaaagcaatctaaagaaatagaaaatgctaacacaaataatccttcagctgatgaatttgctgaccatcttggcaatagtaaattaagcaaatgtgttaactttgacaagaatcctgatagttttgaagttcttagcaatttgaacaaaagaaaaagaccaccatggaagatcacagaaatgtcaacaaaaagacataaacgacagtcttgcaacagtggacaaatggcaaactatttttccaaatccctagatttatggaactttgaacttgagaaagatgatttagggtatatggcggaagaaatttctaagcagcaaagcattcaagaggaaacttgggtgctgttaaaggcatttagttttataaaggaagcagagcataaaagttcggaaaatttgcagcctgacaatttgatagaaaagaaagacccattttctgaggagaaattcaagctggctacagaaatttgcataactaatgaggagccacacgttaatctccaagccaacagggaaaatgtctcaaaggcatggctgttgattcagagggtggaagccccagtgccttggcggcttccacatgctgttgagcctgtgggtgcacagaagtcaagaattgaggattgggaacctctgcctagatttcagaagatgtgtggaaacgcctggatgcccaggcaaaagattgctgcaggggcagggccctcatggagaacctctgctagggcagtgcagaagggaaatgtggagtcacagcccccacacagagtccctactggggcactgcctagcggaactgtgagaagagggccatcgtcctccagaccccagaatggtagatccaccaaaagcttgcaccatacacctggaaaagcctcagacactcaaagccatcccatgaaagcagccaggacaggaccctcagctgcaggtctgttggagtttgctagaggtccactccagaccctgtttgcctgggtaacagcagcggtggctgcagaacagcagattttcgtgaaccgcgaatgctgctgtctgattgttcctctggaagttttgtctcagaggagtacccggccgtgtgagaaaaaacaaccagagtatcctgtggatgccgcatgctcctctgatgagctggccataagtttaattcctgatgtttttccagcctcatcagagagcttagtagacaagcataaggaaaagagaaagggctgtattccagttccaggcagcatgctacaagtgaaaactgatgagaaactgaatgtgtctgatgagaatacagcaagttgccctttgagccccattaagatgtgccttaatcgtcccattgaatggaatctgaatttgacaacagcatctctaacgagctgtacagttcataaccaaaatctcaaaagcgaagagaaatag

SEQ ID NO: 1330 - DNA, 654 bp, Homo sapiens
  SIMILAR (382)..(525): 931254mologous to Homo sapiens Human secreted protein sequence encoded by gene 26 SEQ ID NO:149,accession number Y91476,Smith-Waterman Score=227.
atggggcaccagcgtggacacagtaagtcacacagtaaggctttgtcatcatccaggaggaagaggatgtcagtgctggtggaggagatggaaggaagtggacatggatgggatatggagagatcaggggaagatcagttcattaacagaggaacaagtattacacggaacagtaaaaatcaagatgtttgtcatatcgcatttggatccaaagttcttgggccacctccactctctggcagaaggaataacatgaagatatccagcgaggaatatgactggcgaaactatcagccaagccagatgagtgaatccgagttacagatgctagcaagcctacggtggcaacaaaatgaagaactggaggatgctgggacctcccatggcctgagtgcctcccaggtggacaactgtaatgtcagcataagtaccagcagtgacgacacaaccacctggaactcctgcctgccacccttaaagcacttcagtatggcccattgccctcactatggcccagcagaggagttggaacaggtcttagtcttcctgtttttcagcggtggctgcagaacagcggattttcatgaaccacgaatgctgctgtctgatcgttcctctggaagttttatctcagaggagtacccgcccgtgtga

SEQ ID NO: 1331 - DNA, 1299 bp, Homo sapiens
  SIMILAR (1366)..(2118): 981254mologous to Homo sapiens Human sphingosine kinase C,accession number Y96059,Smith-Waterman Score=1342.
atggccgaacaggaacagctccggtctacagctcccagcgtgactgaagcagaagacaggggcagactgacacctcacacggccgggtactcctctgagacaaaacttccagaggaacgatcagacagcagcattcgcggttcacgaaaatctgctggtctgcagccaccgctgctccaggcaaacagggtctggagtggacctctggcaaactccaacagacctgcagctgaggcaccacaccacacctattccaaaattgaccacatacttggaagtaaagctctcctcagcaaatgtaaaagaacagaaattacaacaaactgtctctcagagcacagtgcaatcaaactagaactcaggattaagaaactcactcaaaaccactcaactacatggaaactgaacaacctgctcctgaatgactactgggtacataatgaaatgaaggcagaaataaagatgttctttgaaaccaacgagaacaaagatacaacataccagaatctctgggacacattcaaagcagtgtgtagagggaaatttatagcactaaatgcccacaagagaaagcaggaaagatccaaaattgacaccctaacatcacaattaaaagaactagaaaagctagagcaaacacattcaaaagctagcagaaggcaagaaataactaaaatcagagcagaactgaagaaaatagagacacaaaaaacccttcaaaaaattaatgaatccaggagctggttttttgaaaggatcaacaaaattgatagaccgctagcaagactaataaagaagaaaagagagaagaatcaaatagacgcaataaaaaatgataaaggggatatcaccaccgatcccacagaaatacaaactaccatgagagaatactacaaacacctctacgcaaataaactagaaaatctagaagaaatggataaattcctggacacatacaccctcccaagactaaaccaggaagaagttgaaactccaaatagaccaataacaggctctgaaattgtggcaataatcaatagcttaccaaccaaaaagagtccaggaccagatggattcacagccgaattctaccagaggtacaaggaggaactggtaccattccttctgaaactattccaatcaacagaaaaagagggaatcctccctaactcattttatgaggccagcatcatcctgataccaaagactggcagagacacaaccaaaaaagagaattttagaccaatatccttgatgaacattgatgcaaaaatcctcaataaaatactggcaaactga

SEQ ID NO: 1332 - DNA, 1872 bp, Homo sapiens
  SIMILAR (1249)..(1530): 1001254mologous to Cloning vector pZC320 SopA,accession number U26464,Smith-Waterman Score=485.
ctagcggtctatcaattttgttgatcctttcaaaaaaccagctcctggattaattttttgaagggttttttgtgtctctatttccttcagttctgctctgattttagttatttcttgccttctgctagcttttgaatgtgtttgctcttgcttttctagttcttttaattgtgatgttagggtgtcaattttggatctttcctgctttgtcttgtgggcatttagtgctataaatttccctctacacactgctttgaatgtgtcccagagattctggtatgttgtgtctttgttctcgttggtttcaaagaacatctttatttctgccttcatttcattatgtacacagtagtaattcaggagcaggttgttcagtttccatgtagttgagcggttttgagtgagtttcttaatcctgagttctagtttgattgcactgtggtctgagagacagtttgttataatttctgatcttttacatttgctgatgagagctttacttccaactaagcggtcaattttggaataggtgtggttgttcttatttttggcaagcaccacccagtaggggcagactgacacctcacacagccgggtactcctctgagacaaaacttccagaggaacgatcagacagcagcattcgcggttcatgaaaaaccactgttctgcagacaccgctgctgatacccaggcaaacagggtctggagtggacctctagcaaactccaacagacctgcagctgagggtcctgtgtgttagaaggaaactaacaaacagaaaggacatccacaccaaaaacccatctgtacatcaccatcatcaaagaccaaaagtagataaaaccaccaagatggggaaaaaacacgaccggaaaaactggaaactctaaaaagtagagcacctgtcctcctccaaaggaatgcagttcctcaacagcaatggaacaaagctggacggagaatgactttgacgagctgagagaagcaggcttcagacgatcaaactactccgagctacaggaagaaattcaaatcaaaggcaaagaagttaaaaactttgaaaaaaatttagacgaatgtataactagaataaccaatacagagaagtgcttaaaggagctgatggagctgaaagccaaggctcgagaactacgtgaggaatgcagaagcctcaggagccgatgcgatcaactgaaagaaagggtatcagtgatggaagatgaaatgaatgaaatgaagcgagaagggaagtttagagaaaaaagaataaaaagaaatgaacaaagcctccaagaaatatgggactatgtgaaaagaccaaatctacatctgattggtgtacctgaaagtgatggggagaatggaaccaagttggaaaacactccgcaggatattatccagcagaacttccccaacctagcaaggcaggccaacattcaaattcaggaaatacagagaatgccacaaagatactcctcgagaagagcaactccaagacacataactgtcagattcaccaaagttgaaatgaaggaaaaaatgttaagggcagccagagagaaaggtcgggttacccacaaagggaagcccatcagactaacagtggatctcttggcagaaactctacaagccagaagagagtgggggccgatattcaacattcttaaagaaaagaattatcaacccagaacttcatatccagccaaactaaacttcataagtgaaggagaaataaaatcctttacagacaagcaaatgctgagagattttgtcacaaccaggcctgccctaaaagagctcctgaaggaagcactaaacatggaaaggaacaactggtaccagccactgcaaaatcatgccaaattgtaa

SEQ ID NO: 1333 - DNA, 942 bp, Homo sapiens
  SIMILAR (388)..(657): 961254mologous to unidentified cloning vector 29kD protein essential for the replication of mini F plasmid,accession number AB015619,Smith-Waterman Score=459.
atgagaagtattggcaaggatgtggagaaaagggaacccgtgtacactgttggtgagaatggagactggtacagccatttcggaaaacaactgtttcgctggcggaatgtcggttacctaggtgacagctccacagccatggcgactgctccaggccccacagacgctcagggccgagccccggcctgtggatgccgatccctggccactctacccaccagagaagttccagggagaaaggaacgctgccaaccaaagaggggagactctgtgttgtctgggatgggcctgcgaggctctgcctattgctccatgcaacttaatgtaggctcaatggcgggtcacgctcgcgaagctcttgggactggccagcagtttgtgctctggcggaatgatgactcctcactgcctgagtatgtccattatgacaaaagttcccatggaaacagacctcagatcgccaaaaaccggtgtccccaggtaacaaagatgggacttgaaacctatcagagtgccaaagtgtatggaagaaggaattcaggaagagtgcaaattaagctagtcatcaaacagcctacacaaagttcaggctggctgcttcctttcctccatgaggaactactgaaagacttctgcacacatgagtataataccactcacagcatcgccagcctcagacctcgatgggtgacaatcacaagtgtacgctcctatcaaaccttcatacactcaaaattcgcctcctatgtcaagtacgctcctattaaaccttcatacagtcaaaactcgcctcctatgtcaattttctctgaagtgaaataccatcgcagcaagctgttactcccctgcacagagctgctgaaaactaatcatcgagcttcaaacgccaggtttggcaaactctggctacagaaaaccactaatcttgtgatggcattttag

SEQ ID NO: 1334 - DNA, 892 bp, Homo sapiens
  SIMILAR (617)..(276): 941254mologous to Mus musculus DNA binding protein DESRT,accession number AF169968,Smith-Waterman Score=589.
tcaagggtcaggaagtgggacctgtgtgtgtaccaggagccctcctgagccaatgtctagacaggcttgtgtaccctgagaggctcctgcagtagggactagagccagggaaaccaggtctgccttctccttgagaacgtctttgaagttgagtccacatgtttagggttgactgcctgtacttcagcagagcttccttctgtccattccttcccaaggcctcagttttcactggtccagcgtggaagccacatctccactggggaaagtcagaaatgtacccacttgaccaggtcttcaagcttcacaatcaccttttcggaaacagcaatgacttcatcctcgccatggtcgctatttctgccctggggagtgtcttctgggaggaaataaagtttagagctggataaaagttgccggctggtcctctcttcccacaacagctggagctccgttatgcaaatcggatcctttggcgtacatcttacaaagataaagtcgccaaggcacaaaagtcttggtttgccttcaaggtggaattgaaaagccttgtagaaaatgtaaggtccgtgcaagccacacggtgaccctacccactggagtgagttgggctccatctcgacgttctcaagtgattgaacactcctatctctccaaacttgttggcttgaatggaatgcatcaggtcctggcagggaaacgcattctctgccttcagccggcgtaatgtctcaatataaagctgagctcttacgtcccttcgggcaccgaaatgattgaaaatatgtcttaatatttcgatagagcttcgattcacagttcctgaaaaaatatacctcggaatgtttgtgcgcctggacgcgtcggtcaactcgggaggtcgataccaata

SEQ ID NO: 1335 - DNA, 1605 bp, Homo sapiens
  SIMILAR (12)..(3347): 991254mologous to Homo sapiens SUMO-1-specific protease,accession number AF196304,Smith-Waterman Score=5807.
atgtgcagggatctaagtggtgtccttatgagcaatctcaagccaatgtctgaggtggaacagtttcatccaaaaacatcacccaatcttcgtggaaaacatgtttccacaaatctggtccctcagtgcaaaaagatctttgctgtgcaagatgataaactggtagcattgctgaccaagacttcgatcttctcagatgcaacaaagtccaggagacaagtcgataaagtagaaggggcagaaaggaaggcagtagcctacaccaaggcccgaaacataagactgaatggggtccctcagagctgcatttcattagtgagaggggcaccacaggaagggggatggctggaagccagtgagtggaaaaagaaggggacaaagacgacaaagaagaggaggccccaagggctttctacggactctaactctgcagggcgtgggggcagattatcaacttcaggcaatggaccacgcacaggattccacctctttctagcacctatcagtgttgcgcacatcataggcctcaacaaacagtgcacttcaactctaaagacgaaatcacggccagggcgacagtcattctctaccgaagccccagaaggtcggcactttgccacgacagagtactgggttcatgtttctttccgaggcggccaagagctctcagcccactggcagtggcgagatgacggacacccagcagtccaatgggcgtcgaacgcgtctaggcttggtggacttccaggggttccccgcctgccgctagggctcgggccgaagcgccgctcagcgccagctgccgctccccgggctccactttcactttcggtcctgggggagctaggcggcggcagtggtggtggcggcggcgcaagggtgagggcggccccagaacccaggtacagcgcgctcgagccgcggatattagggccaccctcaggaagggagctggagagaggctatcggaagaaccctgcaggtcctggaacacccccgtcaggagcaaattgcactgctggctccgagcccctccttgtcgggctcccgtacacagttgtcattcactatgctgcaatctttcggagactttccacggattttacaaaagcacctacagaaccaggaaggggaactgaggccccacctccaacactggggattcaatttgacatgagagttggtggggatgcacatccaaatcatatcactgcaaatactgtattttccatccacgcacaggaggacttgtgtccttcagccatgatgttcaagggccaactgtatagcttagggtggggtcctcgcagcgaacctgccctcttctgcccagaatttcctcctcctgtccctatcattaataatatctccaaatgcctgggttgtcgaagggttaccaaggctgccaatgtgcaggtcccagtccagccagagcttcagctgggtacctctgaggtggaacagattcctgagatggaccaggaatatatcgacacggtccacagggccccgcatgatcattttccagccattttacctgtctcatttcctccttcactccctgctcagagggaaggagcaacagatacactggacttctgttag

SEQ ID NO: 1336 - DNA, 831 bp, Homo sapiens
  SIMILAR (187)..(2682): 981254mologous to Homo sapiens putative p150,accession number U93572,Smith-Waterman Score=4352.
atggaacttgtgttttgctttccatatggaattactggcagcaacagcttaatgagcatcgcccctgccccaagacgggatccagaggactctgtgaaggtggcaggttcaagcatccccagagaagatctagaaattccaactcgttatgagctgacagaaaggctgatgtgctgcggaaggggttggtaccgggaccttggatcagaggctttgcagggttgggtccatgaggggtccaaagagaaacagttatgtctcaacgaggatgcagtgcatgagtggggcttgtcccctacccgcggctcgagcgcgctgtacctggggttctggggccgccctcacccttgcgccgccgccaccaccactgccgccggcctagctcccccaggaccgaaagtgaaagtggagcccggggagcggcaggctggcgctgagcggcgcttcggcccgagccctagcggcaggcggggaagcccctggctaaggcgggagctggggaaaggcgttgcgagggttaggggcatgcaggaaagggccggtgctcaagttggggaccgaagccaggcaggcgctgacaagtccaccaagcctagacgcgttcgacgcccattggactcgctgggtgtccgtcatctcgccactgccaaacaattaaagctgaataaaatggccaaaaagaccatctttaaacagttgaggctaaatgaggtaacaagtcaagaaaacacaaacattaaaacaccaaatgctacaagtttattaccgaaaatgggtcccgatccagaccccaagagagggttcttggattttgcgcaagaaagaatttga

SEQ ID NO: 1337 - DNA, 992 bp, Homo sapiens
  SIMILAR (314)..(817): 331254mologous to Nicotiana tabacum pistil extensin like protein,accession number Z14015,Smith-Waterman Score=187.
ccgcggagacagccagcagttctgtggagcagcggtggccggctaggatgggcttctctggggtctggctctgccccttttcttcttctgctgggaggttgggtctctgggagctcgtggctggtctgcgctgcacgtgtcccgttagctccaccttacaggtgcggaaagcaggcttggagctgagagacttggccagggtcacagggcagagagcagttctccaactcagggtcccaagtccacacgctttcctctccaccagattgaagattgtaccaggagagccgcagtgttccagagctactgagggggctggctgggatttgctgtattcgagaagacccccttggacccgagaggctggggcttggggagcatgaggaggtttcacagcagaaaggacaccccggggtccttgtgggctttggaatataaccctttcatcttctccgctggtcctcaccacgttggcaaggcaggtattgtgaccctgttttctcaggtgaggacatggaggtgttctccatttgcaggtgaaaatggaggtttcctcctcctgcggctgagtgtggcttgcccggaagacctcactgaccccagagtggcagaaaggctgatgcagcagctgaagtgggcactttccgggccaggggagtagaggaaggggcgaggttcgcaggggctgcagggaagacccgcaggacacagaagagcagctaccgcacttgcaagggagtctcgtttcttacggagaaatgggaactagaatctaaggatctctgcctggctttgcttctgcctgccttctccgagttcttcatttccttctctgcaatgtaaacatgtgactcctagagcccccagtttcttctggtccttggaagcttggccttctggcctctgaggcaaaggtcagtgatactgatgggagggtaggtcggactcttggttgcaagtggcagaaacccaagtcagggcagtttatgcaa

SEQ ID NO: 1338 - DNA, 318 bp, Homo sapiens
  SIMILAR (316)..(651): 911254mologous to Cloning vector pZC320 SopB,accession number U26464,Smith-Waterman Score=502.
atgcatacagaagaatgttcactgacagagcaggagcatcgccatcttggacaagcccctcattctaaagttcaccttaataaaaaaccatctaaatccaaagagcatcagcttagtggacagtgtcttactctgtctccccggctggagtacagtagcataatcatagctctctgcagcctcaaactgctggccttaagtgattctcccattgcagtccccagagtagctagaccttcagagggctttcctgatggtctaaaaagccctctgaaagaattacataaggaatatggagaaggaggagtaacaatatga

SEQ ID NO: 1339 - DNA, 484 bp, Homo sapiens
  SIMILAR (93)..(398): 361254mologous to Rattus norvegicus atypical PKC specific binding protein,accession number AB005549,Smith-Waterman Score=103.
  misc_feature (1)...(484): n = a,t,c or g
ggagcgggccgngnaaaatgatgccatgcancatacgaagngcggnggaantccgatgatgtctgaggatgggagaagcccaagcaaacaaacaatttggatagaagaatgaggataagggtggaaaggctgagcagaaaggtactctgaaacatggtggcctgagagaagaagagctggagaaaatgaaagaagagcgtgaaaggattggagcaaaacatcaggagctaagggaaaagcaggcaagaggtcttcttgattatgctactggtgcaattggatcagtgtatgatatggatgatgatgaaatggaccccaattatgccagagtgaaccactttcgggaaccatgcacatcagcaaatgtctttagatctccatctccccctcgagctggaccatttggttaccctcgggatggccatccactgtctccagaaagagaccacttagagggtctctatgccaaggtcaacaagccatt

SEQ ID NO: 1340 - DNA, 321 bp, Homo sapiens
  SIMILAR (325)..(1296): 981254mologous to Cloning vector pBACe3.6 levansucrase,accession number U80929,Smith-Waterman Score=1684.
atgcctagtttatttggaaagaagaaagaggataagggtggaaaggctgagcagaaaggtactctgaaacatggtggcctgagagaagaagagctggagaaaatgaaagaagagcgtgaaaggctagagccttccttgcaagatcaatccagcccccttaacctttcactgaaacacagaaatttttctgaatctgctctgcatttagcagttgtaggcaccctgcagatggggcctcctctggaagctggccttctccgggaacccccagtggaggcctttattgtgtcccacccactttgtgtgcacttgaaaatctaa

SEQ ID NO: 1341 - DNA, 720 bp, Homo sapiens
  SIMILAR (265)..(348): 411254mologous to Hepatitis B virus truncated core protein,accession number AB036918,Smith-Waterman Score=66.
atgcctagtttatttggaaagaagaaagaggataagggtggaaaggctgagcagaaaggtactctgaaacatggtggcctgagagaagaagagctggagaaaatgaaagaagagcgtgaaagatttacctcaccaattatttcaaaggatggacagagaagtaaagccttgccgagaaaggtagaagtttatgtagcttacaataccccagacattcaacagaaggggttgatcctcattcttttccagataatgataagcaccgagggcctgtcgtttagttttcagaaatgcccacttcactctgttctcaacaaagcagtcagagagccctttaccatgattggagcaaaacatcaggagctaagggaaaagcaggcaagaggtcttcttgattatgctactggtgcaattggatcagtgtatgatatggatgatgatgaaatggaccccaattatgccagagtgaaccactttcgggaaccatgcacatcagcaaatgtctttagatctccatctccccctcgagctggaccatttggttaccctcgggatggccatccactgtctccagaaagagaccacttagagggtctctatgccaaggtcaacaagccataccatccactggttccagctgacagggagaaaggagaaaggggcaaatggccaatggaatgtgctagtcaagttcatccctttgaaaagattccccagtag

SEQ ID NO: 1342 - DNA, 939 bp, Homo sapiens
  SIMILAR (69)..(7): 611254mologous to Homo sapiens Human secreted protein, SEQ ID NO: 6619,accession number G02538,Smith-Waterman Score=65.
atggcgctcaggcttgtaatcccagcactttgggaggctgagctggtgggggcactgatgctggccgccctctcccacctgcaccgatttctgctctctatgtgggttctaccacctggcaccttcacagacgccttccccgggctgctgtttcattttcccagaagaagccaaaaagactgcctccttggcctttccaagtctgaccagcgggccatggcttgttactttgggatccttttaatagtctctgccacactgtgttttggaatgaattactacttggatgaatttgcaaatctgttagacgaacttctgatgaagattaatggtttgtccgacagcctacaactcccccttctggaaaaaacatccaacaacacaggggaggcaaggacagaagagagtcccttagtggacatttctagttaccaagctgctgagatggtgatgatggccaggacactggccacctgcctgcagcatgcccagggcctgggctttgaggcttgtcttcccatcctgagtgctccacatgctttatctcactggaccctcacaacatgcctttggcagctaggctttatgagtgcggttctcatcctcaagtacacccgggcactccttgctcaaggccagttctcggggccatttgtgattgacaaaggagtgaggcttgagctcatcggtctcatatccagagtctgggaagtctctgagcaagaaaactcgaaggaggaagtctatcgacatgaagaaggaattacagtcatctcagatttattgttgggcagacagtggcaacagggacacaagggcatctgccttcagctcatgttgcccttctctcgtgggaaacacagaaccagcggagcctttttaatgttcagtcttgagctgttcacagtggcccagcttgttccaatttccgggtcctga

SEQ ID NO: 1343 - DNA, 576 bp, Homo sapiens
  SIMILAR (73)..(423): 901254mologous to Homo sapiens Human 030 gene (fohy030) product,accession number R99390,Smith-Waterman Score=541.
atggagccagcgtctgcttcctgtgagggcttcaggctgcctccactcatggtggaagaggaagaggagccgcccctgggaagcctggcacccccgacggacagcaaagccacggagaaggagaagaagccacccatggccaccaccaagggaggaagaggaaaagggaaaggcaagaagaaagggaaagtgaaagaggaagtggaggaagaaactgacccccggaagatagagctgctgaactgggtgaatgctttggagcaagcgatgctagatgctttagtcttagatcgtgtcgactttgtgaagctcctgattgaaaacggagtgaacatgcaacactttctgaccattccgaggctggaggagctttataacacaagcaaccttccgcctgattaccacatcagcctcatagacatcgggctcgtgctggagtacctcatgggaggagcctaccgctgcaactacactcggaaaaactttcggaccctttacaacaacttgtttggaccaaagagggcatatgacaaccttcccgatgtccgtgtcatcagcttgggctgctgtgactaa

SEQ ID NO: 1344 - DNA, 268 bp, Homo sapiens
  SIMILAR (90)..(149): 601254mologous to Vibrio cholerae acetyl-CoA synthase,accession number AE004118,Smith-Waterman Score=68.
atggagccagcgtctgcttcctgtgagggcttcaggctgcctccactcatggtggaagaggaagaggagccggaagcccatattggctatggtggtattacagaacactggacagtgagtgaaagcccactgtggaccaatggccatgggttccggcgctctggagatgtcggagatccaggcttttcctaaagagtcaggattggaaggcggactcccaccgtttgctgagctccacatgacaacagcagacgacaggccgcactga

SEQ ID NO: 1345 - DNA, 623 bp, Homo sapiens
  SIMILAR (557)..(222): 331254mologous to Homo sapiens PRO2472,accession number AF116704,Smith-Waterman Score=93.
ttttgaacctcgagatccgtagtgcagtgtggcggaattccgctggcgccggccgaatccggcccgggaaccacctccagggacatgacctttggctctaaaaagaagactccatttttcatgataaaatggcagtggtgaaaacccccagcagaggactaaagaatgctaaagaaccctttaataatgcatcaccccatctcttgaagaacctagtggaggagccgaaaaaaagaaaagtagtacctaatcacctcctagaatcaaaggtttatgcaaaacttgtgaataataaggtcatacaggcaagacctggcataatacattttggaggctatcaagtagaaaaacaacaccaacagattctgcatctggtcaatgtttccaatgaagacacacgtgttcatattttacccccgcaaaccaaatactttgagatcaattatgtaagaaagtccggggcttgtcccaacaagatgccacctgtcttccaggaacaccacctggtccctggcttgtccctcacggtcaccgttacattttctccagatgagtggcgatactattatgactgcatccgtgttcactgtaaggggcagtttgtcattggattatgggcctag

SEQ ID NO: 1346 - DNA, 825 bp, Homo sapiens
  SIMILAR (548)..(709): 741254mologous to Homo sapiens Human secreted protein clone yl4_1 protein sequence SEQ ID NO:150,accession number Y73464,Smith- Waterman Score=257.
  misc_feature (1)...(825): n = a,t,c or g
tgtctgacagctccagcacctcaatgaatgtgtactcgctgagtgtggaccctaacacctggcagactctgctccatgagaggcacctgcggcagccagaacacaaagtcctgcagcagctgcgcagccgcggggacaacgtgtacgtggtgactgaggtgctgcagacacagaaggaggtggaagtcacgcgcacccacaagcgggagggctcgggccggttttccctgcccggagccacgtgcttgcagggtgagggccagggccatctgagccagaagaagacggtcaccatcccctcaggcagcaccctcgcattccgggtggcccagctggttattgactctgacttggacgtccttctcttcccggataagaagcagaggaccttccagccacccgcgacaggccacaagcgttccacgagcagaaggcgcncttggccacagctgccctctggcctctccatgatgaggtgcctccacaacttcctgacagatggggtccctgcggagggggcgttcactgaagacttccagggcctacgggcagtaggtggagaccatctccaaggaactggagcttttggacagagagctgtgccagctgctgctggagggcctggagggggtgctgcgggaccagctggccctgcgagccttggaggaggcgctggagcagggccagagccttgggccggtggagcccctggacggtccagcaggtgctgtcctggagtgcctggtgttgtctccggaatgctggtgccggaactcgctatccctgttgtctacctgctgggggcactgaccagtgagcggccgc

SEQ ID NO: 1347 - DNA, 1840 bp, Homo sapiens
  SIMILAR (1038)..(1538): 521254mologous to Homo sapiens Human receptor molecule (REC) encoded by Incyte clone 965938,accession number Y32196,Smith- Waterman Score=285.
atggcgaaggatcgtgtcgctatggcgaaggactgcgctttggcgaaggattgcgctttggcgaaggactgcgctatggcgaaggatgatgccgctgtgacgacagatcgtgcgctgtggcgaaggactggccgctgtgacgacggacttgccgctatgatgaaggatgctgccgtgaactttggtgcacaggcatctgtttgcgtctttgctttcaattcctctctgggcacctccagctcctgctcgccggacggctcccagggagagcagacgcgccagacgcgccaccctcggggcgccgacggtcacggtgagctgcgccccgccccctcccccggcctggctggagctcccgagtggggccggccgctggctcccgggagcatggggtcggcctttgagcgggtagtccggagagtggtccaggagctggaccatggtggggagttcatccctgtgaccagcctgcagagctccactggcttccagccctactgcctggtggttaggaagccctcaagctcatggttctggaaaccccgttataagtgtgtcaacctgtctatcaaggacatcctgggagccggatgccgcggaaccaggactggatcctaaggaccggactgagccccaggctgctgtgaggacaaggggtggtgtgaacacgggggcccaggtgagggggccgcacctcgagtctggacttggagtccccgagtccacctttcctcatggggtcccgtccccgtggggagcgcacggagaggctgccggtgccccgcacccacagacctctggagggcccctctgcaccacctcccccggtggcgtggggctgtcaggggagggaagacgccttcaggggctgcggccagcgagctttgctgctcctcggacacaggcacctgcggcaccagaacacaaagtcctgcagcagctgcgcaccgtcggggacaacgtgtacgtggtgactgaggtgctgcagacacagaaggaggtggaagtcacgcgcacccacaagcgggagggctcgggccggttttccctgcccggagccacgtgcttgcaggtgtgtagccagccccgggccacgcctggcccccacgtgggcacgcggcggcgggtgacggaggcggcgggctgggctccgcaaggcccctcggagcagctcccagccctgcgcttggctgcggagcgaagtcacctggcggcgggctgccccggcacccggcccgcacccgcaccccacggcccggtgccagggcccagcccgaggcccatctccatgcctcagggtgagggccaggggcatctgagccagaagaagacggtcaccatcccctcaggcagcaccctcgcattccgggtggcccagctggttattgactctgacttggacgtccttctcttcccggataagaagcagaggaccttccagccacccgcgacaggccacaagcgttccacgagcgaaggcgcctggccacagctgccctctggcctctccatgatgaggtgcctccacaacttcctgacagtgattgcaagctgttcagattttgtcaagcttagtgttataagaaactttaaaaagaagtgcaatcctcgcaaagttggtggaccaaagcatttcggaaagcagctggtaaagatcttacagtggataattcatttgaatttgcaagacgtagaatctgaaaaacctatcaaataccagcgagagctatggaataaatctatggatgcaatgaagagagttgaagagatcaaacagaaaagccaagctaaatttataatgaacagatggaagaaaaataaagagctacagaaagtttag

SEQ ID NO: 1348 - DNA, 1312 bp, Homo sapiens
  SIMILAR (514)..(353): 1001254mologous to Homo sapiens dJ839B4.6 (novel protein with ankyrin repeats),accession number AL109754,Smith-Waterman Score= 276.
cgtctctatttaataaataaaaaggatatttaaaaaaataataagcataatggtgtagacctggtaaatcttttgactatgtaacgtttataacccacatgccatgtattttactacattcataaaggggcttggggatttatccagaatgacataccattcatttcaaaataacatacatcttttctctagacagctaagaatatttatagttgttaaagcaaaaagaaattcttggtaacaagttcttggtgtatggattgctttggctttgatggaaatatctactttctccaaagattggtccctgggcctcaaagcatttaccccaagaaataactgctatgacttaggtcttcaaggcagcttccagtgctcgagctttctctgtgatgttcttctgaaaaggcatcataaaatcgtcgaagtccacctcatgtgtaaacctctctcgccgtagttccctcttcctgatcagctctgctgttgtggcttcaggactccaaatccttctgtactttctttccctctgatgtggttggtacaccataaattgatgacagcagttccgggagggagaaaacaaggaacataaattcagctcctttggtgaaagggtgacattgcatatggtttcaaatcgcctggagacgcaagaaatctgctctgagtttgcaaatttgattctgaggactccaggcacgggagctgtgtcagattcaatgtatctgtcatcatgggggggctccttcttcaggaagcagggcctggcctcccattgttgggtggtttttctttgtgagaaagtgcctccttctaccgaacctatatcccacctgccccgaacagctccctcaccagccagtggtactcccttccctttgcctgtcccaaaacctctgccattagagccatcctttgatgtctggcgcctgtgggggtggtgtgggggaggctgtacattttcttggagtcttcccataccggtacacaggcaggcagagccctgggggtatttttcagcctcctccagctggatttgaaaggaggccatggaatctagtttcactgatctgaaccatgagccgtgctgagcccgtcttcctggctgtgggaccgtcgtggggctcagggtcaatggggagcctccagacatcttcagggtaggcagagcaactctgcaacctggagctgcttcctggaggggggtgcagaaacagatggtaaaaacccagggtcctcggaccctgcaggtgtgcaagggcatggagctacacccatctcgggttactgcagtatgagctacacccat

SEQ ID NO: 1349 - DNA, 3213 bp, Homo sapiens
  SIMILAR (814)..(1407): 991254mologous to unidentified cloning vector 29kD protein essential for the replication of mini F plasmid,accession number AB015619,Smith-Waterman Score=1042.
atggcgaagaagttaaaaactttgaaaaaaaaaatagatgaatggataactagaataatcaatgcagagaagtccttaaaggacctgatggagctgaaaaccatggcacgaggactacatgatgaatgcacaagcctcagtaaccgatgcaatcaactggaagaaagggtatcagcgatggaagacgaaatgaatgaaatgaagcgtgaagagaagtttagagaaaaaagaataaaaagaaacaaacaaagcctccaagaaatgtgggactatgtgaaaagaccaaatctacgtctcattggtgtacctgaaagtgacggggaggctggaaccaagttggaaaacattctgcaggatattatccaggagaagttctccaatctaggaaggcaggccaacattcaaattcaggaaatacagagaacaccacaaagatactcctcgagaagagcaactccaagacacataattgtcagattcaccaaagttgaaatgaaggaaaaaatgttaagggcagccagagagaaaggtggggttacccacaaagggaagcccatcagactaacagctgatctcttggcagaaactctacaagccagaagagagtgggggccaatattcaacattcttaaagaaaagaattttcaatacagaatttcatatccagccaaactaagcttcataagtgaaggagaaataaaatactttacagacaagcaaatgctgagagattttgtcaccaccaggcctgccctaaaagagctcctgaaggaagcactaaacatggaaaggaacaactgtgcaatcaaactagaactcaggattaagaaactcactcaaaggcgctcaactacatggaaactgaacaacctgctcctgaatgactactgggtacataacgaaatgaaggcagaaataaagacgttctttgaaacaaacgagaacaaagacacaacataccagaatctgtgggacacattcaaagcagtgtgtagaggaatggccatactgcccaaggactggttttttgaaaagatcaacaaaattgatagaccactagcaagcctaataaagaagaaaagagagaagaatcaaatagatgcaataagaaatgacaaaggggatatcaccaccgatcccacagaaatacaaactaccatcagagaatgctataaacacctctacacaaataaactagaaaatctagaagaaatggataaattcctcgacacgtacactctcccaagtctaaaccaggaagaagttgaatctctgaatagaccaataacaggctctgaaattgaggcaataattaatagcttaccaaccagaaaaagtccagaaccagatggattcacagccgaattctaccagaggtacaatgaggagctggtaccattccttctgaaattattccaatcaacagaaaaagagggaatcctccctaactcattttatgaggccagcatcatcctgacaccaaagcctggcagagacataacaaaaaaagggaattttagaccaatatccttgatgaacattgatgcaaaaatcctcaataaaatactgacaaaccgaatccagcaacacatcaaaaagcttatccaccatgatcaagtgggcttcatccctgggatgcaaggctggttcaacgtacaaaaatcaataaacataatccagcatataaacagaaccaaagacaaaaaccacatgattatctcaatagatgcagaaaaggcctttgacaaaattcaacaacccttcatgctaaaaactctcaaccaattaggtattgatgggacatatctcaaaataataagagctatctgtgacaaacccacagccaatatcatactgaatggacaaaaactggaagcattccttttcaaaacgggcataagacagggatgccctctctcaccactcctattcaacatagtgttggaagttctggccagggcaatcaggcagaagaagggaataaagggcattcaattaggaaaagaggaagtcaaattgtccctgtttgcagatgacatgattgtatgtctagaaaaccccaaagtctcagcccaaaatctccttaaactgataagcaacttcagcaaagtctcaggatacaaaatcaatgtgcaaaaatcacaagcattcttttacaccaataacagacaaacagagagccaaatcatgagtgaactcccattcacaattgcttcaaagagaataaaatacctaggaatccaacttacaagggatgtgaaggacctcttcaaggagaactacaaaccactgctcaatgaaataaaagaggatacaaacaaatggaagaacattccatgctcatgggtaggaagaatcaatatcgtgaaaatggccatactgcccaaggtaatttatagattcaatgccatccccatcaagctaccaatgactttcttcacagaattggaaaaaactactttaaagttcatatggaaccaaaaaagagcccatattgccaagtcaattctaagccaaaagaacaaagctggaggaatcacgctacctgacttcaaactatactaccaggctacagtaaccaaaacagcacgggacatggatgaagctggaaaccatcattctcagcaaactatcacaaggacagaaaaccaaacaccacatgttctcactcacaggaagggaattggtgacatctgtctcagtgagcatctggtgacagccccagaacacacaggcactgagagggaccacatccttctgaatccctttggattgaagagcttgcctctgaaggccttgggagtcagaatcagcttggaagatttttatgaggtcagtgcatccctgggatggagcttccagaggaaggagcaggctgccatctttgctgttttgcaggcttcactgacgatacctccagaagtaggctttgaaaggtgggtagtgatgaacttagctgagctaaaggagcatgttgtaacccaatgcaaagaaaccaaaaatcatgataaaacaatacaggagctgatagccagaatagccaggttagagaagaacataaccaacctgatggtgctgaaaaacacagcaaaagaacttcacaatggaatcacagacataggaatccaacgagaaaataaagttacctctgaccggattcatggaagacagttatgccatgaatggggtggggtctggaaggatgttaactga

SEQ ID NO: 1350 - DNA, 525 bp, Homo sapiens
  SIMILAR (103)..(525): 531254mologous to Homo sapiens L21 ribosomal protein,accession number L38826,Smith-Waterman Score=323.
atgggagatttaagtaggcccatgctcaatgttgatgacatcaaagacatccctcctgaggaaatctcaactgcagacccctattatgcccccattcagcagaaagaagttagtacagttgttgccaacctccccaacagcacttgggttttcctgttgagaggggtctccttggactcgcggtacctgcagggtggtgtggggctggtttccccaacatctggcacccaacgtggggctccccataatctctacaaataatccagtgaataaacgccagagcgtggaaagtggaggacgactgacaaaggttgcccgagtacgttttcacttcaggctctacggaagagaatcagcttcctgtctgggtgcccacatgacatcttaagctgtgccatgagccataatccaaggaagaggaaaagacctcggtacatccctgcacccccagttcatcagatggctcagatgaacatctctgttgagcagatggaaaccagtataactcgccaagcaactccactg

SEQ ID NO: 1351 - DNA, 890 bp, Homo sapiens
  SIMILAR (3)..(251): 921254mologous to Homo sapiens putative p150,accession number U93574,Smith-Waterman Score=412.
ttgacacatgcacacatatgtttattgcagcactattcacaatagcaaagacttggaaccaactcaaatgtacaacaatgatagactggattaagaaaatgtggcacatatataccatggaatactatgcagccataaaaaatgatgagttcatgtcctttgtagggacatggatgaagctggaaaccatcattctcagcaaactatcacaaggacaaaaaaccaaacaccacatgttctcactcataggccttgcagtattaaaacatgtgctaacaccacgaataaaggcaactcacgttgcttttgattgcatgaagaattatttagatgcaatttatgatgttacggtggtttatgaagggaaagacgatggagggcagcgaagagagtcaccgaccatgacggttgactggattgttgctgacatcttggccatcaggcagaatgcgctaggacatgtgcgctacgtgctgaaagaagggttaaaatggctgccattgtatgggtgttactttgctcagcatggaggaatctatgtaaagcgcagtgccaaatttaacgagaaagagatgcgaaacaagttgcagagctacgtggacgcaggaactccatgctatagacagcccaggaataagaagctggagcctgcttctaagtccatactcacctctctgaaaggacccgcaaatgcctaccaccaccagccccatcctaatgggtcacctgtcaccatggtgactgctgcctccccaccagactgcgagctccacaggggccctaaaggaaacctggtctggctcaacgaaggcacctcccctgacctggcacaaaagctgggcaactcaccaaggcgcctgaaaattcctaaactttgcttggtcgcctga

SEQ ID NO: 1352 - DNA, 907 bp, Homo sapiens
  SIMILAR (1032)..(907): 1001254mologous to Rattus norvegicus fibrillin-2,accession number AF135060,Smith-Waterman Score=239.
atggatgaagatggaaaccctcattctcagcaaacttcacaaggacagaaaacgaaacaccacaagttctcactcatagagtgtgcccctcaggccttggacctgagaaatagtgacgagtgctgtgatggaaaagaaaaagtgagaagccaaatagtccgcacagctgctgtcagccccctcccctcttgtgttattttaaaggcacataaacattctaaagaccctgagaagtcctgcgatctacggcagacccctggactgcctcctagcccatgctccaatgttgatgacatcaaagacatccctctgaggaaatctcaactgcatgacccctattatgcccccattcagcagaagaactacaaggtgacacaccaggagattaccaccatcatagctaccattagattactggtggtcagcggcttgttctgagacctcaggttctcttctgcaatgtgagctagtctcttcattgcccccaggtcagtggagttgcttgagatgttcatctgagccatctgatgaactgggggtgcagagcattccgaggtcttttcctcttccttgggttctggctcatggcacaactaagatgtcttgtgggtacccagacaggaagctgattctctcctgctcctgtgacatcacatcagccacacttcttcaccctggtagcagcaagtccaggtttcgttctctaacacatcaaagagtcagcctgatggtgccccttagagatgtagcaccagctggtagcactcagagaatggcccagggcttggatatctcaaaatatcagcgacaacaggtcagtaaatattctgagaaaatgaaaaatggacaacctgaccccaagccttgcttccgcctgaacgctgacccagacctcggtcacatttga

SEQ ID NO: 1353 - DNA, 306 bp, Homo sapiens
  SIMILAR (6)..(140): 421254mologous to Rattus norvegicus aminopeptidase B,accession number U61696,Smith-Waterman Score=73.
atggggcaggccagactgtctgcaaaggggcacagggagcttttcggagttgggaaaatctacatcttgatcaagcctctgatctcccaccaggacctcatggtggtggaaaccatgcagaaagcgaagggaagagaacctgctgatgcagtacatacaggaaagttgggaattgtaatttctgtgtgcccaagaaggaaacaagcagctattgccggtgtgttgactgtcatatttgcaatacagaccttcagagctattcgcacaggagatagcaagaggaatgcctgctggggggctcagtga

SEQ ID NO: 1354 - DNA, 368 bp, Homo sapiens
  SIMILAR (109)..(234): 351254mologous to Mesocricetus auratus protein kinase,accession number M21955,Smith-Waterman Score=68.
atggggcaggccagactgtctgcaaaggggcacagggagcttttcggagttgggaaaatctacatcttgatcaagcctctgatctcccaccaggaccttatggtggtggaacccatgcagaaagcgaagggaagagaacctgctgatgcagtacatacaggtctggctccagatacccaaaccagggttagcacagctggagaacagaaggctggagggccactcaggggattttgctccaccgtggaggggattttcatctctagtcagagtccccaggctggaattactcacatggctctatccaactgcaggaaagttgggaattgtaatttctgtgtgcccaagaaggaaacaagcagctattg

SEQ ID NO: 1355 - DNA, 606 bp, Homo sapiens
  SIMILAR (1)..(492): 931254mologous to Homo sapiens putative p150,accession number U93570,Smith-Waterman Score=760.
ggactatggaaagactacatttctcaaccttcctagtagatgtgatgtcaccagtcggaattgggcagaagaatgtatcacttcagtccaaggcaattaagtggtcaaaccgtaagagactggcagctttcatactgttggatgcatgttttgggatgcctccctctcagaatctagccaccatgttctgagaaacctaagccatgtgaaggggccacatgtaggtgctttggtttgcagctccgaccctctagccaatagatggcatctcctgccagccaaatgagtgagccatcaacagtaacctgcccagctgagtcttcagcaacagcaatttatttacggattacctactcagttggtgccaagcctggttctagatgctgaagacagagcctagatcaagattgacttggtcctggctttcctgaagttcccagcctggtagaagagacataataaacaactagcaaacacagaaatgtgattctttctgggagtattaggtgctctgaaaggaagaacaagggtgatgtgatagacgctgattgggatgggagctttttcagattggatgacaggaaaggtcttctgaaatctgcctgg

SEQ ID NO: 1356 - DNA, 759 bp, Homo sapiens
  SIMILAR (1383)..(2534): 941254mologous to Homo sapiens putative p150,accession number U93574,Smith-Waterman Score=1911.
atggcgatcttctcagtatatgacacaccaaatgagataggatcagcatgtctactcgagcttcctaccagccgtggttttgcagccttagtgacatctggatatgagtttggagcagataaatgcaagaatctggattgtggggccttcatcagtctgaggcagcagaggatgcagatcctgtgggagcacattcctggaggaggggagcaaagcaggctcagaggagtgagtcacggagcccaagccctaaatttagaaggtgctgaaagaggcagtcttcccccgggaagcctgtggagatacctgctgacccagaacaccagggactcacggcagggagcagtggttggcaggagtccccagatagcagtgcccatggaagctgagcctgctgcaggcctgttccagaattctccagatcctcctcagttttttggctctggtgctcatctaaacacagcagggtcttcctccatcaggccaagtggttgtggccgctctgtcaccacggctcccggggcctctgtcggctccactttggttgagacgtctccacagcccaacaacggcggcgatctgaggagaggcaggagaaaatacggcgcgctcggcatcgtccttctgaccggggactccagcatctcagtcatcgcgtcaccaagccccacgtgcaggttctggcatccatcatggcaaactggagaccgcggtgaattccaccggaatggcgcgcgcattgccacatgggaactgtag

SEQ ID NO: 1357 - DNA, 519 bp, Homo sapiens
  SIMILAR (216)..(103): 971254mologous to Homo sapiens CGI-52 protein,accession number AF151810,Smith-Waterman Score=179.
agcttctccatggggagtgtggggaggcccatggccctggtcctagtccggctctcctgggtcctccgcggaggctccgacaacgtcgacgcggctgcagatgctgacgccaccttcctgggacctgagaagcagggtctgtacagctccagcaacactctcctcttcctccagaattctccagatcctcctcagcttcttggctctggtgctcatctcaacacagcagggtcttcctccatcaggccaaggtgggggtaggagaagaattgggaacagggactcccctaggttctcagggtacagtcagtcaatctaagcctgtatccaacaaagacactgaccgctggggtacaaggaagggctccaggcccaaaggcaggaggattaggctttagctcttgctcacagcctgctgagacctgaggcaagcccctgtccctctttgggccctcaggtttgcaatttgcagaatgaggaaatgggttcctcaatctacaatcacctgactataataat

SEQ ID NO: 1358 - DNA, 738 bp, Homo sapiens
  SIMILAR (4120)..(5646): 971254mologous to Homo sapiens putative p150,accession number U93569,Smith-Waterman Score=2570.
atggtgtgcctaggtgccacctcgcttcacctggctggggagtggctcctagacctcagctcaatgcgcatcacttccccttctcatcagccaggccagcccagaattctccagatcctcctcagcttcttggctctggtgctcatctcaacacagcagggtcttcctccatcaggccaaggcgcccccacgtgtcgatcccgagactctcggcttgcgcaggcgctctttggtgtttacagcggccgcgaagccccgcgtttgcgcgtgcgcttcccgcccgggaccgcccagagtggttgtggccgctctgtcaccacggctcccggggcctctgtcggctccactttggttgagacgtctccacagcccaacaacggcggcgatctgaggagaggcaggagaaaatacggcgcgctcggcatcgtccttctgaccggggactccagcatctcagtcatcgcgtcaccaagccccagggactatggaaagactacatttctcaaccttcctagtagatgtgatgtcaccagtcggaattgggcagaagaatgtatcacttcagtccaaggcaattaagtcaacagcaatttatttacggattacctactcagttggtgccaagcctggttctagatgctgaagacagagcctagatcaagattgacttggtcctggctttcctgaagttcccagcctggtagaagagacataataaacaactagcaaacacaaaaa

SEQ ID NO: 1359 - DNA, 1152 bp, Homo sapiens
  SIMILAR (826)..(1155): 1001254mologous to Plasmid F Protein D,accession number M12987,Smith-Waterman Score=562.
  misc_feature (1)...(1152): n = a,t,c or g
ggctctgcacgacgcctgaaaggccgcggggcccgcatttctctgtgctgccctcctggagaaccgggacacggggacgggagggccagcatcggctacggcccggttttcccgtttctttcctctgtcgcgtctgggccctcctgcagcgtccatgatgaaggccaggggctgttgctttcctctcgcccagtagccaacccaagcaagggaagtaattatctgaagaaatggatacttctccctccagaaaatatccagttaaaaaacgggtgaaaatacatcccatcacagagatggcgaaatatacttcttcattatccccagcctgggcgatgatgggatattgaaggaaatcaattgaaggctatgggggatttttattgggaaggaaaattccnaaaggaaaggtctgctgagtgaaatgaaaaaaaaagggagagctttctttgggaaccatgggataccctacctccaccaacaggaagacccaatgatcaatgagattggacaattccagagctttgcagaaaaaaacatttttcaatcccgaaaaatgtggatagtgctgtttggatctgctttggctcatggatgtgtagctcttatcactaggcttgtttctgatcggtctaaagttccatctctagaactgatttttatccggttctgtttttcaggtcttatctgtgttagttgtgtgttactatcaggaggccccctttggacccagtggatacagattacgactcttcttttatggtgtatgcaatgtcatttctatcacttgtgcttatacatcattttcaatagttcctcccagcaatgggaccactatgtggaggagccacaactacagtcttcagtgccattttggcttttttaactcgtagatgagaaaatgggcttatgttgacatgggctacagttgtttgcagcatcttagggtgtttgtcttgttcatggatcccaaacattgttgatgaaggacaattctttgttaaatgccgggggaaggaagcctttggggtacaaccatggactgtgnagggctgggacttgaccactgctctntccaatggtaggtatacaggtcccatcaagggngaagatccagccattgggacttgcactgtttacctttgggtgggg

SEQ ID NO: 1360 - DNA, 216 bp, Homo sapiens
  SIMILAR (200)..(156): 661254mologous to Arabidopsis thaliana F5D14.5,accession number AC007767,Smith-Waterman Score=62.
atgaaaaaagagtattttattgttaaactctataatgaagcaactgtctttgactacacaatgtgggaacttgccagtgaatgtagaagtactgcggggccatgcgtcagagccctagtggacacgcctatgcaggtgatcagcagtgccgtggcagccacagagacaggccaccaccactcctcaggccactcaaagccaccagcccctccctaa

SEQ ID NO: 1361 - DNA, 480 bp, Homo sapiens
atccttgcatgcagcttttgcagaactgataaaagcaatggtcggtcatgcttgccacaagctgcttctgttgagatcatcattctacgatcttgaccaatgggtgaagtttggttgcacttttggcatcttgcattcacagacctacagaaaccagattagggagcatgttggaggtggctctgtaagtgccaatgctaagattgagaacatagtgatgacatggtaagtgtgtactgagtgaattaatgaaagaatactgaatttcaggactaaggggaaacatagaggtgattataaaggaagtgaaaacagaactcccagctgaccacaatgaacctgggggtttatgaaggccttattagggcaattgaagtcttaatttggggattgaaggaggtagcaatggagtcttaaacttttctacccaaattacaagagcccctcgtgccaagctgggcgtaatgatgtcatcgatgt

SEQ ID NO: 1362 - DNA, 672 bp, Homo sapiens
  SIMILAR (143)..(181): 461254mologous to Pseudomonas phage D3 Orf92,accession number AF165214,Smith-Waterman Score=41.
atggaggagaagaatttcactccaccattcagacacaatggagaagtgtgtaagtgtttgttgagccagtgtgatgtgtcctgtgttggctgcccaggtatatacgaccgtttctatcctcaggtcacctttactggggggaagactgaagacacttgtgaacaagctcctccagaatccttgcatgcagcttttgcagaactgataaaagcaatggtcggtcatgcttgccacaagctgcttctgttgagatcatcattctacgatcttgaccaatgggtgaagtttggttgcacttttggcatcttgcattcacagacctacagaaaccagattagggagcatgttggaggtggctctgtaagtgacaatgctaagattgagaacatagtgatgacatgctttggcgctgaccacaatgctgagcaggaagcagcagctgcaggcccagtgactggtagctcagtgaccagcagcccagtgaccggcagccaggtcctcacctgggtcctctcagtgaagccagggtggccgccccagcagacagtgctacagagccaactcctgacaggcggcctgttttcagcagagaagctggggtcccatggagctgccctgctccatgcttgcatgccatttctctcagcgttggagcagagccctcaacagtga

SEQ ID NO: 1363 - DNA, 1845 bp, Homo sapiens
  SIMILAR (1)..(417): 971254mologous to Escherichia coli YbiB,accession number L02123,Smith-Waterman Score=705.
atggcacagagaatcctgaaatgtgagaagaaatctcctagtggattctggcatgaggcaagggaggagaatgtcccctttgtgcccttggacacagttatcaggggaactgacgcctggaactgcatctgcattgtgatcttgacactaccggggcaagcattaggcaaagccatggccctgagaatgacgtggacagaaatcctggacaaggctggccaaagggggaatgcgtgggccctgctcccacccccgatgctgacatcaaaggagcagagacacgcaggagactccaggcagcacccgagccctggccgccagcacccacctgtgtgccggctccgcagacgaggtccccccagcaccctggcagggactgtaccatcaacagacaaatggcagccgaccaaggaggcgactggcgtgtggaacagcactggccaccttgggaaccaagatattgggaagggacctgaagggcataagggaatccagagactcttgagaagggatcgtagctcacctcagaacgcctggagcagttggctaaacacagcaattttaggagcccctgacccctttgtccagagtgtgcccccccgcctgatgggcaaggacgcgcacactggccactctgacgatgccgaaagccctccatgtctacccgctacgccgcattcgcagacaggcgggggacatcgcggccgcggcaagctagagatgccgcctgctcgagcaaccttccacctgcagggccggccagttctactcttccaggatcactctcgtctcacccttctccccaaaatgtcagagcaagaaccaggaagggagaggctctttctggaagccacaggcataacgttactgaacaacgaggacaaaacatacacacgagcctgcaatgatggaagcaaaacagaacgtttggagatattcactgccgtttacaaggccacagtaagcagtaagcagattttctactcccctctagcagagaacatgttagcaggccctgtgatcaccaggagcatggacaaaagcctccagaagacaaaagtgcaggaaagctcatttctcagagatcagttcagaagtggtccagctgtcctaataggtgttacatcgtttggctgtgtcccaaatctcatcttgaattgtagctcccataatttccacatgctatgggagggacctggtgggagaaaactccgctgtgcattcgcgacggaatgcaagggacaaggacacatcgtatcttactatcttgaagataattttggctttaccactcctggaggtcttgccatagggtgtttgttgagccagtgtgatgtgtcctgtgttggctgcccaggtatatacgaccgtttctatcctcaggtcacctttactggggggaagactgaagacacttgtgaacaagctcctccagaatccttgcatgcagcttttgcagaactgataaaagcaatggtcggtcatgcttgccacaagctgcttctgttgagatcatcattctacgatcttgaccaatgggtgaagtttggttgcacttttggcatcttgcattcacagacctacagaaaccagattagggagcatgttggaggtggctctgtaagtgacaatgctaagattgagaacatagtgatgacatgtgaccaatctccaaagacacactgtgaggctccctcgcccaacggctggcgtggtctggagaggtctagggtaggagcaccctatgaagacatagtaatagaaactatccagaatggcacacagagagaaaaggaagatggaaaagattacgataaactacctccaaatgatgaggccagatga

SEQ ID NO: 1364 - DNA, 5211 bp, Homo sapiens
  SIMILAR (1005)..(490): 981254mologous to synthetic construct chloramphenicol acetyltransferase,accession number A02739,Smith-Waterman Score=939.
atgcacacacagctccctctgccaagcggggctctcgcacagaggcggccactgaggcatgggaagtgggtatcacgtggctgtgtcctcagcctgccctgtgcacaatattttcagaacctggagaacggcacagaaggcacacttaataactccactaagttctgggtaccaggtacggtgctagacagttacacacattcccacttaaatcctgtctctaatgggtactgttgctacctcatctttacagatgaggaaaaaggaggacagcagcttgcccagcgaatcacatctcgtaagcgtggctttggcgctgaccacaatgctgagcaggaagcagcagctgcaggcccagtgactggtagctcagtgaccagcagcccagtgaccggcagccaggtcctcacctgggtcctctcagtgaagccagggtggccgccccagcagacagtgctacagagccaactcctgacaggttctgaaaatattgtgcacagggcaggctgaggacacagccacgtgatacccactgtagagagagggagagagagacctcctatgcaagctgccggccctctgttccgtagtaaggacaaggtggagcagacacctcgcagtcaacaagacccggcaggaccaggactccccgcacagtctgaccgacttgcgaatcaccaggaggatgatgtggacctggaagccctggtgaacgatatgaatgcatccctggagagcctgtactcggcctgcagcatgcagtcagacacggtgcccctcctgcagaatggccagcatgcccgcagccagcctcgggcttcaggccctcctcggtccatccagccacaggtgtccccgaggcagagggtgcagcgctcccagcctgtgcacatcctcgctgtcaggcgccttcaggaggaagaccagcagtttagaacctcatctctgccggccatccccaatccttttcctgaactctgtggccctgggagccccgctgtgctcacgccgggttctttacctccgagccaggccgccgcaaagcaggatgttaaagtctttagtgaagatgggacaagcaaagtggtggagattctagcagacatgacagccagagacctgtgccaattgctggtttacaaaagtcactgtgtggatgacaacagctggacactagtggagcaccacccgcacctaggattagagaggtgcttggaagaccatgagctggtggtccaggtggagagtaccatggccagtgagagtaaatttctattcaggaagaattacgcaaaatacgagttctttaaaaatcccatgaatttcttcccagaacagatggttacttggtgccagcagtcaaatggcagtcaaacccagcttttgcagaattttctgaactccagtagttgtcctgaaattcaagggtttttgcatgtgaaagagctgggaaagaaatcatggaaaaagctgtatgtgtgtttgcggagatctggcctttattgctccaccaagggaacttcaaaggaacccagacacctgcagctgctggccgacctggaggacagcaacatcttctccctgatcgctggcaggaagcagtacaacgcccctacagaccacgggctctgcataaagccaaacaaagtcaggaatgaaactaaagagctgaggttgctctgtgcagaggacgagcaaaccaggacgtgctggatgacagcgttcagactcctcaagtatggaatgctcctttaccagaattaccgaatccctcagcagaggaaggccttgctgtccccgttctcgacgccagtgcgcagtgtctccgagaactccctcgtggcaatggatttttctgggcaaacaggacgcgtgatagagaatccggcggaggcccagagcgcagccctggaggagggccacgcctggaggaagcgaagcacacggatgaacatcctaggtagccaaagtcccctccacccttctaccctaagtacagtgattcacaggacacagcactggtttcacgggaggatctccagggaggaatcccacaggatcattaaacagcaagggctcgtggatgggctttttctcctccgtgacagccagagtaatccaaaggcatttgtactcacactgtgtcatcaccagaaaattaaaaatttccagatcttaccttgcgaggacgacgggcagacgttcttcagcctagatgacgggaacaccaaattctctgacctgatccagctggttgacttttaccagctgaacaaaggagtcctgccttgcaaactcaagcaccactgcatccgagtggccttatgaccgcagatgtcctctcggctgaagactggaggaagtgaacactggagtgaagaagcggtctgtgcgttggtgaagaacacacatcgattctgcacctggggacccagagcgagatgggtttgttcggtgccagccgaccaagattgactagtttgttggacttaaacgacgatttgctgctgtgaacccagcagggtcgcctccctctgcgtcagccaaattggggagggcatggaagatccagcggaaagttgaaaataaactggaatgatcatcttggcttgggccgcttaggaacaagaaccggagagaagtgattggaaatgaactcttgccctggaataatcttgacaattaaaactgatatgtttactttttttgtattgatcacttttttgcactccttctttgttttcaatattgtattcagcctattgtaggagggggatgtggcgtttcaactcatataatacagaaagagttttgaatgggcagatttcaaactgaatatgggtccccaaatgttcccagagggtcctccacaccctctgccgactaccacggtgtggattcagctcccaaatgacaaacccagcccttcccagtatacttgaaaagctttcttgttaaaataaaaggtgtcactgtggtaggcatttggcatattttgtggactcagtcaagcaaccacagtctgttaatcatttctctatgctcagatgtcagatcctcttgttattagtgtgtcttgttctgcacagtgcaggagactttattcctttggaaaattcactgttccacaaacagcaggctgaatggcctcgcctctagattgacgtgggccagcctccttgagacacacctggcacccgtcatcggccagcggtggatgctgcataatccacctgggtacttcagccttgcgtttccacagccttcagcctgttctagaacgatcactgccttacccctgctgctgcagtggtgtgagtcgtttcacggctgatgtccctcgggggattaaaggatctaaagagaaaatggcacctggttgtcttcgtgctgtgtctcatgggtttccatagtgataaagacaaggaaacgctgcaggggccacaggcacaggctgatatttaaagatctttgcttgcagccctccgtcctgctgaaaacccccataagccagtgaacacagagcagctagaggctcctcctctgctggcttagggtcagaagtacctcacagtggttgtggacatggaagagttttgtcaacacaacactttgtccccgctccgggagatgagtcagatggtggcttgagttgtcacttggtcccctccgcccctcgggtggccccctttgccacgtccccttagcttagtgatcaggtgtgagagtggccatttccttacctttgatccctgtaaagcagaaaggactcctttgacaggcgacaaactactgtggtgagcagaatgatttcctttttcaagacaacacctgcctggcttctattaatgtgtgctggccatgatattgccccaaatccgccccactgaagtgttccctaaggaacagcatttctctgctcctcagtcaacccccgtagcctagagcagtgtcacaagcttcagtaaggccagtcagctggaagtcagtctaccgtatagtaacactgtatttcagtctacagaccacactctagttgttttccatgaaaggtatacaaatgaagaattttctagcaaaacatgtttttaaccatcagtgctcaattgcattttcttcctttcgcagccagtcagtctttcaaactattgacagtaagataattctcacgttcacacctggtggcaggcttcactgtagggacggacattgcagttacaccacgattccttcctcttcactggctcgaggtaaacccttttcaaggaaaaacaactctaggatttcttttttctgtgtacgtagaccagtcccatcagtgtataatctctctctcacacgcctctctccaatagacagcttgtatttgcagtatttcatatttataaatatgcgtttatttaaaaggagaacaaaagcttgactctgattcacagttttgtatgtagctggtttgacgtagtcttttgtattttccctgccgaagtgaattgttggagaatgtaaaccgcctccacgtggcggcagacttcctaaggccccagctcgctggcctcgcgctgggcggctgggaattccacctgagaacaagtcccgcaaaccggggacggaaggacatttgacttttatttttgtatttaattgacatgaatgtaaaggggacagctcagggttgttttggagcctgttgactttgtatctctgcctgtgattttcttttctaaatgaaactccatgtagcaaccaggacgaagttgagaaggaaaacgccaaatgctttggttattagagtttaataggtaagctctgttacactaggtgttagagttccagaatgttcttttgtttgctaaaccttgaagaaacatgtgcctcagcctagatgttttgtcttctcttttctgcacttaatacctgacagtatgaccgatctctgcgcctttctgggggcgggcaagctggcggtagatttgtgatgtcacagtgcaaactgcagtgactgtaaattggcctggcgtgtataaacgttttcagggaatgcagaaggtattaatgaagagacaaaacctttattccatgtgctttgcttcattctgtacatagctctttggctcgtgaacctaattgtaaactttcaggtatttttgtacaaataagggactgatgttctgtttcttgtaattagaaataaacattaatacagtgttcttc

SEQ ID NO: 1365 - DNA, 151 bp, Homo sapiens
  SIMILAR (147)..(73): 481254mologous to Arabidopsis thaliana F10A5.22,accession number AC006434,Smith-Waterman Score=51.
atggcccttatctctgacagttgctgccgcaatggcccccaaactatctcttgggccttctgcagaaaaggatcgagcacaggagcacaagctccccatcacctgctggtgtgacactttgggttctcgactggaccgggttggtgcctga

SEQ ID NO: 1366 - DNA, 460 bp, Homo sapiens
  SIMILAR (149)..(9): 451254mologous to Homo sapiens Human secreted protein, SEQ ID NO: 7344,accession number G03263,Smith-Waterman Score=108.
attggtgcatatatcaataattaatttccttttattggctgagtagtatttactatatggatgtaccacattttgtttatcctttcaactgttgctggacatttgggttgtttccagttttgaggctatataaacaaagacacaaagatttgtatgtaaagcatcgtatggacagccaccttatttctcttggaggcagaaagggaccttaaagatgacagaccaaacatcaacttcacagatgatgacacagaaggtgaatctactgaaaagagctaaaggaaaggacaaatctcttgagggcaggatgaaggggaatgcaaatatttcaaaggaccctggcaggaaaatcagttcaacaagatgctgtttgtcttggggtcttagtgtttgctatctgttggggccccgtttccacattggaccgacttttctttcagctttgtggaggagtggagtg

SEQ ID NO: 1367 - DNA, 1008 bp, Homo sapiens
atgaagggagtccagttagaaggttattgtgatcattccagaaaaagagcagaaagggaccttaaagatgacagaccaaacatcaacttcacagatgatgacacagaaggtgaatctactgaaaagagggcctgcgaccttgctgttctctcatcttggtatgatgttccttcacctctgcacagagctggctccttttcatcctttggttctagaatttcccttagagaacttctgtgtgacattacctcagtggggtaccatgagcacacaggattggaaaatttcaaattaagtgaggaaccccttgcatactccaaagtttggaccaaatattgttgtaggactttctccttagttcagctaaaggctgggttcttgtcacacagccatgaaagattaggcttgcagacacttggaaggagtaagagttacgccccacaagatccaagagaatcttcagtattaggagaaagctcttctaatgagcacggggaaataatttattacaccacacacccagaccccaaggctgtgctcacctgtttcagtaaaggatggcacggcgagaaggctctctcaccagatgccagcccctcagccttggacttcctaaccaccagaactgaaaaacaaaattcagcatctcaagtcaccagatctgattatgatttcccggtcctcactgaccttgtggaccatggccgtgtctccaaaatctcagctgaacactcagatcagatgaacttggacaatctgcggcgtcatggcagttgtaatagatggaagccttctgatatcccctctattttcggggattatgatgctatcaaactgaggaattctggaggaactgcaggagtcatgtactggtataaaaatcccaagagcctctggggagaacctaacctcaccagacagacacacttggcccaggaacaaagcctcagtcctggacaagaggttacttataatcggttgactgaaaatataaaaagccagtcctaa

SEQ ID NO: 1368 - DNA, 473 bp, Homo sapiens
  SIMILAR (367)..(444): 461254mologous to Homo sapiens immunoglobulin kappa chain variable region,accession number AJ298483,Smith-Waterman Score=64.
  misc_feature (1)...(473): n = a,t,c or g
atggaagaaagtccccgtgaagatgaagctgggcctaaaaggaaattagtcttgacaagaagacccagagacttggttgaagaggcccatgtctctgacaaaagagaagcaactgtggagggcttagatgacggcttcatcgagaaaatggaagccatcagaaaggctggctttggcctgactcacagatccaaaagcccctacctccactcggcaaacaatgccagaacaacatctgctacccctaacctacttcccaaaagaaatgattaaaaagttaaagaaacacttccatatggaagaatccaatcccaacaggtcaccccaaagatacttcaaacccaattaaacaggaagagctaaaaaaagcagagaagttcacagaacccacacaatcttttatataagnnnnnnnnnngcgactctggtaaccctacacagttcagaacaccatttggcagttaagtatgtcc

SEQ ID NO: 1369 - DNA, 2410 bp, Homo sapiens
  SIMILAR (1980)..(940): 281254mologous to Secale cereale Sec1 precursor,accession number X60294,Smith-Waterman Score=155.
ctgatcccagcccttttcctacagcactcctcacattccacagcacatcaaatctacttctcggtgtattgtttgtcttctcccaccaaaatgtgaggtccacgagggcggaatgttcgtccaagggcttggaacgctgtttgccccacaacggaacctcagtccttcctcgctgagtgcaagagtgatcacgacgtgcagagatcctgtcagacccaaaggtggccacagccctgagactcagggagaaactcagcctctctcctccaacgcaggccctccaacgccccaggccagctcgacgcctgcagtccctgtgcacaggaaggaggcgctgatgggcggtgcggtgggacttactgagaggagcttccacgtcattggacgcactggcttagggattccggaccagctcaacctccgtaattcctctgttgatgaaaaaagagacgaaaaaggctgtgtttcttctcaggtgaaaatagggggcaagagaaaaccaccaatccaaaagatgattgttatcgtttatctactgaattgtgtgctcctcaccaatctgtttgtgatcaaaaaaggattctggtcccaggaaggggcacggcactgcgcggacctctatggaaaaggattctggtcccgggaaggggcacagcactgcgcggacctctatggaaaaggattctggccccgggaaggggcacagcactgcgcggacctctatggaaaaggattctggtcccgggaaggggcacggcactgcgcggacctctatcaaaaaaggattctggtcccgggaaggggcacagcactgcacggacctctatggaaaaggattctggtcccgggaaggggcacagcactgcgcggacctctatcaaaaaaggattctggtcccgggaaggggcacagcactgcgcggacctctatggaaaaggattctggccccgggaaggggcacagcactgcgcggacctctatggaaaaggattctggtcccgggaaggggcacggcactgcgcggacctctatcaaaaaaggattctggtcccgggaaggggcacagcactgcgcggacctctatggaaaaggattctggtcccaggaaggggcacggcactgcgcggacctctatggaaaaggattctggtcccgggaaggggcacagcactgcgcggacctctatggaaaaggattctggtcccgggaaggggcacagcactgcgcggacctctatcaaaaaaggattctggtcccgggaaggggcacagcactgcgcggacttttatggaaaaggattctggccccgggaaggggcacagcactgcgcggacctctatggaaaaggattctggtcccgggaaggggcacggcactgcgcggacctctatcaaaaaaggattctggtcccgggaaggggcacagcactgcgcggacctctatggaaaaggattctggccccgggaaggggcacagcactgcgcggacctctatggaaaaggattctggtcccgggaaggggcacggcactgcgcggacctctatcaaaaaaggattctggtcccgggaaggggcacagcactgcgcggacctctatggaaaaggattctggccccgggaaggggcacagcactgcgcggacctctatggaaaaggattctggtcccgggaaggggcacggcactgcgcggacctctatcaaaaaaggattctggtcccgggaaggggcacggcactgcgcggacctctatggaaaaggattctggtcccgggaaggggcacggcactgcgcggacctctatggaaaaggattctggtcccgggaaggggcacggcactgcgcggacctctatcaaaaaaggattctggtcccgggaaggggcacggcactgcgcggacctctatggaaaaggattctggtcccgggaaggggcacggcactgcgcggacctctatcaaaaaaggattctggtcccgggaaggggcacggcactgcgcggacctctatggaaaaggattctggtcccgggaaggggcacagcactgcgcggacctctatcgaaaaggattctggtcccgggaaggggcacagcactgcgcggacctctatcgaaaaggattctggtcccgggaaggggcacagcactacacagacctctggtgggtgtcctccctctccttagcccttccatctggaatggttgaggccgcctctcccaagaagcgctcgaagcacacccgccagcgtatcgctcagcgctccccctcggtccacctgctcttctgcaggagagatgtctcctcccacaatcggtggggaagcatcagaaatgcctgcaggcgcctctgcaggaacacggatggcatgcgttcccgcgactacttcatcataaacatgaaacgtagctct

SEQ ID NO: 1370 - DNA, 1671 bp, Homo sapiens
  SIMILAR (64)..(543): 311254mologous to Xenopus laevis Proline rich protein,accession number X68249,Smith-Waterman Score=119.
gcagacccgccctcaccccccagcggcgacctccggctggtgaagtcggtcagtgagagccacacgtcctgtcctgcagaaagtgccagcgatgccgcccctctgcagaggtcccagtctctcccacactcggccaccgtcacgctgggtggcacatctgaccccagcactctcagcagctcagcgctgagcgaaagagaggcctcccggctcgacaagttcaagcagctgcttgccggccccaacacggaccttgaggaattacggaggttgagctggtccggaatccctaagccagtgcgtccaatgacgtggaagctcctctcaggttaccttcccgccaatgtagaccggagaccagccactctccagagaaaacaaaaagaatattttgcatttattgagcactattacgattctaggaacgacgaagttcaccaggacacatacaggcagatccacatagacatccctcgcatgagccctgaagcgttgatcctgcagcccaaggtgacggagatttttgaaaggatcttgttcatatgggcgatccgccacccagccagtggatacgttcagggtataaatgatctcgtcactcctttctttgtggtcttcatttgtgaatacatagaggcagaggaggtggacacggtggacgtctccggcgtgcccgcagaggtgctgtgcaacatcgaggccgacacctactggtgcatgagcaagctgctggatggcattcaggacaactacacctttgcccaacctgggattcaaatgaaagtgaaaatgttagaagaactcgtgagccggattgatgagcaagtgcaccggcacctggaccaacacgaagtgagatacctgcagtttgccttccgctggatgaacaacctgctgatgagggaggtgcccctgcgttgtaccatccgcctgtgggacacctaccagtctgaaccggacggcttttctcatttccacttgtacgtgtgcgctgcttttctcgtgagatggaggaaggaaatactagaagaaaaagattttcaagagctgctgctcttcctccagaacctgcccacagcccactgggatgatgaggacatcagcctgttgctggccgaggcctaccgcctcaagtttgcttttgccgacgcccccaatcactacaagaaatgagcccaggcccacccgcagctggcctcactgtcccgggtggcgcgccccacctgcctggctggtggtaggcccctgtgagctggtccgggctgctaaaaggccttgtgaggtggccccaccctccaggggagctggtgaagatgggccacagacctggtctagggctgacaaagacagggacagcctttgttttttgagataccaaaaagagccaggggagggccccgggttcggcggccagaggcaggtcaggggtcccctctccctctccctgcaatgtccttgccaaatgactgcctcctgctgcccctagtccggggcagcctaggaggccgaccctctttggagtcctgctgtttgggtgccagggccggaacgaggtagtggccatctcatacctactctgaaatgcaaaacttctattctgttgagtgaaagaataaaatgtagccaaaatctaaaaaaaaagaattccaccacactggcggccgcaaggag

SEQ ID NO: 1371 - DNA, 531 bp, Homo sapiens
  SIMILAR (423)..(232): 301254mologous to synthetic construct IFN-pseudo-omega 3,accession number A12144,Smith-Waterman Score=71.
tcaacgactggctttacaaggctcataggaaaggtgcgtgtattcagacggacacgattccagctgtggctcctccactttcagggtcgctgtttccacagttgacaagcaggagaaccatacttgttgcacttccctcactgggctgccgccagcatcatatagaaaaacgctgtcccaacataagccaaagccaccatgactgggatagtcgccaaacagaactcagcttcggttcccctcccggcaaggctggttcgacctacagtcaacaggaagctcctgggggcagggacaggatccctgcctcggaaggaggcaagacgtgaacgttttttggacggcgatcaggatggtgatgagggtcccagacaaccttctatgggactgccacataagcaagtccaaaaccgagcaatggcaaaagtggtaattacttttgcaccaactaatgcaatgcaactagccaggtcgcctaaaacacttaatttcatgaaaataattggggagatggagtctgttctagaataa

SEQ ID NO: 1372 - DNA, 465 bp, Homo sapiens
  SIMILAR (91)..(378): 331254mologous to Aspergillus fumigatus CGRA,accession number AY008837,Smith-Waterman Score=74.
atgctatggcttgggactcagagaaagcgctgtgactcagaactgaccctgaaggcccacagtggggagagtggaaaagagctcctgaagatgaaaagcatcagacaaaatcaaaagctcaaagataacaaaccaggaaaagaaaaaggttacgaggacactccaggtctgacatctgagtttgaaagtcacgagtttccaagacggaaagaggccatcaagcgcacagcacggtggataaaagaaaccctaggatgtggaagagaaaaggacaatctcacaagaaaaaaatacatcccaacagaaatggctaagaaaaatcatggaagaactgccctcagaattctgaagggactagctaaacagaattcttcattagaggaaatagcagttctgttcaaaatctccgcaaaagctggtcagaaaactcgctatgaaatcacaaagactgatccaaagagctga

SEQ ID NO: 1373 - DNA, 1318 bp, Homo sapiens
  SIMILAR (562)..(434): 391254mologous to Lycopersicon esculentum cell wall hydroxyproline-rich glycoprotein,accession number M11759,Smith- Waterman Score=68.
gacaagccttcttaaagccttatttttcaaaagcgccccccccattcttgttcagattaagagttgccaaaataccttctgaactacactgcattgttgtgccgagaacaccgagcactgaactttgcaaagaccttcgtcatttgagaagacggtagcttctgcagttaggaggtgcagacactttgctctcctatgtagttctcagatgcgtaaagcagaacagcctcccgaatgaagcgttgccattgaactcaccagtgagttacgcagcacgtgttcccgacataacattgtactgtaatggagtgagcgtagcagcctcagctctttggatcagtctttgtgatttcatagcgagttttctgaccagcttttgcgggagattttgaacagaactggctatttcctctaatgaaggaattctggtttagctgtggggtgtgccgggtggggggtgtggtggtggatcaaaggacaaagacagtaattttggaacaaaatacggagtgggaggatttaccactaccattggtacaagggaatgaaagtggtcacggggtaaaaactcctaaaagggttaatttctggtccaatgcagtagatgaatgaaagaaaggtttggtattatcaaggaaatgttttcttaagccttttcctttctcttacaccctgccatgcctcccccaaattggggcatttaattcatgctttaaactggttgttctgttagtcgcttaacttagtaaaggtgcctttccctaaaagaaccccttctgactgagcaatatgcctccttgtattataaaatctttctgataatgcattagaaggtttttttgtcgattagtaaaagtgctttccatgttactttattcagagctaataagtgctttccttagttttctagtaactaggtgtaaaaatcatgtgttgcagctttatagtttttaaaatattttagataattcttaaactatgaaccttcttaacatcactgtcttgccagattaccgacactgtcacttgaccaatactgaccctctttacctcgcccacgcggacacacgcctcctgtagtcgctttgcctattgatgttcctttgggtctgtgaggttctgtaaactgtgctagtgctgacgatgttctgtacaacttaactcactggcgagaatacagcgtgggacccttcagccactacaacagaattttttaaattgacagttgcagaattgtggagtgtttttacattgatcttttgctaatgcaattagcattatgttttgcatgtatgacttaataaatccttggawtcat

SEQ ID NO: 1374 - DNA, 476 bp, Homo sapiens
  SIMILAR (448)..(347): 471254mologous to Paramecium bursaria Chlorella virus 1 a652R,accession number U42580,Smith-Waterman Score=64.
attccaggccttttttgttctcttccactttccattactatcccatagccttttggatttaagttcttatagaaaagttcttcctttctcagctcttatttttcagcttccgttgtctctgaaaaaaatattacgagtggtcgactttatcttggaaagaagatccagaatgtgttggcttcctgttttgttgcttctagtcccacgctgatggcgcccccagagcctccacaagtgggtctagtgccatctggtggtaggatgcgctgatgctttgctgcctgatggacagacaacaccgtgcttaatgaagaaaaccttgtgagtgaaatacacgcagaaacttaaacaacggactggtgacatttgcagcagatgacttagtagtcccaaaattcaaatttgttattaaacatgcaaatctgtgaaagttacagagtctttgggaccatgcaaagctaagattgataggtgtg

SEQ ID NO: 1375 - DNA, 1314 bp, Homo sapiens
  SIMILAR (58)..(11): 681254mologous to Caenorhabditis elegans W09C5.4,accession number Z82077,Smith-Waterman Score=69.
atgatcctaacacgtaagctagacttgcgtcttgccgtcgggctggtcgcgggagcgggctgcggaggggacccgccgcgagaaagtgtcaccccgccttgtcaagtcggtgcctgttctgtgctctttaaacgctttctgcagagtctccggattttcttggaggtgctggacgacatcctctaccacgtgaaggggatgcagcgaatagtcaatcagtggtcggagaagttttctgatgaggcagattcggactcagccctggactcggtctctccctgcccgtcctctccaaaacagatacacctggatgtggacaacgaccgaaccacacccagcgacctggacagcacaggcaactccctgaatgaaccggaagagccctccgagatcccggaaagaagggattctggggttggggcttccctaaccaggtccaacagagagcctctgctgatttctaagcagcgtgttatgcctgcgatcaaccacgtgctaaaagataatgctgaaaatgaccagacagtagactgtgagcacgtccacgcccaggattcatttgaagggattgttgcaaccaaattaattctcttcactgctcctagctccttctctcagagggattttgccgatttcggaaccaccatcaaacaggattttcgcctgctggggcaaaccagcgtggaccgcttgctgcaactctctcagggccaggcggtgaagggcaatcagctgttgcccgtctcactgagaaaccaatactacgcgccgtctaccgggaatgacacgcggtggttgtgctgcctcaccgccggtgaacataacactcgtggaggccgtaggaccgcatgttccgatgtcttacctgcccatccgaggaggttcgacgactgcactggtcgagctctaaaatgtatacacggattttgccgattgcggaaccaccatcaaacaagattgtcgcctgctgggacaaaccagcgtggaacccatatgctgcaactctctcagggccaggcggtgaaggccaatcacatgttgccggtctcactggtgcagcgagaatccaccctggcgcgtaatacgcaaaccgcctctcgccgcgcgttggccgattcattaatgcagctggcacgacaggtttcccgactggaagagcgcgacagtgagcgcaacgcaattaatgcagcaaagcatcagcgcatcctaccaccagatggcactagacccacttgtggaggctctgggggcgccatcagcgtgggactagaagctgatgaaaaacgagaagtttcatttcccggttccatttaa

SEQ ID NO: 1376 - DNA, 465 bp, Homo sapiens; identical to SEQ ID NO: 1372
  SIMILAR (635)..(1510): 571254mologous to Homo sapiens putative p150,accession number U93569,Smith-Waterman Score=879.

SEQ ID NO: 1377 - DNA, 1569 bp, Homo sapiens
  SIMILAR (739)..(1554): 961254mologous to Homo sapiens putative p150,accession number U93563,Smith-Waterman Score=1326.
atgaacagtttgctaactgggcagatcccagaatcacagcagattcacagagactccagtgcagccacgtggtggaagaagatttatagacaaaaaatgggaaatgacatagagaaatcggaagtgaggggtggactgacacctcacacagctggatactcctctgagacaaaacttccagagaaacgatcaggcagcagcatttgcggttcaccaatatccgctgttctgcagccaccgctgctgataccgaggcaaacagggtctggagtggacctccagcaaactccaacagacctgaagctgagggtcctgactgttagaaggaaaagtaacaaacagaaaggacatccacaccaaaaacccatctgtacatcaccattgtcaaagaccaaagacagatcaaccagacagaaagttaacaaggatatccaggacttgaactcagctctgcaccaagcggacctaatagacatctacagaactctccaccccaaatcaacagaatatacatttttttcagcaccacaccacacctgttccaaaattgaccacatagttggaagtaaagcactgctcagcaaatgtaaaagaacagaaattatcagaaactatctctcagaccacagtgcaatcaaactagaactcaggattaagaaactcactcaaaaccactcaactacatggaaactgaacaacctgctcctgaatgactactggatgcagaaaaggcctttgaaaattcaacaatgcttcatgctaaaaactctcaataaattaggtattgatgggacgtatctcaaaataataagagctatctatgacaaacctacagccaatatcatactgaatgggcaaaaactggaagcattccttttgaaaactggcacaagacagggatgccctctctcaccactcctattgaacgtagtgttggaagttctggccagggcaatcaggcaggagaaggaaataaagggcattcaattaggaaaagaggaagtcaaactgtccctgtttgcagatgacatgattgtatatctagaaaaccccatcgtctcagcccaaaatctccctaagttgataagcaacttcagcaaagtctcaggatacaaaatcaatgtgcaaaaatcacaaacattcttatacaccaataacagacaaacagagagccaaatcatgagtgaactcccattcacaattgcttcaaagagaataaagtacctaggaatccaacttacaagggatgtgaaggacctcttcaaggagaactacaaaccactgctcaaggaaataaaagaggatacaaacaaatggaagaacattccatgctcatgggtaggaagaatcaatatcgtgaaaatggccatactgcccaaggtaatttacagattcaatgccatccccatcaagctaccaatgactttcttcacagaattggaaaaaactactttaaagttcatatggaaccaaaaaagagcctgcatcgccaagtcaatcctaagccaaaagaacaaagctggaggcatcacactacctgagttcagactatatacaaggctacagtaa

SEQ ID NO: 1378 - DNA, 615 bp, Homo sapiens
  SIMILAR (434)..(856): 501254mologous to Homo sapiens p40,accession number U93567,Smith-Waterman Score=346.
atgtgcactgctgaccctgatttcctgggtatcagcagcagtggctgcagaacagcagtggctgtagaacagcggatattggtgaaccgcaaatgctgctgcctgatcgttccttttgaagttgtgtctcagaggagtacccggccgtgtgcctctcccccagccttgctgctgcctttcagtttgatctcagactgctgtgctagcaatgagcgaggctccatgggcttaggaccttctgagccagtatacatagttgagaaattaaaagcactgctaaggatggataaggagaaatggatactggagtggcacctaacaaatatccaagagaaaaccccaagttccaagcctgaagatgaggaaactgaagctcagagcagtttagaaagcacacagggtcctgccagcattcatcatctgctaactgaagagcccttgagccctgaattaccagcggcggtacccaggtactacatcgagggctttggtgagccccgaagacttgttggcttcaggttagattcagccacattaccagctgtggtggctatggggcaaaactcctcctgcttaagaaaagcagagggaaaagtaaacgggactttgtcttag

SEQ ID NO: 1379 - DNA, 720 bp, Homo sapiens
  SIMILAR (345)..(1): 911254mologous to Homo sapiens unknown protein,accession number M22333,Smith-Waterman Score=537.
ccagtagtcattcaggagcaggttgttcagtttccatgtagttgagtggttttgagtgagtttcttaatcctgagttctagtttgattgcactgtggtctgagagatagtttctgataatttctgttcttttacatttgctgagcagtgctttacttccaactatgtggtcaattttggaacaggtgtggtgtggtgctgaaaaaaatgtatattctgttgatttggggtggagagttctgtagatgtctattaggtccgcttggtgcagagctgagttcaagtcctggatatccttgttaactttctgtctggttgatctgtctttggtctttgacaatggtgatgtacagatgggtttttggtgtggatgtcctttctgtttgttacttttccttctaacagtcaggaccctcagcttcaggtctgttggagtttgctggaggtccactccagaccctgtttgcctcggtatcagcagcggtggctgcagaacagcggatattggtgaaccgcaaatgctgctgcctgatcgtttctctggaagttttgtctcagaggagtatccagctgtgtgaggtgtcagtccacccctcacttccgatttctctatgtcatttcccattttttgtctataaatcttcttccaccacgtggctgcactggagtctctgtgaatctgctgtgattctgggatctgcccagttagcaaactgttcat

SEQ ID NO: 1380 - DNA, 2106 bp, Homo sapiens
  SIMILAR (382)..(855): 981254mologous to Homo sapiens putative transcription factor,accession number AJ271878,Smith-Waterman Score=813.
atgcacgtggctgtaggtcgatcacacagggccaagacatgtttctccaatatctctcgttctcgtctgttggccttctctgactcctcagccccatttgaggaatgttttgagtgccgagagcctgggagaggcatgtcctccacgggaccaaacagtcagtggctactccttatttccagacaagatgttcttggcttggaacttattactcaagaaacaacttggatgtggtcaagttcccacccaccccgacccggtgcctgtctgagaacacctcagagacccccgcatcagtcggagcagggccaagccgacagtggtgtcatgggccctactgcgattttgctttcttggaccaaaattttacaggtgtcatgggacagagctcaccaggtaaaacttccttttcctgtagatcaaatcacagatcttccaaggaacgatttccagatgatgattaaaatgcacaagctaacctcagaacagttagagtttattcatgatgtccgacggcgcagcaagaaccgcatcgcggcccagcgctgccgcaaaaggaaactggactgtattcagaatttagaatgtgaaatccgcaaattggtgtgtgagaaagagaaactgttgtcagagaggaatcaactgaaagcatgcatgggggaactgttggacaacttctcctgcctttcccaggaagtttgccgagacatccagagccccgagcagatccaggccctgcatcggtattgccctgtcctcagacccatggacttgcccacggcctccagtattaaccctgcgcccttgggtgctgagcagaacattgcggcctcccaatgcgcagtgggggaaaaccatgttgtgcaggctggaacccatgagagtgagtccttcaggaaagaaacgacatcaacagatgtacacaacacgtttcaaattaataaaggtggggggaagatcacaaatacaacatctgtaacactgtacgtgcaacttgtcatctctattgaagaaacaggcagccaggttcctttccggttgctggtgagaatccaatgtcagctagagttatactggcacgtccatggtcctggaaaggccttggaaaggctgaggcaggcaaatgcttctccacagatgccctaccccacctcgttcattctcttggatgtcagtgctcttctgctaacagaacctatacttcatgccccatttccccgaatcacttctttcctctactcatacagtatccttgatgaagctgagcaccttcgagtgtccgcagtttttgaaagccgtggctgtcttataataacccatcctgacgttcctaggagtatttatattctgaggggcacagacaaacaaaaagacagcagtaacctctgcagacttaaatgtccctctctgacagctttgaagagagtagtggttctcccagcacacagcttgagatctgagaacgggcatactgcctccttaagtgggtccctgacccccgaggagcctaactgggaggcaccccccagtagaggcgggctgacacctcacacagccgggtactcctctgagacaaaacttccagaggaaccatcaggcagcagcatctgtggttcaccaatatctgctgttctgcagccaccgctgctgatacccaggcaaacaagaataatcaatgcagagaagtccgtaaaggacccgatggagctgaaaaccaaggcacgagagctacatgtcgaatgcagaagcctcagtagccgattcgatcaactggaagaaagggtatcagtgatggaagacaaaatgaatgaaatgaagcaagaagagaagttcagagaaaaaagaataaaaagaaacgaacaaagccttcaagaaatatgggactatgtgaaaagaccaaatgtacatctgactggtatacctgaaagtgacggggagaatggaaccaagttggaaaacactctgcaggatattatccaggagaacttccccaatgtagcaaggcaggccaacattcagattcaggaaatacagagaacgccacaaagacactcctcgagaagagcaactccaagacacgtaattgtcaagattcaccaaagttga

SEQ ID NO: 1381 - DNA, 1593 bp, Homo sapiens
  SIMILAR (754)..(1878): 921254mologous to Homo sapiens 150 kDa oxygen-regulated protein ORP150,accession number U65785,Smith-Waterman Score=1761.
atgtggaagcgactttggaaccgggtaacaggcggaggttggaacagtttggagggctcagaagaagacaggaaaatgtgggaaagtttggaacttcatagagacttgttgaatggctttgcccaaaattctgatagtgttatggacaataatgtccaggctgaggtgttctcagatagaaatgagaaacttgttgggaaatggagcaagggtgacccttgttatgttttagcaaagagactggtggcattttgctcctgccctacagatttgtggaactttgaacttgaaaggggtgatttagggtatcaggcagaagaaatttctaagcagcaaagcattcaagagcctagggacttggtgcactgtgatccagccactccagctatggctgaatggggccaacatagagcatgggctgtggcttcagagggtggaaggcccaagccttggcagcttccatctggtgttgagcctgcctacgagctcttcagtcagcttgtgatgaatgatgccaggcttgggtctctcctttcagggaagtgggctcccatctggcccagagcaggtccagaaatattgtccagcaaccaaggactgaaaccagggaccccaggagcctgcttggtgctctaccctactattgacaagttttattcttccctttccttttctgaagcaaaagagaaaatgattgttcattatctcagtgacctaagatgctggcatcttctgcagagcgggtcactgaggaccatggtggttcctgctattaatgccaataatcatcaacttctttttttgtccctagccatctcctggcatctcagggatggactgacacctcacacggccgggtactcctctgagacaaaacttccagaggaacaatcaggcagcagcatttgcggttcaccaatatccactgttcttcagccaccgctgctgatacccaggcaaacagggtctggagtggacctccagcaaactccaacagacctgctgctgagggtcctgactgttagaaggaaaacgaacaaacagaaaggacatcaataccaaaaacccatctgtacgtcaccatcatcaaagaccaaagatgggggaaaaaacagagcagaaaaaccggaaactaaaaatcagagcacctctcctcctccaaaggaacacagctcctcaccagcaatggaacaaagctggatggagaatgactttgacgagttgagagaagaaggcttcagaagatcaaactactccgagctaaaggaggaagttcgaaccaatgccaaagaagttaaaaactttgaaaaaaaattagacgaatggataactagaataaccaatgcagagaagtccttaaaggacctgatggagctgaaaaccacagcacgagaactacgtgacgaatgcacaagccccagtagccaatgcaaccaattagaagaaaggatatcagcgatggaagacaaaatgaatgaaatgaagcgagaagagaagtttagagaaaaaagaataaaaagaaaagaaacaaagcctccaagaaatatgggactatgtgaaaagaccaaatctatgtctgattggtgtacctga

SEQ ID NO: 1382 - DNA, 666 bp, Homo sapiens
  SIMILAR (1)..(273): 901254mologous to synthetic construct chloramphenicol acetyltransferase,accession number A02739,Smith-Waterman Score=425.
atggagaaaaaaatcactggatataccaccgttgatatatcccaatggcatcgtaaagaacattttgaggcatttcagtcagttgctcaatgtacctataaccagaccgttcagctggatattacggcctttttaaagaccgtaaagaaaaataagcacaagttttatccggcctttattcacattcttgcccgcctgatgaatgctcatccggagttccgtatggcaatgaaagacgtcaggaccctcagctgcaggtctgttggagtttgccggaggtccactccagaccctgtttgcctgggtatcagcagtggtggctgcagaacagtggatattggtgaactgcaaatgctgctgcctgatcattcctctggaagttttgtctcagaggagtacccagtgtgtgacaatctaaaaacttgtcacacttcacatggatctgtcatggcggaaacagcggttatcaatcacaagaaacgtaaaaatagcccgcgaatcgtccagtcaaacgacctcactgaggcggcatatagtctctcccgggatcaaaaacgtatgctgtatcagttcgttgaccagatcagaaaatctgatggcaccctacaggaacatgacggtatctgcgagatccatgttgctaaatatgctaaatattcggattga

SEQ ID NO: 1383 - DNA, 678 bp, Homo sapiens
  SIMILAR (214)..(342): 761254mologous to Homo sapiens Human secreted protein HLYES38, SEQ ID NO:220,accession number Y86305,Smith-Waterman Score =145.
atgcacgttttccgcgaattggtgctcaacctatggaattccgggaaaatctctgtagcaaaacgtttaacgaccgtttacgctgtttatttaatactagttaatggaattgctttctcatatgtttgtaatgtgacaaggcccggtgcggaggcactcgccagattaccctgctcaaagacaggaccctcagctgcaggtctgttggagtttactggaggtcctctccagaccctgggtatcagcagcagtggctgtagaacagcagatattggtgaactgcaaatgctgctgcctgatcgttcctctggaagttttgtctcagaggagtacccggttgttttgatctcagactgctgtgctagcaatgagcgaggctctgtgggcttaggaccctccaagccagtctacaaagaacgacaaactgcacagcacgagcaccacgacacacaacgactgacgatgacgccagtgctcgaaacaacacgtgggggtgtgtggggccccgttgtgagtgaccgctgtctgcgggtgtttcactcgagtgcttctcgtgagtactggtgtgagtggcaaacaggtgttagtggacagtctgctctttatggattggcccgattgagtaacgaagaaaaggaggctatcaagtcccgtaagtcggaggactgtttgctctag

SEQ ID NO: 1384 - DNA, 1239 bp, Homo sapiens
  SIMILAR (1)..(684): 691254mologous to Homo sapiens putative p150,accession number U93570,Smith-Waterman Score=788.
atgatcataattgtgccactgtactccagcctgggtgacagagtgaaatcttgtgaaaagaagagagagagagagagagagagaagaaagaaagaaagaaagaaagaaagaaagaaagaaagaaagaaagaaagaaagaaggcaagcagtaaagaaagggaggaaggaagaaagaaagaaaggagaaagaaattaagaaagaaagaagaaaaggaaagaaagaaaagaaagaagaagagaagagaaggaaggaaagaaagaaagaaagagaaagaaagaaaagaaggaaagaaggaagaaagaaagaatataccaggaaagcgaagagaatccacagaccctttgaaggaaatggatcaccgctgcctgctccctgagatgctgaaaggaacctggtggacaacacctgctagagcttccggcccagcagtcccacttctgtgtgaattcaggcagtggacagtggacacaacctctgttgtcccagaaagcacccacatgccagggcagatgacccaacccatccctgcccctgatagccacaacatggatgaagctggaggccattatcctaagcagactaacacaagaccagaaaaccaaatactgcatgttttcactgataagtgggagctaaacactgagtacaaggacccaaagaagagaacaacagacaccagggcctacttgagggtggaggccacgctggcagctgattggatggtgcccacccagattgagggtaggtcttcctttgttctagccacgctggcagctgattggatggtgcccacccagattgagggtagatcttcctttgttctagccacgctggcagctgattggatggtgcccacccagactgagggtagatcttcctttgttctagccacgctggcagccgattggatggtgcccacccagattgagggtaggggcagaatgacacctcacatggccgggtactcctctgagacaaaacttccagaggaacgatcaggcagcagcatttgcggttcaccaatatccgctgttctgcagccaccactgctgatacccaggcaaacagggtctggagtggacctccagcaaactccaacagacctgcagcttagggtcctgatggaacgcagctcctcaccagcaacggaacaaagctggatggagaatgactttgacgagatgagagacgaaggcttcagaagatcaaactactccgagctaaaggaggaagtttga

SEQ ID NO: 1385 - DNA, 3321 bp, Homo sapiens
  SIMILAR (703)..(2490): 961254mologous to Homo sapiens putative p150,accession number U93572,Smith-Waterman Score=3000.
atgaatctgagcagacacctgaatgaagtgaagggtgagcttctctggtcacttgaatggagagatccagatggtggtagcatcaggatggaggttggactcggaggttggactcaaaggttggaggaggagaaaaagggcaatgtctgttcccatgggaacctagagaaggactttccctatattccccacctctttgggcttcagcaaaagaaaatggacctcaagggagtcttcaagagctgcttcaaaatttactgttcatcaaagcacttgctgaagactggcttcatttcagaggctgtgctgtgttatggagaaggaggtgaaggagatacggtgcttaccatgaaggagaggtggccacatgaatgcatcgttttaatacagtgcaataagggcagactgacacctcacacggccagatactcctctgagacaaaacttccagaggaacgatcaggcagcagcatctgcggttcaccaatatccgctgttctgcagccaccgctgctgattcccaggcaaacagggtctggagtggacctccagcaaactccaacaaacctgcagctgagggtcctgactgttagaaggaaaactaacaaacagaaaggacatccacaccaaaaacccatctgtatgtcaccatcatcaaagaccaaagactttaaaccaacaaagatcaaaagagacaaagaaggccattacatcatggtaaagggatcaattcaacaggaagaactaactatcctaaatatatatgcacccaatacagaagcaccaagattcataaaacaagtccttagtgacctacaaagagacttagactcccacataataataatgggagactttaacaccccaatatcaacattagacagatcaatgagacagaaagttaacaaggatatccaggaattgaagtcagctctgcagcaagcagacctaatagacatctacagaactctccaccccaaatcaacagaatatacattcttttcagcaccacaccacacctattccaaaattgaccacatagttggaagtaaagcactcctcagcaaatgtaaaagaatggaaattataacaaactgtctctcagaccacagtgcaatcaaactagaactcaggattaaaaaactcactcaaaaccgctcaactacatggaaactgaacaacgtgctcctgaatgactactgggtacataacaaaatgaaggcagaaataaagatgttctttgaaaccaatgggaacaaagacacaacataccagaatttgtgggacacattcaaaggagtgtgtagagggaaatttatagcactaaatgcccacaagagaaagcaggaaggatctaaaattgacaccctaacatcacaattaaaagaactagagaagcaagagcaaacacattcaaaagttagcagaaggcaagaaataactaagatcagagcagaactgaaggaaatagagacacaaaaaacccttcaaaaaatcaatgaatccaggagctggttttttgaaaagttcaacaaaattgatagacggctagcaagactaataaagaagaaaagagagaagaatcaaatagacgcaataaaaaatgacaaacgggatatcaccactgatcccacagaaatacaaactaccatcagagaacactataaacacctctacgcaaataaactagaaaatctagaagaaatggataaattcctcgacacatacaccctcccaagactaaaccaggaagaagttgaatctctgaatagaccaataacaggctctgaaattgaggcaataattaatagcttaccaaccaaaaaaagtccaggaccagatggattaacagccaaattctaccagaggtacaaggaggagctggtaccattccttctgaaactattccaatcaatagaaaaagagggaatcctccctaactcattttatgaggtctgcatcatcctgataccaaagcctggcagaggcactacaaaaaaagagaattttagaccaatatccttgatgaacattgatgcaaaaatccttaataaaatactggcaaaccgaatccaacaactcatcaaaaagcttatccaccatgatcaacatataaacagaaccaaatacaaaaaccacatgattatctcaataaatgcagaaaaggcctttgacaaaattcaacagcgcttcatgctaaaaactctcaataaattaggtattgatgggacgtatctcaaaataataagagctatctatgacaaacccacagccaatatcatactgaatggacaaaaactggaagcattccctttggaaactggcacaagacagggatgccctctctcaccacccctattcaacatagtgttggaagttctggccagggcaatcaggcaggagaaggaaataaagggcattcaattaggaaaagaggaagtcaaattgtccttgtttgcagacgacatgattgtagatctagaaaatcccatcgtctccgcccaaaatctccttaagctgataagcaacttcagcaatgtctcaggatacaaaatcaatgtgcaaaaatcacaagcattcttatacaccaataacagacaaacagagagccaaatcatgagtgaactcccattcacaattgcttcaaagagtataaaatacctaggaatccaacttacaagggatgtgaaggacctcttcaaggagaactacaaaccactgctcaatgaaataaaagaggatacaaacaaatggaagaacattctatgctcatgggtaggaagaatcaatatcgtgaaaatggccatactgcccaagacaggacccccagctgcaggtctgttggagtttgctagaggtccactccagaccctgtttgcctgggtatcagcagcggaggctgcagaacagcggatattggtgaaccgcaaatgctgctccctgattgttcctctggaagttttgtctcagaggagtacctggctgtgtgagttttctgtgagcactcacaaagccaccactagctttcaggaagtgaccacacaccatcaagaggatcagctgctcaggaaggcaggaccagataaggacactgcttcttgcatcctagctgctctggctgaagcagccatgtctccagtggccccaagtgtgacccaggcttccactttggagcagtcaggtggtaagctttggcagcttctacaaggtgttagggctgcaggtgcccagaatgcaaaagccacagaggcttggcagcctccacctagatttcagaggttgtatcagaaaacttgggatactaggccaaaacctgcctga

SEQ ID NO: 1386 - DNA, 1493 bp, Homo sapiens
  SIMILAR (885)..(1490): 901254mologous to Homo sapiens p40,accession number U93570,Smith-Waterman Score=917.
ttatgcagtttttgcccaaatatcttcaaaaatcagcttaaattttctaaatgcaacttcactattctgcaaatcagcaggactcacttcaaacatgtgacccttgaggccatcagatgcagttttggttccttgggtcctggtgactagggtctttccaatatttcttatattgaacacagcaggggctttcacatcatgccaatctttcttagaaaatggatcaactggggtggagccaagatggccaaataggaaaagctccagtctacagctcccagtgtgagcgacacagaagacgggtgatttctgcatttccaactgaggtaccaggttcatctcagtggggagtgccagacagtgggtgtaggacagtgggtgcagcacaccgtgcatgagccgaagcagggcgaggcattgccacacccgggaagcgcaagggtcagggaattccctttccccccagtaggggcggactgacacctcacacggccgggtactcctctgagacgaagcttccggaggaaccatcaggcagcaacatttgctgttcagcaatattcactgttctgcagcatctgctgctgacacccaggcaaacagggtctggagtggtcttccagcaaactccaacagacctgcagctgagggtcctgactgttggaaggaaaactaacaaacagaaaggacatccacaccaaaaccccaactgtacgtcaccatcatcaaagaccaaagacaaaacttccagaggaatgatcaggcagcagcatttgcaggtcaccaatatccgctgttctacagccactgctgctgatacccaggcaaacagggtctggagtggacctctagcaaactccaacagacctgcagctgagggtcctgaggaaattcaaatcaatggcaaagaagttaaaaagtttgaaaaaaaattagacgaatggataactagaataaccaatgcagagaagtccttaaaggagctgatggagctgaaagccaaggctcgagaactatgtgaagaatgcagaagcctcaggagccgatgtgatcaactggaagaaagggtatcagtgatggaagatgaaatgaatgaaatgaagcgagaagggaagtttagagaaaaaagaataaaaagaaatgaacaaagcctccaagaaatatgggactatgtaaaaagaccaaatctacgtctgattggtgtacctgaaagtgacagagagaatggaaccaagttggaaaacactctgcaggatattatccaggagaacttccccaatctagcaaggcaggccaacattcagattcaggaaatacagagaacgccacaaagatactcctcgagaagagcaactccaagacacataattgttagattcaccaaagttgaaatgaaggaaaaaatgttaagggcagccagaaagaaaggtcaggtaacccacaaagggaagcccatcagactaacagcggatctctcagtagaaactctataa

SEQ ID NO: 1387 - DNA, 876 bp, Homo sapiens
  SIMILAR (85)..(348): 341254mologous to Aquifex aeolicus polyribonucleotide nucleotidyltransferase,accession number AE000679,Smith-Waterman Score=111.
gtcaaaaaaaaaaaaaatctcaagtgaccatggcatgttttaggttcatgtatgtagttgaattgtttatatatttgtctgtattacgttccagaaactgttcaggttccattatcaaaacgagcaaaatttgttggacctggtggctataacttaaaaaaacttcaggctgaaacaggtgtaactattagtcaggtggatgaagaaacgttttctgtatttgcaccaacacccagtgctatgcatgaggcaagagacttcattactgaaatctgcaaggatgatcaggagcagcaattagaatttggagcagtatataccgccacaataactggaaatcagagatactggttgtaatggtaaaattatatccaaatatgactgcggtactgcttcataacacacaacttgatcaacgaaagattaaacatcctactgccctaggattagaagttggccaagaaattcaggtgaaatactttggacgtgacccagccgatggaagaatgaggctttctcgaaaagtgcttcagtcgccagctacaaccgtggtcagaactttgaatgacagaagtagtattgtaatgggagaacctatttcacagtcatcatctaattctcagtgattttttttttttaaagagaattctagaattctattttgtctagggtgatgtgctgtagagcaacattttagtagtatcttccattgtgtagatttctatataatataaatacattttaattatttgtactaaaatgctcatttacatgtgccatttttttaattcgagtaacccatatttgtttaattgtatttacattataaatcaagaaatatttattattaaaagtaagtcatttatacatcttaga

SEQ ID NO: 1388 - DNA, 404 bp, Homo sapiens; identical to SEQ ID NO: 804
  SIMILAR (265)..(143): 871254mologous to Homo sapiens calbindin D28K,accession number S46006,Smith-Waterman Score=190.
  misc_feature (1)...(404): n = a,t,c or g

SEQ ID NO: 1389 - DNA, 511 bp, Homo sapiens
  SIMILAR (328)..(462): 521254mologous to Human T-cell lymphotropic virus type 2 gag polyprotein,accession number AF139382,Smith-Waterman Score=146.
actgctcctcgccaggccaagctaggtcccaattcttcctcagcctccgctcctccaccctataatccttttatcacctcccctccttacacccagtccggcttacagtttcgttccatgactagccctccccaacctgaccagcaatttactcttaaaaaggtggctagagctaaaggcatagtcaaggatttaattaacctcgccttcaaggtgtacaataatagaaaaaagttgcaattccttgcctccactgtgagacgaaccccagccacatctccagcacacaagaacttccaaatgcctgaactgcagcggccaggccttcctccagaacctcctcctccaggagcttgctacaagtgccagaaatctggccaccaggccagggaattcctgcagcccaggattcctcctaagccacgtcccatctgtgccggaccccactggaaatcggactgttcagctcacctggcagccactcccagagcccctggaactctggcccaag

SEQ ID NO: 1390 - DNA, 466 bp, Homo sapiens
  SIMILAR (358)..(59): 321254mologous to Arabidopsis thaliana proline-rich protein,accession number AL391144,Smith-Waterman Score=119.
  misc_feature (1)...(466): n = a,t,c or g
ngagcattaaccttgactatgcctttagctccagccacctttttaagaataaattgctgggcaggtgggggagtgctagtcacggaatgaaactgtaagccggaacaggtgtgaggaggggaggcgataaaaagattatagggtggaggagtggaggctgaggaagaattgggacctagctcagcctgtcgaggaggggagaggtcagatgggtctgtagaaaaggaagattagaaagactcagcgacacttggggttggtactgaggggacaggcgggagggaaagaaagaagatttgggaggagttgcactgggcacagagactaggaggggactgatgtgtaaaagaatgcctggacgtcaggcacctcagaccatttgcccattttacaacaagaattatttagatcttgcaggatggaaaaattgaaagtgccgttntctggctattctcgtgccgaattc

SEQ ID NO: 1391 - DNA, 396 bp, Homo sapiens
  SIMILAR (104)..(226): 701254mologous to Homo sapiens Human secreted protein, SEQ ID NO: 5210,accession number G01129,Smith-Waterman Score=155.
atggacacatatagaggaacaacagacactggggcctacctgaagacacgcatgaaatttggtgccgtgactcagatcgggggacctcccttgggagatcaacccctgtcctcctgttctttgctccgtgaaaaagatccacctacaacctcaggtcctcagacccaccagcccaaggaacatctcaccaattttaaatccggagcttgctacaagtgccagaaatctggccaccaggccaaggaatgcctgcagcccaggattcctcctaagccgcgtcccatctgtgcgggaccccactggaaatcggacttttcaactcacctggcagccactcccagagcccctggaattctggcccaaggctctctgactccttcccagatcttggcttag

SEQ ID NO: 1392 - DNA, 663 bp, Homo sapiens
  SIMILAR (448)..(552): 911254mologous to Homo sapiens Human signal peptide containing protein HSPP-36 SEQ ID NO:36,accession number Y87259,Smith-Waterman Score=157.
atgcgggcaccacctaaaagtggacagctgcagcactgcaggccctcaaggggcgccctaagatcgggggacctcccttgggagatcaatcccctgtcctcctgttctttgctccatgagaaagatccacctatgacctcaggtcctcagaccaaccagcccaaggaacatctcaccaattttaaatcgggtgtcagaccacgcagggacgcctgccttggtccttcacccttagcggcaagtcccgcttttctggggaaggggcaagtaccccaaccccttatatctctgtgccccgatcccttatttccgcaccccaacctcatatctctgcgccccaatcccttatgtccgcaccccgacctcgtatctctgtgccctgacccctttcccgcttttctggaggcacataagaacttccaaacgcctgaaccgcagcagcccggcattccaccagaacctcctcccccaggagcttgctacaagtgccagaaatctgaccaccaggccaaggaatgcctgcagcccaggattcctcctaagccatgtcccatctgtgcgggaccccactggaaatcagactgttcaactcacctggcagccactcccagagcccctggaactctggccgaaggctctctgactgactccttctcggcttag

SEQ ID NO: 1393 - DNA, 864 bp, Homo sapiens
  SIMILAR (3)..(536): 921254mologous to Homo sapiens putative p150,accession number U93563,Smith-Waterman Score=827.
atgaaactcatggaaacacttaaccagtgcataaacgctggtcatgaaatgacgaaggctatcgccattgcacagtttaatgatgacagcccggaagcgaggaaaataacccggcgctggagaataggtgaagcagcggatttagttggggtttctctcaggctatcagagatgccgagaaagcagggcgactaccgcacccggatatggaaattcgaggacgggttgagcaacgtgttggttatacaattgaacaaattaatcatatgcgtgatgtgtttggatctggctctgaaggggctacgtgttttgctcgtggaaggtaacgacccccagggaacagcctcaatgtatcacggatgggtaccagatcttcatattcatgcagaagacactctcctgcctttctatcttggggaaaaggacgatgtcacttatgcaatatatttcacttgctggccggggcttgacattattccttcctgtctggctctgcaccgtattgaaactgagttaatgggcaaatttgatgaaggtaaactgcccaccgatccacacctgatgctccgactggccattgaaactgttgctcatgactatgatgtcatagttattgacagcgcgcctaacctgggtatcggcacgattaatgtcgtatgtgctgctgatgtgctgattgttcccacgcctgctgagttgtttgactacacctccgcactgcagtttttcgatatgcttcgtgatctgctcaagaacgttgatcttaaagggttcgagcctgatgaccccactggaaatcggactgttcaactcacctggcagccactcccagagcccctggaactctggctgaaggctctctga

SEQ ID NO: 1394 - DNA, 471 bp, Homo sapiens
  SIMILAR (463)..(3180): 991254mologous to Homo sapiens Human N-cadherin,accession number Y70741,Smith-Waterman Score=4725.
atgagcagccagaggctgtttctgaccattgacctgcccaagactcagtgtgcccaagagaagctcagggtcataagaggatgtagggaccaagcaatggaagctttacaaatgacaaaaccatgcttcttcaaatccacctggagccaaaatcatgttgaaaaatgtgttccacatttctccccacccttatatgtggctctcaatcatttaatggctctgaagggctcacagaagtctccaaagaactataacacagtttttacaaaaatcaggaatggagcttgctacaagtgccagaaatctgaccaccaggccaaggaatgcctgcagcccaggattcctcctaagccgtgtcccatctgtgcgggaccccactggaaatcggactgttcagctcacctggcagccactcccagagcccctggaactctggcccaaggctctctgactgactccttttgggcttag

SEQ ID NO: 1395 - DNA, 642 bp, Homo sapiens
  SIMILAR (123)..(1): 731254mologous to Homo sapiens Human secreted protein, SEQ ID NO: 7420,accession number G03339,Smith-Waterman Score=153.
atgtgggaaagtttggaactcaatagatacttgttgaatgactttgatcaaaagcccgatagtgatatggacaataaggtccaggctgaagtggtctcagatggagatgaggaacttgttgggaaccggagcaaagagacaaaggagacacgttttatccgtggacccaaaactccggcgctggtcacggactgggaaggcagccttcccttggtgtttaatcattgcagggaggcctgccttggtccttcacccttagcagcaagtcctgctttcctggggcaggggcaagatttaattaacctcgccttcaaggtgtacaataatagaaaaaagttgcaattcctggcctccactgtgagacaaaccccagccacatctccagcacacaagaacttccaaacgcctgaaccgcagcggccaggcgttcctccagaacctcctcccacaggagcttgctacaagtaccagaaatctgaccaccaggccaaggaatgcctgcagcccaggattcctcctaagccgtgtcccatctgtgcgggaccccactggaaattggactgttcaactcacctggcagccactcccagagcccctggaactctggcccaaggctctctgactgactccttctcggcttag

SEQ ID NO: 1396 - DNA, 1764 bp, Homo sapiens
  SIMILAR (1675)..(1845): 941254mologous to Homo sapiens Human vesicular binding protein,accession number W86813,Smith-Waterman Score=284.
atgggctgcctggggacccagagagctcccagggcctttctgctgcttcctctacccctgcactttgctcagctctctaacctgactcagctccaggcagcggcttccctttccatggtgacccaccggagctctggaggtggtggggagcgaggagcgacagcagcaggaaccgaacagggcggcgcctgcctggcagcgtcactcttgcggggcctgtgggacgcaggtgaagttactcccattagggttagggttaggccatatgatcctttcaccctggctccgcttcacgagcacagtgaagcccagtgtgtcgcatcaccctctctgactgtgactaaggagaaatcgctgcttcccaagagcctgctggcgggttctcgggaagtagcgcgcagccgtgccctttgccatggacaggcccgcccaccacccaggccccaggtcacgcaacagcgcacccagctccagggacaacgcatcctccaatggaggccggcgacagagggtccccacagtcccaggagggggtctgattctgcaaagggaacacatcctcctaccactgggacctgccctccgcgccgcaggcaaggagccggctacagccgctacaattccggagagtcccggaggcgactcggacgacagcaggacctagtagcgcgcagcgacgagcagcgagatccagcgcctgcgacaaggagagaagacaaaatgatagaagagctgcagccctttggggagcacagacctaggagatccccaagccagggctgtgacaccctctttcaggctctgtggttcctggcatctccaagcttccagcggggagggcagctccaggtgctggccctctgcaaggctgcggctggaccaggtgcaccacaggcagcttctacagctggcaccagggaacatgggtatgcctggaagcttggagacaccaggaaccacagagctctgaagaggaagtcacagacctggctcagacggttcccagctggttgtcctgatgtctgctctgctctggctgatctcagggcttttatgggcctcagaggggaggaagtgtgtgccgattggtccatgggtggccatgggagtggggagtgcaggagggggactggtgggcagagggctgtggttcctaaatctccagttcaagaaaaaggcaaagagcccttgagtcttctacagtatttcatggtggatgaaaaagaaagatttctcagaattacctcagaacatgaagacaatgataatagcaacaatagtagtaatcatagcagtatcaatgagacaaaagagacatgttttatccatgaacccaaaactccggcgccggtcacggactgggaaggcagccttcccttggtgtttaatcattgcagggatgcctctctgattatacactcatgtttcaagggtgtcagaccacacagggacgcctgccttggtccttcacccttagtggcaagtcccgctttcctggggcaggggcaagtacccctcaaccccttctccttcacccttagcggcaagtcccactttcctgggacaggggcaagaacttgttacaagtgccagaaatctgaccaccaggccaaggaatgcctgcggcccaggattcctcctaagccatgtcccatctgtgcgggaccccactggaaatcggactgttcaactcacctggcagccactcccagagcccctggaactctggcccaaggctctctgactgactccttctccgcttag

SEQ ID NO: 1397 - DNA, 771 bp, Homo sapiens; identical to SEQ ID NO: 598
  SIMILAR (309)..(407): 481254mologous to Homo sapiens Fragment of human secreted protein encoded by gene 29,accession number Y36505,Smith-Waterman Score=73.

SEQ ID NO: 1398 - DNA, 5131 bp, Homo sapiens
  SIMILAR (484)..(1065): 341254mologous to Araneus diadematus fibroin-4,accession number U47856,Smith-Waterman Score=157.
atgctgttttgggcctttgacaaaattcaacagcccttcatgctaaaaactctcaataaattaggtattgatgggacgtatctcaaaataataagagctgtttatgacaaacccacagccaatatcatactgaatgggcaaaaactggaagcattccctttgaaaactggcacaagacagggatgccctctctcaccactcctattcaacatagtgttggaagttctggccagggcaatcaggcaggagaaggaaataaagggcattcaattaggaaaagaggaagtcaaattgtccctgtttgcagatgacatgattgtatatctagaaaaccccatcatctcaacccaaaatctccataagctgataagcaacttcagcaaagtctcaggatacaaaaacaatgtgcaaaaattacaagctttcttatacaccaataacagacaaacagagagccaaatcatgagtgaactcccattcacaattgcttcaaagagaataaaatacctaggaatccagcttacaagggatgtgaaggacctcttcaaggagaactacaaaccactgctcaaggaaataaaagaggatacaaacaaatggaagaacattccatgctcatggataagaagaatcaatattgtgaaaatggccatactccccaagaggactccattattatcgctgcctagtacattatatgaggagctgtggagacttaggtcctacttcccattgtgccctcaactttacaacatggagcagaataccacagactgggtaatttataaagaacagtgcatttggctcacagctctggagactggggagtccaagagcactgcaccagcatttggcaagggttatcccatggcagaatacatcatatggggcagattgacacctcacatggctggctactcctctgagacaaaacttccagaggaacgatcaggcagcaacatctgctgttcaccaatatccgctgttctgcagcctctgctgctgatacccaggcaaacagggtctggagtggacctccagcaaactccaacagacctgcagctgagggtcctgactgttagaaggaaaactaacaaacagaaaggacatccacaccaaaaccccatctgtacgtcaccatcatcaaagaccaaaggatcaaattcacacataacaatattaaccttaaatgtaaatgggctaaatgctccaattaaaagacacagactggcaaattggataaagagtcaagacccatcagtgtgctgtattcaggagacccatctcacgtgcagagacacacacaggatcaaaataaagggatggagggagatctaccaagcaaatggaaaacaaaaaaaggcaggggttgcaatcctagtctctgataaaacggactttaaaccaacaaagatcaaaagagacaaagaaggccattacatgatggtaaagggatcaattcaacaagaagagctaactaccctaaatatatatgcacccaatacaggagcacccagattcataaagcaagtccttagagacctacaaagagacttagactcccacacattaataatgggagactttaacaccccactgtcaacattagacagatcaacgagacagaaagttaacaaggatatccaggatttgaactcagctctgcaccaagtggacctaatagacatctacagaactctccaccccaaatcaacagaatatacattcttctcagcactacaccacatttattccaaaattgaccacatagttggaagtaaagcactcctcagcaaatataaaacaacagaaattataacaaactgtctctcagaccacagtgcaatcaaactcgaactcaggattaagaaactcactcaaaaaccggacaactacatggaaactgaacaatctgctcctgaatgattactggataaatagcgaaaagaaggcagaaataaagatattctttgaaaccaatgagaacaaagacacaacataccagaatctctgggacacatttaaagcagtgtgtagagggaaatttatagcactaaatgcccacaagagaaagcaggaaagatctaaaattgacaccctaacatcacaattaaaagaactggagaagcaagagcaaacacatttaaaagttagcagaaggcaagaaataactaagatcagagcagaactgaaggacttagagacacacaaaaacattcaaaaaatcaatgaatcgaggagctggttttttgaaaagatcaacaaaattgatagaatgctagcaagattaacaaagaagaaaagagagaagaatcaaatagatgcaataaaaaatgataaaagggatatcaccactgatcccacagaaatacgaactaacatcagagaatactataaacacctctatgcaaataaactagaaaatctagaagaaatggataaattcctggatgcatacatcctcccaagactaaaccaggaagaagttgaatctctgaatagaccaataacaggctctgaaattgaggcaataattaatagcttaccaatcaaaaaaagtccaggaccagatggattcatagccaaattccaccagaggtacaaggaggagctggaggccagcatcatcctgataccaaagcctggcagagacacaaccaaaaaagagaattttagaccaatacccctgatgaatattgatgcaaaaatcctcaataaaatactggcaaaccgaatccagcagcacatcaagaagcttatccaccatgatcaagtgggcttcatccctgggatgcaaggctcgttcaacatatgcaaatcaataaacgtaatccaggatataaacagaacgaatgacaaaaaccatatgattatctcaatagatgcagaaaaggcctttgacaaaattcaacaacccttcattctaaaaactctcaataaattaggtattgatgggacgtatctcaaaataataagagctatctatgacaaacccacagccaatatcatactgaatgggcaaaaactggaagcattccctttgaaaactggcacaagacaggggtgccctctctcaccactcctattcaacatagtgttggaagttctggccagggcaatcaggcaggagaaggaaataaagggcattcaattaggacaagaggaagtcaaattgtccctgtttgcagatgacatgattgtatatcgagaaaaccccatcgtctcaacccaaaatctccataagctgataagcaacttcagcaaagtctcaggatacaaaatcaatgtgcaaaaatcacaagcatttttatacaccaataacagacaaacagagagccaaatcatgagtgaactcccattcacaattgcttcaaagagaataaaatacctaggaatccaacttacaagggatgtgaaggatctcttcaaggagaactacaaaccactgctcaaggaaataaaagaggatacaaacaaatggaagaacattccatgctcatgggtaggaagaatcaatatcgtgaaaatggccatactgcccaaggtaatttatagatttaatgccatccccatcaagctaccaatgactttcttcacagaattggaaaaaactactttaaagttcatatggaaccaaaaaagagcccgcattgccaagtcaatcctaagccaaaggaacaaagctggaggcatcacactacctgacttcaaactatactacaaggctacagtaaccaaaacagcatggtactggtaccaaaacagagatatagaccaatggaacagaacggagccctcagaaataatgccacatatctacaaccatctgatctttgacaaacctgacaaaaacaagaaatggggaaatgattccctatttaataaatggtgctgggaaaactggctagccatatgtaggagaaagctgaaactggatcccttccttacaccttatacaaaaattaattcaagatggattaaagacttaaatgttagacctaaaaccataaaaaccctagaagaaaacctaggcaataccattcaggacataggcatgggcaaggacttcatgtctacaacaccaaaagcaatggcaacaaaagccaaaattgacaaatgggatctaattaaactaaagagcttctgcacagcaaaagaaactaccatcacagtgaacaggcaacctacagaatgggagaaaatttttacaatctacccatctgacaaagggctaatatccagaatctacaaagaactcaaacaaatttacaagaaaagaacaaacaaccccatcaacaagtgggtgaaggatatgaacagacacttctcaaaagaagacatttatacagccaaaaggcacatgaaaaaatgctcatcatcactggccatcagagaaatgcaaatcaaaaccacattgagataccatctcataccagttagaatggcgatcattaaaaagtcaggaaacaacagaccaagctccaatgtcttctctgtgaaactttctgagatccaatccttggctctcatagagactaggtgcttaatgaatgctgatgaacagggtgtgccactgattcaagaaatgctggaatcttgggcaagtatttgcaaagttcccaagtatccaaatgccgaagcagtgcggccagaagagcaaacaccccacctgcacccaggtgaaataaacagccatgttgctcacacaaagcttgtttggtggtctcttcacacggacacgcatgaaatttggtgccgtgactcggatcgggggacctcccttgggagatcaatcccctgtcctcctgctctttgctccgtgagaaagatccacctacgacctcaggtcctcagaccgaccagcccaagaaacatctcaccaatttcaaatccgcacacaagaacttccaaacgcctgaaccgcagcggccaggcgttcctccagaacctccttccccaggagcttgctacaagtgccagaaatctgaccaccaggccaaggaatgcctgcagcccaggattcctcctaagccgtgtcccatctgtgcgggaccccactggaaattggactgttcagctcacctggcagccactctcagagcccctggaactctggcccaaggctctctga

SEQ ID NO: 1399 - DNA, 782 bp, Homo sapiens
  SIMILAR (605)..(778): 751254mologous to Homo sapiens neutral protease large subunit,accession number M27826,Smith-Waterman Score=207.
atgcgtaagggctgtaggcgtggacgggagggcgcagatgcggcgctgcgtgcgcggagatggtggcgcgccagtgcatcgtcgcgtatgataatggcgatgccgtccaggtctggtagaggacagaagaggcatgttttagccatgaacccaaaactccggcaccggtcacggactggggaggcagccttccagtggtgtttaatcattgcagggacgcctctctgatgatacactcacgtttcaagggtgtcagaccacgcagggacgcctgccttggtccttcacccttagcggcaagtcccgctttcctggggcaggggcaagtacccctcaaccccttctcctttacccttagcgcacataagaacttccaaacacctgaaccgcagcagccaggtgttcctccagaacctcctcccccaggagcttgctacaagtgccagaaatctgaccaccaggccaaggaatgcctgcagcccaggattcctcctaagccgtgtcccatctgtgcgggaccccactggaaactggactgttcaactcacctggcagccactcccagagcccctggaactctggcccaaggctctctgactgactccttctcggcttagcggctgaagactgatgctgcccgatcgcctcggaagccccgtagaccatcacggacgccgagcttccggtaactctcacagtggaaggtaagcccgtccccttcttaatcaatacggaggctacccgctccacattaccttcttttcaagggcctgtctcgtgcc

SEQ ID NO: 1400 - DNA, 1202 bp, Homo sapiens
  SIMILAR (540)..(1217): 441254mologous to Homo sapiens arylsulfatase A,accession number X52151,Smith-Waterman Score=436.
  misc_feature (1)...(1202): n = a,t,c or g
caactcccttgtccttnaaaacaggttttgtttttttaaatccatctggaaaggtggtgggtgcccacacaanttaagctgtcttcccctctggcaggcaggcttcctgggaactacacattgggtaatcttgtcccataaaatgccgattggacacttattgtagaaatgccgagggcactgtagattcagatagtccccatcacaggcataggtggtgtggttttacaggagtttggttaggtaacctccactgtgagacaaaccccagccacatctccagcacacaagaacttccaaatgcctgaaccgcagcggccaggcgttactccagaaccttctcccccaggagcttgctacaagtgccagaaatctgactaccaggccaaggaatgcctgcagcccaggattcctcctaagccgcgtcccatctgtgcgggaccccactggaaatcggactgtctaactcacctggcagccactcccagcgcccctggaattctggcccaaggctctctgactgactccttcccagatcttctcggcttaacggctgaagactgaaactgcccgattgccttggaagccccctacaagaccatcacggatgccgagcttcgggtaactctcacagtggaagactcagcccgcctgcacccaggtgaaataaacggccatgttgctcacacaaagcctgtttggtggtctcttcacacggacgcgtgtgaaatttggtgccgtgactcagatcaggggacctcccttgggagataaatcccctgtcctcctgctctttgctctagagagacaaaggagacacgttttatccatggacccaaaactccggtgctggtcacggactgggaaggcagccttcccttggtgtttaatcattgcagggacgcctctctgattatacacccacgtttcaagggtgtcagaccacgcagggacgcctgccttggtccttcacccttagcggcaagtcccgcttttctggggaaggggcaagagcttgctacaagtgccagaaatctgaccaccaaggcaaggaacgcctgcagcccaggattcctcttaagccgtatcccatctgtgcgggaccccactggaaatcggactgttcaactcacctggcagccactcccagagcccctggaactctggcccaaggctctctgactgactccttcttggcttag

SEQ ID NO: 1401 - DNA, 984 bp, Homo sapiens
  SIMILAR (68)..(451): 391254mologous to Homo sapiens Protein encoded by the endogenetic fragment of HERV-W,accession number B07702,Smith- Waterman Score=188.
cgcccattctgtgcttttgtggagggcaagaacccccccaccccttctccatgtctctactcttttctctgggcttgcctccttcactatgggcaagcttccaccttccattcctccttcttctcccttagcctgtgttctcaaaaacttaaaacctcttcaactcacacctgacctaaaatctaaatgacttattttcttctgcaatgccgcttgaccccaatacaaactcgacagtagttccaaatagccggaaaatggcactttcaatttttccatcctacaagatctaaataattcttgtcctaaaattgacaaatggtctgaggtgcctgatgtccaggcattcttttacacatcggtccctgtgcccagtctctgtgcccagtgcaactcatcccaaatcttccttctttccctcctgcctgttccctcagtcccaaccccaagcatcgctgagtctttctaatcttccttttctacaggcccatctgaactcttcccctcctccccaggcatgctccttgccaggccgagctaggtcccaattcttccatcagcctctgctcctccaccctataatctttttatcacctcccctcctcacacctggtctggcttaccgtttcgttccgtgactagccctccccctcctgcccagcaatttactcttaaaaaggtggctggagctaaaggcacagtcaaggttaatgctcctttttctttatccgaaatcagatagcatttaggctctttttcatcaaatataaaaatccagcccagttcatgacttgtttggcagcaaccctgagacactttacagccctagaccctaaaaggtcaaaaggcagtcttattctcaaaatacattttattacccaatctgctcccgacattaaataaaactccaaaaattaaattctggccctcaaccccacaacaggatttaattaacctcgccttcaaggtgtacaataatagaaa

SEQ ID NO: 1402 - DNA, 517 bp, Homo sapiens
  SIMILAR (517)..(407): 941254mologous to Homo sapiens low-Mr GTP-binding protein Rab31,accession number U59877,Smith-Waterman Score=188.
tttagcaaaaatgcaactacatcccctccatgtgcatttcatacactaaaggccattttgtggtggtgtggtgggttttcccagggttttctaaaatccttttcaggtacatttcctgccccgccccctgcaggtcttccaggatgcaaagccagtgtgctcactcttctcaaagtgaggtgccaggccaccgagcgtagggtccttcagcagtgcacaggatgtgggctctggcttcttcaagtaccgtggaccacggcccttgggtcaacagcaccggcggctggcttgcatggttggcttctcaactttgattgttccattgtttccattttcatgggggtccaagggtgggatctggcggcccgttcctgaccagcagtgtcccagatgaggaacttgtgaagtcatttccacaaagcacagttttggtcataaaagatgccccaatagtagggctgatgttgtggtcaaagtgatcctggacaaatcgacacacgatgcttgatttcccaac

SEQ ID NO: 1403 - DNA, 1845 bp, Homo sapiens
  SIMILAR (166)..(915): 751254mologous to Homo sapiens putative p150,accession number U93563,Smith-Waterman Score=912.
atgtgggaaagtttggaacttcctagagacttgttgaacggctttgcccaaaatgctgatagcaatatggacaataaagtccaggcggaggtggtcttagatggagatggggaacttgttggcaactggagcaaaggtcttccaggatgcaaagccagtgtgctcactcttctcaaagtgaggtgccaggccaccgagcgtagggtccttcagcagtgcacaggatgtgggctctggcttcttcaagtaccgtggaccacggcccttgggtcaacagcaccggcggctggcttgcatggttggcttctcaactttgattgttccattgtttccattttcatgggggtccaagggtgggatctggcggcctgcaacaaaaaggaggccaaggttctgctgcatgaagcccaattcatgggcttaggaagttcagtaatgctacagccctttgactatgatccgaatgaaaagagtaaacacaagtttatggtacagacaatttttgctccaccaaacacttcagatatggaagctgtgaggtgcccctcacagagcccagccaagctccacgggtggtcccacagagccagagcaagacgatcactcactccctctaaacactgcacttttattaacacggccacagctcgtattcttggcagccacaatacaccagtgctgaatattaactttattctcaaccaaactttaacccgttttactcctgctcccgctaaatctcagggccacacctcagacatctgcagttcgttttctgaacccaagagctgggccttttgtttgccagctctgtggagcacaacgggggggcgggataagtgtaggggccacggcacacacggtgggggctcacagacagaggccaagtacatctgtgatctcctcacaccacccaatgcatctgtaagctccctgccagtgagggcaccccccacccccaccacagattccaccagccaagagtgtccgcaccggcactggcttctctcgccgcaagaagtactgagcttccttcttttccctcttgattttgagagtctctacaccgccatggtaggaagtgagaaggaaacgggggaaggcacaccttctgtaggaaagcatgcttatgaaagagcccatgccgacggacctcctggcttgggagagggaatcaactctccccttccaacatgcactggcgtacgtgggctgacccaggacatccaagacactggccaggaatcagacaccctgagcacattagggagtgaagatgatgagaagactgctaagcctcagggtgacacctcagaggtcctgccagctgtaaagaactcaccacggactttccaagaggatggtgacattcccagactaccactgggagctgccaaaaactcagctcaaaaaccccagcgactagggcggtcgttgtgtgtgtggctagccaagtcacacagaggagacttagatggccccacattttattttttgaggaagggaggagccccagccgccccctttgcccctggagttcagcccacatggatctctcctttccagagcccctgctctcttgagctcagccctgcacagcctgatttctctcataactatgccctgagtgttcacttcactgttcccaaacagactttcgattctttgaagaatgatatggaacctagcaaagctgttccactgaatgcatctaagcaagatggacctatgccaaaaccacacagtgtttcacttaatgataccgaaacaaggaaactaatggaagagtgtaaaagacttcagggagaaatgatgaagctatcagaagaaaatcggcacctgaga

SEQ ID NO: 1404 - DNA, 1113 bp, Homo sapiens
  SIMILAR (1)..(624): 971254mologous to Escherichia coli K12 Mg2+ transport, system I,accession number AE000457,Smith-Waterman Score=1023.
atgtgggaaagtttggaacttcctagagacttgttgaacggctttgcccaaaatgctgatagcaatatggacaataaagtccaggcggaggtggtcttagatggagatggggaacttgttggcaactggagcaaaggtgactcttgttatgttttagcaaagagactggcagcattttgcccttgccctagagatttctggaattttcaacttgagagagatgatttagggtacctggcggaagaaatttctaagcagagaagcattcaagaggtgacttgggtgctgttaaaggcatttggttttataagggaagcagagcataaaagtttagaaaatttgcagtctggcaatgtgatagaaaagaaaatcccattttctgaggagaaatccaagctggctgcagaaatttgcataagtaatgtggagccaaatgttcacactcccacccagtatctcccaggtcttccaggatgcaaagccagtgtgctcactcttctcaaagtgaggtgccaggccaccgagcgtagggtccttcagcagtgcacaggatgtgggctctggcttcttcaagtaccgtggaccacggcccttgggtcaacagcaccggcggctggcttgcatggttggcttctcaactttgattgttccattgtttccattttcatgggggtccaagggtgggatctggcggcctgcaacaaaaaggaggccaaggttctgctgcatgaagcccaattcatgggcttaggaagttcagagacccatcctggtttaatgagcggctttcatggtaccgtgacttcaacagtaacacctgggataagtcacacacatgccaaccttaaacacagggagaaggaaatgcttccacgcagagaaagagaaaagccagatcataacaatgaggccggcacctttaaaaggagaagggagcctgcaccaggaaaccagaacgcaaaacaagaaagcaaacgccgaacgcaaaccccgatcttagggcctaaggtattcagaatttaccggaaggttcaaggcacttacacaaaggcatggttttggaaaatggccatggctttctgtaccaaggtgatcaccttggaactctgttga

SEQ ID NO: 1405 - DNA, 1101 bp, Homo sapiens
  SIMILAR (634)..(1446): 571254mologous to Homo sapiens ORF2 contains a reverse transcriptase domain.; ORF2,accession number M80341,Smith-Waterman Score=834.
atggaaccaattgctgggcatgagtacgtctctgatatcgactatacaaatgattatacaatgaaacactatctggcccacagtgtgtatggagttggatccttccagtgggttcgtggtctcgctgccttcgagaatgaagccgtggaccttcgcgtgtccctggggagacaagaggccttccatgcgaaggccctggacataggtgaagtacccattacccagatgtctcaccaaatcccaggactaaggatcctggctgtgggcaatctgcagggtggaagaacaatcctgtttcgcctaacatgtcttgtcacagttcccaaggcccccgctaaggacgcgtggaatggggaggacactggggttgggaaatcaagcatcgtgtgtcgatttgtccaggatcactttgaccacaacatcagccctactattggacaccacacgctctccctggtcaccccaaactccaccagccctcaccttctgaacatctggcaactaagcatctggcgatatcccactgggatgtctggtgtttatggctataagtttccctctgagcactgctctgaagttttggaatgttgtgcttttgtcttcattcatctcaaggcctgggttcctgtgaaaagtcaacggcccctgagggggctgctggagcagcaggacagcctagcagtggcctccacccctgcccacagccctgagatccagccgagggctgccatggacatactgaggaagagccggaaacttcagggccacacgagccacggccatggccacatcaccgagtgcggaagcaccgtggaggctgtggtaatgcaggtggtgtgcaccaccacaggatcaactttgacaaatgtcacccaggcccagggcttacgcaccacagggggacagtgtccgtgcttcagaagggatgtgcggaacaactgctttacagcaagatttacgatgtccttgggtagctgctatacccggtcagagaagtggggaaaagctcgttcatggatgaccaaagaggccttgttgaaacactatcgtaatttactagaaaagttccagtaccatattggcagtcgtgttaaagagtaa

SEQ ID NO: 1406 - DNA, 1285 bp, Homo sapiens
  SIMILAR (1)..(1224): 951254mologous to Homo sapiens putative p150,accession number U93572,Smith-Waterman Score=2009.
  misc_feature (1)...(1285): n = a,t,c or g
gagcgtggggcaaaggcgatagacgccggcggtgcgcgggcgcggcnggccccggaggatgctgctgagccccggcactgcctggctgcgagcacatgatggcgatacgggagctcaaagtgtgccttctcggggacactggggttgggaaatcaagcatcgtgtgtcgatttgtccaggatcactttgaccacaacatcagccctactattgggggcatcttttatgaccaaaactgtgccttgtggaaaatgacttcacaaagttcctcatctgggacactgctggtcaggaacggttttcattcattgggctcccattgtactattcgaggcttcagctggcagctgtttattcgtgttatggatatttaccaagcagggatttcatttttattaccttgaaagaaatgggtccaagcggctgaaagaacttggtccggaaaaacattgtaatggccatcgctggaaacaagtgcgacctctcagatatttagggaggttccccctgaagggatgctaaaggaatacggctgaatccataggtgccatcgtggttgagacaagtgcaaaaaatgcctattaatatcgaaagagctctttcaaggaaatcagccgcccagatccccacccttggacccccccatgaaaaatgggaaacaatgggaacaatcaaagttgagaagccaacccatgcaagccagtccgccggtgctgttgaccccaaggggccgtggtcccacgggtactttgaagaagccagagccccacatccctgtggcactgctgaaggaccctacgcttcggtgggcctgggcacctcactttgagtaagagtgaggcacactggctttgcatcctggaagacctgcagggggcggggcaggaaatgtacctgaaaaggattttagaaaaccctgggaaaacccaccacaccaccaccacaaaatggcctttagtgtatgaaattgcacatggaggggatgttagtttgcatttttgctaaaaaaaaaaaaaaaaacctttaaaaattgttggatgtgtacaaaagtcttactgccttattatgtgtatgggattctaaagtggcattccacttggatttcctgtgctacctatccaaattccaagtaactacttcaggggcattgcctttgttacctaaccacccttccctgaagggcaaatttagttcaggggggtagtttttacctacctttggaagaaaccctttatttattactttttggaggaaatcaaaaaaggggcaagggcccgcccctcaa

SEQ ID NO: 1407 - DNA, 149 bp, Homo sapiens
  SIMILAR (25)..(147): 261254mologous to Rattus sp. proteasome beta-type subunit RN3,accession number S82190,Smith-Waterman Score=63.
atgcagctgcaaacattttttgagacattcctgagagccagttcacctcaacaggcttttgacattatgaaggaagcaattggcaaactactgctagcggctgaagtattcagtgaaacatctactctgggaccaaagaccttccatag

SEQ ID NO: 1408 - DNA, 294 bp, Homo sapiens
  SIMILAR (45)..(7): 921254mologous to Homo sapiens Human secreted protein, SEQ ID NO: 4568,accession number G00487,Smith-Waterman Score=77.
atggctgaacttacaatcatggcagaaggcaaaggggaagcaaggcaccttcttcacagggcagcagaaaggagaagtgccaagcaaaagggggaagagccccttataaaaacatcagatctcgcaggactgagagtaagacatacttttatggaactgagctacctggagatgataggataccagactagtcaaggccaggtggcagcaccaaattatcagagtcaagatgaatgtaattcttgtaatgggcagcactgtgagaaatccctaacccatgcaaataaacaataa

SEQ ID NO: 1409 - DNA, 469 bp, Homo sapiens
  SIMILAR (228)..(467): 1001254mologous to Homo sapiens dJ776P7.1 (Novel protein),accession number AL121993,Smith-Waterman Score=422.
tttcgtgagcatttgcagctggtcactccagtctcctgggactttgactcgccgtactcggcgcgctcctgctgagggtcgccggagatgtcgctcggccgccttctaccaggagcctgatccgtgccgcccgccgcccggatgggaccaccagagtgctctaaagtctccagtgaatattgaattgctgaggattttgggaaaagacaaatcaaagttcccattccatggatcccttaggtgcaccttcccagtttgtggatgtggatacactaccaagctggggtgactcatgccaagatgaattaaattcctctgatactacagctgaaatatttcaggaagacactgttcgatcaccttttctttataataaggacgtcaatggaaaagtggttctttggaaaggagatgtggcattactgaactgtacagccattgtgaataccagcaatgaaagtctcacaga

SEQ ID NO: 1410 - DNA, 518 bp, Homo sapiens
  SIMILAR (85)..(240): 401254mologous to Escherichia coli O157:H7 replication protein,accession number AF074613,Smith-Waterman Score=71.
atgcaagagagaaaagctaattcccacttggtgaaagagcacttaagtctcagtgagcaaacaaggaggagtcagccttggtcacttccccctcaagcggccagagagcggaaacacaaagccaggccagtgtcactccagggattgcgggaacctagacaacgcaccatcctgggctcagcgtctacccacccctcacccgagagacggcgtccccgtacaacgcctcgtggaaagaacctaagcaacatgcgaggaagtggcgccaggctcgttcttcaagagaacactctggtggtcccatccgggcggcgggcggcacggatcaggctcctggtagaaggcggccgagcgacatctccggcgaccctcagcaggagcgcgccgagtacggcgagtcaaagtcccaggagactggagtgaccagctgcaaatgctctgggctgcgaaacaccggcttccgctcctggccagagctcaccaatcagcgcccggctttctccgtcatttcctcctag

SEQ ID NO: 1411 - DNA, 461 bp, Homo sapiens
  SIMILAR (2)..(364): 971254mologous to Homo sapiens phospholipase C-beta- 1b,accession number AJ278314,Smith-Waterman Score=617.
acactttagttgggagctgcgcgccgcgctcagttactggagagctggccgcgcgccgccgcctcccgcacgcttgcacgcttgccaccttcagcccccccgcgaacgcccaaggtgcacacatcttgaccaactcagcagcaaggtggattttctttgtgtttaaagaaaaaaaatgtccctgtgtctgtagagatgatttgcagttcagcccggctgaagctgaccgaatgagactatgggctgtgcctccgccaagcatgttgccactgttcaaaatgaagaggaagcccagaaagggaaaaactaccagaacggagatgtgtttggcgatgagtataggatcaaaccagtggaagaggtcaaatacatgaaaaatggggcagaagaagagcagaaaatagcagccaggaaccaagaaaacttggaaaaaagtgccagctcaaatgtaagacttaaaa

SEQ ID NO: 1412 - DNA, 489 bp, Homo sapiens
  SIMILAR (1)..(93): 961254mologous to Homo sapiens bG115G20.2 (novel protein),accession number AL078645,Smith-Waterman Score=160.
atgggctgtgcctccgccaagcatgttgccactgttcaaaatgaagaggaagcccagaaagggaaaaactaccagaacggaaatgtgtttggcgctattatggccctcgactatgtggttactcgacacagcgacacacttgcgtcggatgcacccctgctgacgtgccggctccgacttgggaaccagggctcgcagctctttcctgcacttcctacatcctatccttactgtgcttttatgtgtcttctttccaactataccatgagtgacaaaagcaggggctctctcttattcactgtggtagataatctacccccaactcctagcacagaagtgcattatggtactagtcaagaagaacaggggaagtgtttgagatttggagatttggcagtggtcggcttggagagtggacggtgtacctgcaaagggtgtgtagaaggatgtggtgcaaagtcggcagcccacgagacacattcggcatga

SEQ ID NO: 1413 - DNA, 957 bp, Homo sapiens
  SIMILAR (413)..(739): 561254mologous to Homo sapiens bG115G20.2 (novel protein),accession number AL078645,Smith-Waterman Score=253.
cggccgctgcttctttcaactttatgttgggagctgcgcgccgcgctcagttactggagagctggccgcgcgccgccgcctcccgcacgcttgcacgcgggcccggcttcggggttttgggttcttactccaagcggcggggaggagggggagccccggacacactgtggggaggaggaggaagaagaggaggagggaggaagaaaaaagacgaggaggacaggggcggggggcgggaggcttgccaccttcagcccccccgcgaacgcccaaggtgcacacatctttgaccaactcagcagcaaggtggattttctttgtgtttaaagaaaaaaaatgtcccctgtgtctgtagagatgattttgcagttcagcccggcttgaagctggaccgaatgaagactatgggctgtgcttcccgccaagcatgttgccactacttcaaaatgaagaggaagcccagaaagggaaaaacttaccagaacggagatgtgtttggcgatgagtataggatcaaaccagtggaagaggtccaaatacatgaaaaatggggcagaagaagagcagaaaataggcagccaggggaccaaggaaaacttggaaaaaagtgcccagctcaaatgtaagacttaaaactaataaagaggttccgggattagttcatcaacccagagcaaacatgcacatctctgaaagccaacaagaattcttcagaatgctggatgaaaaaattgaaaagggtcgggattactgttcggaagaagaggatatcacatagcaccaattttaccactcaaaccaggagctactactgtgtaaataggttacaccccagttgaaatctttgcaaaggtcggttctattcagcgaacagcactatagcaaaagaagatcgttccatattgtacgccccattaaattacagtgtttcttaatgaacttgcaaaggaatattgc

SEQ ID NO: 1414 - DNA, 459 bp, Homo sapiens
  SIMILAR (148)..(279): 481254mologous to Human T-cell lymphotropic virus type 1 Gag,accession number S74562,Smith-Waterman Score=143.
cgggaatttttaggccaccatgctatctactttgtggattgtagtagtaaatgaacgaaggcggacttcctcagaattggtaataaactgtggtcccgactcttcccatttttcaggtacaaccaaatctttgtctgtataaatcagcagatcaaatgaacaagaaacttccaacagtggcagaaatgtcaccgtagctgtgatctgtctgatcactgaacggatttcatcctggatagctttctgagacttttctctgggtgcaagaagaactcggccacgatttcgcgtccgcgcagggtgattccctgctcccgggagagctgcagcgccatggccagggacacaaacaaaagcacgcgcttccactccgcggacagcaaccacagcggctccaacagcacttccccgccaagcgtttcaaaagtaacgacgcagcacgtcgtcaggtcctttgcg

SEQ ID NO: 1415 - DNA, 320 bp, Homo sapiens
  SIMILAR (150)..(317): 1001254mologous to Homo sapiens MAD2,accession number AJ000186,Smith-Waterman Score=290.
cattcggcatcaacagcattttatatcagcgtggcatatatccatctgaaacctttactcgagtgcagaaatacggactcaccttgcttgtaactactgatcttgagctcataaaatacctaaataatgtggtggaacaactgaaaggttcatttgatctgctgatttatacagacaaagatttggttgtacctgaaaaatgggaagagtcgggaccacagtttattaccaattctgaggaagtccgccttcgttcatttactactacaatccacaaagtaaatagcatggtggcctacaaaattcctgtcaatgactga

SEQ ID NO: 1416 - DNA, 426 bp, Homo sapiens
  SIMILAR (1)..(312): 901254mologous to Homo sapiens MAD2,accession number AJ000186,Smith-Waterman Score=457.
atggcgctgcagctctcccgggagcagggaatcaccctgcgtgggagtgccgaaatcgtggacgagttcttctcattcggcatcaacagcattttatatcagcgtggcatttatccatctgaaatctttactcgagtgcagaaatacggactcaccttgcttgtaactactgatcttgagctcataaaatacctaaataatgtggtggaacaactaaaagattggttatacaagtgttcagttcagaaactggttgtagttatctcaaatattgaaagtgacaaagatttggttgtacctgaaaaatgggaagagtcgggaccacagtttattaccaattctgaggaagtctgcctttgttcatttactactacaatccacaaagtaaatagcatggtggcctacaaaattcctgtcaatgactga

SEQ ID NO: 1417 - DNA, 1455 bp, Homo sapiens
  SIMILAR (280)..(522): 761254mologous to Bos taurus ornithine decarboxylase,accession number M92441,Smith-Waterman Score=317.
  misc_feature (1)...(1455): n = a,t,c or g
ctgacgacgtgctgcgtcgttacttttgaaacgcttggcgggggaagtgctgttggagccgctgtggttgctgtccgcggagtggaagcgcgtgcttttgtttgtggtccctggccatggcggctgcagctctcccgggagcagggaatcaccctgcgcgggagccngcataatcgtggccgagttcttctcattcggcatcaacagcattttatatcagcgtggcatatatccatctgaaacctttactcgagtgcagaaatacggactcaccttgcttgtaactactgatcttgagctcataaaatacctaaataatgtgggtggaccaactgaaagatttggttatacaaggtgttccagttcagaaactgggttgtagttattcttcaaatatttgaaagtgggtgaggtcctgggaaagatgggcagtttgatatttgagtgtgacaagactgcaaaagatgacagtgcacccagagaaaagtctcagaaagctatccagggatgaaatccgttcagtgatcagacagatcacagctacggtgacatttctgccactgttgggaagtttcttgttcatttgatctgctgatttatacaggcaaagatttggttgtacctgaaaaatgggaagagtcgggaccacagtttattaccaattctgaggaagtccgccttcgttcatttactactacaatccacaaagtaaatagcatggtggcctacaaaattcctgtcaatgactgaggatgacatgaggaaaataatgtaattgtaattttgaaatgtggttttcctgaaatcaggtcatctatagttgatatgttttatttcattggttaatttttacatggagaaaaccaaaatgatacttactgaactgtgtgtaattgttccttttatttttttggtacctatttgacttaccatggagtttacatcatgaatttattgcacattgttcaaaaggaaccaggaggtttttttgtcaacattgtgatgtatattcctttgaagatagtaactgtagatggaaaaacttgtgctataaagctagatgctttcctaaatcagatgttttggtcaagtagtttgacccaagtataggtagggagatatttaagtataaaatacaacaaaggaagtcctaaatattcagaatctttgttaaggtccctgaaagtaactcataatcctataaacaatgaaatattgctgtatagctccttttgaccttcatttcatgtatagttttcccctattgaatcagtttccaattatttgactttaatttatgtaacttgaacctatgaagcaatggatatttgtactgtttaaatgttctgtgatacagaactcttaaaaatgttttttcatgtgttttataaaatcaagttttaagtgaaagtgaggaaataaagttaagtttgttttaaaaaaaaaaaaaaaaaa

SEQ ID NO: 1418 - DNA, 330 bp, Homo sapiens
atcttctgatgagaacttcaggatgcttccacttatggaggaaggtaaaggggaaccagtatgtgcagagatcacatggtaagagtggaagcaagagaggggtggggaggtgaaaggctctttttaacaaccagctctcagctctttgggaaccaataaagtgagaactcacttaccacctcaccctaacctccagggagggcattaatctattaatgaaggatccaccctcccatgacccaaacacttctcattaactccccctaccaatgttagggatcagatttcaacatgacattctgagggtcaaacatctgagctatagcaagg

SEQ ID NO: 1419 - DNA, 351 bp, Homo sapiens
atggagccagcatcatcttctgatgagaacttcaggatgcttccacttatggaggaaggtaaaggggaaccagtatgtgcagagatcacatgctcctttagacaccgtctggtggattccttggggtcaggcaggaatgtccttgggcacccagtgaactcccagggcctttctgctgcttcttctacccctgtattcactcagctctctaaattgactcagctccagattattgcccccaggtgctattttgctgtagggaatctcagaaataaaggaaccaacagaaaggataatgtgaggacacagggatctgcaggtcaaggagagaagaggcctcaagagaaatga

SEQ ID NO: 1420 - DNA, 250 bp, Homo sapiens
  SIMILAR (24)..(197): 361254mologous to Mus musculus Cdx-2 homeobox protein,accession number U00454,Smith-Waterman Score=70.
atggctttagcagcacctcaatttgggatgtctattttccggaacagcgggaataagtgtctgctgctctggtctctcactgccttcgagccccatcacctgctcgggctccccctctgtgtgtccccagttctggacacttattcagcagacctgtcatgcgacatctacatccgcatcaagatgctccaaactgcccagcagcaccaagtcgggctggccccgacagaacgaaaagaagccctccgag

SEQ ID NO: 1421 - DNA, 2985 bp, Homo sapiens
  SIMILAR (2152)..(2895): 771254mologous to Mus musculus Pro-Pol-dUTPase polyprotein,accession number Y12713,Smith-Waterman Score=1020.
atgctcctggtcatgtattgggcccctgccccgccccctgtgcacatgtcccagttcctcactactggtcctaagtgcctagaactgagtctggaccatgggagggactcacaggagatcacagcatctggccttttgtggctacaacatgctgcctgtggcctggctcagtggaaccaaaaaccacatcctccatttctaactttattgcaggcagaggagccctttgagagagccaggtcatgcgacatctacatccgcatcaagatgctccaaactgcccagcagcaccaagtcgggctggccccgacagaacgaaaagaagccctccgaggaagtcagagtccccagaagtcagccagtgggcagaggcctgggtctctggaccgggagctgctgatgctgatcaaaatcagcaagtgcttaagagtacctagtgggcctagctcagtgctggggacagaaagcacaggccctgtccctggggagcttgtcctttgtcagcaggatgcaggtgctacacaggaaggtgtctgttatgggagggagttgatgatctgtagatgtgactccttcccgagactcatggagccctggggggtgaagggaaccccagaggttttccggacagacttgatcacagccatgaagatcccggactcataccagctcagcccggatgactactacatcctggcagacccatggcgacaggaatgggagaaaggtgtgcaggtgcctgccggggcagaggccatcccagagcccgtggtgaggatcctcccaccactggaaggcccccctgcccaggcatccccgagcagcaccatgcttggtgagggctcccagcctgattggccagggggcagccgctatgacttggacgagattgatgcctactggctggagctcatcaactcggagcttaaggagatggagaggccggagctggacgagctgacattagagcgtgtgctggaggagctggagaccctgtgccaccagaatatggccagggccattgagacgcaggaggggctgggcatcgagtacgacgaggatgttgtctgcgacgtgtgtcgctctcctgagggcgaggatggcaacgagatggtcttctgtgacaagtgcaacgtctgtgtgcatcaggcatgctacgggatcctcaaggtgcccacgggcagctggctgtgccggacgtgtgccctgggtgtccagccaaagtgcctgctctgccccaagcgaggaggagccttgaagcccactagaagtgggaccaagtgggtgcatgtcagctgtgccctatggattcctgaggtcagcatcggctgcccagagaagatggagcccatcaccaagatctcgcatatcccagccagccgctgggctctgtcctgcagcctctgcaaggaatgcacaggcacctgcatccagtgttccatgccttcctgcgtcacagcgttccatgtcacatgcgcctttgaccacggcctggaaatgcggactatattagcagacaacgatgaggtcaagttcaagtcattctgccaggagcacagtgacgggggcccacgtaatgagcccacatctgagcccacggaacccagccaggctggcgaggacctggaaaaggtgaccctgcgcaagcagcggctgcagcagctagaggaggacttctacgagctggtggagccggctgaggtggctgagcggctggacctggctgaggcactggtcgacttcatctaccagtactggaagctgaagaggaaagccaatgccaaccagccgctgctgacccccaagaccgacgaggtggacaacctggcccagcaggagcaggacgtcctctaccgccgcctgaagctcttcacccatctgcggcaggacctagagaggggctcccccaacccattagtgcccttgcctcacccaagcccagtcaccacctccagctgctcccaggttagaaatctgtgctacatggtgacaaggcgcgagagaacgaaacacgccatctgcaaactccaggagcagatattccacctgcagatgaaacttattgaacaggatctgtgtcgagagcggtctgggaggagagcaaagggcaagaagagtgactcgaagaggaagggctgcgagggctccaagggcagcactgagaagaaagagaaagtgaaggcggggcctgactcagtcctggggcagctggcaggcctgtccacctcattccccatcgatggcaccttcttcaacagctggctggcacagtcggtgcagatcacagcagagaacatggccatgagcgagtggccactgaacaatgggcaccgcgaggaccctgctccagggctgctgtcagaggaactgctgcaggacgaggagacactgctcagcttcatgcgggacccctcgctgcgacctggtgaccctgctaggaaggcccgaggccgcacccgcctgcctgccaagaagaaaccaccaccaccaccaccgcaggacgggcctggttcacggacgactccagacaaagcccccaagaagacctggggccaggatgcaggcagtggcaaggggggtcaagggccacctaccaggaagccaccacgtcggacatcttctcacttgccgtccagccctgcagccggggactgtcccatcctagccacccctgaaagccccccgccactggcccctgagaccccggacgaggcagcctcagtagctgctgactcagatgtccaagtgcctggccctgcagcaagccctaagcctttgggccggctccggccaccccgcgagagcaagctccagcagctcagctgtgaatgggaagagctcagcgtcctcaactgtggaatcagcatgggatgctggcaggaaatcagccctggggctgagggggtatctgggtggccagcccacctggccatgaacaccattgtggcggctgactcatctgtcaccaggacactctccacgtga

SEQ ID NO: 1422 - DNA, 292 bp, Homo sapiens
  misc_feature (1)...(292): n = a,t,c or g
atggtggtttcaaaaggtgactggaagaaagcggaaggaatgcttgcctcatcttgcagacatcaggtgcattcctgagaagctacaggtgcacaaccttagtcaggctctggggatacagaagtaacaagaagaccagacccttgttccaatggaggagacatcctgtctcgcgctcttgcccttgctggagtgcagnggtgtgatctcggctcgctgcaacctccgcctcccgagttcaggcgattcttctgcctcagcttcccaggtggctgggattgcaagcgtgtgc

SEQ ID NO: 1423 - DNA, 996 bp, Homo sapiens
  SIMILAR (399)..(584): 331254mologous to Streptococcus pyogenes M68 protein,accession number AF025948,Smith-Waterman Score=73.
  misc_feature (1)...(996): n = a,t,c or g
aaatagcaccccagttttcctctgggaaaatccttctcccactctctgttcaaaagattcaggtgctgtcagcttcatcctctgattcagtttccaagtcgtcctttgtatttgatgcccttaacacacgtatatgcatgtgtgcatccacggacatatgcacattatttggacgtgtaattttggagaacaaaattaaacttcacagaaccaccaacagaccaaaaacacatttttcatactttattgcttcctcacctcttcggattaggagaacaggtggatatttcagcgtgaatctgaatgaagaaattttgagaagaggccttggcaaaactgttcttgttaaagggcttaaatatgattctaaaatctactggacagttcacagaaacttacttaaagctgaattaacagccttaaaaaaaggagaaggaatatggaaggaagactctgaaaaagaaagttacttagaaaaattcaaagattcctggagagaaatatggaaaaaggacagttttttaaaaacaacaggatcagatttcagcttgaaaaaagaaagttattatgaaaaacttaaaaggacttatgaaatatggaaagacaacatgaacaactgctccttaatactgaagttcagagaacttataagtcgcataaactttcgtagaaaagggtgaaacggtcaagaaatctagaggtaaccttctccaaagagtgaaatatgtaaatatatggacgtttttcattgaatcaaaatggaagttttgccaaatgatcaaagggttagtccaatggtatttaaatattaaaaagagatgattattataagcataatgtcagaattaatttaaacaaattataattaatgtaatatgattttaggaaagatgaaacactttatgagaagttaccaggctgaatgatttacatatatagggctaatgggtgaagagaaaagttaactcctccaccctttggntggtttaagttatt

SEQ ID NO: 1424 - DNA, 281 bp, Homo sapiens
  SIMILAR (185)..(15): 371254mologous to Mycobacterium avium subsp. paratuberculosis fibronectin-attachment protein FAP-P,accession number AY007557,Smith-Waterman Score=84.
gggttctaggtgtgagtcaccgagttgagcccctaaacacatgtttttctttttagagacagggtctcactccagcctgggtgacagagcaagaccctgtctcaaaaaaaaaaaagctgggcgtggtggctcatgcctgtaatcccagcactttgggaggccgaggcgggcggatcacctaattagccgggcatggtggcacatgcctgtaatcccagctactcgggaggctgaggcaggagaattgcttgaacctgggaggcggaggttgcagtgagctg

SEQ ID NO: 1425 - DNA, 341 bp, Homo sapiens
cgtttggttttgtttttcttctttgtttgtttttgagatggagtcttgctctgtctcccagactacagtgcagtggcatgatctcagctcactacaacctccgcctcccaggttcaagcgattctcctgcctcagcctcccgagtagctggtattacaggcacaggccagcacgccaggctaatttttgtatttttagtacagatggggttttgccatgttggccaggctggtttcaaactcctgacctcaggtcatccacccacctcagccttccaaggtgctgggatgacaggtgtgagcccccgtgcccagccaagacaggagaagttctaatctttg

SEQ ID NO: 1426 - DNA, 505 bp, Homo sapiens
  SIMILAR (24)..(140): 891254mologous to Homo sapiens neuronal thread protein AD7c- NTP,accession number AF010144,Smith-Waterman Score=170.
ttttttttttaggtggagttttgctcttgttgctcaggctggagtgcaatggcaccatctcagctcaccgcaacctccgcctcccaggttcaagcgattctcctgcctcagtctcccgagtagctgggattacaggcatgcagttagagtttttaaggtgatgaaaaagttttggaaatagatagtggtgatggatgcaaaacactgtgaatataattgatgtcactgaattgtacactaaaaaaaatggcaggtttatgtcatatatattttaccacaattttttttttttccttgagacagaatctcgctgttgcccaggctggaatgcagtgggcgcaatcttggctcattgtgacctctgcctcctgggttccagcgattttcccgctcagcctcccgagtagttgggaccacaggggcatgccaccacacttggctaatttttaatttttttttggtagagacgtgggctttaccatgttagccaggctggtctcgaact

SEQ ID NO: 1427 - DNA, 469 bp, Homo sapiens
  SIMILAR (70)..(456): 291254mologous to Homo sapiens Human membrane transport protein, MTRP-7,accession number Y71062,Smith-Waterman Score=135.
cccacgcgtccgcccacgcgtccgggagtcctggtttttgcttcatttccttcaccaccattatccaaagattgtattgagcagaattttttagacaacttccctagcagtgacaccctgtccttcattgcaaggatattcctgctgttccagatgatgactgtatacccactcttaggctacctggctcgtgtccagcttttgggccatatcttcggtgacatttatcctagcattttccatgtgctgattcttaatctaattattgtgggagctggagtgatcatggcctgtttctacccaaacataggagggatcataagatattcaggagcagcatgtggactggcctttgtattcatatacccatctctcatctatataatttccctccaccaagaagagcgtctgacatggcctaaattaatcttccacgttttcatcatcattttgggcgtggctaacctgg

SEQ ID NO: 1428 - DNA, 1023 bp, Homo sapiens
  SIMILAR (155)..(12): 511254mologous to Homo sapiens PRO1900,accession number AF118081,Smith-Waterman Score=95.
atggtgcgcatgcctgtaatcccagctactcgggaggctgaggcgggagaattgctgaacctgggaggcggaggttgcggtaaatgggcagtaagatggaaaaaatggagtggcagacagcaggatccaggtggcagcatggcagccccagacaacttctggctggggtctagtcccagtaaaaagtcaggacccaggctaaaaaccaggaggcagacaggcatgaatacagggaagctgcagcttagtgtgcacctggagccttgggccagccccaccatctggggaccagctaatgaaggtgtttcaaggctacctctggtgtctcaaacgaccccctttacaggcccattgtcactgccaccaccccgatactgggtacatgtggtgtaccaatatggagatgaatactctgaaggtcatgcatttgttgcccaaaattttttgacaacttccctagcagtgacaccctgtccttcattgcaaggatattccgctgttccagatgatgactgtatacccactcttaggctacctggctcgttccagcttttgggccatatcttcggtgacatttatcctagccgaacacctagtactacttcctccggtgccttacgccgaaggctcctgccgaccaggcgcctccagattggccgcttgcttaaagtttttcgtgtcttttctggactttgtcctccggtattttggggaattggcatacaggtcgggggagtgtttcgcccatgggtttgcactccttgtaaacgcactacaagcgcccgaaatcttgccaacattcgcgccgctcgtacgcgcgttcggacctccgaacgtctgcaagtaccgttttcttggccccatacacacagggagaatacaaaagacaaaaatttgcatagatgccgtttcttccaaggtcgcgtcacttcggtactggtagtaaccatcgtcgcatggagtgttggtaacaatgtggtatcaattgacggaaccacgtaccgtacaatatttatcatttga

SEQ ID NO: 1429 - DNA, 3143 bp, Homo sapiens
  SIMILAR (479)..(3370): 561254mologous to Mus musculus mSin3A,accession number U22394,Smith-Waterman Score=2768.
gtctttatttcagtcccggatccgcgggcgcaggcccagctcaggcccccagggatggacgtcgtggaccctgacattttcaatagagacccccgggaccactatgacctgctacagcggctgggtggcggcacgtatggggaagtctttaaggctcgagacaaggtgtcaggggacctggtggcactgaagatggtgaagatggagcctgatgatgatgtctccacccttcagaaggaaatcctcatattgaaaacttgccggcacgccaacatcgtggcctaccatgggagttatctctggttgcagaaactctggatctgcatggaattctgtggggctggttctctccaggacatctaccaagtgacaggctccctgtcagagctccagattagctatgtctgccgggaagtgctccagggactggcctatttgcactcacagaagaagatacacagggacatcaagggagctaacatcctcatcaatgatgctggggaggtcagattggctgactttggcatctcggcccagattggggctacactggccagacgcctctctttcattgggacaccctactggatggctccggaagtggcagctgtggccctgaagggaggatacaatgagctgtgtgacatctggtccctgggcatcacggccatcgaactggccgagctacagccaccgctctttgatgtgcaccctctcagagttctcttcctcatgaccaagagtggctaccagcctccccgactgaaggaaaaaggcaaatggtcggctgccttccacaacttcatcaaagtcactctgactaagagtcccaagaaacgacccagcgccaccaagatgctcagtcatcaactggtatcccagcctgggctgaatcgaggcctgatcctggatcttcttgacaaactgaagaatcccgggaaaggaccctccattggggacattgaggatgaggagcccgagctaccccctgctatccctcggcggatcagatccacccaccgctccagctctctggggatcccagatgcagactgctgtcggcggcacatggagttcaggaagctccgaggaatggagaccagacccccagccaacaccgctcgcctacagcctcctcgagacctcaggagcagcagccccaggaagcaactgtcagagtcgtctgacgatgactatgacgacgtggacatccccacccctgcagaggacacacctcctccacttccccccaagcccaagttccgttctccatcagacgagggtcctgggagcatgggggatgatgggcagctgagcccgggggtgctggtccggtgtgccagtgggcccccaccaaacagcccccgtcctgggcctcccccatccaccagcagcccccacctcaccgcccattcagaaccctcactctggaacccaccctcccgggagcttgacaagcccccacttctgccccccaagaaggaaaagatgaagagaaagggatgtgcccttctcgtaaagttgttcaatggctgccccctccggatccacagcacggccgcctggacacatccctccaccaaggaccagcacctgctcctgggggcagaggaaggcatcttcatcctgaaccggaatgaccaggaggccacgctggaaatgctctttcctagccggactacgtgggtgtactccatcaacaacgttctcatgtctctctcaggaaagaccccccacctgtattctcatagcatccttggcctgctggaacggaaagagaccagagcaggaaaccccatcgctcacattagcccccaccgcctactggcaaggaagaacatggtttccaccaagatccaggacaccaaaggctgccgggcgtgctgtgtggcggagggtgcgagctctgggggcccgttcctgtgcggtgcattggagacgtccgttgtcctgcttcagtggtaccagcccatgaacaaattcctgcttgtccggcaggtgctgttcccactgccgacgcctctgtccgtgttcgcgctgctgaccgggccaggctctgagctgcccgctgtgtgcatcggcgtgagccccgggcggccggggaagtcggtgctcttccacacggtgcgctttggcgcgctctcttgctggctgggcgagatgagcaccgagcacaggggacccgtgcaggtgacccaggtagaggaagatatggtgatggtgttgatggatggctctgtgaagctggtgaccccggaggggtccccagtccggggacttcgcacacctgagatccccatgaccgaagcggtggaggccgtggctatggttggaggtcagcttcaggccttctggaagcatggagtgcaggtgtgggctctaggctcggatcagctgctacaggagctgagagaccctaccctcactttccgtctgcttggctcccccaggctggatggagtgcaatcgggtgtgacctcggcttactgcaacctctgcctcccaggttcaagcaattctcctgcctcagcctcccgagtagctgggattacaggcatgcgcaccactaacgtgcccgggcaatttttttattcccagtaaagacggggtttctccatgttggtcatgctgatctcaaactcccaacctcaggtgataacgcacgccttggcctcccaaaagtgctgggattacaggcttgagctgagctaccgcgcccggctttttttttttttttttttttttttgagacggagttttgcttttgttgccgaggctggagtgcaatggcgcaattccggctcaccgcaacctccgcctcccaggttcaagcaattctcctgcctcagcctcccgagtagctgggattgcaggcatgcgccaccatgcctggctaattttttttctgtttttagtagagacggggtttctccacgttggtcaggctggtctcgaactcctgacctcaagtgatccgcccacctcggcctcccaaggtgctgggattacaggcgtgagccaccacgcccagcaatttattcatatatgtaaactatctgaaactcttgtagcaataaagcaggatacttattaaatatcctgccacattacacaggttcaggcttcaagatccagacgtcgac

SEQ ID NO: 1430 - DNA, 1707 bp, Homo sapiens
  SIMILAR (163)..(1932): 951254mologous to Homo sapiens putative p150,accession number U93563,Smith-Waterman Score=2945.
atgatgcttactgaagttgcttggactacccggcaaattgcccaggggggcacagtcccactgctccctgccaccaggacacatcagcacctgctccagggaatcacggtgccccatgaaaagtggagcaaactcttctcacccactctccccccgactagtgaccctaaggattgggatgagaaagagaaagctttggaagagcctaatcccaggaactggctctatgcctttagtctccatctagttactaaaatccagcttctgaaattcacacccatggatggagttcttccagcctacaagcctcgcaagaccatagggtctttagattttgaaaaacatccctgtcttaacaacgcagtaaggctgtacgtcaaacttcccccgtgtgtgatgtctttacccaagcacacaagggccatggacgtcacgcgaaaagcgcgccactcagaaaccccaacgctacacagggcaatcagcgcgctcattcccgattgtagtatcatgtccatggccaacgagcctctggacgcccgaggcatagttgctcgcaccgcctacgtcgactctagaggatccccctctaaaaaggacaaagagatgagagaagaacaaggtcccacaacagaggcccaggagggactaggactcctgggctcatgtaaccacagagctcacagctgctccagagtagatcggagtatacaggcatgcggtcagccatctccaagcagaagagcgcaacagctgaaaccctcggaatcctccccgaacagaaacaaccaccgctgccagctgcgcgctcgggggaaaagacgttgcgcccccgccgactgccggtttcccgggcgcgagcccggatccaggtggtcagtcccggtacgcaaccacggcgagaacccggccctgctaagggagaagggaagccgtttcccgcgggcttcatacagacacggtgctaagacagcccgagtcgcggaccagtccaacaggcaggcagatcagtgggcagcccgcgtgcgcgaggaccccgatggcggcgcgggtccctgtctgaaaagagatatacttccacttatggctgtaagctgcgctgctaggggcattgcagcgaaagaggatctgcactcggtatatcttgtacgtgtgacacgcttaatagaagactgcacggcggcacgcctagatcagtgtcgacttgattacatcaactgcatcgacgtggaggtaacttcgtttgctcagacatgcactgatttaacacgcattcgatgtagtctatcacgaaggtgcgattatgatgggatgagagtgctacatgtgatcgatattatctcttcgatgtgtgctctggagagagctgcgcagtcactcgctgttgagatagctagtgtggattgcatctgtacccaaactatccaccctcttgctagagacaatgaagggggtgagccggagaaagcggaccggtattccacaacagagccgacacaccgacacaacaaaatcgccatatgcattactcaaacaactaacaagtggctaacagacgaaatctatctctacacggacaacataagtaagagcgagcctcgaatcggacgcgacgccgacaaagacttctatatcgcggtcgatgatgttaatctgctaacatcacaaacacgacacacacatagcaatcggatcttagcgtctgattag

SEQ ID NO: 1431 - DNA, 2489 bp, Homo sapiens
  SIMILAR (489)..(653): 671254mologous to Volvox carteri f. nagariensis hydroxyproline-rich glycoprotein DZ-HRGP,accession number AJ242540,Smith-Waterman Score=219.
atggacgacttcgatgattgtgtgacggatgaggagacagtaggcatggctgctaaattcaccactcatgcacccccagaagaatttaatgaagcattcaatgatgttcggctactactttaataatgacaatctcctcagggaaggggcagcacatgcatttgcccagtataacatggatcagttccacgctgtgaaagatagaaggatatgaagatcaggtcttaattacacagcacagtgacctgggttaatagcagatttttagatccaagaaacaaaatttccttttaaatttgaccacttacggaaagaagcaagtgacccccagccagaagaagcagatggaggtctgaagtcttggagagaatcctgtgacagtgctttaagagcctatgtgaaagaccattattccaacgggtttctgtactgtttatgctaaaactatcgatgggcaacagactattattgcatgtattgaaagccaccaggtttcagccttaaaaacttctggaatggtccgggtgagatcagagtggaaggtcccccatcacaccaccttcagcccaaggtggttggcgtgctttaagattcaggtttcactattatgaagatggcaatgttcagttggttagtcataaagatgtacaggattcactaactgtttcgaatgaagcccaaactgccaaggagtttattaaaatcatagagaatgcagaaaatgagtatcagacagcaattagtgaaaactatcaaacaatgtcagataccacattcaagggccttgcgccggcagcttccagttacccgcaccaaaatcgactggaacaagatactcagctacaagattggcaaagaaatgcagaatgcttaaaggctgaatgtaggattcttcagtatgtggaaagacaaggattcaacgtgtggtcatatgataaataagtgatttataaacaagagtgatattttgctagggctttcaaagttaaccggttttctagcctcatggaatactgttgaacctatagcgttgtcttgattcttttgtgttctctgccttgtaattttctgttactgctatatctacgtgtaaatctttttttctttttttttttttttttttttcttttttggttaattctgccacatttaatgttggtgagagagtgatctatcctaatgacattttactgtttaaaaaagtttcctagccatgaagccctgctactgatttagacaaggtattatggtcattactttgtacccctatccttccaagcacttctggtacttcagtcgtttttactgatccaccaacacctaaagaggctatgctaccagtctctagctaaatggaaaacacattcatccttctccctctgactgctttgatcatcatttattgcatcgtcatatcatatttatcgcatctcataactcaaattttttaagagttggatggggactttccaggtcctttttggagggcaaaggaagtgccagcttctctggggaacttgtttttaaatccaaagacttgaaccacattccctggcacatgaacatgtttgcttttatcccttctctcattgtctccttcccattctttagtaccattggaagttataaaacatctggcattttttaggaaggcattttacccatttattttttttaaaacattcaaggaactgctgacgtactgtgggatgtaggagtataaaaacttgaaaaatgcaggatgttgaagggaataatagggtatcttgtgcttttaatacttttatgggcagggattgtactattaaggcaaatggaatttaaacagctatgttaaatccataaagggaaaacttaaaaatggaacccaaagtggaaaggggttaacttccaggcagtatctttctatggtaaccctgttatttaagggaaatactaagtgatttcttctaaataggatgtaaaacttctttccaaattactcttcctcagtcctgccctgccaaggaactccaaggtgtaaactgtgattaaaataacctttccccaggtatattcggcaggtaatgtgtgtaatctcagaatacacaggtgacatagatatgatatggaccactgggtaatggtggatttcatttacaattggtttacacttctatgacccaggccttaaggggaaggtcagttttttaaaaaaacccaagtagtgtcttccctaccctatctcccagatacatgtcaaaaaaagaaaggtgtttgtgcttccgttttgtttctgcctcagtaatatagtcaagcaagtttgttcccaggtgacccattgagctgtgtatgcatttttgtttatttcaataaaatatatttggtataatttggccttcatactatccatccataccacactatcttctgtatcaggtagtctaatagaaataaaatctgttttgttctaataaaaaaaaagaagggcgccccgtttaaagaaccca

SEQ ID NO: 1432 - DNA, 467 bp, Homo sapiens
  SIMILAR (261)..(52): 361254mologous to Mus musculus cell proliferation related protein CAP,accession number AF273217,Smith-Waterman Score=98.
  misc_feature (1)...(467): n = a,t,c or g
aactcccttannnagtgcggtggaattcggaactcacagcggaacctacaattgtggcccaactctgtaaggagctgcgggctgacggcctgggggctggagatgtggctgctgtgctgggcccactggggctgcaggaagtagctagttttgtgactaagcggagtgcctggaagctggtgctcttgggagctgatgaagaggagccacagctcagggtggacttggatacagccgactttggctacgctgtgggtgaggtgtgcctgcacaggagacagcaccagccaagctgattgtgtatctacagcgtttccggcctcaagactatcatcgcctgctagaagtgaacagctccagagagaggccacaggagactgaagatcctgaccactgcctgggctaggggtgtcactttctagaaagggaagggaactctgggtctaacggagtccactcctgggccn

SEQ ID NO: 1433 - DNA, 349 bp, Homo sapiens
  SIMILAR (174)..(106): 391254mologous to synthetic construct toolbox 80 disintegrin domain,accession number Y09274,Smith-Waterman Score=51.
aactcacagcggaacctacaattgtggcccaactctgtgtgcctgcacaggagacagcaccagccaagctgattgtgtatctacagcgtttccggcctcaagactatcagcgcctgctagaagtgaacagctccagagagaggccacaggagactgaagatcctgaccactgcctgggctaggggtgtcacttcctagaaggggaagggaactctgggtctaacggagtccactcctgggcccactgtgcctctcccctcagtgtcccttctgacagtgactcctctcctctccagcgctgcctgtttcttccccctcctctaagctactcttccttgagaaaaggaaa

SEQ ID NO: 1434 - DNA, 736 bp, Homo sapiens
  SIMILAR (444)..(698): 331254mologous to Homo sapiens Human apolipoprotein E mutant protein fragment 3,accession number Y20287,Smith-Waterman Score=90.
gggtggcaagggattttcctgtgcttaactactgatcacggctaagtggaaatcctataaacacgagcggaaatcaatggaggctgcttagcggccaggggagaggggcggtccacagattgcatctgccggatgagcgagaggaagcagccagggagggctcaaggaagagtagcttagaggagggggaagaaacaggcaacgctggaaaaaagaggagtcactgtcaacaagggacactgaggggaagaggcacagtgggccccaggagtggactccgttagacccagagttcccttcccccttcctaggaagtgacacccctaagccccaggcagtggtcaggatcttcagtctcctgtggcctctctctggagctgttcacttctagcaggcgctgataatcttgaggccggaaacgctgtagatacacaatcagcttggctggtgctgtctcctgtgcaggcacacctcaaagcccgagagtctcctcgcgggacccacagagggggaagggagccccacgccatacactcgcgaggaatgccgggagcagttccggatcccggacctcggcccgaccctccgcgcgcccggcaggtcccggcaccagcggccatattacgcccgttgtggcggtgccgagagcaggccagggctcgagacacgcgctatgtaatgggaggccgcgacccccgcggtggccaggggagcgaggccgccccttgcattctgc

SEQ ID NO: 1435 - DNA, 1209 bp, Homo sapiens
  SIMILAR (2301)..(61): 901254mologous to Homo sapiens KIAA0433,accession number AB007893,Smith-Waterman Score=3443.
ggaattcggcgtgggctcccttccccctctgtgggtcccgcgaggagactctcgttctttgaggtgagacctgaagctccgctggccggtagtgtagcaggaaagggcaggtcctcccgggtcgtgagccagtagcctcctggggtggcaaggtgtagagaggggggcgttgaaaggacacccgctacccggcctgctttctaggggtctctttggattgaggacatcaacagcagtggaagggattttactggagacctgtcactgtcagagccttaaaatatcaccgacggggccttaatgtcaccgaggtaaagagaaaagggcagcagccctagagactattgcgacacagtgtgcccctcataagtttttccagggaggggttctgtactgagttgacggcccaaggagcttgagcaccaaggctttcaatccttgggaactcagcaaacgtttgttcagccaattgcaggtagcatggcccagggcttgattgaggtggagcgaaagttccttccagggcctggcacagaggagcggctgcaggagttggggggcaccctggagtaccgggtcaccttccgagacacctactatgacacccctgagctgagcctcatgcaggctgaccactggctgcgacgacgagaggatagtggatgggagctcaaatgtcctgggagcagcaggtgtctttagggaccccacacggagtattaaggaactcacagcggaacctacaattgtggcccaactctgtaaggtgctgcgggctgacggcctggggggcttggagatgtgggctgctgtgctgggcccactggggctgccaggaagtagctagttttgtgactaagcggagagcctggaagctggtgctcttgggagctgatgaagaggagccacagctcagggtggacttggatacagacgactttggctacactgtgggtgaggtacaggccctggtgcacgattgaggctgagtcaccaactgccctagagaagatccacaggctcagcagcatgcttgtcaccactcctccacaaggagtaaaaagtgtgcctgcacaggagacagcaccagccaagctgattgtgtatctacagcgtttccggcctcaagactatcagcgcctgctagaagtgaacagctccagagagaggccacaggagactgaagatcctgaccactgcctgggctag

SEQ ID NO: 1436 - DNA, 1638 bp, Homo sapiens
  SIMILAR (421)..(1428): 831254mologous to Homo sapiens Keratin 8,accession number X74929,Smith-Waterman Score=1366.
atgagggctgagtacacaaagcgatctattcacatctttggacttcaagagaatcatattgtgtccggaattggtgggttcttggtctcaccaacttcaagaatgaagccgcggacccttgcactagacctaaaggttctccaagtccccaccagagtcaggagcccagctggcttcactcagtggatccggcacctggccgcaggtggagctgcctgccagtcccgcgcccccttgggtggtcgatgggactgggcgctgtcgagcaggggacgccgctcgtcggggaggctcggccgcacaggagcccacggaggcggaggggatgctcatgcttggtgggctgttggttccgagccctgtcccgcgggaaggcttctcaggctcggcgagaaattgagcacagcagctgctggcccaggtggtgatgatagtaataataatagttgctgtcggggacgtgacagctggctggtggtgttcataatgaaagttcaccttcccgccacctcccctagagccaagaagatcatggttatcacagtctcaggccatttttctttgggctcctttaccaagacagtcataggtaaagaaagtgacagggtgaacagtcttcagtcactaaagctaaagaaatccaatcttcctaacttaaccaaccccagatttacgagaagggaagagaaaggggagaagggtgctcaggaacggatagatagcttgcgtcgaactggggtgatccatgaaaaacagacagctgtgtcagtagaaaacttcattgcagaattgctgcctgacaaaataaccaatacagagaagtgcttaaaggagctgatgaagctgaaagccaaggctcgagaactacatgaagaatgcagaagcctcaggagccgacgcgatcaactggaagaaagggtatcagtgatggaagatgaaatgaatgaaatgaagcgagaagggaagtttagagaaaaaagaataaaaagaaacgaacaaagcctccaagaaatatgggactatgtgaaaagaccaaatctacgtctgactggtgtacctgaaagcgacggggagaatggaaccaagttggaaaacactctgcaggatattatccaggagaacttccccaatctagcaaggcaggccaacattcagattcaggaaatacagagaatgccacaaagatactcctcgagaagagcaactccaagacacataattatcagattcaccaaagttgaaatgaaggaaaaaatgttaagggcagccagagagaaaggtcgggttacccacaaagggaagcccatgagactaacagcagatctctcggcagaaactctacaagccagaagagagtgggggccaatattcaacattcttaaagaaaagaattttcaacccagaatttcatatccagccaaactaagttttgtaagtgaaggagaaataaaatactttacagacaagcaaatgctgagagattttgtcaccaccaggcctgccctaaaagctgctgaaggaagcactaaacatggaaaggaacaactggtaccagctgctgcaaaatcatgccaaaatgtaaagaccatcgaaactaggaagaaactgcatcaactaatgagaaaaataaccagctaa

SEQ ID NO: 1437 - DNA, 1128 bp, Homo sapiens
  SIMILAR (409)..(579): 381254mologous to Homo sapiens Human breast tumour-associated protein 57,accession number Y48596,Smith-Waterman Score=76.
tttttttttttttttgcttttataaacattcaaccaacatgttctttaataatctcttctttaaagaacaaaataatcaagcacatggcattaagttaaatgtctctgcacatgaatttccaccttataaatctggtatattaaattgggctgcaaatagatttgcatattttcttttttgagtactatgataggtgaaatggtatgactataaaaaggatttgtttctttttgtctcctgggaatgacatggtgcctttctagagaaagaaaaattgcaaggctaacaggaaaatgaataaaaactaactgggattcaatttaagactattcggattttaggaaggtacaaccacttctttaacatcaagctaaaagtgggggaaagtctcagtctccccaggtaggtctcctctcacactgtcctgggggtggcaggcgctgtttatacatgccctgctatcgctctggctgcacttgtaggatccatcttgcccgacggggacatccccaggtaaatgcccattgtgcccaatcagtccggctgacattcagtaaacttcttttccaaggacttcacccactggtcaccaaaagggccttgaccacctccagattataagtcctgggggaagttagacttttgagcctggctgtacaaatttccaaagggcaccggtgtggcttgtgtaaaatgtttcctaagatgaatgcccatgggacaggatcttcaaccaccaaacaaccaatgtcaaaccatttgtccaggcagcaattctgcaatgaagttttctactgacacagctgtctgtttttcatggatcaccccagttcgacgcaagctatctatccgttcctgagcaccttttaatcctagctgcataagctaatggttgtggggcaaatattggactgtccagcttcccctacaaccacagctaagccaaagacctcctggaaggcatctcggacagcagcaacttttacttctttatttgaggtcactacaatatccagttcacctccagatttgatatagggagccatgccagggtccagcgttgtaatcatgctttctactgaatgccttgtcttatcaagcacagacttcaccataggattcccagc

SEQ ID NO: 1438 - DNA, 552 bp, Homo sapiens
  SIMILAR (13)..(549): 711254mologous to Homo sapiens dJ475N16.3 (novel protein similar to RPL7A (60S ribosomal protein L7A)),accession number AL035587,Smith-Waterman Score=612.
atggcagtagcaagacagaagaaaggaaaagggctcaggtttaagcgactggaatcattcctacatgattcctggcggcagaaacgtgacaaggtgcgtctcagacgactagaagtgaaacctcatgccttggaattgccagataaacattccttggcctttgttgtacgcatcgaaaggattgatggcaatctaaaaatgctgcatatagtggaaccttatgtgacctggggatttccaaatctgaagtctgtccgagaactcattttgaaacgtggacaagccaaggtcaagaataagaccatccctctgacagacaacacagtgattgaggagcacctggggaagtttggcttcatttgcttggaagacctcattcatgaaattgccttcccagggaagcatttccaggagatctcatggttcttgcgccctttccacctctcagtggcccatcatgctaccaaaaatagagtgggcttcctcaaggagatgggcacacctggctatcggggtgaacgcatcaatcagctcatccgtcagctgaactag

SEQ ID NO: 1439 - DNA, 3039 bp, Homo sapiens
  SIMILAR (193)..(1866): 951254mologous to Homo sapiens putative p150,accession number U93563,Smith-Waterman Score=2780.
  misc_feature (1)...(3039): n = a,t,c or g
atgtttggccgctcgcggagctgggtgggcgggggccatggcaagacttcccgcaacatccactccttggaccacctcaagtatctgtaccacgttttgaccaaaaacaccacagtcacagaacagaaccggaacctgctagtggagaccatccgttccatcactgagatcctgatctggggagatcaaaatgacagctctgtatttgacttcttcctggagaagaatatgtttgttttcttcttgaacatcttgcggcaaaagtcgggccgttacgtgtgcgttcagctgctgcagaccttgaacatcctctttgagaacatcagtcacgagacctcactttattatttgctctcaaataactacgtaaattctatcatcgttcataaatttgacttttctgatgaggagattatggcctattatatatcgttcctgaaaacactttcgttaaaactcaacaaccacactgtccatttcttttataatgagcacaccaatgactttgccctgtacacagaagccatcaagtttttcaaccaccctgaaagcatggttagaattgctgtaagaaccataactttgaatgtctataaagtggataaccaggccatgctgcactacatccgagataaaactgctgttccttacttctccaatttggtctggttcattgggagccatgtgatcgaactcgatgactgcgtgcagactgatgaggagcatcggaatcggggtaaactgagtgatctggtggcagagcacctagaccacctgcactatctcaatgacatcctgatcatcaactgtgagttcctcaacgatgtgctcactgaccacctgctcaacaggctcttcctgcccctctacgtgtactcactggagaaccaggacaaggtcttcttaattatacatcatgcaccgctggtgaactcgttagctgaagtcattctgaatggtgatctgtctgagatgtacgctaagactgaacaggatattcagagaagttctgtcttacccactctaagctccttatggcagggatctcacctgtcactgaatcagctgcagtctgggctgcacaaatgctcatctcacttatgcggagcccaggctgcagctgattcagtgacaggtgagatccctgccataaggagcttagagtggctaatcagtgctggttccaaggcgcgcacattcttcttcctgaaaatgctaataggcttctgggagaaggttgattgtgaatatcaaaggcgtcaagtgctgagcacgcggctgcaagaggccttgccgtcaaatcgcctcactgatgttgcagctgtgcattcttcatgcatgttgggctttggttccacagctccacgcggctcctggattggcgatccagcggctgtgcatctgcccctacctggggagctggccgagcaccttgggtccaagggtaccaccactgtcaccaagcaccagccccaggccaagcccagcattcggtgcttcattaaacccaccgagacactcgagcggtcccttgagatgaacaagcacaagggcaagaggcgggtgcaaaagagacccaactacaaaaacgttggggaagaagaagatgaggagaaagggcccaccgaggatgcccaagaagacgccgagaaggctaaaggtacagagggtggttcaaaaggcatcaagacgagtggggagagtgaagagatcgagatggtgatcatggagcgtagcaagctctcagagctggccgccagcacctccgtgcaggagcagaacaccacggacgaggagaaaagcgccgccgccacctgctctgagagcacgcaatggagcagacccttcctggatatggtgtaccacgcgctggacagcccggatgatgattaccatgccctgttcgtgctctgcctcctctatgccatgtctcataataaagaaaatctcctgaaaaagaggaaggcttatcaggcactcaaagccacccaggcaaagcaggaacttttggcaaagaaggagcagaagaaaggaaaagggctcaggtttaagctactggaatcattcctacatgattactggcagcagaaacctgacaaggtgcatctcagacgactagaagtgaaacctcatgccgtggaattgccagataaacattccttggcctttgttgtacgcatcgaaaggattgatggcgtgagtttactggtgcagagaaccattgcaagactttgcctaaagaaaatttttagtggtgtctttgtaaaagtcaccccccagaatctacaaatgctgcgtatagtggaaacttatgtgacctggggatttccaaatctgaagtctgtccgagaactcattttgaaaccgtggacaagccaaggtcaagaataagaccatccctctgacagacaatacagtgattgaggagcacctggggaagtttggcgtcatttgcttggaagacctcattcatgaaaattgccttcccagggaagcatttccaggagatctcatggttcttgtgccctttccacctctcagtggcccgtcatgctaccaaaaataagagtgggcttcctcaaggagatgggcacacctgggctatcggggtgaacgcatcaaatcagctcatccgtcagctgaactagacccaggtgaggcagggctgaaaactgcccttgggctgacttttgataggccatgccttgccactttacaagttctttttgcatttactagtatttaagagtaaccttgagattgggaggaatagaggaggctggtacaaatagatggagacctgctgggatcagtgaatgcctgattaggacatggggctatgcatagcctaagagttatagggcttaaagatgttcgagtaactgaaaaactgtattgctggccggggcgcggtggctcacggctgtaatcccagcactttggggaggcccaggcgggcagaccatgaggtccaggagattgagacctnctggccaacatggtgaaccctgtctctanttaggaatacaaaattgagct

SEQ ID NO: 1440 - DNA, 487 bp, Homo sapiens
  SIMILAR (1798)..(2958): 831254mologous to Homo sapiens putative p150,accession number U93569,Smith-Waterman Score=1651.
ctagtgcaatgcggtgcaattcggagcgctctcaagccccaagtggccgtgccatcctgcccctccactcccgactatgagaacatgtttgtgggccagccagcagccgagcaccagtgggatgaacaaggggctcacccttcagaggacaatgacttttacatcaactacaaggacatcgacctggcttcccagcctgtctactgtaacctgcagtcactgggccaggccccaatggatgaagaggagtacgtgatccccgggcactgagcctaagatgtcctaacctccacccagaaccccttcagtccctgctgggtgactcagggcgtcctaacgcctccatggcctcagtttccccatctgaagaatgggtacaggaaaggattgtccttgaggccccaggaagctctgccgccccctccctgtccctcatgccgctcctcagctcccttcagctctagagggggaagaggagagaccccct

SEQ ID NO: 1441 - DNA, 415 bp, Homo sapiens
  SIMILAR (1357)..(2640): 931254mologous to Homo sapiens unknown protein,accession number M22334,Smith-Waterman Score=2117.
cggcacgaggtggatcacttaatgtatgggatgtatttcagtcacggctgttattaaaatgttttattcagacagctttattgaggtataatcgacttacaataaatgtcacatgtctaaagtgtacaatgtgaaaaatttgacatatgtatacgtccatgaaaccatcatcacagccaagatcatggatatctacaccacaccccaaagcttgctcctccctgtcctttccgctctccctggacaactggatgaacattaacctgcgagaagtcatctgcacgtccagggacggggacaagttctggcggatgcccgagtgctacatccgcggcagcaccatcaagtacctgcgcatccccgacgagatcatcgacatggtcaaggaggaggtggtggccaagggccgcggccg

SEQ ID NO: 1442 - DNA, 495 bp, Homo sapiens
  SIMILAR (88)..(486): 991254mologous to Mus musculus putative pyroglutamyl- peptidase I,accession number AJ278829,Smith-Waterman Score=711.
cagggtcgacgatttcgtggctgcagcggcagcagctgtcgcgccagtcgtattatatgcatgtccgaggcacagcccgatcccgccatggagcatccgaggaaggcggtggtagtgacgggatttggcccttttggggaacacaccgtgaacgccagttggattgcagttcaggagctagaaaagctaggccttggcgacagcgtggacctgcatgtgtacgagattccggttgagtaccaaacagtccagagactcatccccgccctgtgggagaagcacagtccacagctggtggtgcatgtgggggtgtcaggcatggcgaccacagtcacactggagaaatgtggacacaacaagggctacaaggggctggacaactgccgcttttgccccggctcccagtgctgcgtggaagacgggcctgaaagcattgactccatcatcgacatggatgctgtgtgcaagcgagtcaccacgttgggccagtgtatt

SEQ ID NO: 1443 - DNA, 436 bp, Homo sapiens
  SIMILAR (1)..(375): 981254mologous to Homo sapiens junD protein,accession number X56681,Smith-Waterman Score=630.
gcggccgcgcccgaagcgcctgtctacgcgaacctgagcagctactcgggcggcgccgggggcgcggggggcgccgcgacggtcgccttcgctgccgaacctgtgcccttcccgccgccgccacccccaggcgcgttggggccgccgcgcctggctgcgctcaaggacgagccacagacggtgcccgacgtgccgagcttcggcgagagcccgccgttgtcgcccatcgacatggacacgcaggagcgcatcaaggcggagcgcaagcggctgcgcaaccgcatcgccgcctccaagtgccgcaagcgcaagctggagcgcatctcgtgcctggaagagaaagtgaagaccctcaagagtcagaacacggagcttggcgtccacggcgagcctgctgcgcgagcaggtggcgcagctcaaagcagaaagtcctcag

SEQ ID NO: 1444 - DNA, 515 bp, Homo sapiens
  SIMILAR (247)..(324): 461254mologous to Tinaroo virus one of two overlapping open reading frames,accession number AB000819,Smith-Waterman Score=69.
ggcacgagccctccctctctccctccctgtttctccctccctgtttctccccgctgtgcctcccccagttacccacagaagtgcctgcctctccagcgctcacagaacacacaaaaagggacaggaattggtcactgggtagtggccgtggctcctgacgatccagaccagcgtctggcccaagccattcagaggtggggtctggggcctgggggttttgtgtcgtgacactttgtctcaaggagattccacatagggatttgaattaggctttctgcttgccaaggcctgtggcatctgagcctggctgagggccgggcaagcctcccctgagcctttggaagccgagttcactctctgcctgcccaaggggatgcaccggcttggttctgggggctcctctaacatctcaggtttttatcttgtcttaaatttctttctaggaaaaaacccttccctgccaaaggtgactgtgttttctgccgccgaaggagggcccggtccctccaggctta

SEQ ID NO: 1445 - DNA, 3511 bp, Homo sapiens
  SIMILAR (416)..(871): 911254mologous to synthetic construct InsB peptide,accession number Z37515,Smith-Waterman Score=720.
gacagctcctcggtgtcggccccaccttgagccccagttccaccttctaccgcttcagcacctccggcgcggacagctcctcgctgtcgcctccactcccggccctgggccggacccgggagcagacgctcctcggcgcccgctcacggggacgagtcctgctccctgctatcccagacccctttctctggcgcatggagaacctgggggtcggcgaaggggcagaggcttgcagcaggttgagtcgctctcgcggccgccacagcatgaccagagccccgaagcacctgtggcggcaaccccggcgccccatccgcatccaacagcgcttctattcggatccggacaagtccgcgggctgccgcgagagggacctgagcccgcggccggagctcaggaagtcgcggctctcctggcccgtttcctcctgcaggcgctttgacctggaaaatgggctctcgtgtgggaggagggccctggaccctcagtccagccctggcctgggccggattatgcaggctccagtcccgcacagccagcggcgcgagtccttcctgtaccgctcagatagcgactatgaactctcgcccaaggccatgtctcggaactcctctgtggccagcgacctacatggagaggacatgattgtgacgccctttgcccaggtcctggccagtctgcggaccgttcggagcaacgtggcggcccttgcccgccagcaatgcctaggagcagccaagtaggtagagggcggggcggggcgggggcggggccggcagagacaaggtgggcggaaagcgggctgcaaattgaggctggggctccggcgcctccaggtgggtttgaggggcggggcctggtggacttgggggcggggcgagatgggcggagcagccacgcctgaggctgctgtaccgcaggcagggacccgtcggaaacccttcatccagcaatcagctccctcctgcaggtaaagtacctgttccttccctcccccgctgaggacagctgggagcttcctttccatagtgacctccccagtccatgagccccttatactggggctaattgtagccccgcccctgcaaaaacaataacgccctcggggatggaccccaccacactcatattacagatgaggaggctgaggcccagagatctcatggtcacacaggcactcggggaacagatctggaacttgggtccaggagtcctgggtggcccccgtgggaacagtttcagggtccagatgaagagacgaagtcgcgagaggcgtggggtccctgagcgggggggttgggcaggcccctgactgcctcggctcccagaggacacggggcagaagctggcattggagacgctagacgagctggactggtgcctggatcagttggagacgctgcagacccggcactcggtgggggagatggcctccaacaagttcaagcggatcctgaaccgggagttgacccacctgtccgaaaccagccgctccgggaaccaggtgtccgagtacatctcccggaccttcctggtagcgatggggtttcaccgtattgctcagactggtctcgaactcctgacctcaagtgatctgcccacctcgacctcccaaagcactgggattacaggcgtgagccactgcgtccggccgacagggtctttactccgaacttactttggttcctgtagaaagggaaataggttgattctggggtttggcaaaattcaggtcctgaggccaggccccagcaggtgaaatcggcttctctgagcttcaccctggcccatccgcagaccagcagaccgaggtggagctgcccaaggtgaccgctgaggaggccccacagcccatgtcccggatcagtggcctacatgggctctgccacagtgccagcctctcctcagccactgtcccacgctttggggtccagactgaccaggaggagcaactggccaaggagctagaagacaccaacaagtggggacttgatgtgttcaaggtggcggagctaagtgggaaccagcccctcacagctatcatattcagcatttttcaggagcgggacctgctgaagacattccagatcccagcagacacactggccacctacctgctgatgctggagggtcactaccacgccaatgtggcctaccacaacagcctacatgccgccgacgtggcccagtccacgcatgtgctgctggctacgcccgccctcgaggctgtgttcacagacttggaaatcctggctgccctctttgcaagcgccatccacgacgtggaccatcctggggtctccaaccagtttctgattaacaccaactcagagctggcgcttatgtacaacgacgcctcggtgctggagaaccatcacctggctgtgggcttcaagctgctgcaggcagagaactgcgatatcttccagaacctcagcgccaagcagcgactgagtctgcgcaggatggtcattgacatggtgctggccacagacatgtccaaacacatgaacctcctggccgacctcaagaccatggtggagaccaagaaggtgacaagcctcggtgtcctcctcctggacaactattccgaccgaatccaggtcttgcagaacctggtgcactgtgctgatctgagcaaccccaccaagccgctgcccctgtaccgccagtggacggaccgcatcatggccgagttcttccagcagggagaccgcgagcgtgagtcgggcctggacatcagtcccatgtgtgacaagcatacggcctcagtggagaagtcccaggtgggtttcattgactacattgctcacccactgtgggagacttgggctgacctggtccacccagatgcacaggacctgctggacacgctggaggacaatcgagagtggtaccagagcaagatcccccgaagtccctcagacctcaccaaccccgagcgggacgggcctgacagattccagtttgaactgactctggaggaggcagaggaagaggatgaggaggaagaagaggagggggaagagacagctttagccaaagaggccttggagttgcctgacactgaactcctgtcccctgaagccggcccagaccctggggacttacccctcgacaaccagaggacttagggccagccctgcgtgaactgcaggggcaatggatggtaaagccctttggctcttggcaggcagactttccaggaagaggctccatgtggctcctgcttcactttcccacccatttagggagacaatcaagctcttagttataggtggctcccagggtctaattggaggcacctggctggggtccactctgaccctagacttgcctaaaagagctctctaaggggcagcctcttacgatgccctggtgtctttctcctgggcttctatccctgtgaggagaggtgctgtctgctggagcctctagtccaccctctccagtggtcactcttgagtcacatctgtcacttaattatttccttctttatcaaatatttatt

SEQ ID NO: 1446 - DNA, 3097 bp, Homo sapiens
  SIMILAR (1140)..(226): 931254mologous to Homo sapiens putative p150,accession number U93563,Smith-Waterman Score=1454.
atggcgggcgcgcgggtgggtcccgccgccggagcgcgcacggcagtgcccgccgcggggggtgggggcgcggctacacactcgcgggtcagatcccggacggccacccagggacgcacagctgatcgcggctgcacacggcgcgtgcacacacacgttcactcacctcaaatggagccggccacccacattgttgtacacccagccacacacattcgcagcgacactcaacatagcgctccacacagcaaaagtgtaccccgctgctggaacgactgcggatagcccctaaagcctcaggcagtgacattgggtgtctcaccccgcagagctacccacactcagcaagggcaagcccgcgtgtgtgcaaacacgcgctcccgtttacccacagaagtgcctgcctctccagcgctcacagacacacaaaaagggacaggaattggtcactgggtagtggccgtggctccgacgatccagaccagcgtctggcccaagccattcagaggaaataggatttctgtactgggatttgaaccccattcccttgtttctgctgacccccagcagtctcaatatccctacttcctcttcccagaaccaccctccccaaagcccttatcgatgctggaggattcctatgcatccctcaaaatccaagcttcggcgagagcaccaccgttgtcgcccatcgacatggacaagcaggagcgcatcaaggcggagcgcaagcggctgcgcaaccgcatcgcagcatcacaagtgccgcaagcgcaagctggagcgcatctcgcgcctggaaagaaagtgaagaccctcaagagtcagaacacggagctggcgtccacggcagcctgctgcgcgagcagctcctcccttgttggagggagcagagagcgggtgtctgagagcggcccgcacatctgcgcgcagcgagcgccccctagacgcgccttggcgcggggccggctgatgccaggtgacactgggccccgtgagttacacaggaacccgagtgtggtggtggtcgtgtgtttgctggtgtctcttttgctcatcgggtctgtggtcatggctgtgagattctgtcaccggaatgagtccaagtttgagaacctggacgaggtgtccatgggatccgtgaatgacagattgtcctttgcccaccacctccaggaacaccagttcctcttcccccgagtcgctgggtgcagagccagaggaacgccagcgaccccagcagcgctcggacggtgctggccgtggccgctgcggcccccgtgtccaggtgggccagacgcagcctctgggcgccgtcgcttttccagcatcgcagaggcaaaaggtggcagtgggacccaaaaggatgggcccaagcccgtttaggcttgcagccacggtacggcagccggagcgcccccaagccccaatggccgtgccatcctgcccctccactcccgactatgagaacatgtttgtggccagccagcagccgagcaccagtgggatgaacaagggtaaggccctacctgccggcatcctgcagatggtcaccgacacatccaggcccaacgtgggcggggatgagtctctggactgtttggtactcaaccgaatctcgtacacatgcaggtccacgctgtcgccaaggcctagcttttcagctcctggaagagaggagagtgggagtgtcatggccccagatgacagcatggggataatgcgctctctggggggtctgtctagactcactgtggcagcaattgtccgtgatgttaccaagttctgtgacccgggtcctcctcacccagctttgcaagagacaccccagatggccccgagccccggagctccccagcccttaaacccacctgcacctcctcggaagagaaacacagccagtgccccagtccacctgagagctgcgagagatgacagcgaggctgcactgtaccccttcctacaagtttcctattcgttaagtgggcacaagaataactacacgtactatgcatgggttgttgggggattcagagcgctggggtacaaacactcaacagatgtgtgctccggtgttaccatccaggaagagatgtggatccgacatcgttttttaagagctgcccccatcagccagcgtacccgtcactaccaccgcttcctcggctgctccatggcgggatcgggctgtgcctcggacctgctttgttgcgactggcgcgacagctgctgccgctgcagcctctcggccgcgcaggccacgcccctgtcaagcccccggcctcgcccccggtcagccgctcgccttagtgcgcgcggcgcggcgacgaccgccgggagcgtgtgcagcggcggcggcgaagtggccggcgagcccggtccccgccggcaccatgttggtggagctgaaaaatggggagacgtacaatggacacctggtgactgcgacaactggatgaacattaacctgcgagaagtcatctgcacgtccgggacgggacaagttctggcggatgcccgagtgctacatccgcggcagcaccatcaatacctgcgcatccccgacgagatcatcgacatggtcaaggaggaggtggggccaagggccgcggccgcggaggcctgcagcagcagaagcagcagaaagccgcggcatgggcggcgctggccgaggtgcttcggggctctgtcatgctgtggcggccgcgagagcgactcaacctgctgcaagcctctgcccttcgccgacccccaggttctccatgcgccagagaaaggggtctgggaagcagggagcaggactcgtccccgtgagcgggcgccgaggagcgtctgccccgggtccggcccagggccgggagtggaggcgacagcgaggagctgtcgcgccggaggtgctgaagcggtagaaggtggaactggggctcaagcctcaatggtgaacaccactgggtactgggctcgacctctccaggcaacacaaggcggctcggcagcgtggcagcaatggggtacccgagaagcctctccggatgataccaccaccagggggctcacaggggccaagccagaatccaccaactcccagaaccactga

SEQ ID NO: 1447 - DNA, 1026 bp, Homo sapiens
  SIMILAR (426)..(608): 781254mologous to Mus musculus Lsm4 protein,accession number AJ249439,Smith-Waterman Score=237.
catcccaggctggagggagccccagtcagccactcttgagccaggcccacgggcagaggataggagccagtcttccttgtgagtgcacaatgggggctgcgcctaccacaacccacccttgctcctgggtgaaggattgcctggggtcaggacagatcctgcctgcagggtggaccctttgccacgtatgtcccgggactgatactgtgcagcttgcaggggtggtacggggtgcaggctgggcaggatctgcagggcctcccgcgctcccagggctgggccagacggcccggtggtaagttaataacctgctccccttctccgcaggacggggacaagttctggcggatgccctgagagctacatccgcggtagcaccatcaagtacctgcgcatttcccaccagatcatcgacatggtcaaggaggaaggtggtggccaagggccgctggccgcgaaggccttgccagcaagcagaaagccagcagaaaggccgcggcatgggcggcgctggccgaggtgtgtttggtggccggggccgaggtgggatcccgggcacaggcagaggccagccagagaagaagcctggcagacaggcgggcaaacagtgagcgcccacccagaccggctgctgcgccccctcctgccagggtgggcgattccgctccacagtctcggacggatctgctcagaaaggaagaggcaggcgccagggggaacccccttcgtgttttgtgaccctcccttttaggtgaagccccttttttcttgctaaaaccggcaattctccggttagaaatgttacttggtgttttttggttttgtgaaacggccgtcccaaagctggctggattcctagaagagtctgtgttgaaggcatctttcaagccctcgctctggttctcagggcagcattttccaggcgggtttgttttgcatttcttggagcctctccgagcagcaaccagacgggagatttttattttaagctgttcatgctgggactgacagcctgcagggtttcct

SEQ ID NO: 1448 - DNA, 436 bp, Homo sapiens
  SIMILAR (337)..(996): 951254mologous to Cloning vector pBACe3.6 levansucrase,accession number U80929,Smith-Waterman Score=1060.
ctggttccttcaagtggtccagaaggagcaagtggggccatgaggggagcagctgtaactggtggaaatggtgagctgaatccacatgcttgcccactggaaggagacacctttgataatttcatttctgtctttttctctttggagacactaagttccggaagaaggcaagccacattctcaggatcatgtgggtctgccccagctaaagatgtacaagctatagggactcctaagtgcgagccctgtgactgttcatccttaaatacgttagcagccagcatgctgactatgatgagttgtgcgctccaagtcagagggtctgattccccaggttccagaaggagctcaggaggctccatggtgcactttccccacctgcaactattttcctaccagccactatccagcaagagcctccgaattccaccacgct

SEQ ID NO: 1449 - DNA, 981 bp, Homo sapiens
  SIMILAR (656)..(525): 401254mologous to porcine adenovirus 3 97R,accession number AF247039,Smith-Waterman Score=71.
atggggaaatactatgggagttggcagctagaaacacaagttaggaaaggaaagagtgggaaattcagagaaagtgaagaatcacctaagctctgcaatgacagtggtcaagctgctacttcaaaatccatgcctggattcttatgtggaatgtgccctctgtctacctgcatttctttagagcttaaatccaaacattgcctgttcggtgaaggctctgaaataaaaataaaagagcactttcaccttctcctcattgcttacacctgctgtggcctcagaggagcaatagccttcatgggccacccagaagttggatataagaaaacagctctaaacccatcacgggaaggggagtactcaggtgagtgggtgcaggaaccagggcaaatcaacactggaaccagccagttgctcctctctggcccagctgtgagatacagtaagttcaagatgtcagaggccaggccgcccccgctgctcgggcagcacacaacgcacatcctgaaggaggtcctgagatacgatgacagggccatcggggagctgctcagcgctggagtgacgctggagccgaacagcttgggtcttgctgttgtggttacagaggaagttccattagggcaggagcagggagagcatgacagtgtgatcggggactgttctgctccagcgtcaggctgggtcttggactttgcttcttactctttcttagcaaaggaaaatttacttggccttcagggaaagccgaaggaggagcttgacaagctaaaggctgctggcatagtggagaaaagacttcaggaaccttcagcagactgtctccctgtccagatttgtatcaacattaatgctttgctcatgattgaaaaacatgttcaggcttccagactcaaatatgtttcctttgctcataaccctctggtgagggaacaaatggttttggatccctggagagatgggatgtccctttatgactga

SEQ ID NO: 1450 - DNA, 464 bp, Homo sapiens
  SIMILAR (301)..(429): 371254mologous to Homo sapiens Human secreted protein, SEQ ID NO: 5615,accession number G01534,Smith-Waterman Score=63.
tttttccaggaaaaaaattaaatctttatttttaaaaatcccacaaatccataatgaaatcatcatctgaaaaaaaagatggtagggaacaaaacgtgggatacatttaaaaggcactagattcattaataccagagccattctggagatgccatgtaagaaatctggagttactctaaatcttcttcttagtggtatcagaactggggagaagggtccaagcaaagtgttgcctttgccagtgtattcggatcgaggttatgaggaagagcccttttcctttgtcagtgagtttcatgttggtccaccactccagcgctgagcagctccccgatggccctgtcatcgtatctcaggacctccttcaggatgtgcgttctgtcgtgcccgagcagcgggggcggcctggcctctgacatcttgaacttactgtaatctcacagctgggcctatgaagtaacaac

SEQ ID NO: 1451 - DNA, 2700 bp, Homo sapiens
  SIMILAR (33)..(881): 541254mologous to Homo sapiens unnamed protein product,accession number AK001559,Smith-Waterman Score=682.
acccctccaaactgtgtagacatagtctaaaatgtttggagtgtaatgaagtcttccaggacgagacatcactggctacacatttccagcaggctgcagatacgagtggacaacaaatgaagaaacacccctgccgccagtgtgacaagtctttcagctcgtcccacagcctgtgccggcacaaccggatcaagcacaaaggcatcaggaaagtgtacgcctgctcgcactgcccagactccagacgtacctttaccaaacgtttgatgctggagaagcacgtccagctgatgcatggcatcaaggaccctgacctgaaagaaatgacagatgccaccaatgagggagggaaacagaaataaaagaagacaaccaaggtccccagttcccaagcggaagttggaagaaccagttctggagttcaggcctccccgaggagcattcactcaaccactgaaaaagctgaaaatcaatgtttttaaggttcacaagtgcgctcgtgcgtggcttcaccaccgaaaacctgctgcaatttcacgaacacatccctcagcacaaatcggatggtgtcttcctaccagtgccgggagtgtggccttctgctacacgtctcacgtctctctgtccagggcacctcttcatcgtacacaagttaaaggaacctcagccagtgtccaagcaaaatggggctgggggaagataaccaacagggaggaacaaacccagccacgagggtggaatcccctgatgggcgccgtgttcagacagaaagtgcaaagtgttgcgcaaaaacttttgaaactgaagctgccttaaatactcacatgcggatacacggcatggccttcatcaaatccaaaaggatgagctcagcccgagaaatagccacagatgctcccatgaggaaaatccccgtcccacattggaataaaaaagacatttttgttaacaaagtttgccagtataatagagttaacagtactgtcctaggctgttgccaatatattctctttcaatgtaccttccttcacctcgtccgtatatatccctcgataagtattaaaacagtatttgagtttaaaagagtttgtatatatttaaatgaataactttttatactctttgttacatgtttgtatcagtatttagtggaaaaccatttgagttgttttgggttagaatttttctttttgtactgtttctttaaaacagagttcttagtaacaggggcagttcctgaattcaaataaaccattttgtatgtttggattttgaatgggttaactaattacaggctaaaataatgccttttttagtgtttttaatttttaagaattcactacataaattgtaagtaattgtgggtctcaaaaacactaggaacttttaagtgtcgttaacacttcctcgatgtgcctgccctgagggagagagttcacatttgagacaactgcactccagtgtggaccgtgcctttgtcttcaggccatgcgagacggtcgtttaaagcagtcttgcaggtcgctcctttcccagccgtggataaaaactgaagctaggaatctaataaggaatgctgatttcctcagttccattttgaggaatggggaaggctattctaaagaaaaaaaaaatgggacaggttttctgggtagatctgcaagtctggctttaagagcacaaggagggaaagtaacgaaagggctggactactgtaaaagttacaaatacgtagttagaccaatagattttatatagtccagggttttttgtcatgtaatttattaacctaactattacagaaacacagctaagaatatcaagtatttctctggctcttgatagaaaaaaaaatcagctgacttaatcctttgctgtcaaaagagttggcgtttcctgttctgggtgctactgcccaaacgttatggtacttagagtccgggatgcacaacttcaaacccaccgacttatcaatgcagccgcctgtgtattgccaattggcccgttaccttaaggcactgagcccacccggggattagttcagccatttccaagaagtatatttaacgtcggtagttctgctttattaaaatgcagcagaggtactcttctgtcccttccgtttatagaactctctcagagagttctattttttgggtttggtttgggtttttctttggcattttggatcttggatttaacccccgaacatgttttgcacctttttttttttttttttttttttaagaaaaggaattcttttgtgtatatatagatacttgcatgatatactgtagtcaatgttcggttcctcaaagaggtcttgctgctgtcaggtgttatgcactccatccatcataactgtatgaaacacatttcatatgtaaataaacgtgggacatttggcccttgtgcttctgtgagagaattattgatggtgggtctctgacatctttgtgaagtttgggaagtaattaattgcagcgacaagctacagggtgttgcagaattcttcccactcagaagaatggcatattcgttctcattagtaatcagctattttgtcactttcttgttgactccatcagtacatgggtacaatccgagggtgtgaatttcagcttgaaattccattgctgttccttggtttgtttgtattgctctaagttgtattcataatagcactttcatatgtttctg

SEQ ID NO: 1452 - DNA, 369 bp, Homo sapiens
  SIMILAR (330)..(163): 331254mologous to Salmonella typhi single strand binding protein,accession number AF000001,Smith-Waterman Score=74.
atgatacttccgtatactgacctggtggatgacctagagctcatgggaaaagactgccttttcctagaacctgcaattccagagatgttcgttcagcactcgccagggctctgtcttgtgctgagcaatgagtggtttctcccaaagtataagacgcatcccaagagcatgcgccagtcatccgtgggtttcagggaagtgtgcgatggccctggggaatctgctcagaggatggtccctcctaggatgtcgacgagggattttaaactcatgggctttcaaagcggactgcccggggtttgcatgccagccctgccattttccaggccccttggtccagctgatgtgggttacaaggcccacccgtga

SEQ ID NO: 1453 - DNA, 460 bp, Homo sapiens
  SIMILAR (1)..(99): 811254mologous to Chlamydomonas reinhardtii 8 kDa outer arm dynein light chain,accession number U19490,Smith-Waterman Score= 141.
aggcccgtgatcaaaaatgcggacatgtcggaaaagatgcaacaggactcggtggagtgcgctactcaggcgctggagaaatacaacatagagaaggacacatgaaaccaaacacttcatctacttctacctgggccaagtggccattcttctgttcaaatctggttaaaagcatggactgtgccacacacccagtgatccatccaaaaacaaggactgcagcctaaattccaaataccagagactgaaattttcagccttgctaagggaacatctcgatgtttgaacctttgttgtgttttgtacagggcattctctgtactagtttgtcgtggttataaaacaattagcagaatagcctacatttgtatttattttctattccatacttctgcccacgttgttttctctcaaaatccattcctttaaaaaataaatttgatgcagatgtgaaaaaaaa

SEQ ID NO: 1454 - DNA, 1003 bp, Homo sapiens
  SIMILAR (673)..(858): 401254mologous to Mus musculus forkhead 2,accession number AF023915,Smith-Waterman Score=96.
tttttttttttttttttttcacatctcgcatcagatttattttttaaaggaatggattttgagagaaaacaacgtggggcagaagtatgggaatagaaaaataaatacaatgataaagactattctgcctaaattgttttaataaccacggacaaactaagtacagagaatggcctgttacaaaacacaacaaagggttcaaaacatcgaggatgttccccttaagcaaggcctgaaaaatttccagtctcctggaaatttgggaatttaaggctgcaagtccctggtttttgggatggaatccactggggtgtgtgggcaacagtcccatgactttttaacccagattttgaacaggaaggaatgggccagcttggccccggggtaggaaggtaggatggaaggtgtttgggtttccatggtgttcacataaaacctaccgaaagttccctcccccacggatggcaattgccagggtggggattggtacttctcttgtcaaaattccttcttgaatatgaagccgcaatgtccttcctcctatgttgtatttctcccagcgcctttagtaggcgcactcccaccgagtcccgtttggcatcctcttccgacatgttccgcatttttgatacacggcctatcggtcgctacatggttaacctagtgggcaaggcctggggtaaggggttgagttgggccgcgccccccaggcactaactgcccccaccccggccggcgccaccacgggacgacgccccccaccccacttctcaggaagcgcgggctacgcggagggctaagtccggagtggggcgaaataaggcagcgaggacaccccctggccccccgagtttctcaccgtggagaagggggctggccgactgcaacggtctcctgggggaggtgctagcacagctcaggcccggctagagctaccgtcgctaccgaaaccgtggcgcatctaagcagccccacgccagccgccgccgcttagtgctcaggc

SEQ ID NO: 1455 - DNA, 587 bp, Homo sapiens
  SIMILAR (515)..(577): 381254mologous to Homo sapiens Human microtubule associated protein 2 mutant fragment 92,accession number Y20396,Smith-Waterman Score=48.
ggttagaagcacaggcttgcgttctgggggatgagtacaggacccctgtcatgctacgagcagatggcatcgatcctgactttgctgccatgaaatcccctcaagagagccccacatcaggggtcctgagtttgcagacagtcattagagacatccttgtttgggaaacagctgccctccaccctgatttcacagctggggaaacagggcctggagaggagactcatctggtgagaaaactaaagctcaagaaggccacggcacacacaggcagcgagggcagcaggaagattggaaatcagctctgctcccaatgcctgtgcccactctgttccaacacagccttccaaagctcatacgctgtgaagttttctgcccatcacattggccaaagagctctagccagagttgaagccagtgctgatcactttcctgacaacctggctggcagagatgggaccgtatgtagcacagggaagagctcacttggacagggaatgtcccgcatgtttgaaaagatggttcagaaaggagcctttggcaatccccagggtttctgcacccaagatggactggagggatcatga

SEQ ID NO: 1456 - DNA, 533 bp, Homo sapiens
  SIMILAR (1315)..(1953): 791254mologous to Mus musculus gamma actin-like protein,accession number AF195094,Smith-Waterman Score=854.
ggatgcatgctagagcccacgccaggtccctcctcagcctcctcacaaaggaccgaatgacttggctctgtgatcccatcccccagagactttggtgtgactgtggtgacccttggcatagggcacccctccgactgcctcctcatctcaaaactttccaaaccatgacttttatagcagggctttaggaatcgcctggctctaccctctcacttcatggctacagatacttgtgccctgagagagcaagtgaatttcccaaagccaacagcaagccctctgattgctgctctaccaaaccaaaatgatttcagttctcatgaaacctaaggcctgactaaggaagattaagaaacctggtggtggtcgggtcctgtagtggggtgggaggaggggggagggatagtattaggagatatacctaatgtaaatgacaagttaatgagtgcagcacaccaacatggcacatgtatacatatgtaacaaacctgcaggttgtgcacatgtaccctagaacttaaagtataataaaa

SEQ ID NO: 1457 - DNA, 1434 bp, Homo sapiens
  SIMILAR (325)..(1182): 711254mologous to Escherichia coli Anaerobic dimethyl sulfoxide reductase chain A precursor (EC 1.-.-.-) (DMSO reductase),accession number D90801,Smith-Waterman Score=1016.
atgacaggaaaatgtgggaaatttgggaacttcctagagtcttggagggctcagaagacaggaatatgtgggaaagtttggaacttcctagagaacttgttgaatggctttggccaaaatgcttatagtgatacggacaacgaagtccaggctgaggtggtctcagataaagataaagaacttgttgggaactggagtaaaggtcactcttgttatgcaaagagactggcagcattctgcccctgccttagagacctgtggaactttgaacttgagagagatgatttagggtacctggtggaagaaatttctaagcagcaaaccattcaagaggaagcagatcataaaaatttggaaagtttgcagactgaagatgcaatagaaaagaaaaccccattttctggggagaaattcaagcttgctgcagaaatttgcataagtaacaaggatccaaatattaatagccaagacgatggggaaaatgtccccagggttgccgtgcacccgaatggatgctttgcatggaaactgcccgtcctgagccgaaaattcgaacgcaaaccgatttactggatcctgagtgaagtcgcgaaacgtcttggacctgacgtctatcaaaagttcacagaaggtcgcacgcaggaacaatggttacaacatctgtacgccaaaatgcttgccaaagatccggcgttaccgtcttacgacgaactgaaaaaaatgggtatctataagcgtaaagatcccaatggccattttgtcgcctacaaagcatttcgtgacgaccccgaggcaaatccacttaaaacgccttccggtaagattgaaatttattccagcaggctggcggaaattgcccgtacctgggaactggaaaaagatgaagtgataagcccattgccagtttatgcctcaacctttgaaggctggaactcccctgaacgtagaaccttcccactgcaactgtttggtttccatgacaaatcccgtactcactcgacctacggcaatattgatctcctgaaggctgcctgccgtcaggaggtgtggatcaaccctatagatgcgcagaaacgtgggattgccaacggcgatatgccatatgtgttcagcagccaaatggcaaaattcacccccagaactgtgattgtcttccctaatctggaaggcccacaagtgtggagaagcactggagaccctccagaagcagtagtgctagcagtcaggggctactctccctgccgggccccgtgcaagggcctggccaccctatcccaggttgtttccaacgggtttggcctgtgtggatcttcacggaaatgcgcggaaagcgacgtagtgtccttccgggcatttttccttaaagaatcccggtcgttttcatctcctcgtagtcgggcatctcagggttacgtccttcgttttcgcatgtga

SEQ ID NO: 1458 - DNA, 407 bp, Homo sapiens
  SIMILAR (5)..(151): 771254mologous to Homo sapiens Human secreted protein, SEQ ID NO: 7174,accession number G03093,Smith-Waterman Score=224.
taattatactttaagttttagggtacatgtgcacaacatgcaggtttgttacatatgtatacatatgccatgttggtgtgctgcacccattaactcgtcatttaacattaggtatatcccctaatgctatcccttccccttccccccaccccacaacagaccctggtgtgtgatgttccccttcctgtgtccatgcgtcctcattgttcagtttgcacctgcgttttcaaggaaagcttggcaaactaaatggtgggcatgccatcgtttattttcacaagtgctcctgaatgcagcattcataagtggatcttaatttaagttagtgatccagaaaagataaggagcaccagaaaaccaggaagaaaatcaacatctccttgattatgaaacttaaaattattact

SEQ ID NO: 1459 - DNA, 744 bp, Homo sapiens
  SIMILAR (607)..(1695): 921254mologous to Homo sapiens putative p150,accession number U93563,Smith-Waterman Score=1804.
cctgtttcatgcctcaagaggtgaggaaagagggaaagacctctcttcttgaatctgaaaaatagtctgtttttgtttttttagatggggactcgctttgttacccagtggtataatcttggctcattgcaacctccgcttcctgggctcaagctaacctcccacctcctctctgcctcacactgcagtatccactctgtcgccagcagcgaggcattatagcaggaggcttctgaattggccagaacagcagctctcaggtggggtgtctgagaacctcatttcctcattacatgcctccctggtcagccatatgtgttcagcagccaaaatggcaaaattcaccccccagaactgtgattgtcttccctaaatctggaagggcccacaagtgtggagaagcactgggaggaccctccagaagcagtagtgctagcagtcaggggctactctccctgccgggccccgtgcaagggcctggccaccctatcccaggtatgtgacacttggctggctgttctttattgtcctgctagtacctgttgtaaagcttcttttattaaagaagagccaggagattgaagtgtcataaattgaaaagattcacaccaacccggcaaatgtatacatatgtaacaaacctgcacgttgtgcacatgtaccctagaacttaaagtataataacaaaatatgtattaaaaaaataaataaataaattgaagagattgaaaaaaaaaaaaaaaa

SEQ ID NO: 1460 - DNA, 1331 bp, Homo sapiens
  SIMILAR (688)..(738): 581254mologous to Homo sapiens Human secreted protein, SEQ ID NO: 7101,accession number G03020,Smith-Waterman Score=51.
aatatattttaagttctagggtacatgtgcacaatgtgcaggtttgttacatatgtatacatgtgccatgttggtgtgctgcacccattaactcatcatttacattaggtatatctcctaatgctatccctcccccctcccccaaccccacatcctggtgtgtggtgttccccaccctgtgtccaagtgttctcattgttcaattcccacctgtgagtgagaacagtgtggcgattcctcaaggatctagaactagaaataccatttgacccagcaatcccattactgggtatatactgggtgtatacccaaaggattataaatcatgctgctataaagacacatgcacatgtatgtttactgcgtcaccattcacaatagcaaagacttggaaccaacccaagtgtccatcaatgatagactggattaagaaagtgtgacacatatacaccatggaatactatgcagctataaaaaaggatgagttcatgtcctttgtagggacatggatgaagctggaaaccatcattctcagcaaactattgcaaggaccagaaaaccaaacacctgcatgttctcactcataggtgggaactggaacaatgagaacacaccggacacagggtggggaacatcacacaatcacacactggggcctgttgtggggtggggggagtggagagggatagcattaggagatatacctaatgctaaatgacgagtttaatgggtgcagcacaccaacatggcacatgtatacatatgtaacaaacctgcacgttgtgcacatggtaccctagaacttaaaagtatattaaaaaaagaaaccttggcactgattttgttagatttattcctaggtatccttcctcttttttgatttgtcattgctattgtagatggcatctttttaaaaagttatattttctaaagcaaaaaataaaaaaagttgtatttctaatttttattaccaatatataagaatgtaatttatttttacataattatcttatgtctagtaataattctgataatttgcttcttcctattaaaaccttacacccattattgatttatttttctgttttaaaatatcttcctgcactggctaaaacctccactataatgttgagcagaacagtgaggcatccttagaactatcttggttgcaaagggtaggtctctaatgtttcatcaataaatgtgatgtttctagtctgagtttgctaagtatattttaaaataatcagtaaagttagattttatccatttttatcttaactattgagatgctcatatcatttttcttcttcaatgtgttaaaatggtga

SEQ ID NO: 1461 - DNA, 504 bp, Homo sapiens
  SIMILAR (1)..(282): 1001254mologous to Homo sapiens Polypeptide identified by the signal sequence trap method,accession number Y02377,Smith-Waterman Score=470.
gcccatccacagttgaagcagtgtgtgcgtcaggcaattgaacgggctgtccaggagctggtccatcctgtggtggatcgatcaattaagattgccatgactacttgtgagcaaatagtcaggaaggattttgccctggattcggaggaatctcgaatgcgaatagcagctcatcacatgatgcgtaacttgacagctggaatggctatgattacatgcagggaacctttgctcatgagcatatctaccaacttaaaaaacagttttgcctcagcccttcgtctgatggaagtagtgcgatccaactatgaagcaatgattgatcgtgctcatggaggcccaaactttatgatgcattctgggatctctcaagcctcagagtatgatgaccctccaggcctgagggagaaggcagagtatcttctgagggaatgggtgaatctctaccattcagcagcagctggccgcgacagtaccaaagctttctctgcatttgttggacag

SEQ ID NO: 1462 - DNA, 361 bp, Homo sapiens
  SIMILAR (10)..(234): 721254mologous to Homo sapiens P2X like receptor,accession number Z98941,Smith-Waterman Score=253.
aagttcgagcatatcaagctgaacggatgccagagcaaatcaggctgatagttggtggtgtggacccaaaacagttggctgtttacgaagagcttgcacgcaatgttcctggttttttacctacaaaggacttaggtcagcccacgggatttttagcccagcccatgaaggggaatgcggtttaaattaaaacgagtgttttgccaattaatttaaatggtcttgacatttaatatatgattctgaattgcttcctgggagaataatttacaggggaaaaaacacctatagtttttgagttgtagggattctttgcgtgcaattaagtatgacatacaggggattttagaaaagattgact

SEQ ID NO: 1463 - DNA, 5768 bp, Homo sapiens
  SIMILAR (198)..(1079): 441254mologous to Homo sapiens PRO1512,accession number AF130109,Smith-Waterman Score=411.
  misc_feature (1)...(5768): n = a,t,c or g
caggagtatattgagtatggacaagcagtctagagatcctcctgtgaaaatgcaaggctctatcacaacccctggaagtattgcactggctcaggcccaggctcaggcccaggttccagcaaaagctcctcttgctggtcaagttagcactatggtaaccacctcaacaactaccactgttgctaaaacggttacggtcaccaggccaactggagtcagctttaagaaagatgtgccaccttctattaatactacaaatatagatacgttgcttgtggccacagatcaaactgagagaattgtggagcccccagaaaatatccaggagaaaattgcttttattttcaataatctctcacagtcaaatatgacacaaaaggttgaagagctaaaggaaacggtgaaagaagaatttatgccttgggtttcacagtatctggttatgaagagagtcagtattgagccaaactttcatagcctgtattcaaacttccttgacacgctgaagaatcctgaatttaacaagatggttctgaatgagacctacagaaacattaaagtgctcctgacctctgataaagctgcagccaatttctcagatcgttctttgctgaagaacttgggacattggctaggaatgatcacattagctaaaaacaaacccatcttacacactgacttggatgtgaaatcattgctgctagaggcttatgttaaaggacaacaagaattgctctatgtagtggcctttggtggccaagtcttagaatctagcattcgtagtgtggtttttaggccaccaaacccttggacaatggcaattatgaatgtattagctgagctacatcaggagcatgacttaaagttaaacttgaagtttgaaatcgaggttctctgcaagaaccttgcattagacatcaatgagctaaaacctggaaacctcctaaaggataaagatcgcctcgaagaatttagcatgcagcaactctctggctccaaacgaaagatgtcaacgcagcccagaacagaactccactcccaatcgacacaccacaacaacttctactacaccagctaccaacaccacttgtacagccacggttccaccacagccacagtacagctaccacgacatcaatgtctattcccttgcgggcttggcaccacacattactctgaatccaacaattcccttgtttcaggcccatccacagttgaagcagtgtgtgcgtcaggcaattgaacgggctgtccaggagctggtccatcctgtggtggatcgatcaattaagattgccatgactacttgtgagcaaatagtcaggaaggattttgccctggattcggaggaatctcgaatgcgaatagcaagcttatcacatgatgcgtaacttgacagcttggaatggctatgattacatgccagggaacctttgctcatgagcatatctaccaactttaaaaaaacagtttttgccctcagcccttcgtactgcttccccacaacaaagagaaatgatggatcaggcagctgctcaattagctcaggacaattgtgagttggcttgctgttttattcagaagactgcagtagaaaaagcaggccctgagatggacaagagattagcaactgaatttgagctgagaaaacatgctaggcaagaaggacgcagatactgtgatcctgttgttttaacatatcaagctgaacggatgccagagcaaatcaggctgaaagttggtggtgtggacccaaagcagttggctgtttacgaagagtttgcacgcaatgttcctggcttcttacctacaaatgacttaagtcagcccacgggatttttagcccagcccatgaagcaagcttgggcaacagatgatgtagctcagatttatgataagtgtattacagaactggagcaacatctacatgccatcccaccaactttggccatgaaccctcaagctcaggctcttcgaagtctcttggaggttgtagttttatctcgaaactctcgggatgccatagctgctcttggattgctccaaaaggctgtagagggcttactagatgccacaagtggtgctgatgctgaccttctgctgcgctacagggaatgccacctcttggtcctaaaagctctgcaggatggccgggcatatgggtctccatggtgcaacaaacagatcacaaggtgcctaattgaatgtcgagatgaatataaatataatgtggaggctgtggagctgctaattcgcaatcatttggttaatatgcagcagtatgatcttcacctagcgcagtcaatggagaatggcttaaactacatggctgtggcatttgctatgcagttagtaaaaatcctgctggtggatgaaaggagtgttgctcatgttactgaggcagatctgttccacaccattgaaaccctcatgaggattaatgctcattccagaggcaatgctccagaaggattgccccagcttgattggaagtagtgcggatccaactatgaagcaatgatttgatcgtgctcatggaggcccaaactttatgatgcattctgggatctctcaagcctcagagtatgatgaccctccaggcctgagggagaaggcagagtatcttctgagggaatgggtgaatctctaccattcagcagcagctggccgcgacagtaccaaagctttctctgcatttgttggacagatgcaccagcaaggaatactgaagaccgatgatctcataacaaggttctttccgtctgtgtacttgaaatgtgtgttgaaatcagttaccgtgctcaggctgagcagcaggacaatcctgctggcaatcccaacatgatccgagccaagtgctatcacaacctggatgcctttgttcgactcattgcactgctcgtgaaacactcaggggaggccaccaacactgtcacaaagattaatctgctgaacaaggtccttggtatagtagtgggagttctccttcaggatcatgatgttcgtcagagtgaatttcagcaacttccctaccatcgaatttttatcatgcttctcttggaactcaatgcacctgagcatgtgttggaaaccattaatttccagacacttacagctttctgcaatacacttccacatgttgaggccctaccaaagctccctggctttgtatatgcctggcttgaactgatttcccatccggatatttattgcaagaatgctgggcacataccgccacaagcagaaggtgggtggcctatggtatgcacagctacctgattgatttaattccaaattatttaagcgcctttccttagaaatgtggaactcaccaaaacctatggcaaatcctctacaaggggcactttaagaagtgcctgctggttcttttgcatgatttcccagagttccttttgtgattaccattatggggttctgttgatgtgatcccacctaattgtatccagttaagaaatttgatcctgagtgtcctttccaagaaacatgaggctccccgacccattcactcctaatctaaaggtggacatgttgagtgaaattaacattgctccccggattctcaccaatttcactgggagtaatgccaccttcagttcaaaaaggatttggattcctatcttaaaactcggttcaccagttcactttcctgtctgatctgcggcgaacccttacaggttaattggtttggcttaaaactcatctacgtcttccatataaagcactttctatctcatcaatgcactggtgctctatgtcgggactcaggccattgcgcacatccacaacaagggcagcacaccttcaatgagcaccatcactcactcaggcacacatgggatatctttccaggaatttgggctgtgggacttgggacactgaggggtcgctattctcttttttggaatggcaatttggcaaatcagcttccgggtaccccaaataggcacactcactaccttcaggttggaaccatggcggaaccttttttgcagagggccaatacgggaagccatcccaagaacagatcacaagagtcctcttgggaacggttgattgttaaataggcccacatccttggggtcttcttattaccttcattgagctgattaaaaaccagcggtttaaggttctggaacccatgaaatttgttacacttgtgccccaggaaattcggaaaagttatttccagtcgggtcggcacagttgctggcatggggacaggaagggcagggccccagcaagttaattgggagggggacagggttgcccagttagggacggaaacttgcatctctgttgtacgtgttcagtcttggaggtctcacttgcaccgagttcataaaactgactgaagaatcctttcagctccttcctgaactttccccaggccctttggttttgtgggtaatctggcccaactaactggtggggatcagccctcctggcctaatgtgggcacggttcccaaggtttaaatgccatttttttgacccttggccaaaatttagaagatgctgtgaatatcattttgaaacttgtgtaaatacatgaaagagaaaacctttgtctggaacttcttggctttgtgcaagctgtgtccaaggcaagtacataaactggtaccttgtaatgaagaggcagctgattcccatgcacttgtctgagggcatagctcccatgtccttctgacaatcccctggtgtccccaaaagaatagccaaaaagcccagtttgaatattatggtaacttatttttttaatgtggacaggggaccctgaaaatcacctaagttattaaaaatgtgggatgtgctaggaattgggatatgtccagggaacatggggaagggctcactattgggantcccatgagtttccagtttgtctctacccaaacgtattccaaagctgactgcatttgtacccatcttatttcttttgggggattaatacaccctcagccgccctgagaatgggggtcagctcctttatataaaggggaaaaccagacccaggcctaaaagccccaccccctacccctcaccccccacaatccctctccctgaaacttaaaaacagtggggatttagggaagggggacccaaatcctcattaattaattgttcctcccccattaaccccactgaatgaatggccatacaggctaagctgaataatgacaaagttgaaaggaccaatacagccccttttataaggattttgaatgttttgcaaatgtattggtccctgtgttgtattttgtagcctttccctggggcttcagctcccctacttcttgtatgtgtatgcatactgtagctaaccattaaagtcatgacacacacatgagtcccactgtgccctttctcagtaggcaggcaggcagtgctgggtgggtgaggagggaaaagtgggacaatccaggccctgtaggaccttgggggccatggggggaaccaacaactaacttcttgctggaatgattgatttgattgattgattgatagggtcattcctactactaagctggcatgtttaaggaaattgtatttttcttcctatttatttcaacactggacaaatgctggagcaggtttatctggttaaggctgagtttaaaatacccaggttttaatatccttttcccccaggtatttttttttttttttaaagaaaatgagtagatacgtatttaaaaacttaacccacttaaaatttgccttacctttcatgactgtcaagttttc

SEQ ID NO: 1464 - DNA, 1032 bp, Homo sapiens
  SIMILAR (431)..(625): 531254mologous to Homo sapiens Amino acid sequence of a human phosphorylation effector PHSP-2,accession number Y68770,Smith- Waterman Score=144.
atgaacgaaggaacaagtgaccgctcgaccttctacagcgacagggcgcaggcgctcccgcaccaacagccccccaccccgccaccgccagaggcgcagacaggccgggtcccgagtgtctgtcccaggcccccgccccacagatcccggcccgggagcccccgatgcagggacccgcccgggactctgggccccgcccatacctcaacttcgcacgactgcgtgcctcaagccgacgcacggcctactctcgcactgcagacggggaaactgaggcctgaggcggccgggtggggcagacctcccggcgagcccgagcccccgcccccggctagcccgccctggcccgtaagaagcacccggggcgcgaggcgaaggcgcacagcgggggccaggctgggtccagcagcgcgatggcagctcagcggctgggcaacgcgtgctgagcaagctgcagtctccatcgcgggcccgcgggccaggggcagtcccggggggctgcagaagcggcacgcgcgcgtcaccgtcaagtataccggcgggagctgcagcggcggctggacgtggagaagtggatcgacggcgcctggaggagctgtaccgcggcatggaggcagaatgcccgatgagatcaacattgatgaattgttggagttagagagtgaagggagagaagccggaaaatccagtcccagcaagcagggccccttatgcaggctcctgcaggaatctgggtcaaggggcatgctcatgaccaaggtgaccgatattgactcagtacagaatattagctcctcgcctaccttgaaaagcgctgtgtcctgtgtagaacggcgccgggcgcacagtaggcgcttgcccaagaacctactcccaggtggccacgttgtctccaagcaccgcagccctctacgtgtgacctgctggcccgagtggtccagcctggtgaacgcagccaaggcatacgaagcccgggcaagcgtcgtcatctctttgatgccagcgaaccacgttgaccaacagcggaagtga

SEQ ID NO: 1465 - DNA, 429 bp, Homo sapiens
  SIMILAR (1102)..(1476): 861254mologous to Homo sapiens gag,accession number AF156961,Smith-Waterman Score=573.
ttttaattgttaacagaaccaatttaaatacaacttaatacacaaagcaaagctgggcggcgttccggggggccagggaaaagtgccaagagggtcaggggtgaagcagtccgggcccggtccctggagggggctgaggctgccgtcgtgggaggggcttggctggcggaggccgggctgcctgtggaggccttgaagctttgccagcagctcctggatgaagtcctcgacaggtttcccacatgacttcaggagtccctaaaaccccctggattttccggcttctctcctcttcactctctaactccaacaattcatcaatgttgatctcatcgggcatgtctgcctcctagggccagggagggaggggtgcttaggatccccttccctccctccctcgcctttgtccagggctctgcaggagctcaa

SEQ ID NO: 1466 - DNA, 614 bp, Homo sapiens
  SIMILAR (24)..(860): 281254mologous to Streptomyces coelicolor A3(2) putative translation initiation factor IF-2(fragment),accession number AL355913,Smith-Waterman Score=146.
  misc_feature (1)...(614): n = a,t,c or g
ttttttttttttttattgttacagaaccattaaatacaacttatacacaagcaagctgggcggcgtccggggggcagggaagagtgcaagagggtcaggggtgagcagtccgggccccgggtccttggaagggggctgaagcttgcccgtcgtggggaagggctttggctggcggaaggccggggcttgcctgtgggaggccttgaagctttgccaagcaagttccttggatgaagtccttcgacagggtttcccacaatgactttcaggagtcccttggattttccggcttctctccttcttcactctctaaactccaacaattcatcaatgttgatctcatcgggcatgtctgcctccatggcgcggtacagctcctccaggcgcccgtcgatccacttctccacgtccagccgccgctgcaagctccccggccggtcatacttgacggtgacgcgcgcgtggccgctttctgcagccccccgggaactgcccgcgcatgcccgcgcggcccgcgatggagactgcagcttgctccagcacgcgctttgcccagccgttgagctgccatcgcgctgctggaaccagcctggccccgctcgtgcgaattntgg

SEQ ID NO: 1467 - DNA, 469 bp, Homo sapiens
  SIMILAR (314)..(84): 1001254mologous to Homo sapiens replication protein A 14kDa subunit,accession number L07493,Smith-Waterman Score=405.
ttttctccctcaaacaagaagggcttcctttaatagactttaatatagctcatttacaatcgtatgaaaatccatcaagatcaatcatgttgcacaatccctaaaggataaaactgagggaagtcatggataattttcacagcttcattgtaaagtccaagatcaaaaggatggctatcttctttaaactggacataagatgtacacaagatggtggccttggcggttactcttccaaccacttccacaattccagagatttcttcatcaaggggttccatcaactcgatggttccattttttccttctccatcttttccagcctccctacgaagcagacaggcttgtcgatgaattgagctagcatgccggcgttgatgcgcgacctgggcaagtccatcatgtccaccatgattatggtccaagactgcggctggcgggaaacccacggacgactgaaactgtgcgc

SEQ ID NO: 1468 - DNA, 1110 bp, Homo sapiens
  SIMILAR (403)..(116): 511254mologous to Homo sapiens nucleotide-binding site protein 1,accession number AF298547,Smith-Waterman Score=238.
atgtctgcccccaacacctatggtgttaaccactccatgttagaatatggtgctctggatgaacgtggctcccctaagtgttggaccataatcatggtggacatgatggagttgcccaggttgcgcatcaacgctggcacgctagctcagttcatcgataagcctgtctgcttcgtagggaggctggaaaagattcatcccactggaaaaatgtttgttcttttagatggagaaggaaaaaatggaaccatcaaactgatggaaccccttgatgaagaaatctctggaattatggaagtggttggaagagtaaccgctaaggccaccatcatgtgtaaacttatgtccagtttaaagaggaacaacaaattgaacaactatccacataagaacaccttcataagaaccaaaaatcaggaaaccaaggcgccttacccctgggagggtttctttgtggggctcttgccggtccggacctctgcgctttaccggataacttttgccggcttttttcccttcggggaaggggtgcgggcttttttcatagctcgccgctgtcgggtatctcatccccgtgggttggctcgttcgttccaagcttgggcgataacctcagggatggtgataagcacatttgtgtctgctcccatcatgtacgtttctgcctggttactgacctttcccactatggaccctaagccattggcatatgccatccagaatgttagttttgatataagtattgtcagcctgatctccttgatgatcaccacagcagtcaccctgttctgcagcatcctgatagctggcatatccctcatgtgcatgaaccagactgcccaagcaggaagctatgaaggtttcgatcagtctcagagccacaaagtggtggagcctggaaatactgcttttgaggagagtccagcaccagtaaatgaaccagaactttttacaagctctattccagaaacaagctcctgcttcagaggctgcaagggccttgcagtgcccgtgatgcccaaagcgctgcacgtagtgcccaagcccttccactgccagccatattccctctccgagcctattctgccacctctccctgcagctgcctga

SEQ ID NO: 1469 - DNA, 946 bp, Homo sapiens
  SIMILAR (286)..(531): 861254mologous to Homo sapiens replication protein A 14kDa subunit,accession number L07493,Smith-Waterman Score=331.
atggggattctgctggttcctgagtacaacaaatctgactatacattaaccaagatctcagtgaaggttataataaagtgttggggagggacagcattaaaggtaaagaactggcaagagggaaggcgagacagcagtgaacagctggtacgcagcacccacagcaccgcggcagcagctagtgccgactcccgcctagctcttttgactctgttcgcgggaagaatggggaaacatttcagtcgtccgtgggtttcccgccagccgcagtcttggaccataatcatggtggacatgatggacttgcccaggtcgcgcatcaacgccggcatgctagctcaattcatcgacaaacactgtctgcttcgtagggaggctggaaaagatttcatccccaccggaaaaatgtttattctttcagatggagaaggaaaaaatggaaccatcgagttgatggaaccccttgatgaagaaatctctggaattgtggaagtggttggaagagtaaccgccaaggccaccatcttgtgttacatcttatgtccagttttaaaggaaggttagccatccttttgatcttgggcttttacaatgaagctgtgaaaattatccatgacttccctcagttttatcctttagggattgtgcaacatgaatggatcttgatggattttcatacgattgtaaatgagctatattaaagtctaataaagggaggcctttcttggtttgaggaagaagattctgggctttctcatatttaatttgctgttttaaagatattcccacctagagtttttgatggaactgatatattgacagttctcaccgaagtccttttataaagaattgctactccaatatatggtcagattagatgcaagaataaagcagttgtccgagtctaagtttctattttattaataaaaactaaaatggtacgtac

SEQ ID NO: 1470 - DNA, 723 bp, Homo sapiens
  SIMILAR (632)..(78): 481254mologous to Homo sapiens dJ261G23.3 (novel protein),accession number AL136131,Smith-Waterman Score=309.
  misc_feature (1)...(723): n = a,t,c or g
taaantgggcctcctnacttccccaanaacaagttccaggaggaacttctggaaccactgcttctctgtncaagtgaataccaggtttcccaaaggtgtttcttgaattagccagacattgtcccttcaagaaaggggttgaccccaaacggggcattgcgcaaccccttgttccaagccgggggccctttttttgtagatgggctttgacgggagccaggagcccagcgccgtcaagttacccggttgagtttggggtttgctcttcgggaacaaactccttccaggaagccgaggccttgtgatttggtaaatagacctgctcggtgggccatcttcaacaacactccctcgaatcttgcggtgttccttcccctggcaataggccctgtgaatctttcggggcaagcaatccctcccatgaggccggatgaaactggctaagcaagcagaacatcgtccatagttatacttgtgcttcaggttccaactggcagatggggcactggcccagaggggttaggaggatttggactctccttgggagtcgctgtgatacggccttcaattatagttgtcttcccttcttgggtctccaccacttccctgaacccgcgagctggaagccgagacccagctggtcgctgccgggcccgctagtagcccacggagaaaacgcccacagccgaacaccagagccttgaggccccccgcacgcgtggg

SEQ ID NO: 1471 - DNA, 747 bp, Homo sapiens
atgatgccagggcagctcttggatgcaggagagcactgtcagccagtcaggaaaccgcagtctatgagcacagggaccacagagccaacccctcacgtggcctttgctcttctccatttgattctcacagaagccccggggatagatgacggcaccctgcccacgtcacagacgaggaagctgaggccggaggaggagggctatctgctacagctggaaaaaacaatcgggcgtttgctccgaggaaaaagctctctgacgtttgaaaggcgagatggcatcacggataacagcagagcttcccagcccgccccttggaaggcgcaggagaggaaaaaggaaacatttgcaccaccccgcacctgcgacgtggcaatacggctggagcaacacaagcatgagtttaaaggcagcatttcgcagaggcctggggctctgaggggcgccaaggagccctggctttcatttcaggaaatctgggagtctttacttccgctcagtgcctcagtctctcccaaagcccaggacagtctggacacttatgaggtcaccaataaatatgcaattgatgaaagcaggagcagccatgagaaagctattcaccaggatcctgtttacactccttttgtcaaaacaaatccgttgctccttaaggaattggagcacaagtcctggtctgtcttatccatggttgtgtgccccagtgcagagaacaaggcctactacgcggcaggttctcggaagtga

SEQ ID NO: 1472 - DNA, 933 bp, Homo sapiens
  SIMILAR (769)..(1581): 901254mologous to Homo sapiens p40,accession number U93573,Smith-Waterman Score=1246.
atgggagagcaatccagggcccacacagctaaatccaagtccgtgcaaagtgtgctgggtgagattggcctaaggaaaggggaaaagagtgggaacaagtcctttcacccagagataagggggtgcaagtgttcaccggcccatggcataatgggaaggaagcgtttgcacggaccacaaggtggcacagcagctctgcccacagtcggccagcttgggatgggaggaggggtgaagaagacagcctcagtcagggccagagtgggaaggcagatgcatcctcacactccctcccgcttcctcatgacagataccgccagtgccccggatctcagtgaaaacttcagcctctgcctcattggaggcgacagccatgggcacagagaagggagctgttctgatgagaggcctggaactgccaccaacccaccacgacttcaggcaagttattcagccttcctgtccccatctgttcaaaaacaaaaagttttagaagttgggaattccaaaaccaagcccccagatgattcagttcctggtgaaggcgctcttccctgctggcaggcagccaacttcttactgtgtgttcacgtggtagagatagagtgctctggtcccttatctccattgacaagtcctaaaccaaacattgcaaaggaaatggcagaggggattagctcttctgaagctaaagatctgtttgcagtcagaaaacagaacatcacgatccaatcattcccagccagtgtttgtggaaatgagcagcccagaaaccgctctgtggaagtgatcacccagacactgccctgtggaagtgagcgccccaaacactgctctgtggaagtgatcaaccagacactgctctgtggaagtgagagtcccacataccactctgtggaagtcagcaccccagacaccgctttgtggaaatga

SEQ ID NO: 1473 - DNA, 689 bp, Homo sapiens
  SIMILAR (976)..(2310): 881254mologous to Homo sapiens putative p150,accession number U93574,Smith-Waterman Score=2196.
ggccagacccgtggggatttctgaacccaaaacatcaaatctgtgtgggaatcgagcatatggaaaatctctgataccgccagtgccccggatctcagtgaaaacttcagcctctgcctcattggaggcgacagccatgggcacagagaagggagctgttctgatgagaggatccagacatctcaagaagatgactgaagagtatccagcccttccccaaggagcagaagcctctctaccactgacaggcagtgcttcctgcggcgtccccggcatcctccggaaaatgtggacaaggcacaagaagaagtctgaatatgtgggagccaccaacagcgcctttgaggccgactaaaggtgaccctcttcaagtgccctgtgttggccaaggttccccggacaagaggaaaaaccttcaggattgaaactgagccacacgcacctctgctagtagctggtccaaacccattatcctccctcactcattgattaccctgggatagggcacaggaaagaaatgtccctcgaaggcaatataaaactgccccttcttagaattgctaaagccattggtctgaaagtgactttgggaggtcataaagtttgtatctctatctttaagccaaaaatttaacctttcccggtcctttttaaagccctccaaggaagcaaaaaaccaaaaaaaaaaa

SEQ ID NO: 1474 - DNA, 2507 bp, Homo sapiens
  SIMILAR (1)..(3003): 971254mologous to Homo sapiens unknown,accession number AF149422,Smith-Waterman Score=5062.
tcaatgccttctgcttttatctgctcggcctgaaacagtgacgtccagccaagaggccagagctagggctcctccgatgctcctccgatgctccaacggtggtggccctgctcctcgatgaggccggttcccgcaaggccgatgcttaggcatttcagagagatgcactctccctcttcttatcgctttccccttcaggtctgcaagatggcagcccctttggtttgccctccagccttctcttaagtcctggagccgctctggtaattgagccttccttctggcatcctctggaaggctaattgaatacagcaggaggcagtcacagagctttttagcatttctacttcgaggagggcctaaaagaagcacagcagatcttcgccccggcaaacccacaggggcgctgtggagtttcttcatttttgagagaaacacaacctcttggacatccatcagcccctccatgaaacgtctgctcaacatgtgctctctctctcttcgggctccaagctttccataacgcttccaggttgccaaaccgtcaatcccagccactttgaagacccctcctaatgcttccctgccattcacaactacaccttgtggtgactgaacagctgttctgtttcgcttcaggctgttttcctggtggaagaggaagttaattttctttccgggcaaaatgaatggtgtctgcaaatagccagaggccacaggagcatctgtgtttaaacaactgaagaaagcccacagggctgcagaacggagagagaacaagaggcataaggagatgccagacagtgggctttggcagggcagggaaggcttgcgtttgtcaggcgtggccatgtctccctgctcttgtctttgagctgcttcctctcgttctatcttctgcagataccactcctctgtggtctggggattttctctgccaagaacatcatgcagtttgggggtgcagttcccatttgtctcttgacaaagggaaacacaagtggattgaaagcaaaaacataagggctctttccccgaagccattcctgaatcctgaaatgtggccaatggaatgtggaggaagtggcaggtgcccgtcccaaacctatcctcagaagctgtctgctgggaaacaagcccaggcaaatcccagcttcctgcattttgcttcatgctcagagctagccagctgttcagcaagcactcgatcagaggctgttctacgacaagggcatcgttcctgccttgagtcactctcaagctaatcagcgtgggtggctggtggaaaacatgcctcagttcaaggtaaagccggatttccgtggcgggggtcccacaggacctcctgtagtagcccctgcgctgtgtgtctggagcgcggtcctcggccttattgaaatggtccaagtagacagctgcttgttggattccagtgcaggtacctgcgatgtttacgtcccaacaccgaagcccaagtgtggggactgaccatttctcaatggaagtgaaaatttggggattggactttgaagacggattactaaataataattattatatggtaactgaagcaacctacttttgaaaatcaaactgtattgggtagtgggaggtgggaagggaagggctttgggaaaggggatggaatatccctttttacctttaacagacttactttaatcttctcgatgtagatgtttaatgtaggtacttcacattgcaaacgccttttatgtctatttacaagctcagatgtctctgctctcctgaatcttggggcatgccatttctgtaatccaaaaatccctgtaggcgtgctaacaaattccggggtggtccgggtttggcagatttgatttttaaaaaaacgtattatctttaataaaatgttattatgtcaaccagtgaggctgccctgaacaaaaaaaaacaaaaagaaaaaaaaaaaaaaaggaaagaaagaaactgataaaaagaggcattccagcccctatgttattgatggaaaaagaaaaagaagaaaagcaatcttcgcagtacatgtttacttgttcgaaaaaattcccgggacaagactacccttgtttttaagtttttcagtattctgaaaataccagtgtgtggcagttctcgcagatgttacctaaaactgctgaacttgaccggcagaatgttctgccgttttctgctccctcgacacttgattggagggctgtcgacctctcctcccgtgggggccttccccaagtgcctatcttctctgatagtcatgggaggaggttacacttaattcattgggagatgtaagttgttggttttgttttgttttgtttttagaaaaatatatataaatatataataggatatctatcgctataggaattaatgcatttaataaaaatgagggcttttttagagggaaggacccaaaaaattccaatgtctttaaaaatatatttaatgggcaatgccaaaagtcttcctgcttccgtgctgaactttagaac

SEQ ID NO: 1475 - DNA, 351 bp, Homo sapiens
  SIMILAR (172)..(222): 411254mologous to Homo sapiens Human secreted protein, SEQ ID NO: 6994,accession number G02913,Smith-Waterman Score=44.
atggcctatgaagggcatgtggtagcattagacgagaggccgccagccacagcccagatgatacagtccccacacgtcccgtacaccacaagcacacaggcgaccctgccagggaacacgcatggctcggagctcccaagtactctctcctggcaagtgaggagtgtaaataaatcttgggaggaggacatgagagagaaacacagtccctggaggacagcattctggagtggccacatgagttggaaacttccatgccgaagccttaagaggttgacttctcagcctcatcttcagaactgcttaacggtggtaacagtcggcagccagcacgtggtggcactgcgctga

SEQ ID NO: 1476 - DNA, 1272 bp, Homo sapiens
  SIMILAR (1277)..(1342): 631254mologous to Homo sapiens Human secreted protein, SEQ ID NO: 7083,accession number G03002,Smith-Waterman Score=72.
atgcttggaggtggagatcttgctgacaaaacagtgaaggtcaagggcgtcttttatggcagcagcccaacaggaaatctgactaaccaacaagtaattcttttgcacctctatggaagaaaacattctccgagtgttcagggagaatccaggcaggaaaagcaaagccatcctcatgtggtcatgggagaacaattaagtatcaggttgtgtgatcctgaatattatgggagaagaacagatcatttagaaaagaatggaatagggacccaggccacttcctggggcactcaaacatttgtaggtctgatagaggagggaaaactggcaaatgagcccaagaaggagggcccagtaagaggggtcaagctggtggatgaactcagttgtgctgactccttgaggtgtatggtgacccaggacgggcggttggaaaatgtggctgtgattcttggagaggtaatgaataagggaaaagctggaagagcaaaatggctcacagtgcctgatgattgtgccacatgcctggaagaagagcagtatgagcaatccgaaaataaaattaagaaaatggaagccaagatggtggccaagttggagtatgagtctgtgctgtgtgtgaagccaaacatcagcgtctactggattcctccctgggcctccaactgtgattacagggcatctgactggaaattagaccagcctgattggactgttcacctccgaatcatttcaaaagggaagactgcctatatcaaactcgaggataaagtttcaggggagctcttcactcagataccagtagaacaatatcctggtattgctgtggagacagtgacagattccagctgctactttttaatctggattcaggatggtcctgggcagagtgctgtcattgacactgctggcttcacagatcggggagatgcctttgaatttaatgtctccttgcaggatcacttcaaatgggtaaagcaggaatctgagatttccaaggaatctcaagaaatggacgcttgtcctaacttggatctgggcttcaaagaaagacaaaccatcaagttgagtacggggaacattacaaccaagaatggatgtgcttctaagcccaggactgcaatgggtgggggcctgagcttactcgcatccccaccaggaggccaagtcagtattcccccactgtcctcctcagttgcatcagcaatcatgtcaccctaccagccattccaaaatctaaccatggaggcagtgatgcagatatccttttag

SEQ ID NO: 1477 - DNA, 783 bp, Homo sapiens
  SIMILAR (570)..(923): 791254mologous to Escherichia coli ugpC protein (AA 1- 356),accession number X13141,Smith-Waterman Score=466.
aagatggcgaccgagttggagtacgagtctgtgctgtgtgtgaagccagacgtcagcgtctaccggattccgccccgggcctccaaccgcggttacagggcctctgactggaaattagactatgcctgattggactggtcgcctccgaatcacttcaaaagggaagactgcctatatcaaactcgaggataaagtttcaggggagctctttgctcaggcaccagtagaacaatatcctggtattgctgtggagacggtgacagattctagccgctactttgtaatccggatccaggatggtactgggcgcagtgctttcattggcattggcttcacagatcggggagatgccttcgactttaatgtctccttgcaggatcacttcaagtgggtaaagcaggaatctgagatttcccaggaatctcaagaaatggatgctcgtcctaagttggatctgggcttcaaggaaggacaaaccatcaagttgtgtatcgggaacattacaaacaagaaaggaggtgcttctaagcccaggactgcaaggggtgggggtctgagcttactcccacccccgccaggaggcaaagtcactattcccccaccatcctcctcagttgccatcagcaatcatgtcaccccaccacccattccgaaatctaaccatggaggcagtgatgcagatatccttttagatttggattctcctgctcctgtcacgacaccagcaccactgtattgcggccgctctggaggatccacgctaacgtacgcgggcgttacact

SEQ ID NO: 1478 - DNA, 826 bp, Homo sapiens
  SIMILAR (139)..(225): 1001254mologous to Homo sapiens Human 5' EST secreted protein SEQ ID NO:282,accession number Y11630,Smith-Waterman Score=178.
  misc_feature (1)...(826): n = a,t,c or g
gggcaagctctgtgtgattgattggaagacatcagagaaaccaaagccttttattcaaagtacatttgacaacccactgcaagttgtggcatacatgggtgccatgaaccatgataccaactacagctttcaggttcaatgtggcttaattgtggtggcctacaaagatggatcacctgcccacccacatttcatggatgcagagctctgttcccagtactggaccaagtggcttcttcgactagaagaatatacggaaaagaaaaagaaccagaatattcagaaaccagaatattcagaatagggagcaagttgctatttgggaacattcagcaccttctcacagtttgggaacatatattgctgtttactccagtgtaaaaatgaggtgccactggatctgagtgctacacgaacacaagtagaagtattaatttgttgaaatgtgttgttaccaaaaagactgaaaagccccaaagtctagatataaagacctagacttcggcacgcgaaatcccagctatgctacctcttatttacctgaaaggaggacacgcaggatgggcagtcatgctggtgactcttgtactcccttgagggacattggtnnnnnnnnnnnnncctggccccaggcaggatgcccagtctttgacctgaaattggaaggcagtgaggctgagggtgccaaaatttccccagggttcacccaaaggggaaggggctaaatgcccccagctgggtgcaggggggacccattagcccattaccggtggcaaaaccaaggcctaaaacttgtttaatacattggggttttttatatatttcg

SEQ ID NO: 1479 - DNA, 196 bp, Homo sapiens
  SIMILAR (94)..(195): 741254mologous to Homo sapiens HSPC004,accession number AF070660,Smith-Waterman Score=104.
atggctgaaagctgggacagcttcccattggcagcggacagaattcacatccggtttgcacgccggaccggagagcgcggggcagccatggtgcggttcaagcacagcctcgatgaccgagttctgagcagcctcgtacgggacacgatcgccagggtgcacggaactcggcgcgccctgctccatggcttcgcgg

SEQ ID NO: 1480 - DNA, 185 bp, Homo sapiens
  SIMILAR (183)..(100): 821254mologous to Homo sapiens HSPC004,accession number AF070660,Smith-Waterman Score=107.
tcaagtgggtaatgtctgctggttggcagctatccagtttggaaaactgtggaagatgctgttgctacccagattgttctgttcaacaagtgggcctgaagcctgagcagtgtagccagctgactcctcctcctcctctagtaagcagcttcttgtcacagacttctggatagcttcccgctctc

SEQ ID NO: 1481 - DNA, 411 bp, Homo sapiens
  SIMILAR (1010)..(1597): 771254mologous to Homo sapiens putative p150,accession number U93564,Smith-Waterman Score=774.
aaggcagccatggtgcggttcaagcacaggtacctgctctgcgaactggtgtctgacgacccccgctgccgcctaagcctcgatgaccgagttctgagcagcctcgtacgggacacgatcgccagggtgcacggaactttcggcgcagccgcctgcctccatcggcttcgcgggtacaataagaacatgtcagaagttcctaattcagtacaacaggagacagctgttgatcttgttgcagaactgcactgatgaaggagagcgggaagctatccagaagtctgtgacaagaagctgcttactataggaggaggaggagtcatgtgaggaggctgcaaaagcaatggagtgaacctctgctccccacacagctggctacactgctcaggcttcaggcccacttgttgaaca

SEQ ID NO: 1482 - DNA, 470 bp, Homo sapiens
  SIMILAR (131)..(33): 691254mologous to Homo sapiens Human nm214_3 secreted protein,accession number Y28680,Smith-Waterman Score=132.
cccacgcgtgcggtggaggcagccatggtgcggttcatgcacaggtacctgctctgcgaacaggtgtgtgacgacctccgctgccgcctaagccttgatgaccgagttctgagcagcctcgtacgggacacgatcgccagggtgcacggaactttctgcgcaatcgcctgctccatcgccttggcgcttgcaagggcgctgaacgaagaggggaacccggaaggatggcgggatgtggcgggagcaagcgccggaggaagaaagaaggggcacgagtgcccaagcccgtgcaccgttttttgtaaggtatctctttaagcgcctgggaccccaagcgagagtccgaaattagcagagcgctaaaaggaggggcccgaaggcagtggggctttgagctagaagcctctttttacctgcttgacaggtaatttctgtaattggttgtgattgaatttgatagggtagagaag

SEQ ID NO: 1483 - DNA, 990 bp, Homo sapiens
  SIMILAR (34)..(540): 621254mologous to Homo sapiens HSPC004,accession number AF070660,Smith-Waterman Score=429.
ggcacgagcggactggagagcgcggaggcagccatggtgcggttcaagcacaggtacctgctctgcgaactggtgtctgacgacccccgctgccgcctaagcctcgatgaccgagttctgagcagcctcgtacgggacacgatcgccagggtgcacggaactttcggcgcagccgcctgctccatcggcttcgcggttcgatatctcaatgcctatactgggatagtgctacttcgatgcagaaaagaattctatccagcttgtgtggtcagctcttcccttcatcacatacttggagaacaaaggacaccgttacccatgctttttccaacacaattaacattgtgggggggacaataagaacatgtcaggaagttcctaattcagtaccaaccaggagacagctgttgatcttgttgcaagacctgcactgatgaaagggagaagcggggaagcctatccccagaaagtcctgtgacaagaagctgccttattaagaggaggaggaggagtcaggtgatggaggctgcaaaagcaataggagtgaacctctgctcccccacacagctggctacactgctcaggcttcaggccccacttgttgaacagaacaatctgggtagcaacagcatcttcccacagttttccaaactggatagctgccaaccagcagacattacccacttgaaatggagcactcagttaaactgaagttgcctttacctaccattccctggtgaagtgttgcaggttgtgaactctgtacacatctttattgcttggctaagagtacatttaataaatgtatctggcttccgtggcatttagcatacttatattacagaaagggcttatggagtcccactcctccaaaacatataaacaaccaccaacaccactcccaacccaaaaccatctcaccaaccctatcccataattacacacaaaaaccaatccccgcgcggcgtctaataccttccctttcctccc

SEQ ID NO: 1484 - DNA, 366 bp, Homo sapiens
  SIMILAR (118)..(180): 711254mologous to Saccharomyces cerevisiae Yel044wp,accession number U18779,Smith-Waterman Score=87.
atggaagccatgagtgagaataaaatggtgccctctgagtttagcacaggacctgtggaaaaagctgccaaacctttgccatttaaggatcccaactttgtggtaagcatcgaagacttcagtattgatgctcctccatcctttaagccagctaagaagtattctgatgtttcaggtctgcttttgttgaatatggaccacctggaggaagaacaggaccttaggcaaggcagccctccagctgagagaggccctgaaagcattgtatctgtcaccagccctgtggccaaaagtcgtgatggaagctgctcagtgcacatgtgtcttatacgctactgggccacatcatggctgaagcctgaatga

SEQ ID NO: 1485 - DNA, 2814 bp, Homo sapiens
  SIMILAR (2041)..(4410): 821254mologous to Homo sapiens putative p150,accession number U93568,Smith-Waterman Score=3314.
ggacgggcgaggagactcgtggtctggttctgggacttccctaacagcatggcccctaaacgccagtctccactcccgcctcaaaagaagaaaccaagaccacctcctgctctgggaccggaggagacatcggcctctgcaggcttgccgaagaagggagaaaaagaacagcaacgaagcgattgaacacattgatgaagtacaaaatgaaatagacagacttaatgaacaagccagtgaggagattttgaaaagtagaacagaaatataacaaactctcgccaaccattttttcagaagaggtcagaattgattcgccaaaatcccaaatttttgggtaacaaccatttgtcaacccatccacaagtgtcttgcactgctttggggagggaagatgaagaggcactgcaattatttggaccagagttgaaagtgacagaattggaagatattaaatcaggttacagaatagatttttattttgatgaaaatccttactttgaaaataaagttttctccaaagaatttcatctgaatgaggagtggtgatccatcttcgaagtccaccgaaatcaaatggaaatctggaaaggatttgacgaaacgttcgagtcaaacgcagaataaagccagcaggaagaggcagcatgaggaaccagagagcttctttacctggtttactgaccattctgatgcaggtgctgatgagttaggagaggtcatcaaagatgatatttggccaaacccattacagtactacttggttcaagataaggatgatgaagaaggagaaggagaagaagatgatgatgatgatgaagaggaggaggaaggattagaagatattgacgaagaaggggatgaggatgaaggtgaagaagatgaagatgatgatgaaggggaggaaggagaggaggatgaaggagaagatgactaaatagaacactgatggattccataccttcctttttttttaaattttctccagtccccgggaagcaagtgccagtctttttttttttttttttttttttttttccctcttgtgctcagtcgcccctgtttcttgaggtctcttttcttctactccatggttctcaatttatttggggggaaataccttgagcagaatacaatgggaaaagagtctctacccctttctgttcgaagttcatttttatccccttctgttctgacaaaaacctgtatggaatcaacaccaccgagctctgtgggaaaaaaagaaaaaccttgctcccttcgctctgctggaagctggagggtgctaggcccctgtagtagtagtgcatagaattctagcttttttcctcctttctctgtatattggccgagagagtccactggtgtctccatgtggaatttgggacaggttagcatttacccaaccatgtatctgtctactttctccttgtttaaaaaaagaaaaaaaaaacgtaaaaaaatggggtttatagaaggtcagcaaaggggtggggtttgagatgtttgggtgggttaagtgggccattttgacaacatggcttcccctttggcatgtttaattgtgatatttgacagacatccttgcagtttaagatgacacttttaaaataaatttctttcctaatgatgacttaagccctgccactcaatgggagaatcagcagaaacctgtgaggatcttatttgggaattgacattctctattggtaattttgttcctgtttatttttaaaattttctttttgtttcactgggaaagggaaaggatggatggctcagttttaaaacgtttaaaagtgttacaagttggcttttgtttacaattaaaacttaaatgtggtacaccaaggggttttgatgcttttctcttcagcatagggtatgctttactatggaccttcccaagttttgacttggtataaccatcactgtcaaaactttgtcacccctaaccttccgtatttttttgatacggcacttttgcagggatgacctcaggggctaatggtgggattgaagtaatggggattttggaatcaatggtattaataatcccccataggctggggaaaccgtgggttcaatttgcccattgggttcctgaaaagtattccacatctttggaataccacaatagcctcaaatactctctgaggtacattgtgcccgttgattttttatctccaagtgggcagtttttaaaattgggcccttttacctgggatataaattaattggtgcctgccacccacccatccaacagaccgtggtgctcctaatgcccaagttattacacggggacagttggctgggcatgtctttcattgggctattattaaaatgtgggcccaagaagataggctctcagtaaagaggtctgatggtgagcagtaactgtccctgcctttctggtcataaagctctccaaatgtgaccatgtgaatcctggggtggggataatgggactcagctctgtctgctcaatgcccattgtgcagaggaagcaccctaatgcataagctttttaatgctgtaaaatatagtccgctgaaattaaaatgccccttttttagagggtgatttaatgggacagtctggtgaaacttcaaaagctttttgatgtattaaaacttgattaaatgggaactttttccatcaattagggcaaaagtgttaaccaacctatctagatggatagtatgtaatttctgcacaggtctctgtttagtaaatacatcactgtataccgcatcaggaatcttgctccaataaaggaacataaagatttaaaaaaaaaaaaaaaaaagtttt

SEQ ID NO: 1486 - DNA, 276 bp, Homo sapiens
  SIMILAR (1639)..(2352): 451254mologous to Homo sapiens envelope protein,accession number M12140,Smith-Waterman Score=463.
atggaggtgtggatggtggaggcgcagatggtggaggcgaggatggtggaggcgaggacggtggaggcgaggatggcgcagctgctccctgatgccctgcatactcacgctcagagcagcaaccagaggcgagagctagggtggaagtccactgaagcgaaacaggaagagccgacaggtccccaaattcaagcggcaaaagccagagctttgtttgtgcattttgtccaattctttgttcaaagcaccaagaacctggacaccctccaccggtaa

SEQ ID NO: 1487 - DNA, 420 bp, Homo sapiens
  SIMILAR (237)..(166): 831254mologous to Homo sapiens Human secreted protein encoded by gene No. 96,accession number Y27662,Smith-Waterman Score=116.
atgcccctgcagcataaaacagcatcctcggggtttgtaggtccccattgtgttctgaaaactgggaaatccaagatcaaggtgctggcagatctggtgtctggtgagggttctcttcctggtgtgcagaaggacatcagtcatattgttaccagtggagggtgtccaggttcttggcattttgaacaaataattggacaaaatgcacaaacaaagcgaggaaagaatgaagcaacaaagcagaggtttattgaaaatgaaagtacactccacagggtgggagcaggccaagtagaggggctcaagagccctgttacagaattttctggggtccaaatatcctctagaggtttcccattggccatttggtatacaccccttgcaaatgaagtagtggccctcaatcagacgctgaagtga

SEQ ID NO: 1488 - DNA, 477 bp, Homo sapiens
  SIMILAR (181)..(453): 421254mologous to Homo sapiens Kruppel-associated box protein,accession number AF028840,Smith-Waterman Score=196.
gggatagccccggagatgcacctgataacccggtcggtacttgcttcacgcagcgagagtaagcagcatatatctgtgctgttctctggtgcatcctcgctcactgcgagggcttcgctgatcgcgctactgcggcgagagtactgcccgtcactgggtaggtgggacttgaaattcattttaatagaaggaattttcgtggatataatctacaaccgattttgctctgcgcaggtgagcaaggtcatgctcgtgctgaaggctctggagtcttcagacctcaccgaggttgtcggttacggcttctatttatacaagtgccagaccaaacttcatactggagagaaaccttacaaatgtaaggtttgtgacaaggctttcatgtgccattcttatctggcaaaccatactagaattcatagcggagagaaaccttacaagtgtaatgagtgtgatctaagtgattgtacacaatag

SEQ ID NO: 1489 - DNA, 892 bp, Homo sapiens
  SIMILAR (9)..(407): 351254mologous to Caenorhabditis elegans Similar to cuticular collagen; C18H7.3,accession number AF067607,Smith-Waterman Score= 107.
  misc_feature (1)...(892): n = a,t,c or g
cacttttatttctttttcctttatttcactggctggaacctttcatattgtgtggaatagtagtgataagaggggacattcttgccctcatcccaacctctaggggaaactatgctttcaccagtttgtatgatgattctgattctgtaaggattggtaggtgatcttgagttgaggaagtttcccatgatactgctttccatactgaccgcagtatttcagattcccacaaaatgtacgaaaatagtttctccacatccttgcttgtgaagcaggttcactgcacactggttgccaatgtgtctgagttgagtgagagataatctcacggacacacagtaagttacatgaagtgaatttggtacatacagatcggcagatacctgggattcaatgcattctgctccccaaggctcaggaaatccacccagtgcagatgcagtctctctgtatgtgttcaacttgcatcacagctgtgggaggctggaaggcggcccatcctgggtttcatgctccagggatgcatggcacgttggcttttctttcttgtccatttattttcggtttttttctctttctttcatggttttctttctctttttcaacttctctttcttttctctttctctttactctctctcttctctctctttctgcttccagggtaggtgggacttgaacttcattttaatagaaggaattttcgtggatataatctacaacaaattttgctctgcgcaggtaagatccgttttcagaccaaaaccctgaaaacaagcgcagccagtcaagcgaacggaagcgcaggcccggcccaggctttgtcccggcccaggctttgtcccggcccgcgaattccnccngctggncagaggtcctcaggggcgccatc

SEQ ID NO: 1490 - DNA, 467 bp, Homo sapiens
  SIMILAR (56)..(160): 1001254mologous to Homo sapiens Human BS274 protein epitope 3,accession number Y08477,Smith-Waterman Score=181.
caccctgccgctctgcagagggtctgtggcctcagcttccttcccagtcagcccgctctgcccccaggaggttcccgaggctaaggggaaacccgtgaaggctgcgcctgtgaggtcttcaacttggggaacagtcaaggactcactgaaagccctctcctcttgtgtctgtgggcaggccgattagctggccctgcttccccagctaagcaggagtcttttgtgcttgagccaaggaaacatcattagatccgctaaggggcatctgaaacatcccgtcgagtggcagaggcaggataagtcacctgcacatgaagagactcattcattcatacagcaaatattactggtacatcttccacatgccaggccctgcaaagtgctggggagataccatggttttcctggagctggtatttttggggtggagggaacccaccctgaataaataaagtaacccaataaat

SEQ ID NO: 1491 - DNA, 504 bp, Homo sapiens
  SIMILAR (55)..(111): 1001254mologous to Homo sapiens Human BS274 protein epitope 4,accession number Y08478,Smith-Waterman Score=97.
atggccccgtcagaagatcccagggactggagagccaacctcaaaggcaccatccgtgagacaggcctggagaccagctccggtgggaagctggctggccatcagaagaccgtccccacggctcacctgacttttgttattgactgcacccacgggaagcagctctccctggcagcaaccgcatcaccaccccaagcccccagtcccaatcgagggcttgtcaccccaccaatgaagacttacatcgtgttctgtggggaaaactggccccatctgactcgggccccaaggacaaggctgcagagggagtttgagaccctcaaggagaaaggagacctgtggctgcacatccggcttttcaccagcaggtgtcgccctctcatcagactagaggacactgggtccaggcctggacagggaagggtcaccttggccgggctggcggccaagggctccttcagacccgacgtgccccagcggcccagcggccgcttggtcccctga

SEQ ID NO: 1492 - DNA, 931 bp, Homo sapiens
  SIMILAR (157)..(417): 481254mologous to Homo sapiens KIAA0452 protein,accession number AB007921,Smith-Waterman Score=227.
cctaggatagctcctctcctgccagagctaggtaggcgccgaagtagccgcatggccccgtcagaagaccccagggactggagagccaacctcaaaggcaccatccgtgagacaggcctggagaccagctccggtgggaagctggctggccatcaaaagaccgtccccacggctcacctgacttttgttattgactgcacccacgggaagcagctctccctggcagcaaccgcatcaccaccccaagcccccagtcccaatcgagggcttgtcaccccaccaatgaagacctacatcgtgttctgtggggaaaactggccccatctgactcgggtgacccccatgggtgggggatgcctttgccaggccagggccacccttgccgttttgaaaagggctggtggcctaagtttcctttcaagtcagcccgctcttgccccaggaggttcccgaggctaaggggaaacccgtgaaggctgcgcctgtgaggtcttcaacttggggaacagtcaaggactcactgaaagccctctcctcttgtgtcctgtgggcaggcccgattagctggaaagggccgggctctgaattccccagaggctgcaattccccagggcctggccctgcttcccccagctaagcaggagtcttttgtgcttgagcccaaggaaacatcattagatccgctaaagggcattctgaaacatccgtcgagtgggcagaggcaggataatcaccctgcacattgaagagactcattcattcatacagcaaatattactggtacatcttccacatgccaggccctgcaaagtgctggggagataccatggttttcctggagctggtatttttggggtggagggaacccaccctgaataaataaagtaacccaataaataaagaagatgattttgaaaaaaaaaaaaaaaaa

SEQ ID NO: 1493 - DNA, 1446 bp, Homo sapiens
  SIMILAR (929)..(1444): 401254mologous to Baboon endogenous virus strain M7 gag-pol precursor polyprotein,accession number D10032,Smith-Waterman Score= 273.
gaaaggatgcaagacctcaggagaaactcctcacttggtagcccatttgaggcctaaaactgggatacaaatgcccctgagagagcaacggtatactggggtaaacgaggacgggcatatggtggaaaggcgtgcctttgtgtaccaaccctccacctctgccaatctcctcaattggaaaaacaataccccatcctatactgaaaagcctcaggctataattgatttgctccaaactattatccagacccacaaccctacttgggctgattgccaccagttgctcatgtgcctgtttaacacggatgaacggcgaagggtgctccaagcagcgactaagtggctagaggaacatgttccggctgattacaaagaaagggccttgtttaatctggcagaagggttactggactgagggggactaggctcatgtgcacccaaagagcccatggtcagaatgacagtcgggggcaaggacattgagtttcttgtcgatactggtgctgaacatccagtagtaaccaccctggtcgcccccttatccaaaaagactattgatataatcttggacctaaaaaatgctttctttagcatcagactatctcctgagagccaaaaactgtttgcctttcagtgggaggatctggagtcagctgtcaccactcagtacacttggacccggctcccccaagggttcaagaactcccccaccatcttcagggaggcactggctcgagacctccagaaaattcccaccagagacctaggcttcgtgctgctccagtacgttgacaacttcctgctgggacaccacaagaagagaggtgtgtaggatatggtaatcctggatgctgtcattgaagccaaatcgcccctaccaggcatcagtcacagccccctgctccctcaggcacctgaccttgtacctacttattctaaagagaaggactttctccaggcagagggagggcaggtgatagaagagggatggatccagttatcggatggaagaatagctgtgccacaactgctaggagccgcagtcatactggctgtgcatgagaccacccacctaggccaagagtcacttgaaaagttgttaggctggtacttctacatcttgcatctttcagcccttgccaaaacagtggcgcagcagtgtgtcaccttctggcagcacaatgctaggcaaggtctaaccatccccgccagcatacaagcttatggagcagccccttttgaagatctccaagtagacttcaccaagatgcccaaatgtggaggtaacaagtatttgctagttctagtgtgtacatactctgggtgggtggaggcctatccaacacggaccgagaaagctcgtgaagtaacccatgtgcttctccgagatctcatccctaggtttggactgcccttacaaatcagctcagacaacgggccggcatt

SEQ ID NO: 1494 - DNA, 636 bp, Homo sapiens
  SIMILAR (23)..(634): 401254mologous to Reticuloendotheliosis virus C end of pol protein (reverse transcriptase),accession number X01455,Smith- Waterman Score=343.
ccacaagaagagaggtgtgtaggatatggtaatcctggatgctgtcattgaagccaaatcgcccctaccaggcatcagtcacagccccctgctccctcaggcacctgaccttgtacctacttattctaaagagaaggactttctccaggcagagggagggcaggtgatagaagagggatggatccagttatcggatggaagaatagctgtgccacaactgctaggagccgcagtcatactggctgtgcatgagaccacccacctaggccaagagtcacttgaaaagttgttaggctggtacttctacatcttgcatctttcagcccttgccaaaacagtggcgcagcagtgtgtcaccttctggcagcacaatgctaggcaaggtctaaccatccccgccagcatacaagcttatggagcagccccttttgaagatctccaagtagacttcaccaagatgcccaaatgtggaggtaacaagtatttgctagttctagtgtgtacatactctgggtgggtggaggcctatccaacacggaccgagaaagctcgtgaagtaacccatgtgcttctccgagatctcatccctaggtttggactgcccttacaaatcagctcagacaacgggccggcatt

SEQ ID NO: 1495 - DNA, 470 bp, Homo sapiens
  SIMILAR (11)..(358): 521254mologous to porcine endogenous retrovirus REVERSE TRANSCRIPTASE,accession number A66553,Smith-Waterman Score=307.
ggaattcgctgttccccctggcatacaagcttatggagcagccccctttgaagatctccaggtggacttcacagagatgccaaagtgtggaggtaacaagtatttactagttcttgtgtgtacctactctgggcaggtggaggcttatccaacacgaactgagaaagctcatgaagtaactcgtgtgcttcttcgagatcttattcctagatttggactgcccttacggattggctcaaataatgggctggtgtttgtggctgacttggtacagaagacggcaaaggtattggggatcacatggaaactgcatgctgcctaccagcctcagagttccggaaaggaccccagactgtcatcctgagcactcccaccgctgtgaaggtagagggaatcccaacctggatccaccacagccgtgtaaaacctgcagtgcctgaaacctgggaggcagaccaagcccagaatat

SEQ ID NO: 1496 - DNA, 2682 bp, Homo sapiens
  SIMILAR (565)..(1941): 461254mologous to Murine leukemia virus gag-pol polyprotein,accession number U13766,Smith-Waterman Score=889.
atggataaaaatccaccaaccaagtatcctatctgttgtcttcaagagactcaactaacacataaggactcaaataaactccagcagtgtgcggcagacccccgtggagaattaacacagcggttgaacaccgggaaggaatcggcgattggagtctggacatctggaacatgggaagtcagctcctacggttctgtccgaccccacatcagaggatgcatggcagaaatggcaccaatggtgcccctccttaccaagaagagaggctccccacatcgaagcccacagcccctgagcctctgcaaggatccaaacgagacagagggtatgcaaaggctaatgcggtatagggaagcactcttagaagggttgaggagaggagcccaaaaggccacaaacgtaaacaaggtctccgaggttatccaaggaaagcaagaaagtccagtgcaattttatgagagactgtgtgaggcctatcgcatgtacactccctttgacccagacagccctgaaaatcagcgcatgattaacatggccttagttagtcaaagcgcagaggatattaggagaaagctgaagaaacgggctgggtttgcagctgcagctattagaggggtccccctgaaaggacaagggaatgggggctccaggaaaaatacccagtctgaccgtccacgcttgcaacgtaaccagtgcgcctattgtaaagagataggacattggaaagataagtgccctcagctgaaagaaaagcaaggtggttcagagcaaaagaccccagacaaggacgaaggagccttgttcaatctggctgaggggttattggaccgaaggggaccaggctcacgtgcccccaaggagcccatggtcagaatgacagttgggggcaaggacattaagtttctggtcaatactggtgctgaacattcagtagtgaccaccccggtcgcccccttgtctaaaaaggctattgatataattggagcaacaggagttttgacaaagcaggctttctgtttgccccggacctgctcggtggggggacatgaagtgattcaccagttcctgtacatccctgactgccccttgcctttgttaggaagggacctgcttagcaagctgagagctatcttcctttaccaagcaaggctctttacaactgaagttgcctggaacaggagttatcatggccctgacagttccccgagaggaagagtagcgactcttcctaaccaaaccaggcaaagagatagggccagctctggcccagtggtggccaaaatatgcgcagaagacaaccctcctggattggcagtcaatcaagctcctgtactcagggaagttaagccagaggcccagccagtcaggcaaaaccagtatccagtccccagagaagccctggaaggtatccaggttcatcttaagcacctgaggacttttggaattatagtgccttgtcagtctccatggaacacccccctcctacctgttcccaagccagggaccaaggactacaggccagtacaggacttgcgattggtcaatcaagccacagtgactttccatccaacagtacctaacccgtacacattgttggggttattgccagctaaggacagctggttcacctgcctagacctgaaggacgccttctttagcatcagattagctccagagagccagaaactgtttgcctttcagtgggaggatccggggggttcaagaacttcccccaccatctttggggaggcactggctcgagacctccaaaagtttcctgccagagacctaggctgcgtgttgttccagtacatcgacaacctcctgctgggacgccccatggcagtcgggtgcgtcaaaggaacagacgccctgcttcagcacctggaggactatgggtataaggtgtccaagaagaaagctcagatctgcagacagcagcaaaatgctaggcagggtccaaccatcccgctcagcatacaagcttatggagcagccccctttgaagatctccaagtagacttcaccgagatgcccaaatgtggaggtaacaagtatctgctggttctagtgtgtacatactctgggtgggtagaggcttatccaacacgaactgagaaagctcgtgaagtaacccgtgtgcttcttcgagatctcatccctaggtttggactgcccttacggattggctcagacaatgggccggcatttgtggctgacttggtacagaagacggcaaaggatccccactggaagacaggagaaaatgtaaacctaggaattgatggaactgggcttgacccccgagtcaaccttttaatccaaggggagatccacaagcgctcccccaaaccagtgttccagaccttttatgatgaactaaatgtgccaataccagaactgccagggaagacaaaagatttgttcctgcagttagcagaaaatatagcccattccctcaacattacttcctgttatgtatgcaggggaactactatgggagaccaatggccttgggaggcccgagaattagtgcccatggatccagttcctgatataattccagtccagaaggcccacactggtaacttttgggtcttaaaaacctcaattattgggcaatactgcttagctagagaaggaaaagacttcaccatccccgtaggaagctcaattgcctag

SEQ ID NO: 1497 - DNA, 1602 bp, Homo sapiens
  SIMILAR (340)..(2595): 931254mologous to Homo sapiens putative p150,accession number U93572,Smith-Waterman Score=3717.
gcggccgcccggcccggccgcggatcagagactggagactgggtcttgctctgttacccaggctggagtgcagtggtgtgatcatagctcactacagccttgaactcctgggctcaagaggttgaggctccctcctcagcctcccaagtagctgggactacaggctttcagcaccatgcctggctaattcaaaaaaaccttcagagagatagggtctctctatgttgccctagctcgtctcaaactcctggcctcaagtgatcctcctgcttggacctcccaaagcgctgggattacaggctcctggaaccatgggcctcaggccctgaggatacggggctcccggtggccatgacgacgggtgactgctgccacctccccggctccctgtgtgactgctccggcagccctgccttctccaaggtcgtggaggctacgggcctcggaccgccccagtatgtggcacaggtgacttcaagggatggccggctcctctccaccgtcatccgtgccttggacacaccgagtgatggtcctttctgccggatctgccatgagggagcgaacggggagtgcttgctgtccccgtgtggctgcaccggcacgctgggtgccgtgcataagagctgtctggagaagtggctttcctcatctaacaccagctactgcgagctgtgccacacggagtttgcagtggagaaacggcctcgacccctcacagagtggctgaaggacccggggccgcggacggagaagcggacactgtgctgcgacatggtgtgtttcctgttcatcacaccgctggccgccatctcaggctggttgtgcctgcgcggggcccaggaccacctccggctccacagccagctggaggccgtgggtctcattgccctcaccatcgccctcttcaccatctatgtcctctggacgctggtctccttccgctaccactgccagctgtactccgagtggagaaagaccaaccagaaagttcgcctgaagatccgggaggcggacagcccccagggtccccagcattctccactgggcaggtggactcctgaagaaggtggcagaggagacaccagtatgaatgctgggctctccggaccctgcagcagagaggccagaggtagctggtgataccctgtcctgtggaaggacttccacttcaacacttccacttcaacagttcccgcacggcctgaacgcttcttaggcccaagagacacccatgcagagccttagtctgtgatcctgtgtgaagatattttcagggttttttttttttttttttttgcatatggaggacaggtgggacatggtcctgagctctggacggagcaggcaccctgatttcattttgaggtccacatggccccttttgggccagcagctgtggccggtgtatcaagggggcccttaaagctggaacattccagcaagcttcttgggcttttttgcacccggcaggccccctttcctggcaccctcgactttatataaaagttgccctgggtttcaaaaacccccccctgaatgaataaaaggagccctggctggaaaaaaaaaaaaaaaaaaaatatataaaagtcgtatcga

SEQ ID NO: 1498 - DNA, 443 bp, Homo sapiens
  SIMILAR (231)..(46): 351254mologous to Alcelaphine herpesvirus 1 capsid protein,accession number AF005370,Smith-Waterman Score=80.
tgcggtgcaattcgaatatggtctgtaggggtcatatcagagttccccagggacactaggggctgactcttgggtgggaggtagctgagggacttccgctctggaagtctcttccttggtggctggcaagaggcaacctgctcctgcctttgggagcctcatgtccccttggttctctccgtgtcctcccagctgggagctgttgctgggttcagaccacatgctgccacttgtgtttctgcagagggtcctggtgtttggtcactttcatctccagccccacagctcaccagctgctgcaggccaattccgtcatagccatgcatctggagccacgtgcaaaggttccagtgggccccaaatctaaacttccccccgctgtcctcagtgtacaaacgtaaatcattttatatctgcgtgggtttctgatacagagcaatctt

SEQ ID NO: 1499 - DNA, 1114 bp, Homo sapiens
  SIMILAR (111)..(404): 541254mologous to Homo sapiens SMT3B protein,accession number X99585,Smith-Waterman Score=191.
  misc_feature (1)...(1114): n = a,t,c or g
gaattcccgcctccttcttctgccgctcctggtgctgcttgtgtgctcgtttggtgcggacctggtacctcttttgtgaagcggcagctgaggagactccggcgctcgccatggccgacgaaaagcccaaggaaggagtcaagacttagaacaacgatcatattaatttgaaggtggccggggcaagatggttctgttgtgcaagtttaagattaagaggcatacaccacttagtaaactaatgaaagcctattgtgaaccgacagggattgtcaatgaggcagatcagattccggatttgacgggcaacccaatcaatgaaacagacacacctgcaccagttggaaatggaggatgaagataccaattgatgtgttcccaacagcagacggggaggtgtctactgaaaagggaacctgcttctttactcccagaactcttgttctttaaagacccaagattacattctcaattagaaaactgcaaatttggtcccacccacatccctgactactaccgtatagttttctctattctttcatttccccccttccccattcctttattgtaccataaagtaactgggtatatgtgcaccaggccatatggcattttttttttttttttaactaaaccngcccaatgggtaggtttggattgaccatccaagtgggagacccgggatgggggaaaaattactgattctgtggaaaatacccccctttctcccattagtggccatgttccattcagctcttaccctttatattccagtaaagttattttggctctcactgttttaacaaccacaacaaaacaacaacaacaacataaaaattccttggcatacccttgttcaattggatgaattttaatgtttttcaatttatcattgttaaaaccccnggggccaaantttttataacttttttggtacggtagctgttaccnatgtagggcaatctcgtctttaagtagggattaaattactcnctaaaacaaaaaagaatcctagawcactwctcccttcaagtcaaagcgtcttggttgtttaaataaacttcttgtttaaaaaaaaaaaaaaaaaaaaaaaaaaaacctcgagggggggccc

SEQ ID NO: 1500 - DNA, 517 bp, Homo sapiens
  SIMILAR (828)..(1031): 821254mologous to Homo sapiens p40,accession number U93570,Smith-Waterman Score=279.
gaaaaccagcgtgtgctagtgatacaccatgacagggccaggctgttggcgccctcttgtcctccaaggtcctggccatccgcagcagagctttgccctgctgctgcatctcgcccagactgagagcggacggagcctgatcatcaaccaccttgacctgaccagattattggaagcgctggtgtcatttcttgatttctcggataaggaggccaacacctgctatgggactgttcacagacttggctctggaagaaagattccaagtctggttccagggccaaccttccagggtgttctccctggcacttcacaggcgttctgaagacagatcccaaggtaaaggcagcttccttcggctcttgttgccagttgcatttgccatcatggggaaacctcagttgttgagcccattacccgaagacacatggcggcctgtgaggaatttggggatggctgcttgagcctcctggccaggtgtgaggaggatgtggacctgttcagagaggttatctac

SEQ ID NO: 1501 - DNA, 1082 bp, Homo sapiens
  SIMILAR (140)..(961): 841254mologous to Mus musculus neural cell adhesion molecule NCAM-180,accession number X15052,Smith-Waterman Score=1136.
gtgtttttccacagcaggaaatgatgcagttgaagaaatggtcctggccatccggcggcagagctttgccctgctgctgcatctggcccagactgagagcggacggagcctgatcatcaaccaccttgacctgaccaggctgcctgccgacactacggccactgtcgaggacatgctgccttctgtcaccagcgtcaccactaactctgacactatcaccgaaacctttgccactgctcagtatatcctcaccagtgagaccaccaccctgacctccagtattgccccgccggccacggccacgcctgactcaaactctgtaccggctggccaggccaccccttccaaggggcccagcgcctctgccccctccccggccccagcttcagcccccaaggtcgcccccctcgttgacctgagcgacaccccgacctcaacccctgccgctagcaatttgtcttctagtgtcctggctaaccaaggggctgtcctcagcccaagcgcccctgctggtgtcggggaggcctctaaggctcctccggccagcaagcccacccctgcaccagtccccaccccgactggggcagccagtcctctagcagcagcggctgcccctgccacagaagcccctcaggccaagcaggaggctcccagcaccaaaggcccggacccggagcccacccagcccggagccgcgaagagcccggccgaggcagccacagcccttgctagcccgaagagcgaggctgcctccgtcagcaccacaaacccttcccagggcgaggactttaaaatggacgaagggaacttcaagaccccagatattgaccttgcaaaggatgtttttgcagccctgggctctcctgctcccgccgctggggccagtggacaagcccctgagcttgctccttccactgcagacagctctgtttcgcctgcgccagcaaagaccgagtacggcctctctttgtctgctgtcatcgggttgtgtcctgtggtgagtggctgggaagactcggggctccccagcatcaaatggctgctgggtctcaaagttcaagagaaaggccttaacctttcag

SEQ ID NO: 1502 - DNA, 1771 bp, Homo sapiens
  SIMILAR (152)..(934): 671254mologous to Homo sapiens template acyivating factor-I alpha,accession number D45198,Smith-Waterman Score=850.
  misc_feature (1)...(1771): n = a,t,c or g
atggtgctgatgatgtcgtccacgctggtgaacagaagccagactcctggacttgcctatgagccatcttcatttccaaaaaggcgatattgggtcctggccatccggcagcagagctttgccctgctgctgcatctcgcccagactgagagcggacggagcctgatcatcaaccaccttgacctgaccagctgccaagaggagcagaacatccgtggcccctttgtgttatactgcattagaggggtacccaagcaggatgacagctctgtttcgcctgcgccagcaaagaccgagtacggcctctctttgtctgctgtcatcgggttgtgtcctgtggtgagtggctgggaagactcggggctccccagcatcaaatggctgctgggtctcaaagttcaagagaaaggccttaacctttcaggtttgaagggccccgtagaagcaaagccagagtgccagagaacagaaaacgaaagcagcgccagcgaaagtcaagacggtccccaatgtacgccacacagacaaaggagaacgagagcaaagcatgatgggtgaagagaaccgagcaaagatcaaaataaaaagtgacacagcagcttcaccagagcatttccaacaccacagacacacacacgcacgcacacacacaaacacacatgcacacacacacatctcatttcctctagtgtcttttgcctttaaaaaaaactaaacagataaaacatgggaatctcctttttgtaggtttatagaaagggtccctttgttgcaccactcacttgtaagaaaatgagacccaaaggttaaacccacagccaaactaggacactccgttccctgaaaccgttaaaaaatcaaacaaaaggaccccaaattaagaatctaggaagctcagaaacgaaatctaggttcaggaagaccacacttggtgttacccgattggcacagaccagtttcagagaaatactttcaggcactaagactaatcgaatgaacaaagtccacagtttatttttatactttcagtcaagtttgaactctgtaaaacctcataaataagttataaattctggttcactttgaatttgttcagtatgcaaagtgtgtcaccctttctagctgaattcaattcccacgtagactcttattttataggacgaatgccaaattgcagcttctgggggtagatctcaatttgcagtattcagacttctttttctttcttttacattcttttttctttctttctttctgccaactttgttttccagtgtttacaaggtgacaaatgtttgactttggttgtgtttaaatgtccgtgtaaaatagctgccttttattttttaaggtaacaaataccacctagaggtaggtaggatcatcccacgcttgctttagcacaggacaactttacaaaacatgattgtttacagctgctcttcccctcttttctgatctgcagtttttgcctgggtcccactcaggtgaaaatccatctcattctggaatggttttgcttttgaatttttggttatttnttgtgtttctttgggggttagaccactttctgattagccgccacctgcctgcatctgtgaaaagggatctgctcccaggcgttctcacccttcttttgaaggactccttaggctttgttgaatgaagcagagaagattgtatagttggggctggtcttggtgaacacacattattaccccacacatcccctttgtgtagaaagccaaataaaatctatacataccaaaaa

SEQ ID NO: 1503 - DNA, 2600 bp, Homo sapiens
  SIMILAR (1)..(2961): 961254mologous to Homo sapiens putative p150,accession number U93567,Smith-Waterman Score=4958.
gtcgaccctttccacccctggaagatggaaataaacctgcgtgtgggtggagtgttaggacaaaaaaaaaaaaaaaaaagtctagagccaccgtccagggagcaggtagctgctgggctccggggacactttgcgttcgggctgggagcgtgctttccacgacggtgacacgcttccctggattggcagccagactgccttccgggtcactgccatggaggagccgcagtcagatcctagcgtcgagccccctctgagtcaggaaacattttcagacctatggaaactacttcctgaaaacaacgttctgtcccccttgccgtcccaagcaatggatgatttgatgctgtccccggacgatattgaacaatggttcactgaagacccaggtccagatgaagctcccagaatgccagaggctgctccccccgtggcccctgcaccagcagctcctacaccggcggcccctgcaccagccccctcctggcccctgtcatcttctgtcccttcccagaaaacctaccagggcagctacggtttccgtctgggcttcttgcattctgggacagccaagtctgtgacttgcacgtactcccctgccctcaacaagatgttttgccaactggccaacgacctgccctgtgcagctgtgggttgattccacacccccgcccggcacccgcgtccgcgccatggccatctacaagcagtcacagcacatgacggaggttgtgaggcgctgcccccaccatgaccgctgctcagatagcgatggtctggcccctcctcagcatcttatccgagtggaaggaaatttgcgtgtggagtatttggatgacagaaacacttttcgacatagtgtggtggtgccctatgagccgcctgaggttggctctgactgtaccaccatccactacaactacatgtgtaacagttcctgcatgggcggcatgaaccggaggcccatccctcaccatcatcacactggaagactccagtggtaatctactgggacggaacagctttgaggtgcatgtttgtgcctgtcctgggagagaccggcgcacagaggaagagaatctccgcaagaaaggggagcctcaccacgagctgcccccagggagcactaagcgagcactgcccaacaacaccagctcctctccccagcctaaagaagaaaccactggatggagaatatttcacccttcagatccgtgggcgtgagcgcttcgagatgttccgagagcctgaatgaggccttggaactcaaggatgcccaggctgggaaggagccaggggggagcagggctcactccagccacctgaagtccaaaaagggtcagtctacctcccgccataaaaaactcatgttcaagacagaagggcctgactcagactgacattctccacttcttgttccccactgacagcctcccacccccatctctccctcccctgccattttgggttttgggtctttgaacccttgcttgcaataggtgtgcgtcagaagcacccaggacttccatttgctttgtcccggggctccactgaacaagttggcctgcactggtgttttgttgtggggaggaggatggggagtaggacataccagcttagattttaaggtttttactgtgagggatgtttgggagatgtaagaaatgttcttgcagttaagggttagtttacaatcagccacattctaggtaggtaggggcccacttcaccgtactaaccagggaagctgtccctcactgttgaattttctctaacttcaaggcccatatctgtgaaatgctggcatttgcacctacctcacagagtgcattgtgagggttaatgaaataatgtacatctggccttgaaaccaccttttattacatggggtctagaacttgacccccttgagggtgcttgttccctctccctctccctgttggctggtgggttggtagtttctacagttgggcagctggttaggtagagggagttgtcaagtctctgctggcccagccaaaccctgtctgacaacctcttggtgaaccttagatcctaaaaggaaatgtcaccccatcccacaccctggaggatttcatctcttgtatatgatgatctggatccaccaagacttgttttatgctcagggtccaatttcttttttcttttttttttttttttttctttttctttgagactgggtctcgctttgttgccccaggctggagtggagtggcgtgatcttggcttactgcagcctttgcctccccggctcgagcagtcctgcctcagcctccggagtagctgggaccacaggttcatgccaccatggccagccaacttttgcatgttttgtagagatggggtctcacagtgttgcccaggctggtctcaaactcctgggctcaggcgatccacctgtctcagcctcccagagtgctgggattacaattgtgagccaccacgtccagctggaagggtcaacatcttttacattctgcaagcacatctgcattttcaccccacccttcccctccttctccctttttatatcccatttttatatcgatctcttattttacaataaaactttgctgcca

SEQ ID NO: 1504 - DNA, 129 bp, Homo sapiens
  SIMILAR (3)..(44): 351254mologous to Homo sapiens Human beta-amyloid precursor protein mutant fragment 11,accession number Y20186,Smith-Waterman Score=46.
tcagagggaccacttggggccagccagactggcctcaatggcggactcagtcacattgactgacggggaccagggcttgtgtgggtcgagagcgccctcatggtgctggtgctgttgtgtgtaggtccc

SEQ ID NO: 1505 - DNA, 490 bp, Homo sapiens
  SIMILAR (317)..(186): 311254mologous to Homo sapiens Fragment of human secreted protein encoded by gene 62,accession number Y36708,Smith-Waterman Score=61.
ttgggaagtcagaacttccttatagggctgttatgatcatacttgtacatgtcttttggagcacacgtgtacacatttctttctgtatatactgggagtggaattgctggggtgtggtcatggatacacatctgttcaactttttagtaagtttaaattcttctgaacagttttccaaacaaatgaaccgtcttatactctcaccagcagtatatcaatgttctgctttctccacatctttgataatacttgacatcatcagtttaaagaatattttcattactctcataggtaatatagtggcatttgattgttgataattgtggattaattttccattttctgattgctgcctatttgtatattcttgcaatttctcttcgctccttgctccgggcattggatgcattcgatgtgtcagtgagctggttttgatgactgtgatggaatcagctttatctctgcatctccagttcccagtatgaaccat

SEQ ID NO: 1506 - DNA, 428 bp, Homo sapiens
  SIMILAR (59)..(145): 481254mologous to Drosophila melanogaster CG11625 gene product,accession number AE003726,Smith-Waterman Score=60.
ttccctacattgaatccgcaaatcttgttgactctgctttcaaaatacatcctgtactcaccacctttacatacaccattctagtccaagccagcatcatctctgaaatgtgttgtagtggcatagtgtcctgtgtctgcccttgtccctcctcaacagcagccaaaatagtcctgttgaaacccaagtcaagtcatgtgactcgtctgctcacaaccctcagatgacttcctgcctcactcaggaaagccaggtccttatgatggtctacaaacaggacatgatctggacttttttccatctcaaacctttgtctctacctgcccgctgccattataactccagccacagtgatctccaacacagtggagatctgtgatctccaggtaagacctgagagcctgggcacttgatggcccctgcctcag

SEQ ID NO: 1507 - DNA, 480 bp, Homo sapiens
  SIMILAR (316)..(558): 761254mologous to Homo sapiens COP9 signalosome subunit 1 CSN1,accession number U51205,Smith-Waterman Score=293.
atgcttcctgcactggaacatcggactccaagttcttcagcttttggactcttggacttaacaccagtgatttaccaggggctctcaggcctttggctacagactgaaggctgcacagtcagcttccctacttttgaggttttgagactcagactgacttccttgatcctcagcttgcaaacggcctattgtgggatttcaccttgtgatcgtgtgactcatggacacatagaagtggggattcagactggcgaggctgctgaagggcagtggaacacacttgatggcctaaacctggttgtgctgcaagcagcccaggccatctgtcaggttggcattgggcccactagcaagttcatgacccagaaaaacaagaagtatagaaagccagataccctgggccaacttgaagccctggaaagagaggcagccctagggattgtgggggcagggaaatgtgtcgttcatacgaacccttga

SEQ ID NO: 1508 - DNA, 256 bp, Homo sapiens
  SIMILAR (118)..(222): 611254mologous to Homo sapiens Human secreted protein, SEQ ID NO: 6395,accession number G02314,Smith-Waterman Score=104.
cagtgtgaaaacaaactatacaataaattggtatcagtagagtggggcacggctgaaaagatacctgaaaatgtggaagcgactttggaactgggtaacaggcagaggtcgaacagtttggagggcttagaagaagacaggaaaatggacttgctgaatggctttgacaaaaatgctgatagtgataagaacaataaggtccaggttgaggtagtctcagatggagatgaggaacttgctggggactggagcaaag

SEQ ID NO: 1509 - DNA, 454 bp, Homo sapiens
  SIMILAR (42)..(146): 451254mologous to Human immunodeficiency virus type 1 envelope glycoprotein,accession number U33776,Smith-Waterman Score= 66.
tttttcttcagaaacacaggagagaagatttattttacatcatcaacattgcaagatttcagaatgcacagtattaaacttggccttggggtgagagggaggaggacggggagggataaaattgcagctttcaagggatcacaggttgagattaaacctgcacacaggaaacaaccagaaaacaactccaaaccatgaatcaagccatgtgcaacgtagggacatctagttccacaaagtgatggggggatgagcacagggttcaagtctgatcattgggcagaagcctaggtcataataggggtttgcctgccatttcactgagttttcacccagctggtactaagcccttgcatagatgagaccatcattattcaacagcccaatgaaataggtacttagccgtcccattttacagataagaaactgaggctaatagaggtgtagcaactta

SEQ ID NO: 1510 - DNA, 909 bp, Homo sapiens
  SIMILAR (1048)..(1491): 481254mologous to Homo sapiens p40,accession number U93567,Smith-Waterman Score=349.
atggacaagggaagagagagaatggccgctgccgccgccgctgctgccgccgccgccgccgccgctcagtgccggagccctcggtgcgcggcggagagaagaggattccggcgggaactcgactcttggcgccaccgcctcatgcactgtgtagagtggggcactgctgaaaaaatacctgaaaatgtggaagtgactttggaactgggtaagaggcagaggttgaatagtttggaaggcttagaagaagacaggaaaatgtgggaaaatttggaacttcttagagatttgttgaatggctttgataaaaatgctgatagtgttatgaacaataagatccaagctgaggtggtatcagatggggatgaagaacttgttgggaactggagcaaaggtgactctttttatgttttagcaaacagactggtagcattttgcccctgctatacagatgtgtggaactttgaacttgacagagatgattttagggtatctggcagaaaaaatttctaagcagcaaagcattcaagatgcgccctggctgctttcaacaacctatggtcatatttgtgagcaaagaaattatgttaagttggaacttatatttacaggggaagcagagcgtaaaagtttggagaatttgcagccagctatgtggtagaaaagaagagcccattttcagggaaggaattcaagcaggctgcagaaatttgcataagtaaaaaggagccaagtgctaatggccaagaaaatggggaaaaggccttgaaggcatttcagagacctttgtggcagcccctccctttcaccccaaggccaagtttaaaactgtgcattttgaaatcttgcaatgttgatgatgtaaaataaatcttttttcctgtgtttttgaaaaaaaaaaaaaaaaaa

SEQ ID NO: 1511 - DNA, 696 bp, Homo sapiens
  SIMILAR (559)..(645): 481254mologous to Homo sapiens gamma- glutamyltransferase,accession number AJ007378,Smith-Waterman Score= 70.
atggaaaccgacgctctgcgcaataagcaaattgcccaaagccacgtagctggggaaaatccattcaactctttcatccgaattattccgtattttcctttctatctctcagtcactgcctctgctgctcctcttgattttctagcgtcagataccacctgcggatttctcagtttagcagatgcctcagactccctgaactccaaactccatctcctctacttggcaagaccacctggctctgtcctatggtttgcaaaccctgcaggcgcacgtattgtcagaacacagttcctgccccatttccttgttgcatcatctacagatcttctggtcgcttcctttcctccactgatgactttagcacctgtcttcatccttgatacccctgcaggttgtatcacatatagaaaagaatcaaatatgtctagcacccccgaggtaaaccagaggggatctcatgatcttcacatgaaccttagtgtcttagacaaagggggcagtggtagttttgttctattttggtttgtttttgaaacgggtgatagaaaagcatgcttttgtgctgacaggaaagatctaggagagagggagaaattgatgctgccagaaagaggggacagttacagaagcgaagaccttgagaaggagatgatgagacccaggatgcaacacagaaggcttggacttagataa

SEQ ID NO: 1512 - DNA, 246 bp, Homo sapiens
  SIMILAR (221)..(117): 451254mologous to Tachypleus tridentatus Kex2-like protease,accession number D83994,Smith-Waterman Score=75.
atggggatggctgacattcaggtcggaactaaacctcagggttctttgaaaccccaattatctcagatgtttgctgggaacagtgataatgataatgagcatcatattgaggtagaggaagaggactggttagtggccacagccccgctggagcagtcactctctggaaaccacggggaaacagcctttttggtccggcttgacagccccaaccagaccgagggtgcagaagaaccagggtggtga

SEQ ID NO: 1513 - DNA, 313 bp, Homo sapiens
  SIMILAR (310)..(164): 341254mologous to Chlorella protothecoides putative extensin- like protein,accession number AJ238629,Smith-Waterman Score=71.
tcaaggtcttcgcttctgtaactgtcccctctttctggcagcatcaatttctccccttctctccctagatcttttccctgcaggggtatcaaggatgaagacaggtgctaaagtcatcagtggaggaaaggaagcgaccagaagatctgtagatgatgcaacaaggaaatggggcaggaactgtgttctgacaatacgtgcgcctgcagggtttgcaaaccataggacagagccaggtggtcttgccaagtagaggagatggagtttggagttcagggagtctgaggcatctagaatttgtgggggcacagta

SEQ ID NO: 1514 - DNA, 597 bp, Homo sapiens
  SIMILAR (1249)..(2712): 961254mologous to Mus musculus E-cadherin binding protein E7,accession number AF167441,Smith-Waterman Score=2740.
ccttcatctttctggaagggccaaccaggcattcatccttggcctccactggctccttctctgtctccaaagattttaaataacgtggcaggcaaggctgcctgaaggctggggacaagcgatggtccctgggctcctccccagagctcgacttctcctacgctggagctgtctccacaggcccccctgtgtacagtgcaggattggaaggagcactggacggggagtcagtggagcagatctcgcagacagaaaaacctgaggatcgggcccacaacttaattataagtggagctacagagaaggctgaattctcgactctggcaagtctgctagtccaagaccagtatcttcagtcaagttacaacagaattcagttataccacgagaataaagggatgacagagaggctgcaggacccagccaacgttcactggcagacatcagaagaggatggatgggactggatcacgagggtgctgggatcaaaggcaatggaggagggagtcggattccttggaccaaaaggccatgggacgagggaaggagtcactgtactggcaggaattactgtccctgagcaactggcaggagaag

SEQ ID NO: 1515 - DNA, 361 bp, Homo sapiens
  SIMILAR (263)..(18): 341254mologous to Acipenser ruthenus immunoglobulin light chain,accession number AJ133188,Smith-Waterman Score=89.
atggtcagtaccgcccaggataaaagcaggcagaggaacgtggaagaaccagactggctgagttttccaggcttcatctttctcccgtgctggatgcttcctgcccttgaacattggactacaagttcttcagcttttggactcttggacttataccagtggtttgacagggactctcgggccattggccacagacagaaggctacactgtcggcttccctacttttgaggtttggggactcggactggcctccttgctcctcggcttgtagacggcctattgtggaacttcgccttcgtccaccagctacagcggcgatggaggcgatggaaatgcgcctatttggagttgagctgttct

SEQ ID NO: 1516 - DNA, 276 bp, Homo sapiens
  SIMILAR (162)..(25): 341254mologous to Chlorococcum littorale HCR1,accession number AB007992,Smith-Waterman Score=67.
atggtggtgtgtttcatcagcctctgtcaggacaaggctgtcactgatcaggccaggaatctggaggtaatcaggctgctggagaaaagttacagagaaataaaaactttcaacattcaagtgatgtttcgtcatggtcacggttcttcaggaaacaaaactgcagactggttagttctgagggaggccatctactgccccccaaggagagatgacctaattctggagatgcaactgaacaacacaacttggatgtctgcaaacctgagtccatga

SEQ ID NO: 1517 - DNA, 790 bp, Homo sapiens
  SIMILAR (695)..(537): 431254mologous to Homo sapiens p8 protein,accession number AF216972,Smith-Waterman Score=81.
atgtggaaaaccccacatggcaaggaattgagggagaccctgccccaaccaatcaccatcaaggaacagaatcctgacaacaacctaactcactccaatttaggcacccgcctggcagaaggagcgatgtggaggagcatagaggaggaaagtggggatgttcctggctttgaggttcaagagacccttggccccttcctgggctatatctgctgtagtgtcctggttacagtgctactgattgaagaaacagaggcccagacaagctcatactcacaaacagaggctggtccaagaccagcaaacaaagcacagatggcctcatggcccaatgcaactgccttcacccctgcacctacaccaatgcttcccaacgttcttcacattatggcacacagagaatgtgataaaatccgtaagattcactgggacccgaagcagcgcaagggcgtcctggctgcccaaacgcggggctccagcgccgcctgccggccgccgtgtgcaacgccgacccggaagtctcgccgtctctgcctgcgctggggacgcgcgggacacccggttccgggaatcccggtgggggtccgaccttgctttgggcgcagggaacgcggctctgcaggacgggctgccgccgagggcatcggcaagcttcggggtgtggaccgtgcctgcgcccgctgcatccgttttgggcaaggctgtggctttttgagcctcagtcactctttgcggaggacgaacaggatgatgcccagttgtggtgtcactaatctgggtcctgtggcct

SEQ ID NO: 1518 - DNA, 663 bp, Homo sapiens
  SIMILAR (240)..(311): 521254mologous to Homo sapiens chordin,accession number AF136635,Smith-Waterman Score=69.
atggaggatgtcagtggggtcaccagcagggagagttccaagcagccaggagctggagttgctctgaccactgtggagaccctgcctgacgttataaatgctgtgtcttggaggactggtgtgatgcggttgatgacactgattgctgtcatctgtgagatgggctatcaggttcggtgcttggcattggagaaatatcttcaggataaggcaagtttcatatgcccgtgcactggaatggcagatggccttgcccaaatagaaagcctgcatgctcttatgcttgtgggaaaccagaacatatcccaggggccctactggtatggggactccaggactgacagggtccggaggagtcatctgaaaatcccccaaaaggaccagttagacaagggctcagggatggtcattgaatttagaaatttacaaaacacatccaagcaaagaagcttggaaacaccgttgaaatggcaggaccctcaagtccagctcacggaccacaaaaccaagcaacacaagcaaaaagcaaaatcggttcttcccacacctctctccccaccaggaggcaaagtggaacaacaggcaaaagcctgttacagcaaacacaagtacagtccgaaaaggtcagcagaacataaagattcccacctccgcgaatcctga

SEQ ID NO: 1519 - DNA, 577 bp, Homo sapiens
  SIMILAR (61)..(390): 411254mologous to Homo sapiens ubiquitin-specific processing protease,accession number AF229438,Smith-Waterman Score=182.
gattccgagtatgcagactgggattacaaagtggaaagaaaggatcctttgaaattgtagaaaaagagaataaagtcagcctagtagttcactaccaatactggaggaactccaaggatatttcagctaagtcataacattaaaaatgtggtgcttcgacccagtggagcgaaacaaagccgcctaatgttaactctgcaagataacagcttcttgtctattgacaaagtaccaagtaaggatgcagaggaaatgaggttgtttctagatgcagtccatcaaaacagacttcctgcagccatgaaaccgtctcaggggtctggtagttttggagccattctgggcagcaggacctcacagaaggaaaccagcaggcagctttcttactcagacaatcaggcttctgcaaaaagaggaagtttggaaactaaagatgatattccgatttcgaaaagttcttggtaatccgggtagaggatcgattaagactgtagcaggaagtggaatagctcggacgattccttctttgacatctacttcaacacctcttagatcagggttgctagaaaatcggtag

SEQ ID NO: 1520 - DNA, 207 bp, Homo sapiens
  SIMILAR (160)..(74): 431254mologous to Synechocystis sp. beta transducin-like protein,accession number D90916,Smith-Waterman Score=53.
atgactgcagggtctgcctctgaagcccagcgtttctactccatttgggatattccacacaggaagagaattggaaatgctggaggctccccacgtcaggccgtcctccaggagtggctatccatctctaagggctttccggactgctgcccagcaacttcaacaggcacctctaatcgacgacctctcctgcctccgctggtgtag

SEQ ID NO: 1521 - DNA, 512 bp, Homo sapiens
  SIMILAR (700)..(2361): 711254mologous to Canis familiaris zinc finger protein,accession number AJ388557,Smith-Waterman Score=2263.
  misc_feature (1)...(512): n = a,t,c or g
atggatggagtatttcaaccacaatggcaaagaatgaattaccggcagtgtcagagtttcttggttngctgtgggaagacagctgccatgttgagaggtgccttgtggagaggctcatgtggcgaggaactgagactggcttctatccaacaaccatgttaaagacgcagaacctgttcaggcaagagtggaagcaagaggacgcataccacagtctggaattgacagtcatcctgacagatgccctgacaattgaaaaagatggtagaaaagggggagtcaggggctacatcctcaggagccttgaacatcatcttcccagcagggatttcccaagggtaacatgggtaccactgatatcttccaaatcaattaaagaaaaaaaagacagcaaaatctgtgttcatcatttcatatcggcaccagatgaacagctcattgatggagtaagggcagtcgagggggagtgtcataaaaagacaattctttttatgctgaatggagaggactga

SEQ ID NO: 1522 - DNA, 221 bp, Homo sapiens
  SIMILAR (69)..(170): 381254mologous to Homo sapiens Human myosin heavy chain homologue,accession number Y94290,Smith-Waterman Score=74.
tcaatagtcactgatccagatggcttggcttctccttttaagatgtttgtattctctgtacctcacaggtcagcaagtcctgggcttggtggagaaccagagtgagctgtgctgtgtttaaaatccttcctggggttggcagcaatgagtaagataatgctccttgctcacagagagtagtcggccagctgaaagcctgcttggcagtactgccatgggct

SEQ ID NO: 1523 - DNA, 785 bp, Homo sapiens
  SIMILAR (420)..(647): 281254mologous to Vicia faba ENOD12 protein,accession number AJ277288,Smith-Waterman Score=69.
atgaaggctgggctagggggtgagctgtgtccggtgtcgaaagaccccaggcaggccgcagaggggattgtggaccacaagcccccagatgcctgtcctctgatgattcagggcctgtgcttgaaatcagcccagaaacctgcagaagatgctggagccaggtggtccctgcatcaccaagcctctcccctggatgtcactgttgtgctgcgtgaacaagaagttgagtgtcagtttgccaatctttctgagctgaacaggtaccaccctggggcctctccttccctccttcctcttcctttcctcgggagtcacaggtcagtcccagttggggtcctgatactcatctctatttcatcagcaacctgtggacaactggagtacgctggactccttcctactccaaggcttcatatggcttttccccccaacttcacctggttgagtcctcaaccagcgaattcttcaatgccagctcagctctgagtcctaagacactgagctcaaaggtagatgtggtcccgaggaaggacaccccacagaataaggcaggccagctggagcctgacttggggaaacacccgcctcctctgctgtggaggccggcccacgccatgtcccgtggcccatatgcattccatagcaccttctttcaggacacagactccccttgccggaagcaaagcctttgcatctggtttctccacggcagttcagagattgctgaagcccaatctcatatgacgatccagatcttaggaagtccagaaaaatgggcaggataa

SEQ ID NO: 1524 - DNA, 498 bp, Homo sapiens
  SIMILAR (102)..(137): 581254mologous to Antheraea polyphemus chorion protein, class A,accession number K01841,Smith-Waterman Score=43.
atggcggatgatctgggtggagaaacatattttctgcacgacattggtgccctcctccctgaagaagcaaagccttatgaggggatctctcgggcccagggggttgcatgtgtcactgcagctgtggggggtgcggggaacagcttcagacttacagcacttctgtgccctggcttatcaggtcagccaagagcggcggttgagttcctgagaaagctggcttccttcaccggcggacgctatcactgccctgtggaaagccacctggggctgaaagtgctatggaccaatcctatgaacaacagtaagaccaggtatgggggcctgggaggcacaggctctgggctagtgaatacttgggggtctccaaccctcatgccaacaagtcacatcagctatgccgatagggtaggcatttatgagagcgatgacatcaactccatcatgtctgagatggaaaaggctctcaactactcccaaaagaggctggaagtctga

SEQ ID NO: 1525 - DNA, 221 bp, Homo sapiens
  SIMILAR (68)..(106): 1001254mologous to Homo sapiens bK1216H12.2 (like- glycosyltransferase (KIAA0609)),accession number AL008715,Smith- Waterman Score=69.
atagtcactgatccagatggcttggcttctccttttaagatgtttgtattctctgtacctcacaggtcagcaagtcctgggcttggtggagaaccagagtgactggtgctgtgtttaaaatccttcctggggttggcagcaatgagtaagataatgctccttgctcacagagagtagtcggccagctgaaagcctgcttggcagtactgccatgggctact

SEQ ID NO: 1526 - DNA, 291 bp, Homo sapiens
  SIMILAR (232)..(122): 351254mologous to Mus musculus open reading frame (251 AA),accession number D00570,Smith-Waterman Score=73.
atggcagaagtatcagaagcattcaaagggttgatgccctttgattcatcaaatttatttctaaggattaatcccaaagaagtaatcagagaggcagagagggacgctgctgagcacctatgtgtgtccagtgctcaggacaaaggtctagccaagggagacacttttcaagggaaaggtagacacagaaacaaacaggcacagaggaaagacgatgtgaagatacaacgagaagattgtcatttacaggccaaggaacagagaacgctgctggcaaacatcacaaactag

SEQ ID NO: 1527 - DNA, 504 bp, Homo sapiens
  SIMILAR (341)..(409): 601254mologous to Mycobacterium leprae weak match to acetyl- CoA carboxylase carboxyltransferase,accession number U15184,Smith- Waterman Score=67.
atgcaaaatgatagaggagacctgacacatcttcattttgcctttactgagcgggtatccacagagacaggtgataagaacactgagtctcagaagctgcccaaggttccaaagacattaagtggtaaaggaaatacaagctgtatggatcgcaatgacgctggtgttgcactgacggaatacaagcctgatggatccgatgacgctggccttcccgccggtctcctgcgtccaaacctgctgcagcagccgcgcggagcactcagacaccagtacgtccatcctcccatcagcgtctcactcgccaagtggacggaagcggaaacggtcagcctctcccggaagcggaaaccccctccggtccgctgtcccgtcggactgggtgctggcgcctctgctgcctcctggcgggatccagtagacactgcgaggagaacccgcggggatttcggtcaggagcgaggccgcaactcagggacgtttgggcgaggggagaggaattga

SEQ ID NO: 1528 - DNA, 470 bp, Homo sapiens
  SIMILAR (1)..(393): 891254mologous to Escherichia coli cat,accession number X99398,Smith-Waterman Score=630.
gtgagacgctgatgggaggatggacatactggtgtctgagtgctccgcgcggctgctgcagcagggaagaagagattaaatctctgactgctgaaattgaccggttgaaaaactgtggctgtttaggagcttctccaaatttggagcagttacaagaagaaaatttaaaattaaagtatcgactgaatattcttcgaaagagtcttcaggcagaaaggaacaaaccaactaaaaatatgattaacattattagccgcctacaggaggtctttggtcatgcaattaaggctgcatatccagatttggaaaatcctcctctgctagtgacaccaagtcagcaggccaagtttggggactatcaatgtaatagtgctatgggtatttctcagatgctcaaaaccaaggaacagaaagttaatccaagagaaattgctgaaaacattaccaaacacctcccagacaatgaatgt

SEQ ID NO: 1529 - DNA, 282 bp, Homo sapiens
  SIMILAR (114)..(269): 391254mologous to Penicillium chrysogenum SutA,accession number AF163975,Smith-Waterman Score=86.
atggtcatctgtggacgatcatcaagtcagcatggttccattctggcacataggtcacacgactactgtgcactaggacctgtgtctagttctgtgcccttcgtcctcgtgggaaaaccagaagagcgtgactccaagtgtggcctgggacggctgcctgtccatggcaagatggccaccaaagtgtggcccaacagcaacgctttgctaaaagaactccaactgtaccccagccaaccctacgaactcatccactcactttctcagcttcctgtggagtga

SEQ ID NO: 1530 - DNA, 408 bp, Homo sapiens
  SIMILAR (204)..(281): 421254mologous to Homo sapiens SEQ ID NO 472 from WO9922243,accession number Y19754,Smith-Waterman Score=58.
  misc_feature (1)...(408): n = a,t,c or g
cctaattcggcacgagggaattcagacacagcttacctggatcccttggcccatggtctctcacaggctacagtaaaggtagccctcagttccttgccatgtgggcctctccgtggtgcagctctcaggatggcagcagaatttatcagagcaggtaagtgaataaagccagaaaaagagtatgagcaagacaaaatccacagtctttgtcacctaatctcagtgacattccatcatgtttgccataccctatttgtcagaagcaagtcgtttgctccatcccacactcaaagggaggggattgcnnnnnnnnnnnnnnnnnnnnnnnnnnnnnnnnnnnnnnnnnnttcagaagctgcctgccatactcccctccacatgtacctgcccattcctgtgtgtcccaan

SEQ ID NO: 1531 - DNA, 398 bp, Homo sapiens
  SIMILAR (188)..(265): 421254mologous to Homo sapiens SEQ ID NO 472 from WO9922243,accession number Y19754,Smith-Waterman Score=58.
  misc_feature (1)...(398): n = a,t,c or g
ggaattcagacacagcttacctggatcccttggcccatggtctctcacaggctacagtaaaggtagccctcagttccttgccatgtgggcctctccgtggtgcagctctcaggatggcagcagaatttatcatagcaggtaagtgaataaagccagaaaaagagtatgagcaagacaaaatccacagtctttgtcacctaatctcagtgacattccatcatgtttgccataccctatttgtcagaagcaagtcgtttgctccatcccacactcaaagggaggggattgcnnnnnnnnnnnnnnnnnnnnnnnnnnnnnnnnnnnnnnnnnnttcagaagctgcctgccatactcccctccacatgtacctgcccattcctgtgtgtcccaatagtgan

SEQ ID NO: 1532 - DNA, 1027 bp, Homo sapiens
  SIMILAR (2)..(424): 951254mologous to Cloning vector pZC320 SopA,accession number U26464,Smith-Waterman Score=671.
atggagaggacatttgaaaaaggtgaagaaggtggagttctaaaagccgaagagttcaagatcaagaccctaactgaattagtgtctgaggtgggcccacttgcgggttaccaacttgcaaacagtcatctccttgtctatcctcacgtggtggacacaaagagaggaggcaagtgctgtcatgcctcttcctgtcagacagagacgcactcctgtggtcagagaacaccctcaggcagagttacaagtcatcagagcagggagtccttggcatctatccatattgcccaggtgatacgggacattggcagtgtctgcaacaagctacttcagaatcctgaggggagctggccctgtgggtcttggtggactggatgcatgcacagcattcctggagggatctggatcacagtagtgttttttctgagtgtggcatatggatcacaggtggtacaaaagccagccaagataaccctagccaaagagaaaccttgcctcattcttggattaaatgcaaaggtcggcttgaccattccaagctgctcaaaagaacacacgtttattatctcagaacttccatgggtccggaattcagacacagcttacctggatcccttggcccatggtctctcacaggctacagtaaaggtagccctcagttccttgccatgtgggcctctccgtggtgcagctctcaggatggcagcagaatttatcagagcaggtaagtgaataaagccagaaaaagagtatgagcaagacaaaatccacagtctttgtcacctaatctcagtgacattccatcatgtttgccataccctatttgtcagaagcaagtcgtttgctccatcccacactcaaagggaggggattgcacaaggctgcgtattcctggagatggggtcattgagggccatttcagaagctgcctgccatacttccctccacatgtacctgcccattcatgtgtgacccaatagagatagttgacctgcacactctaatgaagttacatgggtacttactt

SEQ ID NO: 1533 - DNA, 372 bp, Homo sapiens
  SIMILAR (533)..(399): 911254mologous to Homo sapiens Human secreted protein, SEQ ID NO: 7553,accession number G03472,Smith-Waterman Score=239.
atgcctgttgacaacttgattgtgttttctttttttgttatatatggtaaagtatatcaggcgattttcaacagtttagcagctttgcattctcagctggaggaacccaagtctgagctggctttaccaccagctgatgaaaatgacctggggactggaataaatttgaatggcagtcaggtcacaaagaatgcaatcctaagccaagccctggtgctgcactcatctcagagacagtggactttggtggttacccaatgcaacaccagttgtggcagccagtggagtaactgtgtcgcctatcccccaattccacacagtgtaactctgggagagactccttctgctgggggcaagaagagggaagagtaa

SEQ ID NO: 1534 - DNA, 1086 bp, Homo sapiens
  SIMILAR (1291)..(1698): 481254mologous to Escherichia coli dihydroxybenzoic acid- activating enzyme,accession number X15058,Smith-Waterman Score=218.
atggaccttgcttcaagtgccgcaaaactggctactgggccaaggactgcccacagcccaggattcctcctaagccatgtcccatctgagcaggaccccactggaaatcaaactgtccaactaatattgcagccacttctaaggcccctggagctctggctcaaagctctctggctgactccttcccagatctccttggcaagactgatgctgctcaatcgtctcagaagccccccggaccatcatggatgccaagcttcagttcccttattaggccaagacattttaacaaaattatccactaccctgactattcctggaatacagccgcatctcattgctgcccttcttcccaacccaaagcctgttttgcatcctccccttgtaactctccaccttaatccgcaagtatgggatacctctactccctctttggcaactgaccatgcaccccttaccattccattaaaacctaatcacccttaccccactcaatgccagtatctcatcccacagcaggctttaaagggactgaagcctgttatcactcgcctgctacagcatgggcttctaaagcctacaaattctccttacaattcccccattttacttgtccaaaaaccggacgagtcttacagctctcagcgagccgaactcattgccttaacttgggccctcactcttgcaaaggtactgtacgtcaatatttatactggctctaaatatgccttccatatcctgcaccaccatgctgttatgtgggctgaaagaggtttcctcaccacacaaggctcttacattatcaatgcctctctaataaaggctctccttaaggctgctctcctgccagccaaggctggggtcattcattgtaaaggacaccagaaaccaactcatcttattgctaaaggaaatgcctatgctgacagaacagcaaaagaaatagcaaatgcctccacacccacaaatattccagccctcactccaaaaggccaatatttttctttctactctatcacccccacctactcctcttctgaaaacctgctctaccagtctttccaactcagggcaagtggctcttag

SEQ ID NO: 1535 - DNA, 673 bp, Homo sapiens
  SIMILAR (1135)..(2523): 951254mologous to Homo sapiens ORF2 contains a reverse transcriptase domain.; ORF2,accession number M80341,Smith-Waterman Score=2316.
tctcgtagtgaacaccttatgtatgtaaggtgtccccagcccccgggccacaaacgggtaccagcccatggcctgttaggaaccgggctacacagcaagaagtgaatctctggcaagccagggaagcttaatctgtatttacagccactccccatcgctcgtattaccacctgagctcggcctcctgttggatcagcagcagcattagattctcagaggagtgccaaccctattgtgaactgcgcatgtgagggatccaggttgtgtgctccttttgagaatctaatgactgatgatctgtcactgtctcccatcaccccccagatgggaccatccagttgcaggaaaacaagctcagggctctcactgattctacattatggtgagttgtataattatttccttatatattacaatgtaataataatagaaataaagtgcacaataaatgtaatgcacttgaatcatcctgaaaccatcccctggccccctgtctgtgggaaaaattgtcttccacaaaaccagtccctattgctaaaaaggttggggactgctgctctagtgtgctcaccttctgatctgtctgatgtaacttcttgggattatttgacttatttctctagagcttgtgattcctattaagagaactttagatcttaagattcaagttaaa

SEQ ID NO: 1536 - DNA, 587 bp, Homo sapiens
  SIMILAR (50)..(160): 481254mologous to Alcaligenes sp. hydrogenase,accession number X93046,Smith-Waterman Score=68.
tttttatttgattgcattttattgtttccttcagctcaatgtgtacctgatattggagggctctccctatgggttgagattgagacatgttataaatgatgtggtttttattatttctgtgggctcctgtgcagccaggtgacaatcctgaggctgcgtaacgtcggaggtcaggcccgagttgccctgttctgactagcagagcccagtgtccacaccgtggcacagccacttctgcctgcatcatagaatggctggggcagctgctgttgtgccgacttgagatgcctgttccatgaggagatcagtaggcattcagcacggctatcctggccttttcacacagtgggttctagtttaccatcgcctccgaactccaagtccttaatgttgcagtggaagatgacttcttcattcaccatgagttccaccacattccagtcttctatcttctctaggatgacctcatgtccatctatggccaacacagcttgcaggccctgcaggcggaaggtgtggtgctccaccggtaggcctgccgcgctgtagggcccatagcgcaggatgaccactgcgttcttgggcat

SEQ ID NO: 1537 - DNA, 537 bp, Homo sapiens
tgcatgaagctttttttttgcaactaacattttaattgaaaacaaatagggggaagtgttcacatattctagagagagtgttatagattaatattggacaccttccataggccctataaacagcagccaccattctgccactgccatccccaagaagaaagttggctggcgttcttgggtacatggagtctggcggcggtggagtcccacagtatagggggcgtctttccttgaattcaagggcaggtctccagagtaattattaggtcccatggaagtgtctgcatcatgaggagcctgacagctttctccctctggacacttgcttagctccacaagtcccattgcccgtcttggtgctgctgtcaaagaggaatctgggggagtctttaagagagcttcacacaggttccctgcagttggaggatgtgctcggccatagaggctgttgtctattttgggtccagagatttcccattccaggtttctgagtccattagaaggtgtagaagaggtctcaggttcttgtggctccat

SEQ ID NO: 1538 - DNA, 405 bp, Homo sapiens
  SIMILAR (388)..(110): 411254mologous to Homo sapiens Human secreted protein encoded by gene No. 47,accession number Y27613,Smith-Waterman Score=150.
tttcatctgcaaggtattaaactaagggaatgaatcagggcattgcacccagatattttctagattgctaaaaagcttgtgattacctagtcataggaaaagcatgctattgatatggacaggagacagggaaatactgggtagaagagggcagttcccgtgcaaaggctccagtctcaagtctggaggcctgcagccctaagtgggaacaggcatttctgttttcatgcccaaaaagttgtgttttggcctgcaatgccccactatcctgtacccatataaccttgaaccccaggctccaggagaagacaaggagatgaggagacaagcaggtgaatggcagaacggtgtagcagggaaagagagaagagaaggtatgtctgaacaccaggaggagtacagctg

SEQ ID NO: 1539 - DNA, 693 bp, Homo sapiens
  SIMILAR (137)..(51): 381254mologous to Fucus vesiculosus metallothionein,accession number AJ005834,Smith-Waterman Score=49.
atggctgtggcaggcctgggccaagggctgggaagacgtgggagaaagaagcagtgggtctggccccatcctgctggagccccacatggagaggaagttcccccacggggctgggtcctgccctctgccattgtccccacagctgctgccacagacccaggaaggtccacagatgatgctccttctcacggatgcgaggccatcaaatcactttttgtctccgctgctctctctccatcgtggatagccaccatggtttctcaggagggaaaggacacaactggggcctggtctcccctcaagacacggtcacagatcagaggccacaccatcctagcagtggagcaggaccagctgggacagggtccttctgtgacacctgctgcatcaccaggctgggtgaacggacacaattgccagaactcacagaatagaagtatcagcaccgaaacctcacaggaaaaatgcgtggatcgtaatgcacgggaggcagtgttacatgcattccagcaccctgatggccatgggctaaaacaaaaagattttccttcttttgctaagaccatttcacttgcccagtctttaccagccaacctaatcagtgtggttatttatcaggagctcaaattatcccatgtccttgatgcatacactgtatgtgaagaaggcccattgcctcctaagggtagctga

SEQ ID NO: 1540 - DNA, 129 bp, Homo sapiens
  SIMILAR (129)..(67): 571254mologous to Bacillus pseudofirmus AtpI,accession number AF330160,Smith-Waterman Score=43.
atgagaagatcggagcatgtggatgggttaatcagagtggaggaagcccataacacaagtctaagtaaggaagaggctaaagtagagacctgcaataaagtctacaaaggatactttgagcagaattag

SEQ ID NO: 1541 - DNA, 486 bp, Homo sapiens
  SIMILAR (369)..(157): 1001254mologous to Homo sapiens lymphocyte-specific protein 1,accession number AF043350,Smith-Waterman Score=361.
atgaaaaaccccaggtgggatgacaacgacatcatactctttagaggaaaagaatgtaaagagacaaaaacgatggttgcaatggggcagggagggcaccctggaggagacactaaaaatattcccaaagacgaacaaagcgggtttgttgatgtactgaatcggacacattactttctagctgaacactcagcttcatccactccaggacagctgagcgtctggatatattgggttgggcccatcataggagctgtcctcgctggtggcctttatgagtatgtcttctgtccagatgttgaattcaaacgtcgttttaaagaagccttcagcaaagctgcccagcaaacaaaaggaagctacatggaggtggaggacaacaggagtcaggtagagacggatgacctgattctaaaacctggagtggtgcatgtgattgacgttgaccggggagaggagaagaaggggaaagaccaatctggagag

SEQ ID NO: 1542 - DNA, 1377 bp, Homo sapiens
  SIMILAR (301)..(1227): 691254mologous to Homo sapiens putative p150,accession number U93572,Smith-Waterman Score=979.
atgctggctgttaagacctgggtaacagtgaaaagtggtcaaagaattgcaaaccaggaaataacactgaactggaagaaccccaagtttcacatgcctgaggatgtacgagaaaaaaaggaaaatcttctactcaattctgagagatctactaggctcttaacaaagaccagtcattcacaaggaggggatcaagctttaagtaagtccacagggtcaccaacagagaagttgattgaaaaacgtcaaggagctaagactgtttttaacaagttcagcaacatgaattggccagtggacattcaccctttaaacaaaagtttagtcaaagataataaatggaagaaaactgaggagacccaagagaaacgaaggtctttccttcaggagttttgcaagaaatacggtggggtgagtcatcatcagtcacatctttttcatacagtatccagaatctatgtagaagataaacacaaaatcttatattgtgaggtacctaaggctggctgttccaattggaaaagaattctgatggtactaaatggattggcttcctctgcatacaacatctcccacaatgctgtccactacgggaagcatttgaagaagctagatagctttgacctaaaagggatatatacccgcttaaatacttacaccaaagctgtgtttgttcgtgatcccatggaaagattagtatcagcctttagggacaaatttgaacaccccaatagttattaccatccagtattcggaaaggcaattatcaagaaatatcgaccaaatgcctgtgaagaagcattaattaatggatctggagtcaagttcaaagagtttatccactacttgctggattcccaccgtccagtaggaatggacattcactgggaaaaggtcagcaaactctgctatccgtgtttgatcaactatgattttgtagggaaatttgagactttggaagaagatgccaattactttttacagatgatcggtgctccaaaggagctgaaatttcccaactttaaggataggcactcttccgatgaaagaaccaatgctcaagtctcactggaaatgatcaacacaattagatttgcttcttttgccccagaacaaagcgggtttgttgatgtactgaatcggacacattactttctagctgaacactcagcttcatccactccaggacagctgagcgtctgggaaaatccattccatgtatcacctaagggcatcttgcataccatcagtggcccatatgctgcctccatgatgaggaatgacactgtttttgagaaaggaggaaagaaaacgaggattcaggaggaaatgccttatattaagatggagatgaagatttgtgtgcatctcatttga

SEQ ID NO: 1543 - DNA, 491 bp, Homo sapiens
  SIMILAR (406)..(347): 551254mologous to Rhizobium sp. NGR234 Y4oE,accession number AE000088,Smith-Waterman Score=65.
ggtggcagagcttacatggccagggatcccggaggacctggaaggggttttaatggacttttgagaatcaaagtgaactgccagggacaaacaagagtggcgaggaaatggaagcagtcataccactcaggctggaaaatcgctctaggaatggcaagaagggctctttctcacttggatggtctccagaaagtcagctgccatgtcacgaagtgccctgtgagaaggacctgtaaggagggacggagggaggcctctaaatgacagccttcgaggaactgaatcctgctggtgaccatgtgagggagcttggactccggtccccctgtgttgagccttcagatgagttggcagccccagctggtggcatgactgtaacgtcctgaaacaccttcagccagaaagcattcagctaaaccacacctgtatttctgacccaaagaaattgtgagataataaacatttcttctcttgaaaaaaaaaaaaaaaaa

SEQ ID NO: 1544 - DNA, 410 bp, Homo sapiens
  SIMILAR (169)..(288): 521254mologous to Homo sapiens Human secreted protein sequence encoded by gene 11 SEQ ID NO:72,accession number B24447,Smith-Waterman Score=93.
  misc_feature (1)...(410): n = a,t,c or g
nagaccaaggagcagaaacatgggggcaggtaccctttaaaaaaaaatctatggaaggatctggnnnnnnnnnnnnnnnnnnnnnnnnnnnnnnnnnnnnnnnnnnnnnnnnnnnnnnnnnnnnnnnnnnnnnnnnnnnnnnnnnnnnnnntggcacctggaaccccagcgagacaaaaactgttcacactcctggaaagggggctgaagccagggatccaagtggtctcgctcagcgggtcccactcccagggagtccagcaagctaagaaccactggcttgaaattcttgcnnnnnnnnnnnnnnnnnnnnnnnnnnnnnggacaattgagcttggtgtnnnnnnnnnnnnnnnnnnnnnnnnnnnnnnnnnnnnnngggtttcccctcacagtgctaaggactgggt

SEQ ID NO: 1545 - DNA, 266 bp, Homo sapiens
  SIMILAR (129)..(266): 561254mologous to Homo sapiens Human secreted protein sequence encoded by gene 11 SEQ ID NO:72,accession number B24447,Smith-Waterman Score=118.
  misc_feature (1)...(266): n = a,t,c or g
attgcaacacgcagaccaggagattcccttgtgtgccaatgctaccagggccctgggtttcaaatgcaaaaataggtggctgtttggggagacccttagctaactgcaggagnnnnnnnnnnncccccagtgggacctggaacctcagtgagacagaaccattcactctcctggagaaggggctgatgccagaaagccaagtggtctcgctcagcaggtcccactcccatggagcccagcaagctaagaaccactggcttgaaatt

SEQ ID NO: 1546 - DNA, 786 bp, Homo sapiens
  SIMILAR (682)..(837): 371254mologous to Human immunodeficiency virus type 1 gag protein,accession number AF024104,Smith-Waterman Score=79.
ttactttctgcaccttcctcctctctgctctgcatcctctccagcctgcactccattcttgtgaggcttttctctagtgtccggggcttggtgggccctggtgtgagaaacctcccgtcccgtgagaatttgcacatgaagaccccaaggactgagggcattacaagaagtcctctgaagaagcttgggcctaggagtcatgaggcccaagaacccaagagctaagtttggacatgaattcactgtatggctctgtccaagtgagttccgctccctggctcttggatcccctgtttgtagaatgagggcctcagtggctgtggtgctgtgagatcctttgcctctgagccccacactggaagcagacccataggggcagcagggcagaggcggcaggggaaaagccagaagggacccttgggtgacaccaggagtagaaagaagctgctctctagttcccagttttaagttattgtcacatactccccttttgttatcttcaagctttgttattcgctgttcttggggaataaaaggagaagtatggtttgtggtacccaaaaagtttgtagctttggtatcctctggaatattttgggaaagaactggatttcctgcagtcatgtaggagcggggctggaaaggaggctgaagccagggagccaagtagtctcgctcagcaggtcccactcccatggagcccagcaagctatgaatcactggcttgaaattcctgctgccagcacagcaggaattgacctgggatgttgacctgggatgattgag

SEQ ID NO: 1547 - DNA, 528 bp, Homo sapiens
  SIMILAR (488)..(243): 321254mologous to porcine endogenous retrovirus VIRAL CORE PROTEIN,accession number A66553,Smith-Waterman Score=91.
atgagagcaggtggaacctattgtacttctaaggcagactggccctgtcctggaacctcagaagccacattaacccatgcttctcctcctacagcagagacattcagaagacccaaacgccactctttctccacccagccacatgtccagaagtctgagctctatggactgcacactaaagtagcacactttgcttttgtcctctggctgggttcagccatgagagtcactaacaaattagagggtaagaggagcaaggcgctaaggccccgcgacgcagccaacggccgggacgtgcgcgcatgcgcgctaggactccgctccgcctacgctgcaggcggagagcaaccgccaagcttggtgggagtcaaggtgagtggcaaagcactacagcgctggggtcccactaactcgaggtcaccgctgtcagtgggaggggtcctcatgagtctggactcgctttcatccgctttggttgtgaagtgttttcctgcagtcttcccctcaccagttcatccccggtgctga

SEQ ID NO: 1548 - DNA, 461 bp, Homo sapiens
  SIMILAR (255)..(335): 391254mologous to Homo sapiens Human normal uterus tissue derived protein 37,accession number Y59874,Smith-Waterman Score=48.
atgtggttcctgctccccgtcctcatccgccagggtcggcaaccccaggagaccaccccgctggccctgtccttgatgtcagatgccgtgctgggtgctggagtgccatgccggccactcccaacttcacgcagccacacagccaacttgctgtgtaccaggcactgtggggctgctgggaccctaaaagagctgtcagagggtgttccacggccacctttcagtttccgtgtgggtggctcagcggacgtttccatccttgcagaaaggtctcgggccagtgcggctcccagtgcctcagtgcgcgtgcccagcatttacacacagagccactgctgcacagccaaactcagagggagcttcagatgctctggccggtgggacctgggaaatggggcatcatcaacccagggaagctcaacccagagcagctagcctgtgtctccgcccagaaactgcag

SEQ ID NO: 1549 - DNA, 861 bp, Homo sapiens
tttgctaaacttggtttattattgtctaaaatcttgacattggtatttgtagggaccagccccacagggtccgtgggtctctccctccctgtgtgcagcaatgagagagtgtagaaataaagacacaagacaaagagataaaagaaaaggcagctgggcccgggagaccactactaccaatgctcggagaccggtagtggccctgacctgactgactgcgctgttatttatcggatacaagacagaaggggcagggtaaagaatgtgagtccatctccaatgataggtaaggtacacgtgggtacacgtgtccactggacagggggacccttaccctgccctggacagttgaggcagagagagagagagaggagacagagagaaagacagcttacgccattatttctgcatatgcagggactatttagtattttcacttaattttgctactgctatctagaaggcagagccaggtgtacaggatggaacatgaaggcggactaggagcgtgaccactgaagcacagcatcacagggagagggttaggcctccggataaccgcgggccagcctgactaatgtcaggccctccacaagaggtggaggagcagagtcttctctaaactgccccggggaaagggagcctccctttcccggtctgctaagtagtgggtgttgttccttgacacatttcgctaccgctagaccacggtccgcctggcaatgggtgtcttcccagacgctggcatcactactagaccaaggagtcctctggtggccctggaaagtatccttaaagcgtttgagcctggattgtattgctattaagccagtgaacttggtgatgaacaagttaattatc

SEQ ID NO: 1550 - DNA, 131 bp, Homo sapiens
  SIMILAR (74)..(121): 621254mologous to Pyrococcus horikoshii 103aa long hypothetical protein,accession number AP000001,Smith-Waterman Score =45.
ctagatctcgtatttgaatttgtggcgcttggtgtccgcgagttgccgaatgaagctgagcgtctcagtggaaccagggatctcaggggtgagcgaccgcgaggggagagcgacgaaaagggcggccggag

SEQ ID NO: 1551 - DNA, 571 bp, Homo sapiens
gtgttctgagtaacagtcagtgtataaaaggggattgcagaaaaaaatgagggcttgctttactcaacagaaaatatggcccttcctgaatgacactaggagagtcattttatctcatacattcccttcatttcgttggtggacatttgttgaaaccggcactcaatggtcaaaccgtctgtgccctccagttgctgacagtcctgcaggaagatggacaagaggcccagtgctgacagtcacacgactctcactacttgaatgaggggactgtgggtgcaactagaaaatatgttgattcttagccattcccaccttgcctctccggttcagaaccccagctgcgagctgtttgtttccctgcctggaaatgatgttttaggcaggttccttaatttctcaggtctgtctcagataataaaaagctctttgtatgagcctcagaactgtatcttcagtgaatgaaattaccagtcattatacgaagggactttaaaaaatttgtggaaatactgaagtaaaagatgataaaaaaataaaaactttatctcttggctgggaaaaaaaaaaa

SEQ ID NO: 1552 - DNA, 291 bp, Homo sapiens
  SIMILAR (43)..(225): 341254mologous to Homo sapiens similar to mouse neurexin IV; similar to PID:g2773268,accession number AC006456,Smith-Waterman Score=58.
acatcatggatgagagaaagaaccaaaaaggatgaagaactaggtgcctggaatgttcctaaagattcacttgggaaacagcttaatatagtggactttggcaacagaccaactaggcttcaaatcttggttctaccacctaacggttataagaccttgaaagatggtttaacttctgagttcatttcctatttcaaaactctaagagactctgcgaagagacacattgctttggaggaatcagccccaggccaaagcaacaagcaacaccagagtcctgcggagagctga

SEQ ID NO: 1553 - DNA, 522 bp, Homo sapiens
  SIMILAR (680)..(1090): 811254mologous to Homo sapiens Homo sapiens Tub Interactor (hTI-4) protein,accession number W59133,Smith-Waterman Score=565.
atggcatttaacccagaccttcagaaattggtagaacttggacaggtgggcctgaggaagagcagctttctaaccaaatggcctgatgcaaaccaaagcacaaaggtcgcaatgaagatggactgtacccggggctttggtgatgtgctgtcactggtgatggctggtgaaggccagaaagagctgctgtctaaattaataacaaaaataaagacacccaaccagagagtctgtgaaagaggaggagggctcagggcgtcagaagacttccctccccaagctgccatgtgtttgccacagagcatggtacttcaccagcagtttggcaatgggctcacgcaatgttggagctggtctctcagctgtaagaagcaggctaggacgctgccctatggcttctccatggccttgcagggcatctccgtggaagagaacaggctcacagatgacttttttgggacagcaaattcactcgacacccatttgtaccaaggacctacttggcattcagctgtgtggtag

SEQ ID NO: 1554 - DNA, 1166 bp, Homo sapiens
  SIMILAR (1)..(687): 611254mologous to Homo sapiens Gag-Pro-Pol-Env protein,accession number AF164611,Smith-Waterman Score=751.
atgaccagtgacacaggagttataacctactggagtaaagtaaataccacatggaaatttaagcaacagtctgaagcaggatgtggtttgttgacagtctgtgtcacagctggtaaattcagagaggggcatgtttctaagctgaaatggtcagggaagtcttcactgagaagttctccaggttgggcaatagataggcactgctacataggcattgaagaaagcatttggaactatgctccttctggtaaaaatatgctcaatgaaaagcctttttctgaagacctagttatagtcacaggtgataagaaaaggcaagagagaacagttaacacaaaaatcagtctagcagttagctcttggaagaaggaggaaactgtgaccagaatgaggcatgtaagaattccaagagaagacttgtggtctggagggcagctctccctctcagtcgatggtcctgtcacagatgtcgagcacagactagtcgagagtccaagcgatttcagagccccagtggccacttgtagatggggaagtagggcagggcctgagctaggtcacctgggtctctgggatgctttccatgagctccggcagggcagggagagaggtgtgcaagcagatagctgggtgcaaggagccagcgccatgggagagaggtccgcaagaggccatgggacggtgggcagcacagatgagtgtgagaattggcagcaagtaaccaagatgctcacaacctcagacactggggagacatggcagaacctccagcaaacagggccaacaggaggatcttgagtggatccccagtcctgaaaaacgcctatcaacaactatcttgggacaactgggaaaattggagtaagaaaccaaagaactccctgtttctcagcccttgccagcagaatctggtcacccctctgcccctcaaaattacacatcttatacaactagctcctgtccctgcaccattcctgtcccttgtccttgatccctggtttcccagtggaacaggaaaaagagagatcacaataaaggggaaaagcacccatactcgccatgtggacaagtcagtgtctctgtattcccataaaattccattgacaaagcaggcagcagaccagatttgtcccgtgggccatagtttgctgaccccggattactga

SEQ ID NO: 1555 - DNA, 1548 bp, Homo sapiens
atgatatgcatgcgcctcttctcactcctgctggtccggaagtggttttctggttccacagaaactcacaagacttggaatcacttctgtaagacctataatgggaacacagccaacttctcatatacgtgtgtgttttccagagaagacttgtggtctggagggcagctctccctctcagtcgatggtcctgtcacagatgtcgagcacagactagtcgagagtccaagcgatttcagagccccagtggccacttgtagatggggaagtagggcagggcctgagctaggtcacctgggtctctgggatgctttccatgagctccggcagggcagggagagaggtgtgcaagcagatagctgggtgcaaggagccagcgccatgggagagaggtccgcaagaggccatgggacggtgggcagcacagatgagtgtgagaattggcagcaagtaaccaagatgctcacaacctcagacactggggagacatggcagaagctcagcaaacagggcaacaggaggatcttgagtggatcccagtctgaaaaacgctatcaacaactatcttgggacaactgggaaaattggaggatatactttcctactgaccatggggcctggtacacagcggacagtttaataaatgctgtcacagctgctgttgatcttgttatgtttcagtataaagcagtttgttttcttaccactttagtttctcttgggacaaggaagctggaacatttgtcactggaaagtttttggcagtcacggaaagccaagccccactggggaaaaaatgaaatgaggaatgcttctggaaatagacccctaagtgggaaggaaagggaagttagccaacagcctcatcttccagtcacccagaaactccattctcctgagccagaaaccctctcctggaactccgaagcagctgagatgtcactgcgctactttgtgaccatgtttaggaattgcaccttctgtggggcagccggctatgcgaccgccggcaaggcacttaactgccagcttactcaaccatatggtgaggatgagataaaatgtccgtggagtgcctggcacatgctgggtgtgcagcacattagtgactccattatgaaattggtgatgcttgtggtcaaagtgtggtgcagaaaacccttcacccccgtgtcaaaaggagctgacgaagaagcaaagatgcccttgccaagtgacccattgagaggtgatcctagagtaaacacacttcttccccctctgtgttcattaatgttccagctgtgtagaggactgaaaagtaaggccactcagcaaaatcagtgctgccaaccatggggtgttcaggggcacagtcctcaccctgggtatcagggacggctgggcactggtcagattgcaacggcccaagcctccctgcagcaggatgccacgtcgtcatctcacaaaggcttgctgagttcagcacacaggatccatggctgccggaaacctggaattaattcccctttattctcttcattcccaatgatgtgtttcaagttctga

SEQ ID NO: 1556 - DNA, 475 bp, Homo sapiens
  SIMILAR (119)..(289): 1001254mologous to Homo sapiens unnamed protein product,accession number AK000349,Smith-Waterman Score=298.
tggttggttactcgcactatgcagacgtgttgcggtgctgaatacaacatttattactaaagccagacactggatcaccgtcacggcagatgtcagcacacctgttgtaatcaagaatatgccttctgcatcctgtgatacactactggatgacatcgaagatatcgtgtctcaggaagattcaaaaccacaagataggcattttgtaagaaaggatgttgtcccgaaggtacgaaggcgaaatacccaaaaatatttgcaagaggaagaaaacagtccaccaagtgacaggcctccatacactcctattacaagaggacttctgtctctgttccacatttcccttcgttgttggcgacctaaccttggtgaccgcaagcgatcggttgtgagagaaagagctcaaaattccttggaaggacctgctgcttctctttctgtttctagttcactctacggaggcccttttacttga

SEQ ID NO: 1557 - DNA, 646 bp, Homo sapiens
  SIMILAR (172)..(444): 281254mologous to Euphorbia esula glutathione S- transferase,accession number AF239927,Smith-Waterman Score=83.
atgctagaaggagaatgcaagttaaacccaaataaaagagaagaagacaataataaaggggttctgaaccaggcagaaatagctgaaatgacagaaatagaatttagaatatggataggaacaaagatcattgagctaccgaagtatgttgaaaccagatccaaggaagctaaaaatcatggtaaaacaaacgacctgatagaggtgggtgtcattccaagcactctgaactgtcctgtggaattcagaaagttcagctctgctctgtgtttgacaagctccatttttcatgcgatggcagaagactggagacctgaggatatgttcatggtggcttgctcccagtgcatcacaatctggagaggcctccggcagaactatagacaaataatttcaagcttcatttggaagaagaaaatctatgggaaatatcaagtccccttggcactctggtaaccactgacaacccttgaatttgattcccacaaatttcatgggagcatcagtgatggagaagcggaaaggagtgctacacatgctttacacctttgtaagataaacttttaccggggattaagtggcaaccagctaacaacaatagacagaaatctgggagctaggaaaggaagtgtgaatgatggggcag

SEQ ID NO: 1558 - DNA, 722 bp, Homo sapiens
gataattttgtgtcttgataaagtaggaatatggctgggaccatccctgactctcttttttccttgaatgtgaacacatgagtgaagcatacatccattgtccatggggcaagaaacatgaggatgaaaagccaatatgttaaggacatgaagtgaaaagcgggaagagcttcttattcatgttatcactgagcagcgggaactgggggctctgctcattatagttgcccacggcctccagtcaatgaaatttccggccaatgaaatgctctactgtgactgaagcagcaaagagaagatgttctgccggaggcctctccagattgtgatgcactgggagcaagccaccatgaacatatcctcaggtctccatgtcttctgccatcgcatgaaaaatggagcttgtcaaacacagagcagagctgaactttctgaattccacaggacagttcagagtgcttggaatgacacccacctgcaatttaaacaaaaaagaaggatgagtaatttgctgctacatttgtgtgggaagtgctgcttgccgatagggaagtaggagaggaaataaggaaaacaataaaccaagtacagttttgcaaatacccagacacattggatggacacagaagctttcactgggagattattgaagggtagatgcttggtgtctccattgcctcctgtgatgggacctcacattacaagccactgtggttggaact

SEQ ID NO: 1559 - DNA, 870 bp, Homo sapiens
  SIMILAR (108)..(188): 401254mologous to Homo sapiens Human HUPF-I mutant protein fragment 33,accession number Y21385,Smith-Waterman Score=49.
atggaggtcaatggcctgtctctggaggcactagcatatgtgaaactctttttgggcttcttggtggatggttttggtagcagaaccaaggccaaatggggctgtagtcaaacccttggggaaacagggccatttcttggtctgcagcccaaatcacagtctgtgagtctgctacctgggcccgcagtgcacagggctcgtactctgctgtgttgtcttctctctgccttggctgcgcagtatcaaagccctccctatttacggggaaacctttacctcgcgaatcttggaatcccaccgcccaccacagcagggccaaagcctgtgttaggcttggcctcagatccccgcaccacggaacttgtagtgggagccagtgactcagagttgggaaagcaaagatgtcgttacccgggggcacatggggactgctgcagtggtcctggcgtccagtgtgcaaggacagcacaggtattgctccagcagtggtgctcagaagccaatcccccttccccccggcaaacccccagccaaagcctaagtggaagcgtgggagcccagcaggaggcgcagaggcagcagctgcggaagctggtgcaggacatacaccagtgtcaagccaagaggtctaaggctgtgcttgggcttggaccacgggcacagggagagatatcagagtgcagggcagtaaatagtcacctgcatctttgtgaagaactggaagttggtgtcatctcagcaaaatgttctctgtatgatggaactgagaagtgctggctgccttctaggagacaccgggcaccagtgacattaccagttgccagttacatcagcagtggcattaccagttaccagttacattactggtaa

SEQ ID NO: 1560 - DNA, 708 bp, Homo sapiens
  SIMILAR (4712)..(7297): 951254mologous to Homo sapiens putative p150,accession number U93563,Smith-Waterman Score=4223.
atgaattcaaatgactcttttgacccaacagttacaaaatcattggccattgctgcccaggagagtgtggcctctgctcaaacacagcaacagaccctgaaggtgccgcagctggtggccatcagctcactacactctcatcacaaggttccctcggagggagaactgagtggcaccttccactggctgccaacatggcaggcttatgcggatgtttctgggggttcccaggtgccatcccacatgggctctgaagcaaggccgcagacatgcttccagtctccctgctcaccgctggccccagcactgctgccccttctgcccaatgtccttgcttttacaactactgtgatgggctgtatcccctctttgtgcttgatgttttattttaaacgaaatgagtcagaactggcttcccacatcccctctgagggcctcacggttctacccggcaatccacccttctatgctgcatgccttctcacgctgtctcttgaagatcctgggcctggcactgagcactcagggacagtaggcctctgccatacatgtcgatattcatctgtcaaatatttatcgagcagccactccgtgccagccgatcgaatgcctgctgcactgctgaagaggaaacagagtcgtggcctccgggagggggctcaaacctgtgactggtgcatgttcgccattagacacactggctggtga

SEQ ID NO: 1561 - DNA, 420 bp, Homo sapiens
  SIMILAR (361)..(260): 471254mologous to Plasmid pDU1358 unknown protein,accession number M15049,Smith-Waterman Score=60.
atgacagaaaccctatggccagcagagcctaaacgtttactatctgacccttcggaggaaaagtttgctgaccgtgtgctaaaggatgttcatcaggcagtcatactggcaggcatggccagcttgaaagctttcttcagaaccatcaagaggcattcactgatcccttatggatgtgagcaccctacccccactacacagttggcacatggagaggtaggtgaaatgaacaaacccatctgccagatcatagccccaaggtcaattgagctggaaacagaaacttctgcagtgttagaccagcgaggttccagtgctgctcctcccaccagccagccttccctgacaggaggaggagaagataaacaacaaataaaaaatgaaaaaataaagtgttcagcttatgataaagtggaataa

SEQ ID NO: 1562 - DNA, 1011 bp, Homo sapiens
  SIMILAR (124)..(294): 981254mologous to Homo sapiens unnamed protein product,accession number AK001123,Smith-Waterman Score=294.
atgaagatcctctctcctggccacagtagttgggatctggccccaggctcacctgtgctcagcaaagcagaagcctgcactgagcgggacccatcatccctggcaggcccccccggcttcccgaaggtcccaaagacggagaaaagctttgaggagaggctgatcttcaaggctttcctgctgaagtttgtgaattcctacacccccatcttttacgtggcgttcttcaaaggccggtttgttggacgcccgggcgactacgtgtacattttccgttccttccgaatggaagagctcctgtacgaagagtgggcacgctatggagttttctataagtaccagcccatcgacctggtcaggaagtattttggggagaagatcggcctgtacttcgcctggctgggcgtgtacacccagatgctcatcctgcctccatcgtgggaatcattgtcttcctgtacggatgcgccaccatggatgaaaacatccccagcaggctctgaagaaccaggaagaaaacaggaagtcgaaaccagggctagggacctggagcagattcccacgcacggctgggtccctgctgtgacccgctggacgacaggctgtacctgctggaatgggatggcactcttttctttactgccatgggacagggagctccagaatttccgaggactgcagggagaacctggtgagcagacccagggtccccttttggggtcttcggtatacaggcctgggcagctgggccgggtcctcttgcctcggctcaccaacactgtatctcattcctacccttccggagacccgggacagaggccgccagctctgagcatgggtgccggcaatggaatctggtacaatatcctcagaggcattgggaagcttgctgtcatcatcaatgagcagaaatgtgaacagctggaggccggaaaagaaaggacacaagcggagaagaaacaccagaggaaaaataatcccttagagggtaaagaacaaataattgaataa

SEQ ID NO: 1563 - DNA, 195 bp, Homo sapiens
  SIMILAR (39)..(161): 341254mologous to Echinococcus multilocularis ATPase subunit 6,accession number AB027555,Smith-Waterman Score=67.
caagttaatggtagactaacactggggggtggggtctaggcatcatgcttttgtcagcatactcttgagcttttaagtctactatgtctgaactgtggtttcttgtttatccttttttccttagttggactgttctgtatgggtgtctatacccttattccaaggtgaataaataaagttgtgtttgcctaatca

SEQ ID NO: 1564 - DNA, 733 bp, Homo sapiens
  SIMILAR (202)..(41): 331254mologous to Simian immunodeficiency virus envelope glycoprotein,accession number U05142,Smith-Waterman Score=64.
cgcgtccggcaggtgcatgagcccgtgtctggagaaaggttatgaaggtgaatgctggttacatgggagggtgacttggagccctctagtttccttcttgtgccagctgggttcctgtttcaaggccaggcttctctaacttgtcttcctgggaaatgtagcttttccaagaatttggtagtgcacaccaggaaaaactaggtatcagaacagatttttttttaaatagtggaaacaccctcactcccacactttggacagttagggttggatatttaatttcatagttactctttttttccacagaagaaaggccagcctgacccaagttgcctatttttaatgtgttactgcaccttaattttccccttcaaagtgaaaaaaggcccagaaactagcagatagaaatggaacccgttgacttagttcccttataagaagttcttgcaaacacctctgtgacgttttcattcaagtggatatgttggacaaataggaaacagttttagtttacgcgaacagtatgagacttcccaggtggtggacgccatttttttagaagtgttgatgatgtatttgataacattataaaagtatgtgtctcccgtgaaagaacattgagctatttccctggaatggatggggaagaaatgagcaaaggagtgctgttctgtatgggtgtctatacccttattccaaggtgaataaataaagttgtgtttgcctaatcatg

SEQ ID NO: 1565 - DNA, 154 bp, Homo sapiens
  SIMILAR (18)..(140): 361254mologous to Human immunodeficiency virus type 1 vif protein,accession number AF170545,Smith-Waterman Score=67.
ctagctaaccgcagcaaggactggcgtccggagaagggcgaggccgcttgtatcatggagtgtcagcttgctggaagccgaatgaattccgcgatgatatgtgcagaaaagagatccagggctttttcgattgtgcttcaagggattaggaagc

SEQ ID NO: 1566 - DNA, 390 bp, Homo sapiens
  SIMILAR (193)..(315): 311254mologous to Homo sapiens unknown,accession number AF107885,Smith-Waterman Score=65.
atgtccataagcaggcgccacgaagcggcccctaacagatctattgaaaagcaattctctgtcctcttttcctctccacctttgcttctcacaattccgagccctcgggtggtttgtgggagcacactctgcattcgaaaccacgcgcacctggccttagagagcgggaactcggatgcgaaggcatgcagaatctccttttcaacccttgcagctcttccctccttcaccccattgctcgcgcctttttccccaacagtttcatctcctacacccactcacatcaaagataaccatgttcacagctctggaactgtccaggccttgctcatcttaccacagcataatgcctctcaacatatatcaccaattggaggaggaaagcgtggg

SEQ ID NO: 1567 - DNA, 403 bp, Homo sapiens
  SIMILAR (70)..(384): 341254mologous to Oryza sativa DNA binding protein,accession number X88799,Smith-Waterman Score=81.
cccccatcccatgaatggggtctggcttgcacaaggaatgcagaggcctcagcctgtcctgtgacaacgttaagtccaagagcgccaaaaggggatggcagaggagtcatcccccgaatctgctggtacccaagaggtggggggttggctgttcctccagactcactaaagcttcggcatcgcctcccgacggccgccgggaggagccaggcgtcccggtagtcgcgcttggaaggatggggtcggggggagtcagtctccccgaccggctttcccccaagctcgaggtcccaggagcctcctccaggaccccgtaaacgcacggagtagaggaacttccagtcctgcccacccccaacgcccactcgcacgagccgcaccagcactcaccttctccacgaaa

SEQ ID NO: 1568 - DNA, 501 bp, Homo sapiens
  SIMILAR (474)..(418): 571254mologous to Rattus norvegicus acetylcholinesterase,accession number X70140,Smith-Waterman Score= 47.
atgttacactctcctcaagcccagaagagctgcgtgggcttgataaacagccacgtttggtccgactgcagctccaaacagatgtctgtagatattgcagaaagccggcagaaagtcgacagtccgcggtgtaacaatagcaagcgcaaacaggctaagagtcccgaagagggcgacggtcccctggccaacgcggcgctggaccccagcttatgtgtgctgttgcttcctgccagcgcgactaccgggacgcctggctcctcccggcggccgtcgggaggcgatgccgaagctttagtgagtctggaggaacagccaaccagcgtccttacaacatgggcacagaccagaaatcggatctcagctttggttctgcgcaagtatcaacaacttgatttctgctcagtgcatgaagaaaccttcaacagcagcagctgcgccgtgaagtgcgggggcagggcacccccggggaaccaacaggtcaacccgtgttttgcctaa

SEQ ID NO: 1569 - DNA, 752 bp, Homo sapiens
  SIMILAR (276)..(317): 571254mologous to Homo sapiens Human secreted protein, SEQ ID NO: 6363,accession number G02282,Smith-Waterman Score=42.
gaaaatggggggccctgagtccctggcctggaagtgggcctgaggctgtggtgaatggagccaagagaataattaccaggtcagtttcctatggagtttctgggtcagtaatgccaagaccaatagtccagggtcagggtgccaaattcagacagggcaataaaaaagagaaagctctaattcaaattgatcgttctgacagagaaggcaatgcaaagggagttcagtcagacaagccaggactgattcctgagaaaaaaatgcacacagtgccaatttccttttttaactggttcctgccacagctaacatcggggacatatcctaaatctggcaaagctgttgaagaagcccagccaaacagtccacctgccgagggcagaaacgttcgggacagggtgagagaccgaatttacgattcaagtctaatgttcttcggacgtgcgcttcggccccagagaaggggagtctcggtccccgttttcaggtctgcgaaggaacacattggcagggtgaaaggaattcctcccacacaaccagctctaaacctgatgacgcgggtggagaaggtgccatcccgccccaaaggggcaacggggaagatccctaggccagaccgccggaccccggttagcctttgggccacaaggagccgagagggagtaggggaagagctggccgcagtcgctcagccccaggatagaagctaccaaccagttaatgcaaaatggtcgctatggcaacacacgtag

SEQ ID NO: 1570 - DNA, 536 bp, Homo sapiens
  SIMILAR (204)..(419): 1001254mologous to Homo sapiens Human secreted protein, SEQ ID NO: 8036,accession number G03955,Smith-Waterman Score=376.
ctccagcgtggtggaattcgcggctacgtgtgttgccatagcgaccattttgcattaactggttggtagcttctatcctgggggctgagcgactgcgggccagctcttcccctacgtgcctctgggctccttgtggcccaaaggcctaaccggggtccggcggtctggcctagggatcttccccgttgcccctttggggcgggatggctgcggaagaagaagacgaggtggagtgggtagtggagagcatcgcggggttcctgcgaggcccagactggtccatccccatcttggactttgtggaacagaaatgtgaagtttttgatgatgaagaagaaagcaaattgacctatacagagattcatcaggaatacaaagaactagttgaaaagctgttagaaggttacctcaaagaaatttggaattaatgaagatcaatttcaaggatgcatgcacttctcctcttgcaaagacccatacatcacaggccattttgcaacctgtgttggcagcagaagattttactatctttaaag

SEQ ID NO: 1571 - DNA, 476 bp, Homo sapiens
  SIMILAR (720)..(4): 811254mologous to Escherichia coli O157:H7 putative transport system permease protein,accession number AE005448,Smith-Waterman Score=898.
  misc_feature (1)...(476): n = a,t,c or g
gggcaaaaaaaattgaacgcctgcggaatatgtacgacggaccaggtgcctactccgtagattttgtctctctattgcctgcgccgtgtcctggactgctcacgggagttctgcaggagacgccggaatatatggaagctgaaaaatggacataaatggaaagaccagaatattgaagatcactacagaaatctaannnnnnnnnnnnnnnnnnnnnnnnnnnnnnnnnnnnnnnnnnnnnnnnnnnnnnnnnnnnnnnnnnnnnnnnnnnnnnnnnnnnnnnnnnnnnnnnnnnnnnnnnnnnnnnnnnnnnnnnnnnnnnnnnnnnnnnnnnnnnnnnnnnnnnnnnnnnnnnnnnnnnnnnnnnnnnnnnnnnnnnnnnnnnnnnnnnnnnnnnnnnnnnnnnnnnnnnnnnnnnnnnnnnnnnnnnnnnnnnnnnnnnnnnnnnnnnnnnnnnnnnnnnntcttgctttaan

SEQ ID NO: 1572 - DNA, 2274 bp, Homo sapiens
  SIMILAR (568)..(879): 801254mologous to Fugu rubripes ribosomal protein S7,accession number X94942,Smith-Waterman Score=400.
atgtttggagtccacggcaacttcttgggaatagagtctaggcccccactgctgtcactctcacccagcctcctctacacatgtgagatgtttcaggaccctgtggcctgtgaggatgttgctgtgaacttcacccaggaggagtgggctttgctggatatttcgcagaggaaactctacagggaagtgatgctggaaactttcaggaacctgacctctatagggaaaaagtggaaagaccagaacattgaatatgagtaccaaaaccccaggagaaacttcaggagtctcatagaagggaatgtcaatgaaattaaagaagacagtcattgtggagaaacttttacccaggttccagatgacaggctgaacttccaggagaagaaagcttctcctgaagcaaaatcatgtgataactttgtatgtggagaagttggcataggtaactcatcttttaatatgaacatcagaggtgacattgggcacaaggcatacgagtatcaggactatgcaccaaagccatataagtgtcaacaacctaagaaagccttcagatatcacccctcctttagaacacaagaaaggaatcacaccggagagaaaccctatgcttgtaaagaatgtggaaaaacctttatttcccattcaggcattcgaagacgcatggtaatgcacagtggggatggaccttataaatgtaagttttgtgggaaagctgtccattgtctcagattatatcttatccatgaaagaactcacactggagagaaaccgtatgaatgtaaacaatgtgttaaatcctttagttattctgctacccatcgaatacatgaaagaactcacactggagaaaagccttatgaatgtcagcaatgtgggaaagcattccatagttccagttcttttcaagcacataaaagaacccacactgggggaaagccatatgaatgtaaacaatgtggcaaatccttcagttggtgtcattcctttcaaatacatgaaagaactcacactggggagaagccctgtgaatgtagcaaatgtaataaagcattccgtagttacagatcctatcttagacataaaaggagtcacacgggagagaagccttatcaatgtaaggaatgtagaaaagcattcacgtatcccagttcccttcgtagacatgaaaggacccactctgcgaaaaaaccttatgaatttcctttcaatatcatgaaaggactcacactggagagaaaccctatgagtgtaagcaatgtgggaaagccttcagatgtgccccacaccttcgaaggcatggtaggactcactggagagaaaccctatgagtgtaaggaatgtgggaaagccttcagatctgcctcacaccttcaaattcatgaaaggacacaaacacacataagaatacactctggagaaagaccttataaatgtaagacatgtgggaaaggcttttattctcccaagtcatttcaaagacatgaaaaaactcacactgcagagaaaccctatgaatgcaagcaatgtggtaaagccttcagtagttccagttcctttccgtaccatgaaaggactcacactggagagaaaccctatgagtgtaagcaatgtgggaaagccttcagatctgcctcaatccttcaaatgcatgctgggactcaccctgaagagaagccctacgagtgtaagcaatgtgggaaagccttcagatctgccccacaccttcgaatccatggtagaactcacactggagagaaaccctatgagtgtaaggaatgtgggaaagccttcagatctgccaagaaccttcgaattcatgaaaggacacaaacacacgtaagaatgcactctgtagaaagaccttataaatgtaagatatgtgggaaaggcttttattctgccaagtcatttcaaatacatgaaaaatcttacactggagggaaaccctatgagtgtggcctccagctgcccagaacagctgcagagagtgtggattctgagaagctgcagggccctggaaagcaggagacccacgtgcagcttttgtctctctattgcctgcgccgtgtcctggactgctcacgggagttctgcaggagacgccggaatatctggaagctgaaaaatggatcgtcatcgccatcattgcttgtcgctgacttcggacttgtcctcggactccttggagacatctgcagactagaagtagacaacataaacataccaatattaataatgccagtgacaacaatgatcctccgaggggtttga

SEQ ID NO: 1573 - DNA, 486 bp, Homo sapiens
  SIMILAR (131)..(193): 451254mologous to Streptomyces coelicolor A3(2) putative hydrolase,accession number AL357591,Smith-Waterman Score=57.
atggtggctcatgcctgtggttctagcactttgagaggccaaggtggcctccagctgcccagaacagctgcagagagtgtggattctgagaagctgcagggccctggaaagcaggagacccacgtgcagcttttgtctctctattgcctgcgccgtgtcctggactgctcacgggagttctgcaggagacgccggaatatctggaagctgaaaaatggtgagtgtgcggagccggaaaccccgaggagtttacatgcagcaactgacgcacattcatgtaaaaacagacattatctgactggaaaaacagactccttgtggcaagaagataccaaattacaaacaagacctaaggccacgcaagacaagggagaaaaagtggacactgggggccccacagaccgctgctcctcccaagcacgaaccccacacccgagtcgggatcacccacatgaccctcccgtggcccccgcacaatctgggtag

SEQ ID NO: 1574 - DNA, 553 bp, Homo sapiens
  SIMILAR (149)..(27): 871254mologous to Homo sapiens dJ341E18.1 (Serine/Threonine Protein Kinase (presumptive isolog of Rat protein Q62726)),accession number AL031178,Smith-Waterman Score=177.
cccgaaggttcatgcattcctcccagggataaaattttcttttcattttttttaatagcgatcagctccccagactcaatgcttcttcccagcaggacggaaccgtaggttccatccccgagctgcctgattgttgtgtatctattcatggtgtgcctgctcaggccggacactcatctcacggccgaagtggttcagttctgcagtggtagcagtcctccccagagtgtaaccagatttttcgatggcagcaccagcacaaggtattcaataggacgtgactgtctcccaaatacatatttccaaaaatcagtcttctgctggcgccgcgaacgcaggcgggggcccgcccctgaggtgagcgcagctcctcgacgaagcggggcgcagccgcccgctccggagctggaaatggcgacaatccctgctaggaccggccgagggctccgtacagggacgcccgcgaggtccggcgagtcgcactgggcccacggcgcatggtagtgcagcaggaacccggccgttttcccagccggcaggaaaacaaacaaaa

SEQ ID NO: 1575 - DNA, 918 bp, Homo sapiens
  SIMILAR (1267)..(1890): 1001254mologous to Escherichia coli K12 putative oxidoreductase,accession number AE000303,Smith-Waterman Score=1064.
ggcagcaatgaggagaaaggaagaaggaacagtggcgtggtgagtacccaggatttcccttcagttccctttgctgctggaatgaagcagctggcaggacatgagaaacgagcaggcacaaaagaaggacctcatcaaggaggaagggatgaggaatcttgtaaggtgcgcctcctttctacctgcttctgccttccctcccctctgtgttcagggttaggctgtggcccagtgctgatttttcgatggcagcaccagcacaaggtattcaataggacgtgactgtctcccaaatacatatttccaaaaatcagtcttctgcctgcagagaaaaaaagaaacaccggatgctggaagcaaaggagacttggaaagccatgataattgttccaagtgtacaaaggatatcagagagaagggttagttacactaggtatggttccagagaacaagaaccatgaccactctttgagctttctattattcacatcctgaaatctctgagtatatgacattagcatacaaagatttcacactgtgtagaccagagaccacatactggcagcataatatttcacccgtaagtcactccattgagacctcactccacaagtagaagaccgtttctactgctgggttctttacaatttgtctttgtcttctcactccacttgcagtagcaagtcctcaaagattgtttgaagggcccaaatgtgagttttagtctttgctattattttctgtaccaccttggctaagtacctcaaaattctcagtgcttctagctgtcgatggacgttctgagcacattaaattaaagataatcgttgtgaaaacatttttctgatttgaaaaaacgtagttgaggtggcacgacattgtgaaagtaatcaatgccactgaattgtattcaaagtg

SEQ ID NO: 1576 - DNA, 918 bp, Homo sapiens; identical to SEQ ID NO: 1575

SEQ ID NO: 1577 - DNA, 395 bp, Homo sapiens
  SIMILAR (176)..(355): 381254mologous to Mycobacterium tuberculosis SEQ ID NO 15A',accession number AX005206,Smith-Waterman Score=64.
agttgtcactgtggcacataaaaaacagttctttttctttttttcctgcttgcaagacattcacaatgctcagcaggcgttcatcatttggtgtaaaaatgtctctttgtaatgcatgcttgattgctgtcatcttttctcagcgggacaaacggggaaaggaaggtcagaaggagcggtgcccgaccccaggcgtggagacagcagccggactgaggagccgccttagaccctggtgcctgtcagctcgtctgtccgccgccgccgggactaccgggcagccgcggcagaaggcttaccgcaaggccggactgagcctggctgtgccgaggcgggtcttccaaaacggagaccggatgggggccactaggatacgcccctcaataaagcgttga

SEQ ID NO: 1578 - DNA, 415 bp, Homo sapiens
  SIMILAR (533)..(925): 801254mologous to Homo sapiens hFATP1,accession number AX015323,Smith-Waterman Score=484.
  misc_feature (1)...(415): n = a,t,c or g
aaacaggtgctttggcttacctcctgaccttccagctcctccttgtcttccttcatatcccacctgtagaaacacagctcatggcacgccccaccccacttcactccagagccatgtccccctgccttcgggccctgccagacagcctctccttgccccgggctttgctgcctgtggctggtgccaccgagggtctgctggcttgcccgccccgaccttttccatcagggagcaatggtgggggctgtagtttctggtggctcctgggaccccttctgctgcctgccctggccgggccttctcccctcagctggctgcagtcctgtagccctgtgcgtctctgtgccgggcgaggcgggctaggtcgatctgctcccgctcctgcttccactgggcatagtcccagcccgcctcn

SEQ ID NO: 1579 - DNA, 1326 bp, Homo sapiens
  SIMILAR (4)..(735): 911254mologous to Bacteriophage phi-80 gene 15 (AA 1 - 302),accession number X13065,Smith-Waterman Score=1162.
atgcctcgcctgagactgtcaggccgggaatggcaatgttttgaggcggtgatctggcttacctacggctggaacaagaaacaggaccgcgtgacaaatacggttattgccgagcttacgggcctgagcgatacgcatgtatcggacgcgcttaagtctctcgcagaacgcaaaatcatcttttcacagaagcagggcatgatgaaaatcgtcggtgtaaacactgacctttcagcatggattttagacaaaccggaaacgggaagaaaattcccgaaaacgggaaaatccttcccgaaatcaggaataaccttcccgaaaacggtagacacccaatacaagaacaagaacagtattaaccgccctccgtccgagacttctgacgaatcctctgacgcacgtctgaagacattctcctcaactcatcctgaagctgcggtctacacaccatccggtgcgaagtggggctctgctgaagacctcgagacagctaagtggatttcctccagggtgaagctgattaacccaacctgcaaagccccggacatgacctcctggtctaacactgttcgcctgatgcgccagatagacaaccggtcgcaccaggacatctgcgcgctgtatgactgggctagcaaacaccacttctggcagaacaacatcctgagtcccgaaagcctgcatccttcaaagagtcatattgcccagtggtcacctcacactccttcaaggcacaattttaatgcaaaagatcaaatgtattcagatggcaatttcactgatgtaggtgttgtggaaatagaagcaaatgacaaaaagccttttgcagaagatctgaaatcattagacctgttcaaaaaggaaaaaattaatactgaaggacacggcagtggccaagcatttctagcagtgatgaaaatgaatcttcacacaacacttcgaacactgtccagtattctgctgtggtacacagtggctacagacaccaagttccatcagtccagcgtggctgatctgatcatcatcgaccactgtggtcgaattcatgggacaatagacactggggactacaagagagggaatggaagaagagaggcaagggctgaaaaacaactgggtgctatactcactacctggcggaactaccgcgagctctttatggctgacttcgccccgggcttcgtgcatccggaaaagctcgtcggtatcgtttctccagagaagctacgtcgattcttctttcggcagaaagtagaagcgcaggacctaagttaccgcgggccgggtcggagcaaaggagaaagcatcttcttcagttggcaatag

SEQ ID NO: 1580 - DNA, 1992 bp, Homo sapiens
  SIMILAR (1405)..(1926): 961254mologous to unidentified cloning vector 29kD protein essential for the replication of mini F plasmid,accession number AB015619,Smith-Waterman Score=882.
atgggtgggaacacccagtcaactgggcttgaacacatagaagatggtggccttctgcgcctattggacacctcatttctcgttccggaactaaaagaattctttttggacaaggcgaacaacgggcttgatacccgacacgtgactctaaagaaccccctagcaaacatgaaagtttcgttcgaccctgcgtgtgatttgctgatttcggttggagaccttgttgaccgcggcgcggaaaacgtcgagtgcctggagctgattactatgccttggttccgggctgtgcgaggtaaccatgagcagatgatgattgatgggctatcggagtatggaaacgttaaccactggctggaaaacggcggcgtgtggttcttcagtcttgattatgaaaaagaggtgctggctaaggctctggttcataaatcggccagcctgccattcgtcatcgagctggttaccgctgaacgtaaaatcgttatctgccacgctgactacccgcataacgaatatgcgttcgacaagccggtcccgaaagacatggtcatctggaatcgtgaacgggttagcgacgctcaggacggcattgtctcgccgatagctggtgctgatctgtttatcttcggccacacccctgcgcgccagcccctgaagtatgccaaccagatgtacatcgatactggtgccgtgttctgcggaaacctcacgctgtgcaaagtatgcggtgaatacttcgtgccgaaattccacgacatccggatccggtggtgcagcccggagcatggcgcaatcctcgcaatgggagaacgcaagaaggagaagaagaatccccgagagagtgcatgggtgggaacacccagtcaactgggccttgaacacatagaagatggtggtgagagggaaaattcccttctgactagttctaggcctggacaatgggaccatccacagcagctgttgggcaccttcctaagaagtgaacaaggtgggaaccactcaagagagcctctagggaagtattctctgtggaggttgacatttaagtggagagctaagaaaagaattggtcatgggaaagaacattccagaaagaggaatggcagaggcaaagatcctaaggtggcaactagaataagtcctgggaagtggctgaaggctttggtggacatgcagaatcaaaatctgcatgtggcccctggagatccacgttccaaaagctccttgggtgatattgaaacacactcttgtttaagaaccaggcagttaggggcaagcagctggagacgctgcctctgtcagggccgagactggcagatcctggaagtctggccctgggatgccactgggaaggacactcttgcactaatgccagaggaaagggttcggaactggctcctcccaggtgcggttatcaatcacaagaaacgtaaaaatagcccgcgaatcgtccagtcaaacgacctcactgaggcggcatatagtctctcccgggatcaaaaacgtatgctgtatctgttcgttgaccagatcagaaaatctgatggcaccctacaggaacatgacggtatctgcgagatccatgttgctaaatatgctgaaatattcggattgacctctgcggaagccagtaaggatatacggcaggcattgaagagtttcgcggggaaggaagtggttttttatcgccctgaagaggatgccggcgatgaaaaaggctatgaatcttttccttggtttatcaaacgtgcgcacagtccatccagagggctttacagtgtacatatcaacccatatctcattcccttctttatcgggttacagaaccggtttacgcagtttcggcttagtgaaacaaaagaaatcaccaatccgtatgccatgcgtttatacgaatccctgtgtcagtatccttcttctacgggccttcacctcccaaaggaatctccaatgctgggactgacccatggttctcatccgaagggcaagatggca

SEQ ID NO: 1581 - DNA, 1548 bp, Homo sapiens
  SIMILAR (41)..(364): 351254mologous to Homo sapiens Graf protein,accession number Y10388,Smith-Waterman Score=126.
  misc_feature (1)...(1548): n = a,t,c or g
atggctgcgactcgcggcgaggagaaaatctgcatgagcatgtatcaacgcattaatggcgctgactggcgcaatatnttcgtcgtcggcgatctgcatgggtgctacacgctgctgatgaatgaactcgaaaaggtttcgttcgaccctgcgtgtgatttgctgatttcggttggagaccttgttgaccgcggcgcggaaaacgtcgagtgcctggagctgattactatgccttggttccgggctgtgcgaggtaaccatgagcagatgatgattgatgggctatcggagtatggaaacgttaaccactggctggaaaacggcggcgtgtggttcttcagtcttgattatgaaaaagaggtgctggctaaggctctggttcataaatcggccagcctgccattcgtcatcgagctggttaccgctgaacgtaaaatcgttatctgccacgctgactacccgcataacgaatatgcgttcgacaagccggtcccgaaagacatggtcatctggaatcgtgaacgggttagcgacgctcaggacggcattgtctcgccgatagctggaggagcgactcaagccttcgcgaaagaaaataaccaaaaagcatacaaagaaacgtacggcgtctctcatattacacgccatgatatgctgcagatccctaaacagcagcaaaacgaaaaataccaagtgcctcaattcgatcaatcaacgattaaaaatattgagtctgcaaaaggacttgatgtgtgggacagctggccgctgcaaaacgctgacggaacagtagctgaatacaacggctatcacgttgtgtttgctcttgcgggaagcccgaaagacgctgatgacacatcaatctacatgttttatcaaaaggtcggcgacaactcaatcgacagctggaaaaacgcgggccgtgtctttaaagacagcgataagttcgacgccaacgatccgatcctgaaagatcagacgcaagaatggtccggttctgcaacctttacatctgacggaaaaatccgtttattctacactgactattccggtaaacattacggcaaacaaagcctgacaacagcgcaggtttcctcattcgaaagtgcgctgaaaatactgcacatgtgtgaattcgagaataaccgctcggggagtgggcgaggtcgaggtttgaattatcctgccccaactgacatcaagtcaaggcaggttcccctgtgcggcaggaacatctgcacagtgcagacagacggctgcgaaacagccatggcctggagttggcataggttggttatgccggtactgccgggcttcttgcgggatatcgtccattccgacagcatcgccagtcactatggcgtgctgctagcgctatatgcgttgatgcaatttctatgcgcacccgttctcggagcactgtccgaccgctttggccgccgcccagtcctgctcgcttcgctacttggagccactatcgactacgcgatcatggcgaccacacccgtcctgtggatctacccactagtcaattcaccatcttgttga

SEQ ID NO: 1582 - DNA, 1440 bp, Homo sapiens
  SIMILAR (355)..(822): 631254mologous to Escherichia coli K12 bacteriophage lambda lysozyme homolog,accession number AE000161,Smith-Waterman Score= 483.
atggctgcgactcgcggcgaggagaaaatctgcatgagcatgtatcaacgcattaatggcgctgactggcgcaatattttcgtcgtcggcgatctgcatgggtgctacacgctgctgatgaatgaactcgaaaaggtttcgttcgaccctgcgtgtgatttgctgatttcggttggagaccttgttgaccgcggcgcggaaaacgtcgagtgcctggagctgattactatgccttggttccgggctgtgcgaggtaaccatgagcagatgatgattgatgggctatcggagtatggaaacgttaaccactggctggaaaacggcggcgtgtggttcttcagtcttgattatgaaaaagaggtgctggctaaggctggcatcgatgtaaccatcgtcatcagcggtcctacctgctccggcatgaggcgaaacaatgacgctatgccctcgcttaccggggatcctctagagtcgacaagacacgaacattcacctaaaagggcttctcgccaagcttacttcctctccctgcagcaaatctccaaaatgatggagctggccagagagaaacaggcggcagagctgaaggccctgaaggagacgtcggagaagtacgactgcctccctcccacacctgcttcgcctcccagcaagggctcagggtacaacgtggccggaaaatggtggggcgcggtgtttgtcgatagtgccgaagcgggtaagcgatattcgccgcagcgacttttaaaacaggtacgagggtcggcgtgcgctgggaatcgccggtcgggcaaatcaaactcgattttgccgtaccgatcgcggataaagacgaacacgggttacagttttacatcggtctggggccagaattatgagtttatggaaaaaaatcagcctcggcgtggttatcgttatcttactgttgctgggatcggtggcgtttctggactggatattggcaaggtcaccggcggctggcgcgatctcaccttgtctgacgttcgttatgagcagccaggcgtggcggtaaaagcgggcaatctgcatctggctgtcgggcttgagtgcctgtggaacagcagtgtttgtattaatgatctggcgctgaaagacattcaggtcaacatcgacagtaaaaaaatgcctccttctgaacaggttgaagaagaggaagatagcggtccgctggatctctccacgccgtatcccataaccctgacacgggtggcactggacaacgtcaacattaagattgatgacacctcggtatcggcgacgatgcttgccgaagatgacgatcgacacatcaccacggaaatcgctaacgccacacagttttataatgacgaagatgaccaccagcaatatctgcataaaaacccgtatggttactgtagaattggcggaattggcgtctgtatgccgccggaagaatag

SEQ ID NO: 1583 - DNA, 1878 bp, Homo sapiens
  SIMILAR (832)..(1464): 931254mologous to Escherichia coli Respiratory nitrate reductase 1 alpha chain (EC 1.7.99.4),accession number D90757,Smith -Waterman Score=1042.
atgggtgtttcgctactggcggccttgaccgtcatccgctgcatccggaccgactgtggtgtgattcaggtgacggtgaaaacgcgtattggcatcgacgaccaggacagctatgaatttctctgcgatttcatcaataccgtttccggcaaaggcgagtgtgagatgttcatcatccacgcacgtaaagcctggctttcggggttaagcccgaaagaaaaccgtgaaatcccgccgctcgattatccgcgtgtgtatcaactgaagcgtgactttccgcatctgacaatgtcgattaacggtggtatcaagtcgctggaagaggccaaagcacacctgcaacatatggatggcgtgatggtcgggcgcgaggcgtatcagaatccgggtattctggcggcggtagaccgggagatctttggttcctcggataccgatgccgatccggtggcggtagtgcgcgccatgtatccgtacattgagcgtgaactcagccaggggacgtatctcggccatattacccggcatatgttgggcttgttccagggtattcctggcgcgcggcagtggcggcgttatttaagtgaaaatgcccataaagcggtgcaccgaacggctatccttacgtctggcagctccttgccgatgattccgccaatacgttggcggcggccattaccggcggctggtgatcgctttcggaatcagacgtctggcacctggtttggtatctttgacccgctgatcggcctgatgtcgccgttggtttcgttttatctggattgtggttacgccgcaaagcgaaagccgcgcaacaggagcttgtccatgaacattgagttactgcaacagttgtgcgaagccagcgccgtcagcggcgatgaacaggaagttcgcgacattctgataaacacgctggaaccttgcgtgaatgaaatcaccttcgatggtctgggcagctttgttgcccgtaaggggaataaaggtccaaaagttgccgttgtcggacatatggatgaagtcggctttatggtcacccacatcgacgagagcggttttctgcgttttaccaccattggcggctggtggaatcagtcgatgctcaaccaccgggtaaccatacgcacacacaagggagtgaaaatccctggtgtgattggttccgtcgcgcctcatgcgttaacggaaaagcaaaagcaacaaccgctgtcatttgatgagatgttcattgatattggcgcgaacagtcgcgaagaggtggaaaagcgcggcgtggaaattggtaattttattagcccggaagccaattttgcctgctggggcgaagataaagtggtcggcaaggcgttggataaccgcatcggctgcgcaatgatggctgaactattgcagacggtgaataatcccgaaattacgctgtatggcgttggcagtgtggaagaagaagttgggctacgcggggcgcaaacctcggcggaacacattaaaccggacgtcgtgatcgtgttggataccgccgtagcgggcgatgttccgggcattgataacattaaatacccgctgaaactgggccaggggccggggctgatgctgtttgacaagcgctacttccccaaccagaaactggtagcagcgttaaaaagctgtgccgcacataacgatttaccgctgcaattttccaccatgaaaaccggtgcgacggatggcgggcgctacaacgtgatgggcggcgggcgtccggttgtcgcgctgtgtctgccaactcgttatctgcacgccaacagcggacaggctacatttgtcacaatggaagacggccatcaagcagcagcaatgtctgcgtggatgtctaaatgcctgtcagggcctgcttggtaa

SEQ ID NO: 1584 - DNA, 602 bp, Homo sapiens
  SIMILAR (2)..(214): 1001254mologous to Homo sapiens mitotic checkpoint kinase Mad3L,accession number AF053306,Smith-Waterman Score=362.
acttagccaaaatatttctgagctaaaagatggtgaattgtggaataaattctttgtgcggattctgaatgccaatgatgaggccacagtgtctgttcttggggagcttgcagcagaaatgaatggggtttttgacactacattccaaagtcacctgaacaaagccttatggaaggtagggaagttaactagtcctggggctttgctctttcagtgagctaggcaatcaagtctcaccagattgctgcctcagagcaatggttgtattgtggaacactgaaactgtatgtgctgtaatttaatttaggacacatttagatgcactaccattgctgttctactttttggtacaggtatattttgacgtcactgatattttttatacagtgatatacttactcatggccttgtctaacttttgtgaagaactattttattctaaacagactcattacaaatggttaccttgttatttaacccatttgtctctacttttccctgtacttttcccatttgtaatttgtaaaatgttctcttatgatcaccatgtattttgtaaataataaaatagtatctgttaaatttgtgcttctaaaaaaaaa

SEQ ID NO: 1585 - DNA, 3188 bp, Homo sapiens
  SIMILAR (790)..(2313): 951254mologous to Homo sapiens putative p150,accession number U93572,Smith-Waterman Score=2493.
atggctgcgactcgcggcgaggagaaaatctgcatgagcatgtatcaacgcattaatggcgctgactggcgcaatattttcgtcgtcggcgatctgcatgggtgctacacgctgctgatgaatgaactcgaaaaggtttcgttcgaccctgcgtgtgatttgctgatttcggttggagaccttgttgaccgcggcgcggaaaacgtcgagtgcctggagctgattactatgccttggttccgggctgtgcgaggtaaccatgagcagatgatgattgatgggctatcggagtatggaaacgttaaccactggctggaaaacggcggcgtgtggttcttcagtcttgattatgaaaaagaggtgctggctaaggctgggtaccaagatgattttgcgttctgcgagagacttaagcgcgtccgatacatgcgtatcgctcaggcccgtaagctcggcaataaccgtatttgtcacgcggtcctgtttcttgttcccagccgtagcatcgatgtaaccatcgtcatcagcggtcctacctgctccggcatgaggcgaaacaatgacgctatgccctcgcttaccggggatcctctagagtcgacaaccgttaatcccgactgtccgcgcagagtctttacaacgttcatggcgcccaactgttttaccgacaagaaaaaaaagcctgccagtagtgccttggtggtcggtgcacaagtcgcacccaaccggcttattctttacgctctgcaagttccgttgcagatgtttcccgccaatacgctgcaggcgagcattaccggggtgttggtgatcgctttagaaatcaaacgtctggcacttggtttgggtatctttgacccgctgatcggcttaatgtcgccggattgtggttacgccgcaaagcgaaagccgcgcaacaggagcttgtccatgaacattgagttactgcaacagttgtgcgaagccagcgccgtcagcggcgatgaacaggaagttcgcgacattctgataaacacgctggaaccttgcgtgaatgaaatcaccttcgatggtctgggcagctttgttgcccgtaaggggaataaaggtccaaaagttgccgttgtcggacatatggatgaagtcggctttatggtcacccacatcgacgagagcggttttctgcgttttaccaccattggcggctggtggaatcagtcgatgctcaaccaccgggtaaccatacgcacacacaagggagtgaaaatccctggtgtgattggttccgtcgcgcctcatgcgttaacggaaaagcaaaagcaacaaccgctgtcatttgatgagatgttcattgatattggcgcgaacagtcgcgaagagctcgctactcaccgggctgttatccgggttagcgggcataacatcggtcatatatttccaccaacgttggcaaacatcagtgctggcaaccgcattccagcgttcttcagattcaatctctaccatggcaaacagcagattacgcgctttgtcgagatagatggcgtagttatgcgcaccgatctgtacagtccgaaagccgctgagggtaaaaacatccagctgcaccctaaggtcaacactgtaggaaaagtccactatcttcaaagcttgattgttcttgttacaatcatagggatcgtggattctgagcccagatttaagagagggctaaaagatggtgaattgtggaataaattctttgtgcggattctgaatgccaatgatgaggcccaagtgtctgttcttggggagcttcaacaagaaatgaatggggtttttgacactacattccaaagtcacctgaacaaagccttatggaagaaaaagcgggtggttagcaggaactgggcaaggggtacttgtggacccagagtgaccaacgagatgcttgaggatgaggatgctgaggaccacgggggtactttctgcttaggggagctggtggagctggctgtgaccatggagaacaaagcagagggcaaacggattgtaagtgaaaagcctaccagagcaaggaaccaaggcatagaggggtcacctggagggcgtgtgacccgaagcccccccacgcaggtggccatcagctcagattctgcacggaagggttcttgggagccctggagccggccggtgggggagcccccggaggcgggctgggactatgcccagtggaagcaggagcgggagcagatcgacctagcccgcctcgcccggcacagagacgcacagggtgactggcgccgcccgtgggacctggacaaggccaagtccacgtgggtggctgggttgggcaggttgcctgtggtcccaggagccaccagaaactacagcccccaccattgctccctgatggaaaaggttaatgagatgctgggagaggccattagcagaggctgcagcgagagcctggtgcccggggaggctggtggtaattacagcagctcccttcccctgggaaatgaggcagggggacatggctctggagtgaagtggggtggggcgtgccatgagctgtgtttctacaggtgggatatgaaggaagacaaggaggagctggaaggtcaggagggaagccaaagcaccagagagactcccagtgaggaggagcaagcccagaagcagagcgggatggagcagggccgactggggagcgcccctgcagccagcccagccctggcatccccagaggggccgaagggggatcacaagaacatggctttggagtgtgacactggcctaggaatccatgactcccaaaggacggggctaggggtagaggaggttcaggcaaagcccttagattttggagacatcaggcagatgtctccaaaaatgattgtgatcaagaatctgaattataagattcacagtctgctccccaacccagtgctgccaactgtacagctgcgcctccacgaaggggcatatgccaggctcgtctgaccctgggaatgaggatgtaggaagcaggcagagctccggttcagccctcacaatgggactgaagcaggagagaaggctgggcagaagggctgtggggaagtagggcttgtctccatggatgacgtccagaaggatgtcaggaggaggaatatcacaggagttatagacattggagggaacagagactggcacaggacctcttcattgcaggaagatggtagtgt

SEQ ID NO: 1586 - DNA, 1284 bp, Homo sapiens
  SIMILAR (301)..(480): 831254mologous to Homo sapiens CYP4F11,accession number AF236085,Smith-Waterman Score=282.
atgaacatgaacatcaaaaaaattgtaaaacaagccacagttctgacttttacgactgcacttctggcaggaggagcgactcaagccttcgcgaaagaaaataaccaaaaagcatacaaagaaacgtacggcgtctctcatattacacgccatgatatgctgcagatccctaaacagcagcaaaacgaaaaataccaagtgcctcaattcgatcaatcaacgattaaaaatattgagtctgcaaaaggacttgatgtgtgggacagctggccgctgcaaaacgctgacggaacagtagctgaatacaacggctatcacgttgtgtttgctcttgcgggaagcccgaaagacgctgatgacacatcaatctacatgttttatcaaaaggtcggcgacaactcaatcgacagctggaaaaacgcgggccgtgtctttaaagacagcgataagaccccactcaatcgacgctggaaaaacgcgggccgtgtctttaaagacagcgataagttcgacgccaacgatccgatcctgaaagatcagacgcaagaatggtccggttctgcaacctttacatctgacggaaaaatccgtttattctacactgactattccggtaaacattacggcaaacaaagcctgacaacagcgcaggtaaatgtgtcaaaatctgatgacacactcaaaatcaacggagtggaagatcacaaaacgatttttgacggagacggaaaaacatatcagaacgttcagcagtttatcgatgaaggcaattatacatccggcgacaaccatacgctgagagaccctcactacgttgaagacaaaggccataaataccttgtattcgaagccaacacgggaacagaaaacggataccaaggcgaagaatctttatttaacaaagcgtactacggcggcggcacgaacttcttccgtaaagaaagccagaagcttcagcagagcgctaaaaaacgcgatgctgagttagcgaacggcgccctcggtatcatagagttaaataatgattacacattgaaaaaagtaatgaagccgctgatcacttcaaacacgttgcatgccacagataaagataagcgtgcacctgccactgcaataacccatggtttccgagacccctgccacagccagactgtcccacgtcggccaccgtcgagcccccactttatccaatcagatcgcggggaaggacacgcaaacctgccgagggctcgagggctccgggctgctgctgctgccagcgtcctgggaagtgacaggcattag

SEQ ID NO: 1587 - DNA, 454 bp, Homo sapiens
  SIMILAR (172)..(14): 771254mologous to Mus musculus contains transmembrane (TM) region,accession number AB030182,Smith-Waterman Score=236.
  misc_feature (1)...(454): n = a,t,c or g
taggtctgtttcctttgnaaggtcccccagcctccaaatagaagcagataacaaacacattccacgtaacccagaggactagccagacagcatatcctgttatgtaacgaggtctatattgaatagttccaaacaaaccaagaatgacgataataatatgtacaaaatttgcccaggataggtgcccactgatatccaaggaagtcaaatatttgcctctccagcacacaaaccagttgcatgccacagataaagataagcgtgcacctgccactgcaataacccatggtttccgagacccctgccacagccagactgtcccacgtcggccaccgtcgagcccccactttatccaatcagatcgcggggaaggacacgcaaacctgccgagggctcgggggctccgggctgctgctgctgccagcgtcctgggaagtgacaggcattaggaccc

SEQ ID NO: 1588 - DNA, 1050 bp, Homo sapiens
  SIMILAR (594)..(367): 1001254mologous to Escherichia coli cysA,accession number M32101,Smith-Waterman Score=410.
atgttcatagatgtaagtgtacaaatggaagataactggcttccaaacacaatcattagggcagttaatgaactgcattactcacagcataactgcaacctggttggaactggagaaccttgtcttaaggaagcaactcagttaagaaagtcaaataccacatgttcccatttacaagtggaagctaagcaacttgtaaacgtggacatacagagtggaataatagagattggagactccaaaaggtggcagcagcgggctccgaagcctgtctctgcaggtagcagccgcttcacagctttcaggccggtgctcagcggaggctggtgcatccccactaggaatccacacccagctgggactgctgtgaagctgaagacgctggcagcagcagcagcccggagccctcgagccctcggcaggtttgcgtgtccttccccgcgatctgattggataaagtgggggctcgacggtggccgacgtgggacagtctggctgtggcaggggtctcggaaaccatgggttattgcagtggcaggtgcacgcttatctttatctgtggcatgcaactgtgagatctcaaccttctcaatcagtccctctgactcccttttcaagctcatggcactgcgattcatcataagaaccaacagggaccaactactgcaggatactgcagatcttcttaaacaggataatggtagtggacagacgccagctcttcagagaatggaatctctaagaaggaaggggcaacaaaggcgatggcctttgttaactaaaaaccagattgacagaaaaatttctaagagaatgtttgacaatgtcaaattaaattgtcagcctgacagagtgatggaaaagcctctgacggcacagctgaggtgccagcttggagattataccctgcaaggatggggcatcatccttcaggatgtagtatgcacaccaaatcaacaaccattttatggtctgtgtcccaattattctggctgtcatgtggaagatgtactagaaggagaagatattggaggcaagaagaccaattaa

SEQ ID NO: 1589 - DNA, 561 bp, Homo sapiens
  SIMILAR (544)..(693): 821254mologous to Homo sapiens ribosomal protein S10,accession number U14972,Smith-Waterman Score=231.
atgaacaagagacaccatactcttacctcctgttcttggttctccgacatcctacaccaaaagcccattggaaggaaacatctgatgagggacagaggatacaggatcaaggcattggataaactgccagcacaggagcagagagttaaatattctgaagtgtctttaaacaaaactaacaacgggaaagacgatgacaaggaaatcacagtcatccactcagtggagctcatacatcttttgtgccttgaaaaaggcccgggctctgagtgggattcccgcttccgaatagcgcggctccgctggccaaggccccggactggagtcgggatcccccctccactcacttgggacgccggagagtgcacgcaggtgccgggtgagggacggcgaatggatatccaatccggggccgcgttccgcccactgtcaggggaagccaatcagcggccagggggcgtcagcgacgggcagccagtgggtcccgggagcagaggggtcggagctatcaaggggactccgattcagattcgtaaagccacggaccgattgtcagagtga

SEQ ID NO: 1590 - DNA, 330 bp, Homo sapiens
  SIMILAR (601)..(801): 501254mologous to Homo sapiens Human NIP2b protein,accession number Y70847,Smith-Waterman Score=145.
gatgcacgtgtgctagcgctgagcaggcaagagtcccacactgaagtatcagagaagctccagggcaaaaagcaagaggcaccaggtgtgggccagaagggtccaaaatggtttttgaaagaaacgatgagccggactaagaaaacagataatgtgcccacggccacggagctggcagatgagaaggaattcggtctctgcgtttccataccaaggccctttccactcacccaccgcttctcttcctgcccggggcatctgctggcggaggaaggcttgtccacggaaaggcaaaagcgactcccgatcaaaatccgggggcacctgtag

SEQ ID NO: 1591 - DNA, 443 bp, Homo sapiens
  SIMILAR (195)..(404): 311254mologous to Human T-cell lymphotropic virus type 1 gag polyprotein (partial),accession number M22461,Smith-Waterman Score= 76.
tttcgtcagactctgcgaaaggccgagagaagctggtcctgctcacgagagaaaaaggagggttacgctaaggacatggtgacagactttgatgagaaacatgatgagtatttaatattgcttcagcagaggaaccggagctgagaagaagcctggaacttagtgtaaatctacaaagggaacaaaaggattgttccagcgatgagtatgactctattgaggaagacatactctctgagcctgagccagaggacccggcactggtgggccatcccagacatgaccgccctccttccagtggcgactggactcagaaagatgttcacggggaacaggagacagaaggacgctcttctccaggcccagacaccctcgtggtgctggaatttaacccagcttccaaaagtcataaaagggaaaggaatttgtctgcaaagcggaag

SEQ ID NO: 1592 - DNA, 924 bp, Homo sapiens
  SIMILAR (253)..(675): 971254mologous to Homo sapiens dJ718P11.1.2 (novel class II aminotransferase similar to serine palmotyltransferase (isoform 2)),accession number AL109983,Smith-Waterman Score=758.
atggcctgcatttttgtacagaaatctgtgcagatcagaacagaagctggcccacggctccacatcgaacctcctgtggactattctgatgattttgagctgtgtggggatgtgactctccaggcaaacaacacttctgaggatcgtccgcaggataccaaatctcccaccagtaccaagccctgtggttttaacttctcccttctgaatgcatgtggacattctgacccttcaagcagcgtggacaaagaaaggatcctcttaactattcaggatgtgatgaaacatcaaaggcccccagggatgaccaactggacagctcagaccaaaagacggctggcttgtggcattagaaagggccctgggcaggagctgagaagaagcctggaacttagtgtaaatctacaaaggaaacaaaaggattgttccagcgatgagtatgactctattgaggaagacatactctctgagcctgagccagaggacccggcactggtgggccatcccagacatgaccgccctccttccagtggcgactggactcagaaagatgttcacggggaacaggagacagaaggacgctcttctccaggcccagacaccctcgtggtgctggaatttaacccagcttccaaaaaaagtgaatttttctttcccaaaaggcccagcaaaagtcccagacctggttctccaacccacacggggtcacatgctgtcttggattggatcaccgtggctctgatgggccaggtccagccaataggactaaggggtgtggttatcaccacccagccacacgatagtgcggtaaagctctcatctccaaaagaaactcaaggtgaacctgaaggagggaggatgctggcacgcagagacagcagtgtccaatggaggaagtttgtcaagaaagatcttggaaagtag

SEQ ID NO: 1593 - DNA, 479 bp, Homo sapiens
  SIMILAR (354)..(313): 571254mologous to Homo sapiens Human secreted protein, SEQ ID NO: 7559,accession number G03478,Smith-Waterman Score=50.
gtcggaattcccgtgtcgacgatttcgtggagggatgcggaggggaaagatcgattattatgtttttagtgattggtgtccccgtgctgctgcaaggcgaaacgggagggagtgacccctgcgcccctcagaccctcctacgacgtcgcctccatagtctgcggagaagcggagactgcgcgcctcgcctcacagcgaaacgccgcgcactcggagccggcacggctcggcgggtggtggttttttgcactgaatgtaacctagactcatcttcacgggcttgcgttgccccaggcactgtcaaaggcagtatttttgtgtttctgcacagatgtgcacacaatctgttcccatgcaaaccaacgagggagaagtatcgtaagaaagcagttacaaggtggagcaggaggattttgtaatggaagggcatggcaagactccacctcctggagaagaaagcaaacagtgagtcacagttg

SEQ ID NO: 1594 - DNA, 843 bp, Homo sapiens
  SIMILAR (173)..(607): 591254mologous to Homo sapiens small GTP-binding protein rab22b,accession number AF183421,Smith-Waterman Score=361.
gcttgcaggcctgtgctcagcacactccttggtctggtgctgtactgtctgcttcctccagacccacgctccattctccgcctaactgtgtgccccaggggacaccatcattgggctccttatcttggtaacaggatcttactttaatggtgagtttggaaggagaaacaacgtaggtggagctcagccctgtcttttccttccttctggaaaccagctgccccaggaagcctgcattctcctcttctcctccacccataaacacaggaccctcacaactactaatgtcctacagtacctgtgcaagttcttccaggaaaattgccaaatatgttaatattttcaagagccctccaggatccagcccttgcctgtctctccagcctcgtctgcctggtctctgttccatttgttccagccgtaatgaacatcttacagctttgccaatatggcagactgtttcaggtttccatgtttttgttgctatcactccctctgcctttccctcctctggttattttaaaaacttacctttgacagtacctggggcaacacaagcccgtgaagatgagtctaggttacattcagtcagaaccacctgaaacctgtcatttgggagctcctttcctgtcttaagagtaaggatactgaagatccagccactgggccaggggcatcctgttttagttcctggtatccaggctgtgtcgggtcctcctgttcccttgggtctgcaaccagccttcttatcatgggcagggtttggggtgggtgagacggtgaaaagctcctggtccctgctcaccccggtccctgctcgccccactgccttcgcctccaaag

SEQ ID NO: 1595 - DNA, 93 bp, Homo sapiens
atggagaaggccacccacctcactgacagtcccaagaatgaccggctgcgaggtcctagtcaaaagatagcagtcatctacatttttgtgtga

SEQ ID NO: 1596 - DNA, 782 bp, Homo sapiens
  SIMILAR (43)..(237): 321254mologous to Solanum tuberosum 70-kD heat shock protein,accession number Z11982,Smith-Waterman Score=74.
atgacgaatgaaactgttgagcgccagacatatagtctaggtggccgcacccataagctctcaggttactggaggggcaaaagaacagataaagtttatgttgctccgggggagaagattaggggaacactggttaaagaaaggctctctggggacaagtcactcggccaacacacgaaggacccacagaaaacgctgttacagctagaacggctgcacggttttctacgccgctttttcggcgactttttgctcttccgctttttgccaccgcccccaaccttctatatccttgcagcccctaccttttcttgtgttgctcctcccctggcagccgtgaggggggttagatctcagccggagccggagctgggcctagctgtcccacgggccaccactacctcctttggttcgggagaaagctacgaccaagtacgcccagctcgggccttaaaacttctgaacgggcagtgcgggtaggccctgcttagcccttcccggaggacacctgaaaccgtctttaaggttttctccgtaaagaaagtaccagtatactctttcatggtcaagtacagattgtggaactgataacttttaagggaccgtctgactcatcactgggggtcaacgtggaacatagcaactcaccatacctctactccttcgcgtcccctgggaactcaagccgatacgggcatacctggcatggacttagagtcaccacattttatacaccctactatccctggttgggacccattagcccccttccttctatctag

SEQ ID NO: 1597 - DNA, 416 bp, Homo sapiens
  SIMILAR (7)..(90): 531254mologous to Bromheadia finlaysoniana extensin,accession number Y13141,Smith-Waterman Score=68.
gggggaccacccttcaagagaccctcacccagcccatcagtgcccaagagaggcaggcatccaactgcaccatctccctctccttccccatgcagctccctctgaatgatgatcacacgttctcaacaccgattcagcttcccagcatccatcgatggaaagatgactacactcatgtcccagacaggggatcggatgctagcgaggtcaatggctacaagtacaaacctgatcgtaactgccttccacaaaggatcagaaaaacacctcttctggatcagtccactaaacccagccaagaatctgcagaaatgctgctacaccgcttcaccagcaacacagtccctgcgctactcactgcgttgcccaacgttgcttttctaccctgttatggcctgtggacacatactcactag

SEQ ID NO: 1598 - DNA, 1656 bp, Homo sapiens
  SIMILAR (524)..(402): 341254mologous to Homo sapiens Fragment of human pre-pro- artemin polypeptide,accession number Y84596,Smith-Waterman Score= 61.
tctcaaagagccgcaggcgtcatccagccccaccccctgctggcatcctgccccaagaattacaaggagtccaggacatggaggtgcctggtgtctgcctccttgtcatgctgtcctctccttctcctggccccgtctgtgtcctgtttggcagttactcctgccagcaaaggcctcgtgactcactgccgctgcctgccccccagcccgcgggagaggagggcgtgggcccaccccggaaacagccctcaggcaccgttgatggtgaggtggacccaccctggaagccgtcactcaccgttgatggtgaggtggacccagctgccattgtggaaggctggcagatggaggtggcggtggctgtcgctggtattattagacaacaggcctgtggtttggaagtctggtgcccagaggaggaggaggaggaggaggaggaggctgcaataaggacttgtactaatgagcaacggatgctggtgctcactccgttccccgcttccccagccaccagccagacccagctaggggtctcagagtctcaggcagaaggccaggctcctcagagctgcacgttctcaacaccgattcagcttcccagcatccatcgatggaaagatgactacactcatgtcccagacaggggatcggatgctagcgaggtcaatggctacaagtacaaagtgaggtgcaaagtcgaccctgagatggtttgtgaggaacaaattgctcccgtgggaagtaacagaggagtgcagggggcaggggggaagggaaagaagccaaacaagagggccatttcagacccgtcccagcctcagccgaccctgcgggggagctctggggacaattactcctcagtttgtcccaactggaagcaaggggcatttctgtaaggctgacaatgaggctcacatccagggctgcaaatccagctctgtcatcgtgcagagggacaatggcagcgaggtctgccagtttgatatcctgatgttcgaatgctcaggccctgacctaggtctaacagagcagggagaggagaggagggcgcctccgatgggggtgagaacagctgtgcagctcatgggaagaagccgcaggtggagtggaggaggccccttggaggcggtgacggtgggggagggaggccacacattccagatcagtggtgggagtagtgacgatgatgagtccaagtgtaaggaaacgctaagtcaccaggaaaatcaggagccaccctggatgcaggagaaatcaaggagacagagagaaaatgactggtttgtcttctgcaacttccttcagagctttgcgaccatcacaaaggctgtggcaggaagcaaggccaaggggctacaccagacccacaatgcgtatgaccctggagccacgcaggggatgcctaacaaagggttggggcaggattggattcagttcccggagctgtgcagcctactattgaccacacaaaagcagctggaccggagcatctttactattccagactcagctcccctaaaagtccactgcgtcctgacttctgctaagatcctgcactcaaaacaaagtactgccaccaaggtctcctcaaaagccattgggcgttttcaaggagaagctctgacatccacagcccttgccaggatcatggggaag

SEQ ID NO: 1599 - DNA, 2259 bp, Homo sapiens
  SIMILAR (886)..(1209): 851254mologous to Homo sapiens Human hSK2 protein,accession number W63707,Smith-Waterman Score=450.
atggctgttatgtcgcagcatgtatccgctgctcctcacgatgatgcgatgctggctgctgctgcaatgaactgcgtgtacagctctgcatgcagcatgaatgcgagtggcctcgatgctgcgtatatagcagtgtatctcaactccctggacagattctggatcccgtgcccagtctccagcacgataacatcgccagctactaatgagaagtcgtcgacgctatccactcgggcacgtacgagcatgaactactcgttcgaccttgcatgcctgaggtcgactctagaggatcccctcatccggcacccgcggacctttctcagcaagatcctcacctcgaaattcctgaggcgctgggagccgcaccacctaacgctggccgacaacagcctggcgtccgccacgatactgtggtacgagctcggtttcgtcatcataggcatagctgtttcttgtgtgaagtcgttagcgctcaacaatccacacaacatacgtagcggtagcatcacgtccgtccaaaaacgcttcagtgaatatttgaaacagtctctttgggcactgattcaagcagcatccgagagcttgttgccacagtgtggtcctcgggccggcggagcaccagcagctgccaggagatgtggcagcggccgtgctactgcgttcagctatgctctacgtcacactgcatcggacatgtcgtataccgctacaagatgtcagtgctcctattctcttgagctcagtcatgcggagtacctggcccgcgaatgggcttgtgcccctacccacatggctgagtcttgtggggatgctccggagaagctccgggtgaccccgtcgtttcttgctacacgcagcgagagaaagcggcatataactgtggtgttctctgaagcatgctcgctctggcgagggcactgccgaccgcgctactgcgcggggagatactcgccgtcactagtcttctgcacatacgtgaagacgttccaggcttggaagccgtcagattttcctagcgtggacaatctcataggacacgcggatgatcttgctcgtggtaacccagcttttacctccgatgtgagcacagagcagttggaagacggcattcaagatatccatgtatggatagatctcgtcatgtgccggggagatgtcggccgcttccgtgggcctggcgaccccgagagccagattcagtccagcagtcagttctacaaagacaagcattgttcgtgtccctcgaagcacgctgtgcagtggatggaggccggcgctccatggaatcaccggttatgtgagtcaaatagtcgttggtgcgagcgtagatgtgtcgtgctctcggagcagtgcagctcgttctttcggcaccagcacgcatatgtattcggtgctgatcgtgccgacgagcgccttgttcgtactgcttcaggtttgatactggtgctcgctgctgtactcgtgacgctagcggcgccaatgcgaaatttagagaggggacctgccgagcacgccatgacattaatgatgtactcactgagagaggacagcattaagaagcgccccacggtaaacgacgaggattgtacggaatgtccagctacgacatgtacactacgccttgcagcgaacgaggctgactatgggatttcgggggcatacgagatcgttctcgtaacagggtacatgcagattgatagaggagctaccacagaccaagtggggcgctggggtccagtaacagaaaatgcgatgaacactcccctgagcatcgttgttcgagggcctgctgtgtgccaggcccaacagccctggaggaagagcagaacaacaggagtaaataaccagtgcgccacatgcgcggcgatttttatcctacggttttactctctagcagagaacgagataggtatgtactatcggctacacgtcaagagtatgctccatctctggaagatgacctcgtgtgagttcgctgaggacatggataaactcattaatgttcccgtccgctcctccggcctcagtgttcatggcactgtcatccggaacagcgacgaatgggaagtgagctctacaactgaaaccaccgtgtggggccataagctgcgcacggagatgtggccctctgcggaggtctcatctgtcttcgccaggctgttccctgaagctgtcattacgctggccttccagccgcggtgcagcagcattgggtggtgctccggcgactgcatgcagcctgcggttgttttttaa

SEQ ID NO: 1600 - DNA, 427 bp, Homo sapiens
  SIMILAR (180)..(317): 361254mologous to Simian T-cell lymphotropic virus type 1 envelope glycoprotein gp46,accession number L20648,Smith-Waterman Score=67.
cgcacatccccgaggcgactcaaacttaaccttcatgttctttgtctcagtgtctgagatcattgatctgggtgacttgactggtgtctgtctccccctgctcattggaagcctctcatcacatgtgagccgtggctcttttgctcacctgtgtattctcaatgcctgccgtagaatagatgctcagtaattgttcgctgaacttctgtgtcttgtgccttcccctttctctctaccagcaaactcctgttcatccttcaaggcccagctccagtgacttctccctggagccattggcagccagcctctcccctgccttcctgcagagctcactacacccctttgctctgccacttcctatgctggcttaaagccctgcgtcttctttcctcaagggagatgcttggcacagtacataatatgtggt

SEQ ID NO: 1601 - DNA, 852 bp, Homo sapiens
  SIMILAR (800)..(844): 531254mologous to Rattus norvegicus huntingtin,accession number AJ224997,Smith-Waterman Score=52.
atgacaggcctaagcaacaaccagatttggcccaaggcccatgtttgttctccctttgtccctggcttcactgtccaccagagtgaaaacctcatacgcagaaaacacccacaacccaagctgaggggaaacaatggccctccaggctctgcccttattctctgccaagacttacacctctggccttatgctgtcactgtccgctggccacagatgcctcccagagccctccctgagaagacacaggattctctcttgaatgtcacaggtgtgatgtggcagcctctccagcagagagcctccatgtccacctacagcagtgagatttccagcagcaaaggctttagcacaatccttccagaagttccaaagctgacagggaccgacagacttgacaacggtgacagcactgggctcccagccgcacatccccgaggcgactcaaacttaaccttcatgttctttgtctcagtgtctgagatcattgatctgggtgacttgactggtgtctgtctccccctgctcattggaagcctctcatcacatataaggaaactaagtcagaaaggtgaaatgacttcccccgttgggacaactattgtaaaaagaatcagccctcaaggacaggatgttcgcattagggggacaccaacagcaaaaagtggaaccctaaaatgttcatttttcgagaccgctggaggagctatccatgaatgtcactgctccagggccaacatcacacttcctcctccacccatacccaagcctcaggtccttacaaggagcttctgggctgtctccttcaggaagtcctcctgccagccctccctctccagccccgagctgctctaa

SEQ ID NO: 1602 - DNA, 204 bp, Homo sapiens
  SIMILAR (68)..(124): 941254mologous to Homo sapiens Human secreted protein encoded by gene 162 clone HSAAS44,accession number W74889,Smith-Waterman Score=94.
atggcactgtcgcgggggctgcccgggagctggctgaggcggtggccgggggccgggtgctggtggtgggggcggcggcatcggctgcgagctcctcaagaatctcgtgctcaccggtttctccacatcgacctggttgccaaggaaagtgtactgcagttttacccgaaagctaatatcgtgcctaccatgacagcatcatga

SEQ ID NO: 1603 - DNA, 2632 bp, Homo sapiens
  SIMILAR (53)..(1540): 901254mologous to Homo sapiens type II intermediate filament of hair keratin,accession number X99141,Smith-Waterman Score=2253.
ggcacgagctccgccgcggctcgtggttgtcccgccatggcactgtcgcgggggctgccccgggagctggctgaggcggtggccgggggccgggtgctggtggtgggggcgggcggcatcggctgcgagctcctcaagaatctcgtgctcaccggtttctcccacatcgacctgattgatctggatactattgatgtaagcaacctcaacagacagtttttgtttcaaaagaaacatgttggaagatcaaaggcacaggttgccaaggaaagtgtactgcagttttacccgaaagctaatatcgttgcctaccatgacagcatcatgaaccctgactataatgtggaatttttccgacagtttatactggttatgaatgctttagataacagagctgcccgaaaccatgttaatagaatgtgcctggcagctgatgttcctcttattgaaagtgggaccagctggggtatcttggacaagtaactactttccaaaaagggtgtgaccgaggtgttatgagtgtcatcctaagccgacccagagaacctttcctggctgtacaattcgtaacacaccttcagaacctatacattgcatcgtttgggcaaagtacttgttcaaccagttgtttggggaagaagatgctgatcaagaagtatctcctgacagagctgaccctgaagctgcctgggaaccaacggaagccgaagccagagctagagcatctaatgaagatggtgacattaaacgtatttctactaaggaatgggctaaatcaactggatatgatccagttaaactttttaccaagctttttaaagatgacatcaggtatctgttgacaatggacaaactatggcggaaaaggaaacctccagttccgttggactgggctgaagtacaaagtcaaggagaagaaacgaatgcatcagatcaacagaatgaaccccagttaggcctgaaagaccagcaggttctagatgtaaagagctatgcacgtcttttttcaaagagcatcgagactttgagagttcatttagcagaaaagggggatggagctgagctcatatgggataaggatgacccatctgcaatggattttgtcacctctgctgcaaacctcaggatgcatattttcagtatgaatatgaagagtagatttgatatcaaatcaatggcagggaacattattcctgctattgctactactaatgcagtaattgctgggttgatagtattggaaggattgaagattttatcaggaaaaatagaccagtgcagaacaatttttttgaataaacaaccaaacccaagaaagaagcttcttgtgccttgtgcactggatcctcccaaccccaattgttatgtatgtgccagcaagccagaggtgactgtgcggctgaatgtccataaagtgactgttctcaccttacaagacaagatagtgaaagaaaaatttgctatggtagcaccagatgtccaaattgaagatgggaaaggaacaatcctaatatcttccgaagagggagagacggaagctaataatcacaagaagttgtcagaatttggaattagaaatggcagccggcttcaagcagatgacttcctccaggactatactttattgatcaacatccttcatagtgaagacctaggaaaggacgttgaatttgaagttgttggtgatgccccggaaaaagtggggcccaaacaagctgaagatgctgccaaaagcataaccaatggcagtgatgatggagctcagccctccacctccacagctcaagagcaagatgacgttctcatagttgattcggatgaagaagattcttcaaataatgccgacgtcagtgaagaagagagaagccgcaagaggaaattagatgagaaagagaatctcagtgcaaagaggtcacgtatagaacagaaggaagagcttgatgatgtcatagcattagattgaacagaaatgcctctaaacagaaccctcttactatttagtttatctgggcagaaccagattgttatgtcctttgttccaaagggaaaaaattgacagcagtgacttgaaaatgattctgctccctttgaaagcattcattttgctagaactgttagacacattgcagtatgctgtattgaaagtaggaatatagttttaaaaaccctttgaacaaagtgtgtgcataaccagtcatgagataaaacaacacaatgcatgttgcctttttaatgtaaatacccttaggtatcattaatagtttcaaaatattgtggtttagtaaagttgatacctggttataaatattatgcctttatttttggctagaagaagaattatttttagcctagatctaaccattttcatactcttaactgattgaaacagattcaaagaagtatcgagtgctatgcattgaaacttgtttttaaatgttagatggcactatgtatattaatgtaaaacaatgttaatttactcaagttttcagtttgtaccgcctggtatgtctgtgtaagaagccaatttttgtgtattgttacagtttcaggttatttatattcgatgttttgtaaaactcaaataacgactatacttatggaccaaataaatggcatctgcattcttgtt

SEQ ID NO: 1604 - DNA, 1505 bp, Homo sapiens
  SIMILAR (711)..(1364): 661254mologous to Pseudomonas aeruginosa alanyl-tRNA synthetase,accession number AE004524,Smith-Waterman Score=741.
cccggcggtgcagaaaggtcagggcgatcttgtgggtgaaacgtccaaacttattcaactggcatatgacacaacctgatgaaagcattctggtttctgacggtaaaacactgtggttctataacccgttcgttgagcaagctacggcaacctggctgaaagatgccaccggtaatacgccgtttatgctgattgcccgcaaccagtccagcgactggcagcagtacaatatcaaacagaatggcgatgactttgtcctgacgccgaaagccagcaatggcaatctgaagcagttcaccattaacgtgggacgtgatggcacaatccatcagtttagcgcggtggagcaggacgatcagcgcagcagttatcaactgaaatcccagcaaaatggggctgtggatgcagcgaaatttaccttcaccccgccgcaaggcgtcacggtagatgatcaacaaaatttagcacagtatatcggccagcaacatttgctggctgcggggaagccgttgccgcgcgctatcgaagccgggcatttacattctatgatcctctgggggccgccgggtaccggcaaaacaactctcgctgaagtgattgcccgctatgcgaacgctgatcgtggaacttgtgactggaacgagcagaacgaaggctacctcgtcggcgcgcaccaacggcagctatgctacgtgtacgcgtgcttccatgcgcttcctagtgtgcatctatgtatgacgcttttcgagcgcgtgctcaaggctgaagaagagcagttctccaagaccctggagcacggcctgaagatcctcgagcaggacctggctgaactcaaaggcaccgtggtgccgggcgacgtggtgttcaagctgtacgacacctacggtttcccgatggacctgaccgccgacatcgcccgcgaacgcgagctgaccatcgacgaagccgggtttgagcgtgagatggaagcccagcgtgtacgtgcccgttccgccagctcctttggcctggactacaacaccctggtaaaggttgatgtagcgacttcgttcattggttatgaagccaccgttggctcggccaagatcgtggctatctataaggaaggcaagtcggtcgacgtgctgaacgaaggtgacgagggcgttgtagtcctggatcagaccccgttctacgctgaatccggcggccaggtcggtgactgcggtttcctgagctccacctccggtcgttttgaagtgcgcgacaccaccaagaccggcggtgcgttcctgcatcacggcgtgctggtgctgggtaacctgaccgtcgggcgcgccgtcatttcgagggcccgattcaagcctgagcagttgaaggccctggaagacatcgtcaacgccgagattcgcaagaacaccccggtggaaaccgaagaaaccgacatcgagaccgccaagcaaaaaggcgccatggcgctgtttggccgaggaagttacccggcggaccgaagtggcgcgtactga

SEQ ID NO: 1605 - DNA, 1792 bp, Homo sapiens
  SIMILAR (567)..(4): 811254mologous to Escherichia coli tRNA nucleotidyltransferase,accession number M12788,Smith-Waterman Score =820.
atggcgtacagatcagctctggtgacaccctgtgcgcgtattccgcaggaatccggcggtaccaaggacatcaccggtggtctgccgcgcgttgcggacctgttcgaagcacgtcgtccgaaagagccggcaatcctggctgaaatcagcggtatcgtttccttcggtaaagaaaccaaaggtaaacgtcgtctggttatcaccccggtagacggtagcgatccgtacgacgagatgattccgaaatggcgtcagctcaacgtgttcgaaggtgaacgtgtacaacgtggtgacgtaatttccgacggtccggaagcgccgcacgacattctgcgtctgcgtggtgtccatgctgttactcgtcacatcgctaacgaaacccccccccggcccggaaccccaacccccacgaacccatgcacagccgccccgccctcccccccgcgagccccaccccgcaccctatggtcaattaccgcctttacgaaagattgtattctggtcgatctggcatcagtgaaaaatgggccattacaggccatgctggtggcgcatgatggtccggtgctggggctacacccgatgttcggtccggacagcggtagcctggcaaagcaagttgtggtctggtgtgatggacgtaaaccggaagcataccaatggtttctggagcaaattcaggtctggggcgctcggctgcatcgtattagcgccgtcgagcacgatcagaatatggcgtttattcaggcactgcgccactttgctacttttgcttacgggctgcacctggcagaagaaaatgttcagcttgagcaacttctggcgctctcttcgccgatttaccgccttgagctggcgatggtcgggcgactgtttgctcaggatccgcagctttatgccgacatcattatgtcgtcagagcgtaatctggcgttaatcaaacgttactataagcgtttcggcgaggcgattgagttgctggagcagggcgataagcaggcgtttattgacagtttccgcaaggtggagcactggttcggcgattacgcacagcgttttcagagtgaaagccgcgtgttattgcgtcaggcgaatgacaatcgccagtaataatccagtgccggatgattcacatcatccggcaaccttttcatcagttggatcaacaggcactacgttctcacttggccaggccaaactggcgcgccagttccaccagaaaatagctggttatcgcccaacaccgctttgtgcgctggacgatctcgcaaacctttttggtgtgaagaaaattctcgtcaaagacgaatccaaacgattcggtctgaacgccttcaaaatgcttggcggtgcgtacgccatcgctcaattattgtgtgaaaaatatcatcttgatatcgaaacgctgtcatttgagcacctgaaaaatgccatcggcgaaaaaatgactttcgcgaccaccaccgacggcaaccacgggcgcggtgtggcgtgggcagcacagcaactcggacagaatgcggtgatttacatgccgaaaggttctgctcaggaacgcgttgacgccattctgaacctcggtgccgagtgcatcgtcacggatatgaactatgacgataccgttcgcctgaccatgcacacgcgcagcagcacggctgggaagtggtacagacacggcatgggaaggttacaccaaaatcccaacctggtcggggatccactagttctaagcgccgcacccgtgatttacaaaaatgtgatcattgtactgtattatgttaataaaacatag

SEQ ID NO: 1606 - DNA, 684 bp, Homo sapiens
  SIMILAR (284)..(652): 921254mologous to Escherichia coli P protein (AA 1- 257),accession number Y00455,Smith-Waterman Score=557.
gcaccaccgcgccggaattcccgcgacgactatttcgtagctccataccactttgcctggctctcaagatctcaccctccatcctgtctgccctgcaggatgccgcaactgaccctgtactggctgggcctcgggcaactggcagcattcccgtggctgctcctgctgctggctggggcctcccggctcctggccggcttcctggcctggacctatgccttctatgacaactgccgccgccttcagtactttccacaacccccaaaacagaaatgggtttggggtcaaccaggacctcctgctattgcgcccaaggatgatctctccatcaggttcctgaagccctggctgggagaagggatactgctgagtggcggtgacaagtggagccgccaccgtcggatgctgacgcccgccttccatttcaacatcctgaaaccctatataaagatcttcaacaggagtgtgaacatcatgcacgttgttccctgcaaacacaactctgaaaaatggctgaagtaagaacatcatggccttgcattcttggcatgcccagcaagggtggctcaggggctgatgaaaaagatgcctcttccaacacaagggatatctttctgaaatgactttgtaaacaaatggagaaagagtgaaagagaaacatttactggagcacctcccccatag

SEQ ID NO: 1607 - DNA, 2352 bp, Homo sapiens
  SIMILAR (1287)..(1069): 951254mologous to Escherichia coli ferrienterochelin receptor protein,accession number M13748,Smith-Waterman Score=342.
tctttcgagggaaaaaatgcaagaaaactgattattctacctgccgcaagatactttgtcagttagcaccaaacctggaatctagctcctcttgccaaaagccagtgtcttctaatacccccaataatgcaaacagcaatgcaaagaggaatggaagatttcatgccccaatctctgaagaaaaaaaaagagtagatgcaaggttcctggggtccgggccaacttcaacagaggtggcacgtgcagaagaaatggtggatctccttgtgtccacagaaggcgaggtggaaaaggccgaggtcaccaccatccccatgaccaagccaccagcccaggagcagccacccggcaggatgccgcagctgagcctgtcctggctggcctcgggcaggtggcagcattcccgtggctgctcctgctgctggctgggcctcccggctcctggccggcttcctggcctggacctatgccttctatacaactgccgccgccttcagtactttccacaacccccaaaacagaaatgttttggggtcaaccaggacctcggcctgccgcctggtgcacgacttacagatgccgtcatccaggagcggcgccatacccttcccactcaggtcttcattatacagaaatatgaaaatatcgagtcattgattcctcccaccagggaccaaagacaaggcaaaggagcggggggaagaccttggaatgggggctctggtgatggtgaacaagagagactagacattcagagtgggtttgagtttctggaagaagatcggaccttcaagattgtctcagggcctcaatgcatggacgctgtccaccctctggtgctaagcagcccagagacccaagcctgcctgcttccccttcaggccatgacacacagccagtggtctctcctgggtcctgtacaacctcgcgaggcacccaaataccaggagcactgccggcaggaggtgcaagagcttctgaaggaccggatcctaaagagattgaatggcattatctgcatcatcaacattataggaatccatcacaacccactgtgtgaccggatcctgaggtgctgcctttcccatccacccccgacccctgccctctttgtcaattccaaggtctacaaccccttccgcttcaactcagagaacagcaaggagaggtcacctctggcttttattcccttctctgcgggacccagcaggtgcagctggatctctctacgcctactataaaaacgccgatttgccgttagcacaggctgccatgatcgttttattcgccttaacccgacccatccgaatatcgattatgcaacactatgacatcggaaaacccgttactggcgctgcgagagaaaatcagcgcgctggatgaaaaattattagcgttactggcagaacggcgcgaactggccgtacgagttgggagaaggccaactgctcttgcatcgcccggtgccggagatgtgaatcatccggcactggattattactggcgattgtcattcgcctacgcaataacacgcggctttcactctgaaaacgctgtgcgtaatcgccgaccagtgctccaccttgcggaaactgtcaataaacgcctgcttatcgcctgctccagcaactcaatcgcctcgccgaaacgcttatactgcttgttcgatcaggcggtgcagtttgtcactgaaaaacgcaagcgtcaatttctggcgtacagcgtcagttccgcattggttataaccggcagcgcgtattatcgaacagatggaagcgcaggggattgtcagcgaacggggcacaacgtccagcgactggcagcagtacaatatcaaacagaatgggatgactttgtcctgacgccgaaagccagcaatggcaatctgaagcagtcaccattaacgtgggacgtgatggcacaatccatcagtttagcgcgcaacgctgtctacactgcgtttaaagccgcgctggccgatgctcgcgaacgcccggattatgacgtgccggttcatttgcgtaatgcgccgacgaaattaatgaaggaaatgggctacgggcaggaatatcgttacgctcatgatgaagcaaacgcttatgctgccgttatgctggatctgcataccgaacagcatggctacagtgagaactatgttccgtacctggttaaccaggacacgctgtacggtacgggtcaactgccgaaatttgctggcgatctgttccatactcgtccgctggaagaagaagcagacacagtaactatgcgctgatcccaacggcagaagttccgctgactaacctgggcgcggtgaaatcatcgatgaagatgatctgccaattaagatga

SEQ ID NO: 1608 - DNA, 450 bp, Homo sapiens
  SIMILAR (378)..(250): 401254mologous to Halobacterium sp. NRC-1 50S ribosomal proteins L39E; Rpl39e,accession number AE005125,Smith-Waterman Score=66.
acctcgttgatctctcgtgacttcaacagacttcgctttcttcttccatttgtggagacttaaaacgaaaggcgacaggtcttcttggcagccagtgtcgaggccaattgcagacagcggtccccttcttcccagtcacactcgtgagtcctggaaaaatccgaatgggtcgtgaaggttcgagtgtcagctcctagagatatcctggttgttatgcagccttcaagaaaaaatgttccccattcaagtgcgttttaattcatgtctttcctgggtagagcagaggtctgtgcatgttgttttctgcatcacccagacagggactcttcggtgaagttttctcccccgcgaggctgaaatgggatccctctttccaagccccctcttcgctcccctccgcccaccaaaaacgcaagcacacagccagcctgtctgggtccggcgtgggct

SEQ ID NO: 1609 - DNA, 406 bp, Homo sapiens
  SIMILAR (327)..(190): 381254mologous to Trypanosoma brucei probable similar to ring -h2 finger protein rha1a,accession number AL359782,Smith-Waterman Score=68.
gaaagcggtccccttcctcccagtgccactcctgagtcctggaaaaatccgaatgggtcgtgaaggttcgagtgtcagctcctagagagatcctaggaaaacgagaagttaaaggtcatgaactttctccaggcgcctatcactgtcttgcccacatgtccacaccaagttcgcgtttcctcccgagcaaaacaaacaaaaaaaaattttaacgtaaacaaacaaaaagcctataaattcgagggggtgtttaaaaaagagaaatctcgaaactgcccagcggttgcgtcaaacacacctggctgttatgcagccctcaagaaaaaatgttccccattcaagtgcattttaattcatgtctttcctgggtagagcagagggctgtgcatgttgttttctgacgaaa

SEQ ID NO: 1610 - DNA, 804 bp, Homo sapiens
  SIMILAR (265)..(651): 321254mologous to Mus musculus methyl-CpG binding protein MBD1,accession number AF072240,Smith-Waterman Score=74.
atgattacgaactcgagctcggtacccgaccggtcaaacctgaacagaggatttcgcatgcgccagcctgaattcccgaaaaccgtcgccatcgcctgccaggggggcggcagccacaccgctttcacggccggcgtcctgcaaaccctgctgtgtgaaatcgatactgcgcgctaccagatccaggataaattcatggacagagaatgtatcctgtctcctaaggcgctgtctgtggcggtgtgttttcgcatatttcgcggtcgccgcccccctctggcctatcgcggctgcttctccttttttgcattcgtctccgcaggcccgagcgggcgggaagggatctctctaggagctgacactcgaaccttcacgacccattcggatttttccaggactcaggagtggcactgggaagaaggggaccgctttctgcaattggcctcgacactggctgccaagaagacctgtcgcctttgttttgaagtctccagaaatggaagaagaaggcgaagtcagttgaagtcacgagaaatcagcgaggcatttgaaggcgcttcctgaaaacctttattccctggcacgttgtctgtttcaacagccctgcccctcctcggagcctgcttgtggaattcttccccttcgggtgtgtggtggcattccccgccacgtccaatgtggactccaaaggatttgtcccttctttgtcatttgaaatgaaatgatggccacgcgtcggactggtctgtctgagggagatggtgacaagctcaaggcctgcgaggtctcaaaaaataaagatgg

SEQ ID NO: 1611 - DNA, 2496 bp, Homo sapiens
  SIMILAR (619)..(1167): 441254mologous to Homo sapiens BC85722_1,accession number AC006486,Smith-Waterman Score=310.
atgcttctctcaatagatgcagaaaaggccttcgacaaaattcagcagcccttcatgctaaaaaccctcaataaactaggccatggctatgagcagcaccatctccacaccaccaatgacgtggatgaagaagatttgagcgatgcagcctccaaaggagatgactttgcgctttctgaacagtctcaagatgcacactttttacaaccagaagcctatggactgggtgagggagcagaaacagccacaggtactgcccatcagggtaatcatgttcgtgtggaggaatgtggaaggtcactctgcggctgtgttcccctggtactccatccccttcctgacccctccctgcagccacacgaggcccagcaacctgccagtcactcagtggcctgcaaccagagaaaacaacctgccaagttgccagctgttgctcatgagcgtccaccaggtgggacagggagtgttgaccctgggcggccccctggagccacctgccctgaaagcccagggcccgcaaccccacacactttgggggtggtggaacctggtaaaagctcacctcccaccatggaggaggagccctgggcccctcaggggagtccctgctggacagcccagtccctcagtgccctgcgcaaggaacaggactcatcttctgagaaggatggacgcagccccaacaaatgggacaaggaccacatctggtggcccatgagtggcgctcatgatcttcagcaagcggcaccaggccctggcggggcgcaccagggtcaccccaaccaggataaccggaccgtcagccagatgctgagcgagcggtggtacaccctggggcccagtgagatgcagaaatacgacctggccttccaggtgaaggtggcccacttgcaacaaggaccgaaagaagtccagctcagaggccaagcccacaagccaggggctagcagcagtgtaacaagggctcgtgggagcggagcatatcagagacgggcactgccactgcccctggggcgtcctctgaactcctgtcagttgcagcccaaacactccagagctcggatgccaaggagcagcttctgtggggcagaacggctgcacacacacatggccagtgaggacacagcgagtgacgaggagcacacggtcatccatgaggaggagggggtgatgatgtcattgctgatgatggctttagcaccaccgacaccgatctcaagttcaaggagtggcttttggcagtctatggtcacaccctgtcctcctcctacacatactcggatgcttcctcctcaaccttggcgcccacctccttcttactgggcccaggagccttcaaagcccaggagtctggtcaacgcagcagagcgggccccctacggccccaacccctggggatgggggcccagggacgccttccaaggtggcctgtttcctcccaatggatcctgccaccttctggtggagaagccgaggacaggctcagggaaccggagaccgagaaggagctgtcctcttcactgcacgtgccctggaccagtgccggccctgatcatgcagctcttccaggcccactgcttcttcctgtccactaggccacagccgccctccaggcccactatgcacacatcttcccctccaagccctgtgggggtcctgaccgcacctcacctggctcagactcttgacgctgccctggctgccccaccactgcctctgcccgagagtcacccctgcctgaccccacctcaacctgctcaggctctggcacaaacctggctgccctgccactgcctctgccccagagttggggccttgacagcctggttggaaggggacaccccagccctgcctcaacacctgggggtctccataactaccacaggcagggctgcaaacagaaaggattttgttcaccgtcgatgctgccctgagttgtcccaaagcgaggccgtgcccccaagcacacactttctgagtgccgagtgtctccagcaggagaggggctctagttcccgggatcccaccctccacagaggacagcagcaccttgagggacagatgtgcaaagggcaagtcagcggttttgcagcaatagcattgcatgtgggttttaggctgatgatgctcaacagtggacaatcctcttcacctgcctgggccccactgcctgcccttccatacagtgcagggtcacagctgagctctctgagacacctcgcaggatctcggcttctgaactatcaagtgtcttccagggctacagtgaattacacactctggcatgggtttgcacgccacgtgctggaagccagcagtcatgcaggccatgctctcccacacttaggaaaacagcgcatgagaaagatctccatcaagttcacacagaatgacctccagcaagacctggaaaatgctcagttccacaaaatacctgtgtccaaatcctttcagtgcacagctctggcatcaggttcctgtgaggacagaccctga

SEQ ID NO: 1612 - DNA, 1188 bp, Homo sapiens
  SIMILAR (421)..(816): 351254mologous to Carassius auratus g-RICH,accession number L42357,Smith-Waterman Score=109.
gcccagtccctcagtgccctgcgcaaggaacaggactcatcttctgagaaggatggacgcagccccaacaaatcagacaaggaccacatccggtggcccatgagtggcgctcatgatcttcagcaggcggcaccaggccctggcggggcgcaccagggtcatcccaaccaggataaccggaccgtcagccagatgctgagcgagcggtggtacaccctggggcccaatgagatgcagaaatacaacctggccttccagcacatggccagcgaggtcatagcgagtgacgaagagcacacggtcatccatgaggaggagggggtgatgaatgtcattgctgatgatggctttagcaccaccgacaccgatctcaagttcaaggagtgggagccttcaaagcccaggagtctggtcaacgcagcagagcgggccccctacggccccaacccctggggatgggggcccaggacgccttccaaggtggcctgtttcctcccaatggatcctgccaccttctggtgcaagagacctgaaagtgtgggcgacctggagctaccaggctcctcagtcatcagggtggagaagccgaggacaggctcagggaaccggagaccgagaaggcgctgtcctcttcactgcacgtacactggaccagtgccggccctgatcatgcagctcttccaggcccactgcttcttcctgtccactaggccacagccgccctccaggcccactatgcacacatcttcccctccaagagcttttcacttttcggaaaatagctcctgctggggctacaagatggagtgtgaagagggccttgggccacagggaggcgcctgtggactagggggagttcatgcaccccttctttccccagaggggctggactcagatcagtactgccacatggagggtccagcactggacgtgaatgagtgtgcagagaaccctggcgtctgcactaacggcgtctgtgtcaacaccgatggatccttccgctgtgagtgtccctttggctacagcctggacttcactggcatcaactgtgtggcctcaggttcttttgacgtttccctcaaagtcgtcgacctgtttcttcaggttgatggtttgctgtccgttttaatgtgcagtccctctcaagtctattacccagcagaggtagtggaagagaaaagctattag

SEQ ID NO: 1613 - DNA, 1654 bp, Homo sapiens
  SIMILAR (693)..(1127): 731254mologous to Mus musculus Pro-Pol-dUTPase polyprotein,accession number Y12713,Smith-Waterman Score=545.
gcctgcgttcagtgaggcctcccgtggcgtcagcatgttcgtgtggaggaatgtggaaggtcactctgcggccgtgttctcctggtactccatccccttcctgacccctccctgcagccacacgaggcccagcaacctgccagtcactcagtggcctccaaccagagaaaacaacctgccaagttggcagccgttgctcatgagcgtccaccaggcccagtccctcagtgccctgcgcaaggaacaggactcatcttctgagaaggatggacgcagccccaacaaatcagacaaggaccacatccggtggcccatgagtggcgctcatgatcttcagcaggcggcaccaggccctggcggggcgcaccagggtcatcccaaccaggataaccggaccgtcagccagatgctgagcgagcggtggtacaccctggggcccaatgagatgcagaaatacaacctggccttccaggtgaaggtggcccacttgcaacaaggaccgaaagaagtccagctcagaggccaagcccacaagccaggggctagcaggagtgtaacaagggctcgtgggagcggagcatatcagagacgggcactgccactgcccctggggtgtcctctgaactcctgtcagttgcagcccaaacactccagagctcggataccaaggagcagcttctgtggggcagaacggctgcacacagtccagggaacctggctcagcctggcccaagccttctcccacagcggggtacacagcctggacggcagggaaatagaccgtcaggcactacgggaactgacacaggtggtgtctggcactgcatcatactctggcccaaagccttctactcagcatggagctccaggccactttgcagcccctggtgagggaggtgacccgtgggcagccctgctgccgcccacgagccttcaaagcccaggagtctggtcaacgcagcagagcgggccccctacggccccaacccctggggatgggggcccagggacgccttccaaggtggcctgtttcctcccaatggatcctgccaccttctggtgcaagagacctgaaagtgtgggcgacctggagctaccaggctcctcagtcatcagggtggagaagccgaggacaggctcagggaaccggagaccgagaaggcgctgtcctcttcactgcacgtaccctggaccagtgccggccctgatcatgcagctcttccaggcccactgcttcttcctgtccactaggccacagccgccctccaggcccactatgcacacatcttcccctccaagagcttttcacttttcggaaaatagctcctgctggggctacaagatggagtgtgaagagggccttgggccacagggaggcgcctgtggactagggggagttcatgcaccccttctttccccagaggggctggactcagctagctttgactcctctgtcacttgtccgctttggcatcacctcctcatagaagacttctatgactcccgagattctcaggagcatggcaggaatcaaggttccctagagaaacggctgactccatgtatggtgcagtatattgatcctggaacatctgttttgccagaaagcaagaaagccatcaaagtccaacaggatcacgtcaaaaagacatga

SEQ ID NO: 1614 - DNA, 783 bp, Homo sapiens
  SIMILAR (4)..(609): 691254mologous to Homo sapiens fibrillin-2,accession number U03272,Smith-Waterman Score=856.
cgggtcgagggctccttccgctgcatctgtccccatggcttccaggtgcagagtgaccactgcattgatatggacgagtgctcagaggagcccaacctctgcctctttggcacctgtaccaacagccctgggagcttccagtgcctctgcccacctggctttgtcctctctgacaatgggcaccgttgctttgacacacggcagagtttctgcttcacccgttttgaggctgggaagtgctcggtgcccaaagctttcaacaccaccaagacccgctgctgctgcagtaagaggcctggggagggctggggagacccctgcgaactgtgtccccaggagggcagcgctgcctttcaggagctctgcccctttggccacggggcagtcccaggcccggatgactcccgagaagacgtgaatgagtgtgcagagaaccctggcgtctgcactaacggcgtctgtgtcaacaccgatggatccttccgctgtgagtgtccctttggctacagcctggacttcactggcatcaactgtgtggaaccttcaggccaggcgtcacccacaggacaacctacatccctgcagcccaaccccttggattctttcaaaacagatgctcctgccccagtggggcccctggttgctctagcaatggaacagagctggatggagaatgactttgatgagatgagagaagaaggctacagacgatcagacttatctgagctaaaggaggaagttcgcacccaatgcaaagaagctaaatcattgaataaagattag

SEQ ID NO: 1615 - DNA, 1428 bp, Homo sapiens
  SIMILAR (47)..(511): 1001254mologous to Homo sapiens ribosomal protein L23a,accession number U43701,Smith-Waterman Score=786.
tctcaagatgcacactttttacaaccagaagcctatggactgggtgagggagcagaaacagccacaggtactgcccatcagggtaatcatgttcgtgtggaggaatgtggaaggtcactctgcggctgtgttcccctggtactccatccccttcctgacccctccctgcagccacacgaggcccagcaacctgccagtcactcagtggcctgcaaccagagaaaacaacctgccaagttgccagctgttgctcatgagcgtccaccaggtgggacagggagtgttgaccctgggcggccccctggagccacctgccctgaaagcccagggcccgcaaccccacacactttgggggtggtggaacctggtaaaagctcacctcccaccatggaggaggagccctgggcccctcaggggagtccctgctggacagcccagtccctcagtgccctgcgcaaggaacaggactcatcttctgagaaggatggacgcagccccaacaaatgggacaaggaccacatctggtggcccatgagtggcgctcatgatcttcagcaagcggcaccaggccctggcggggcgcaccagggtcaccccaaccaggataaccggaccgtcagccagatgctgagcgagcggtggtacaccctggggcccagtgagatgcagaaataccacgacctggccttccaggtgaaggtggcccacttgcaacaaggaccgaaagaagtccagctcagaggccaagctcacaagccaggggctagcaggagtgtaacaagggctcgtgggagtggagcatatcagagacgggcactgccactgcccctggggtgtcctctgaattcctgtcagttgcagcccaaacactccagagctcggataccaaggagcagcttctgtggggcagaacggctgcacacacacatggccagtgaggacatagcgagtgatgaggcgcacacgatcatccatgaggaggagggggtgatgatgtcattgctgatgatggctttagcaccactgacaccgatctcaagttcaaggacttttggcaaagtctatggtcccaccctgtcctcctcctacacatactcggatgcttcctcctcaaccttggcacccacctccttcttactgggcccgggagccttcgaagcccaggagtctggtcaaggcagcagagtgggccccctacggcccctacccctggggatgggggcccagggatgccttccaaggcgacctgtttcctcccaatggatcccgccaccttctggtgcaagagacctgaaagtgtgggcgacctggagctaccaggctcctcagtcatcagggtggagaagccgaggacaggctcagggaaccggagaccgagaaggcactgtcctcttcactgcacgcgccctggaccagtgccggccctga

SEQ ID NO: 1616 - DNA, 2121 bp, Homo sapiens
  SIMILAR (202)..(720): 951254mologous to Escherichia coli ATP-binding protein,accession number D85613,Smith-Waterman Score=844.
atggcgggaccacggccccaaactcgtcgtattcacgaatcgagccgtgtgtatacgaatgacaagttgacgccaaactcctcacgtgactctcgggcagaagcagtggtggggcagcagggcagcgtcaagagtctgagccagcatgttcgtgtggaggaatgtggaaggtcactcgcggccgtgttctcctggtactccatccccttcctgacccctccctgcaccacacgaggcccagcaacctgccagtcactcagtggcctccaaccagaaaaacaacctgccaagttggcagccgttgctcatgagcgtccaccagcccaaacactccagagctcggataccaggagcagcttctgtggggcagaactagaggcccggatccgctacgtcatcgtccgcggaaacgagcaaggttttttcgcatgcatcacctccgtggcgtcagctccctgcagctggggcggagcgtccggggcctggaacctaccggctggaggtgtgccggaagcagacactcttcctcatatcgtagttggcacaaaggagaagaatgtggatgtcgatgagtgtggcgcagggagagtccctgccagcagaatgctgactgcatcaacatccccggagctaccgctgcaagtgcacccgaggattttgatgagtgtctaccctggtggggcaggtgtgccgatttggccattgcctcaacacagcggttccttccactgcctctgccaggatggctttgagctcacagctgatggaagaactgtgtgggctgggaagtgctcggtgcccaaagctttcaacaccaccaagacccgtgctgctgcagtaagaggcctggggagggctggggagacccctgcgaacgtgtccccaggagggcagcgctgcctttcaggagctctgcccctttggccacggggcagtccaggcccggatgactcccgagaagaagccatgtctgcaacgcctgccatccgcagagtgaatgagtgtgcagagaaccctggcgtctgcactaacggcgtctgtgcaacaccgatggatccttccgctacacagacgatgctctgtcggccacccctgtgggcaagggacatgcaccaatgtcatcgaggcttcgaatgtgcctgtgctgacggctttgagcctggcctcatgatgcctgcgaggggagctcccgggaaactgactctgcagaaagggggaagcacaggcactgtggggggtgcccagaggagaggagaactacctccagaggccgagtctgagtccctgcagagcccagcccagcaggagcgggaaagggaggactcgagccctccaggtgtctcccaaccgcggcctctagggcaaggggcagcgcattctgttggaacctcggactgcagtgccaggagacctggacgaatgcacctccggcagcacaactgtcagttcctctgtgtcaacactgtgggcgccttcactgccgctgtccgcccggcttcacccagcaccaccaggcctgcttcggtagtgacccttgcccctcaccgggagatatcgacgagtgctcagaggagcccaacctcgcctctttggcacctgtaccaacagccctgggagcttccagtgcctctgccacctggctttgtcctctctgacaatgggcaccgttgctttggcctcccagccagcacccctactgtctcagaaagggccttttcccctgtttccctcacctgcacacacctggtggaactggctgcctgcgaacaaggctcagactgccttgagcccccaaacaagccttaccttcatgctccccccgccctcaagccacctgttccctgccttcacggggaggaagggttcccactgcctttgctttggtccagatgcatagtggttgcccagcaaccggaggaggagacggacggacggacggaggacggaagacggacgacgaacgacgacggacgggaggacgaggacacggcggccgacaacgaggaggagaaggaggaccggaggagaacgagcgacggggacgacgacgcccgcgaccccgccgacgcggacgacaccgccgacgcggccgacacagtacatatgacaacgcgaccctga

SEQ ID NO: 1617 - DNA, 667 bp, Homo sapiens
  SIMILAR (167)..(63): 511254mologous to Hordeum bulbosum chitinase,accession number AJ400135,Smith-Waterman Score=78.
ggtaaatggatccttctatgagatcttgcaagtggactttggaattgataatagcagtgacctggctggggcccagcagattacctggcaggtggagtacccgattgaggactccatgagtgagctggtcgtctccgagatcttcgtcagccagacaaccttcgtgggcatcgtccctcttgccatgtcaagctcaggggctacatctgagatcagggtcatgggtgagattccagagcctaaattccagagattccacggagacagtgaggccttttggaaagtgattagccatgagggctctgccctcacaaatggatggcttccttataaaagggttggaggaagctggcttaggcccctgtgcctgtcccttccgccatgcgaggacatggtgtttcgtcctccctggaagacgcagcaacaaggcaccatcttggaagcaaagagaccagatcttcagcagacactgaccttgctagggtctctgtcttggccttccagcatccagaacttgaatgaaaagagagaaaatggaatggatgaaagttttgaagttgaaactattaggccttggaaaccatttatgtctaagatttccatttctagcagagcagcacagatggtcaaaagcttcaaaaaccgcttcttgaaaagggtggtctaa

SEQ ID NO: 1618 - DNA, 339 bp, Homo sapiens
  SIMILAR (699)..(358): 311254mologous to Caenorhabditis elegans coded for by C. elegans cDNA yk34b1.5; coded for by C. elegans cDNA yk13h10.5; coded for by C. elegans cDNA yk46e8.5; coded for by C. elegans cDNA yk46d5.5; coded,accession number U58755,Smith-Waterman Score=150.
atgctgagctcccgggccgaggcggcgatgaccgcggccgacagggccatccagcgcttcctgcggaccggggcggccgtcagcggctccctccccgaacagctgctgctccagggaggaagcggcgcgggtgctgtccagcttcccggtgctgaaaaccggagggctcgtcatccaccactaccatgtaagggccatgagaagggctcatcctggcgcagcgcggacatggaggaggacttattccagctaaggcagctgccaaccaggcatgagacaattaaggacagcccctatgctccagagaaggatgaaattattcaaacgaaccgaacctaa

SEQ ID NO: 1619 - DNA, 434 bp, Homo sapiens
  SIMILAR (85)..(1503): 751254mologous to Homo sapiens dA22D12.1 (novel protein similar to Drosophila Kelch (Ring Canal protein, KEL) and a heterogenous set of other types of proteins),accession number AL035424,Smith-Waterman Score=1656.
tgtcgtgttgaggcgccggctttcccgggtcttctccttttgccaccgctttactgcaaaactgacgggcgcaaaaacatgagtgactccgcgggagggcgcgctggtctccggcgttaccccaagctcccagtgtgggtggtggaggatcatcaggaggttctaccctttatataccgggccataggctcaaagcatcttcctgccagtaatgtaagttttttacatttcgactcacatccagacctccttattcctgtgaatatgccagcagacaccgtgtttgataaggaaacactctttggagaattaagtattgaaaattggattatgcctgcagtttatgctggccatttttcacatgtaatatggtttcatcccacatgggctcagcagatcagagagggcagacaccactttttagtaggcaaagt

SEQ ID NO: 1620 - DNA, 1392 bp, Homo sapiens
  SIMILAR (43)..(2433): 831254mologous to Homo sapiens putative p150,accession number U93563,Smith-Waterman Score=3353.
atttggcaccagttttattgagctagtttgttggccatgcctagctgagaaatagagaagtggagggagatggggggatgggagagcttttcctcatggcacactctgctccaggagtctgtatacaggagtgtggagaaaaggaagtgttaccttgcaggaagttgcccccaaagcaagggcaggaggtgggggtgggggacttggcctctgatggaattctggaattctgatgagagaggtgctagcctgacctgaacaggagatgctgacaggcagtgctgggcatgttgcacagagatggctggttacacagccccgtggcaggatcccagagtgccgagaccagctgggtcgtggagaccctaacccagtggcgctagaggaattaaagacacacacccagaaatacagggtgtggagtgggaaatcaggggtctcacggcctttcagagcttgagagccttgaacagagatttacccacatatttattgacagcaagccagtaataagcattatttctatagattatagattaactaaaaacactttcttacagggaaaataaagggatgggctgaaataaagggatgggtctggctagttatctgcaagcaggaaacatgtcgttaaaggcacagatcacttatgctaatggtttgtggttccaggaaacccctttaaagcggttttcccgccctggggtgggccagggtgttcctcgccctcgttccagtaaaccccaccaacctttcaggggtggggggtcatgggccattcaccaaacattgttcacagttgcttgcaggagatttttgttttatgggcccagttttggggcccagtttatggctagattttggggggcttgttccccaacacccagagatttcccccaaacagcagatgacttttgttagtcttcaaggaacaaaactgcctcagcggacctctgctccctgcccacgatcattacccccaaaacatgccggcaagtctctgctccctgcgtcggcagagggatttataagccctctcttataaatccctggtttagcctttgttttgtgactgagtccaccgagatccttgcaggagaagaaaatttgcaggcaaatgaactaaatgtctcttccctgaacaactccccttctggggggctgaggaaactgtgaacagccctggtttgtcacacagcacgatggccaccacactgaagcagcagcaagcagattcatggaaggtgtgctgagaaccagccacctgggagccctactgtccctgggtatcctctggcttctggctgcaaagctggtcttttttttttttttttttttcattgatatagggtcttgctttctcacccaggctggagtggtggtgaaatcacc

SEQ ID NO: 1621 - DNA, 171 bp, Homo sapiens
  SIMILAR (162)..(112): 521254mologous to Homo sapiens Vpr binding protein B29-1 amino acid sequence,accession number W68196,Smith-Waterman Score= 48.
atgaaaaagcacaggggaatgcagggaaaaggtgggaaaatgggttctcgagataagggtggggtgtggaagatgagaaccctgtccgagagcctgcgtccacgtctggccacagcaggaggggcagccatgagtcctgcactctccaatctgcccacaaccctggggtga

SEQ ID NO: 1622 - DNA, 569 bp, Homo sapiens
  SIMILAR (121)..(2): 951254mologous to Homo sapiens Human protein kinase homologue, PKH-7,accession number Y76754,Smith-Waterman Score=219.
cgggattgacaaaggtgtgggcccctacatgctcctctacaggcaaagaatttccacagtaggggcagaatttgaatgccgcttggatacttttgccacagtctggacagaaggagatcatgctttatgaggtcacggtctggcccttggatttactgggttggaaactccatcttgacagcgacctcagcgcaggtggggcgattgcttaggcgacgacaaaagcctcccttcggccgcacctccatagaaaccacgggatgacttagacgccaagtttcacagcggagaagctgtcgaacttcccacaagttccgcccatctccgccttagccatgcccaacacggagcccaaggtggcttgggaagctcaagaggaggccagtgaaccccgcgacccggagccgctctcattccgaaccccgacagcaggggcctccgcctcccacaaacggtcgtgctgacgtcacggacgccccggccgagctgcggctagggggtcgggggacgtcccctcgttcgcctcgcttcccctcacctctgtacttggggactggggtgggacgaaa

SEQ ID NO: 1623 - DNA, 912 bp, Homo sapiens
  SIMILAR (377)..(487): 401254mologous to Homo sapiens Human secreted protein sequence encoded by gene 28 SEQ ID NO:151,accession number Y91478,Smith-Waterman Score=69.
atggagaggctcaggtggagaggaactgaggccctggccaacagccaccatcagctgctgggtagggatgattatcccatctttgaaacctacaaaatgatgctcaaaggtgacaattctccttcccccagacctgactccactcacctagaaaacatggggacgcagctgaaatccagaacccaaaagcccatgttcttcacctgtgccaatttatacaacgaaaacgcaaaaccggactgggttcttggggcacagaaaccacgggatgacttagacgccaagtttcacagcggaggagctgcgaacttcccacaagttccgcccatctccgccttagccatgcccaacacgagcccaagccgctttgaacgccttctggttctactgcgcatgtgtcagtgtcagaccaatcggatgcaccgtgaggtacctctccaccaatcagaggtcacattacctaaactctgcctcaactccgccccttacttccgcttgttttctcagaaacccgtccaacgcgtttccatggcaacctaccgcttgctcttcggaaaagagctgagagtatatgagatgtgggcagaatgtgatttggtactgcagacagggatctcaagctcagctgtctgtgagggccaggcagatgcatacaggaaagaagagaactggtccagtggtagtggagttgtcggcaaggagatcctgtcctcagggcatgtacaaatgtgcatgcactgctgctggtgcaggggcaggactgctgtcaatggcagcagccccagcatgcagctctcaggctctgggaaatacatgctttggcccctggcagaaacagagtttcatcgagtcccagcactgatgccaacagggggccaatgtcctctgcgggagatttcactcggggcttga

SEQ ID NO: 1624 - DNA, 462 bp, Homo sapiens
  SIMILAR (261)..(64): 351254mologous to Agrobacterium rhizogenes hypotethical protein,accession number AJ271050,Smith-Waterman Score=77.
tttcgtggaatgagcggttggctcgggctggtttcctccctccaccgcctgcttgtttcgccatgcccgggccggacggtggggctgcagcggcgaaagcgactgaagtccgggagcagtcgcatgagcttcccggtcaccaggaggccccgggaacagacacctcaccctgacattgtggcagctataccatctggaacagatgacttccaaggacaccgtagcaaagaaaaagagaactggaagcccatgtgccttaatcgcttcatcctagaggaatgtatagctgctgatgattttcgaattcgtggtctggaacccaacccacaataccttcaaggaaagcccacccaagtctcagagtctctgaggcttttgcgaaatgacactcaggatcccaacatcaaaaccaggtacatcatgaatcttgcaaaaacaatccagagaagtcctgacaagtag

SEQ ID NO: 1625 - DNA, 436 bp, Homo sapiens
  SIMILAR (172)..(291): 321254mologous to Homo sapiens mitogaligin,accession number AF266280,Smith-Waterman Score=73.
ccagccctgatggtgacaacacaaatggttgtgagtaaaactctccttgccccaaatgtcatcctccctgtcccctttcaaagtaatctgaccagtccttgctgcaggcccaccttggacctgcacctgcagaaagtgccatgtggggcatcaggatcagagccacccagccagcctggtctatggaaaggggccatggagaatggtgagatcacgtacggtctcccaacagctgcaatgtgcaaaggaatgtgcgcctgggagagcccttgccggggtcaaccctggtccggcagggaagccgctccagtggtgggaagtccaccaaggtgagggatcctggttccagagccttcttcttcatgaactcatcaaccttctaggagctctgtattcttcatctaagtacaataacaacaactgtttttgtacgaaa

SEQ ID NO: 1626 - DNA, 1001 bp, Homo sapiens
  SIMILAR (2133)..(1951): 451254mologous to Mus musculus FasL isoform,accession number AF288572,Smith-Waterman Score=107.
  misc_feature (1)...(1001): n = a,t,c or g
tttttttctttcctagattgtattaagaaattaatgtagctgaatcacatcctatttagtttccaggtcaatatgaaaagatggtaatttttctttgaaacttacaagtacaatctgcaaatacataattttgagaataatttaatatgttgacttcaagatacaactatattctatataaggtacaactctatatgtcagtattttaaagaaatggatccttacaagaccaaaataacccacaggccatgaggttggtttttccttttttttttttttttttgtttaaacaaatgtgcaccacgatgtttcaacaagacaaatgccataaatgtgaaagctgcagtttgcaatataccacatttagaatccagcgaaaggtgaatcaaacagaggtggtagtcattctaattaaacaatcaggtaacttcaccgacaagctggatttgcagcatcaaaaagtgtccatttaagtttcctttttcttgatgatcaagaggggcccacattggtctccaggtcctcctcggtaaggttttggtggtgagcccccatcacagaaatgggaactttttggacctcccaacaacgggcagttccacaagcttatatcttcccaaagtccgtccatgtccaaaagcaatgtactatcttggggttgtccttctggatgtgaaggtttatcatagctttatttcgatgatctttaccataaaatcttttgtaagctagataaccaattggcagctgctcccagcagcaatggtaactgctgcgaaccattcaacccagctccaggcaatgttggagagaagaaagttctgcataatctggttagcctcagcctcagaggagagttgtctattcccagcatggagtgggctcgtacgctggaactggaagtcagactcatggcgccgtcgcttgcaaggcgtgtgcactaggataccgagctcaaacgggttcgcgcggccggcgagagtaaannnccagcgacgaaa

SEQ ID NO: 1627 - DNA, 701 bp, Homo sapiens
  SIMILAR (187)..(756): 1001254mologous to Escherichia coli enterobactin,accession number M60177,Smith-Waterman Score=1010.
gagtagaataagtccagtatttatccctcttgatctccgttgcatggccagatatcagggaaacagctcagcaatgggaaaacgtactcaggtggtcagtttcaggtatctggggagatatacagacggctgaaccagaattcttaataccattacgttttaggtatagctcatgccctgaggatttctattccaccacagagtttcacgtccagctccccggaatccgaggttccctaggcacgcctcctaatatcgctgccaaggaccaagagcctgtgcccttcaacctcactgttcttaaagcttctcggctcctgagttttacagcgccaaccccttcctccgagtgtgggcacgtcgttcccgtgcggtccggcggagatgcggcaacttcgacaagaccccagccccccgggaggcgccgacctccgcccagcagccccagcccggccgccagctcccgcagcccggggaaacggcgagagatgccgctcacaaccaacgacagcagccggaccaaacagacgcggaaactcacgctctctacgacccgcctgcgtccccacgtcttcgcgcgcacgtggtacatcacgcacgttccccgatccggggcgccccggattcctggggccggccactggccgctgactacgcgtaaggcaaacaagcgacctgcgttcaagggacccgaagactag

SEQ ID NO: 1628 - DNA, 572 bp, Homo sapiens
  SIMILAR (299)..(568): 331254mologous to Arabidopsis thaliana putative protein,accession number AL138659,Smith-Waterman Score=92.
  misc_feature (1)...(572): n = a,t,c or g
tttcgtgagagcnnnnatttccgcgtctgtttggtccggctgctgtcgttggttgtgagcggcatctctcgccgtttccccgggctgcgggagctggcggccgggctggggctgctgggcggaggttcagccgtctgtatatctccccagatacctgaaactgaccacctgagtacgttttcccattgctgagctgtttccctgatatctggccatgcaacggagatcaagagggataaatactggacttattctactcctttctcaaatcttccatgttgggatcaacaatattccacctgtcaccctagcaactttggccctcaacatctggttcttcttgaaccctcagaagccactgtatagctcctgccttagtgtggagaagtgttaccagcaaaaagactggcagcgtttactgctctctccccttcaccatgctgatgattggcatttgtatttcaatatggcatccatgctctggaaaggaataaatctagaaagaagactgggaagtagatggtttgcctatgttatcaccgcattttctgtacttactggagtggtatacc

SEQ ID NO: 1629 - DNA, 420 bp, Homo sapiens
  SIMILAR (122)..(196): 401254mologous to Ovis aries BIIIA3,accession number U60024,Smith-Waterman Score=48.
tttcgtagggtggctttctccggctggcatggacttgagcagaaactcattgccggcttcctccttgcacgagcaccaagtgattcccaggtcccccatcctcccctgggacatcgaggacacacaaaaaccttgttcaccctccactgagagcggggctagagatggatgctgagtacaggaagggtgtgtgaggattcctttggctccactcttgtttccaactattgctggtcctaggcgcccagtcctgagcaaccatgacgatggagactctccccaaggttctagaggtcgatgagaagtctccagaagccaaggacctgctgcccagccagaccgccagctccctgtgcatcagctccaggagcgagtctgtctggaccaccacccccaggagtaactgggaaatctaccgca

SEQ ID NO: 1630 - DNA, 749 bp, Homo sapiens
agtactctcctggtctagaaatcaagtatttaaaaattagcataatgttaatctctatacttttcaaaaaagattggatcaaactgtgtcaaatagtaggtttttagtgttgtgatcccggctgcatttaattctataaaacaaagttcaaactaccagtatgtgtggtttttgagggcatttatccacatctaacttgcaattagacttttttttaaagtacgtcccctgacattaactgttcatacatccgcatcaaaacaatacatcgcaggggcgtgagggagaggggagacgaatgtttactcttggcaaagaggattctaaaagacgggaaaaataaaaacgagcgttttcagagtatcagttcttcgttgccaacaggctttttaccagctcaccgctacccccaaactccctcagcacgtgaatgttacgagagttctaaaagcatcataaaacgtttggcacacagtgcctggcattacgcgcctctacatacgttattctcctacccgtcttcagaccttgccagggagagaaataagagccgacgcgaatttagacgtaagacaaacaaaacgggcttctggaaaccggccaactgtgccaggggggacgaatgccccaaacagatggctcggagaatgatttcggcggggagcgcggtctcggacacgcacaaagcacgagaggacggttctgtccccgccctcccgcacgaaatcgtcgtcccgggaagggaaacc

SEQ ID NO: 1631 - DNA, 1949 bp, Homo sapiens
  SIMILAR (1530)..(1261): 401254mologous to Homo sapiens Human protein clone HP10563,accession number Y94867,Smith-Waterman Score=94.
ctgcaactcagctgatggcatgttcaagcttccagttgcccaagtcccaaaaacctacagagtttagggaaaagttgaagtgtgaccccacaatgccagctacctagaaactaaggtagatcctaggtactgggattaaagatatcataaaatcattaaaatgttttctgaaatgtttgaagtttaactcattttatttctaggatttggatttcaacattttaatttctttggaatataagtcactttttgcaagctaaaaaatagaatcaaactaaggtgatctagtcctctaggcatccaggctgatccttcggaatcatcgagcagaatgatgacatactacaaggtgctagcaatacggctataaactctaaataataaccactacatgtttcattaggaaacagccaaaagtccggcccgttaaagggaataatctgcaggaacatcttgatttacaaggggacaaaatgatgcaaaattatatggctggcccaaccctactgggtggaactgggatccaggaatgggtcccaagggacctgttttaaaccgaggggaggtattttaccatttttggaaaaactttgctctgcagggataaaaaaattccctggttggctgtcagtaagaaagcaagtaaaaaaaatattccagatgaactccctgatctttgattttactaaggtcttccactggaacatgaaggtagggataagtgtacaggataatatactcagatatttttaaaataaattacttaataataagaaattaagccaggccacattgttccattagctacaagagcaagataggcaatgaaggctatgtaaaagaaatgctcagctttacagagggtggtggcaggcaacacttttccattacagaataacctctattcttccatgatacatattcctgtggaaaaacttgtcaagggcccccagggatgaaaaaaatagagcttgtccctaaattagctaaactgtaggttcaacttaaacatctttggggaaggaccccaaaaaatctggcccattattttccttaaaacatcctgcaagctgcaagaaattcccttagtccctccagctaatagtttctgcctagatatccttaaagctgggaacagttcccactgtgaactcctcctcagctatggggtgggtgctagtcattcaaaagtctggaatgttcatccataggaataaaccacggtaaccctttggaatgccataattaaccgaatgccgccaggtggtaaaatcccgggtaggaacaccaagaatgcccaatgatcagcaactggaacggcccggtctgccccccctttgctgatgtagcctgacagcaggagggagccctataataatgaagaaaggcgcccaatcaaaaacagcacagtggcaagtgcgatggcccttataagggatccttaaggaggggttttcctttaaactgaaaggtcaaatgttacccatcgtctgtgctggagagccttgaaatatttcactttactactggggattccagtagcccaggttggtacgggacggcatcataacacgctgacacaggtcccctgacattaactgttcatacatccgcatcaaaacaatacatcgcaggggcgtgagggagaggggagacgaatgtttactcttggcaaagaggattccgtcttcagaccttgccagggagagaaataagaaccgacgcgaatttagacgtaaaacaaacaaaacgggcttctggaaagaggccaactgtgccaggggggacgaatgccccacacggatgactcggagcttgatttcggcggggagcgcggtctcggacacgcccagagcccgagaggacggttctgtccccgcccggagcgccgcgccaggccgcccgcacacccagagctcgcccacggttggcagcgcccaaggttgcat

SEQ ID NO: 1632 - DNA, 575 bp, Homo sapiens
  SIMILAR (3)..(152): 1001254mologous to Homo sapiens putative replication initiator origin recognition complex subunit Orc4Lp,accession number AF022108,Smith-Waterman Score=260.
gtgaccgaactagcagttgcccagtgatcttcatattagatgaatttgatctttttgctcatcataaaaaccaaacacttctctataatctttttgacatttctcagtctgcacagaccccaatagcagttattggtcttacatgtagattggtgaaaagcccagaaggaaaatttcagaagaccagtactggagctgtcagaatgcaaccaaaatcagctgagttgaagtttgtcaccaagaacgatggatatgtacacattcacccttcatcagtgaactatcagatattaagaaccagaatagccttgtctttgtttctctttcctaggaaaactcaaaaagaagagcacagctcacaggccgggcctgcccaagcacaaggaagtccttttcgttctatcaatatccctgagcctgttcttccaagcgaagactttaccaaccttttgccttctcaggcctacgagaaagggatgttagaacagatattaaaaaatggtaccgaagaaactggctttccagtggaagtcagagttttggttattaacttacattcaactcaggaaaagtaa

SEQ ID NO: 1633 - DNA, 2238 bp, Homo sapiens
  SIMILAR (232)..(879): 781254mologous to Mus musculus Pro-Pol-dUTPase polyprotein,accession number Y12713,Smith-Waterman Score=869.
gccctagcctccgaactcaaaactggtttcacagaagcaatgcaagaactgtcaagaattcaacatggagaatatgctttggaagaaaaggttaagagctgcagatgttccatggaagaaaaagttactgagatgaagaattcattaaactatttcaaggaagagctgagcaatgccatgtcgatgatccaagccatcacttccaaacaagaagaaatgcaacagaaaatcgagcagcttcaacaggagaagcgaagagaatctcgaaaagttaaagccaagaaaactcaaaaagaagagcacagctcacaggccgggcctgcccaagcacaaggaagtccttttcgttctatcaatatccctgagcctgttcttccaagcgaagactttaccaaccttttgccttctcaggcctacgagaaagcccaagagtccagatctgttcatgtaggagacagtaatgtaaaaggaatgatgggtcctggagtgaacccaacaactccagaagcagaagaaaacctcaagtcttgcctctcggctgatatccagtccaagggccatctcccatctggcatgtggaggcagcctaaggatggtaaagaatggggtgaagaatacgtcacaaaagaccacccagataaactcaaggaggctggccagggtagacacagctccttggaaaacgttttatgtgaaacctccttagctgctaaaagacagactgtggccctggaactgcttgaatctgaaagaaaatatgtcattaacatctctctgatcttgaagataaaagccacattccaggggtcagatggaaagaggaattccaaagagagaagaccagctgaaggaaatacaaagcagaatgaaattgttccttttctctatcggcatttttctccatgcaaagatgaaaataagtatattaacatttactatcggcatttttctccatgcaaagatgaaagtttgcttgttgggaaagcaccccagttgtccacgagtttactctcatttgaccctggggaaatattcaacctcttccctggctctttacggtacctcgtccagcagcacctggatctgcttcacgcactgcaggaaagggtcctgaagtggccacgccaaggcgttcttggagatttattccttaagttaacaaatgacgagggtgatgaagagattaaatctgacatctacacgttgttttttcacatagtccagcgcatccctgaatatctgatacatctgcagaacgtcctgaagttcacagagcaggagcaccctgactattatctactactggtgtgtgtccagcgcctccgagtatttatctcacactacaccctgctgtttcaatgcaatgaagatttgcttattcagaaacggaaaaagctcaagaagtcatccatggcgaagctgtacaaagggctggcttcccagtgtgccaatgctgggcaagatgcttcccccactgcaggtcctgaggctgtccgtgacactgggatccactcagaagagttgctgcaaccctacccttctgctcccagttctggccctgccatcacacatctgatgcccccagtgaagaaaagccaacagcagcaaagcctgatggagagcatgcagcccgggaagcccagtgactgggagctggagggcaggaagcacgagcggcccgagagccttctggcaccgacgcagttctgcgcggccgagcaggacgtgaaggcgctggccgggcccctgcaggccatcccggagatggacttcgagtcctctccggcggagccgctgggcaacgtggagcgctccctgcgcgccccggccgagctcctgcccgatgcccgcggcttcgtgcccgcggcctacgaagagttcgagtacggcggcgagatcttcgcgctgcccgcgccctacgacgaggagccgttccaggctccggccctcttcgagaactgctcgcctgcctcctccgagtccagcctggacatctgcttcctgcggcccgtcagcttcgccatggaggccgagcggccggagcacccgctgcagccgctgcccaagagcgctacgtcgccggcgggcagcagcagcgcctacaagctggaggcggcggcgcaggcgcacggcaaggccaagccgctgagccgctctctcaaagagttcccgcgtgcgccgccagccgacggcgtggccccacgcctctacagcacgcgcagcagcagcggcggccgc

SEQ ID NO: 1634 - DNA, 933 bp, Homo sapiens
  SIMILAR (688)..(515): 411254mologous to Drosophila adiastola hunchback protein,accession number U92997,Smith-Waterman Score=70.
atggctctaaagttaaagagtccccagagaaaactaacagtacatgaaataggccctatgtgggcaaaaggacaagctgcagaaccagttaagacagaagaggcagcccaagtgaaatacaatgatcccagaatctcacctctttggtatattgaccatgaagggcatattgtggatggaaacctgaagtctatcatgaggctggtccttgccttggcagctcatttcaaacctggctccagcaggacggtgaaccaaggacgggactccagagcccctctgcaaagtcaccgaccacactgtgccactgctgttgcccagggagcagctgctgctctggccgatgtgtgtcatgacatgtcccgatcaggacgggatgtctttcgatatagacagaggaacagcagcatggatgaggaaattgagaatccatactggagtgtgcgggccctagtgcagcagtacgaagggcaacaaaggtccccgtctgaatccagctgctccagcctccctctggtgcttttcggcacccaaagtccagagggagctaaggcagcaggggctggcatatcagtgctgccccaaccctgtgcacacccagccaggttgtggcagtgcccgggcttggcctcaactttgctccaagatcggagcaggtgcagggagtcgggagaggccaggcagcaggagcaagcatttccaagcctagcccctgagagtgcagcgatgcctgggtccacagctgtggcttgggcagctgcagctgcagctatacctgaggggttggggctcctgcctgctcctggcccccaagagcacagggatgcctggtccacagccatggtttgggtggctgcagctgtgcccgggaggccgggactcctacctgcttctggcccacaagagcacagggatgcctgggtccacagctag

SEQ ID NO: 1635 - DNA, 1542 bp, Homo sapiens
  SIMILAR (2038)..(2541): 941254mologous to Homo sapiens NAG13,accession number AF194537,Smith-Waterman Score=815.
atggcagaaggcaaggaggagcaagtcacattttacatggatggcagcagacaaaaagagagacagagtttgtgcagggaaactctgcctcataagccatcagatatcgtgaggcattgtgccaaggtcagtgcttacaggcacataaataacggacacaaagtgattgctgctacaagagagaaacgtttaaaaaaaaaagctatttatgcagagaaggagcaacaggatggaaggctggaggaatcaggaaaaggtcaacagggaaggagacatctggctggttctttacggatgtctgccaattgcagagaggacaagggcagagatgcttacacagtcattgatgttgcctacaatcctgatgttcttcatgcagcagaaaaggaccaagtgaaaaaaaatcagttaattcagatggccatgaaatgcattgaggagaaattccagttcaccctctcacactcttaccatattaccaaatttagaataaaaggaagcattcaaagaatgaaacaaaatctgatgggaatccaaactgattccatagatttaagagaaaaaatgagaagggaactaactcttggacagatacgaagcagtactatgagcaatccagatcactttcctcaactgttactgccaaaagaccaagtttcaggcaaagcagtgtgtctgatagaagagatttccagtactgaaatccaggtggagatgaagatgccagcctatgaactaaaaattgtgcatgatcacagtgagaaacctctgaaaattgagttgaaagttgaattacctggtattaattctgtctctctctgtgaccttagtgtttctgagcaacagctgcaggcctatgtggcctgggtgaatgcacagctgaagaagaggccagcagtgaagcctgtgcaggacctgcgacaagatctccgggatggggtgatcctggcatatctcatcgagattgttggcccctctggaacactcctgccccgtagtgcccctcgtccccgctccgtagagaaagagcgtgcgtgccgcgcatttctggcctggggagcgggtggagtaaacctgcgggaaccattttacgacaacgtgcggctgtgcggtgtggctgacggcaacgccgctgctcttggagagaatgaggtaatgcattctgaagcaacccagatgtcaccatctgatctaactatatttggtttgcagaaggaactgctgaaatgtaaacaagaagccagaaacttacaggggataaagatcaccacatgtcaaaagaacaccaactggggactttcattcaacagacagcacttgacacctatgatacagcttggatgtctgtcccctccaaatctcatgctgaaatatgatccccctgacttccgtttccgggtcagagccatggtggtggcaacttcaagccctgctaaccccatggtgttctttgatgtcagcaatggcagtcaggaagttggccgcacaaagatcgagctctctgcagacgttgtgcctaagacgaccgagaactttgggtag

SEQ ID NO: 1636 - DNA, 849 bp, Homo sapiens
  SIMILAR (382)..(474): 671254mologous to Homo sapiens Human secreted protein fragment encoded from gene 42,accession number Y07785,Smith- Waterman Score=101.
atggctgtggaccaggcatccctgtgctcttgggggccaggagcaggcaggagccccaacccctcaggtatagctgcagctgcagctgcccaagccacagctgtggacccaggcatcgctgcactctcaggggctaggcttggaaatgcttgctcctgctgcctggcctctcccgactccctgcacctgctccgatcttggagcaaagttgaggccaagcccgggcactgccacaacctggctggcccatcaaaaccccagactcaaccagacttggaaaatgatgggacgacctgcctgcggagaggagctacccactccagggtctcctccctgctgaatggcaacaagaaggagagaacagaggagagaagagctgcagagagaagagctccctttggggagcccagacctaggagctccccaagccagggctgtgacaccctcttttgggctctgtggttcttggagtctccaagcttccaggcgccaccacattccctggtgccagctgtggaagctgcttgcagagaccctctgaagcttggggttcagcaacagctgcaggcctatgtggcctgggtgaatgcacagctgaagaagaggccagcagtgaagcctgtgcaggacctgcgacaagatctccgggatggggtgatcctggcatatctcatcgagattgttgatcatgagagggacactaaggagctacagcaaagccaactattggacaaagggccaaagcagatactgggaatgggtggaggatcagtgaggcctctcaaggaggatcttgcaggcatccagtcagctctgaaggacaacggggtcccgagaaggggggtctag

SEQ ID NO: 1637 - DNA, 684 bp, Homo sapiens
  SIMILAR (290)..(481): 321254mologous to Homo sapiens high-sulpher keratin,accession number X63755,Smith-Waterman Score=83.
atggtggcggctatggtggcagcggctgcgatcgatccgaaggggcccctccacgcaccacgcagagcagaggagggcgtggtgtcttgcaggccggggcgcaggcgctggcttttgaatatccctttaaagactaaaggtaagcaggtagggaagcgtaagaagggagtacctggagagattccccagtccagggccattgccattttccaggcagtgaccaaggtttctccttgtatggttcccatgaaggtcatcaatgccaagctcgatggcttttactcattccccatctttgtcggcactgatctgttgatgctgcagtcgaggagctttagcttagagaggttaaatagcatcctcaaagtcacccaggtcatgctctgcttctggaggggctgggatgcagcatgggagtgtgacctcctgcgcacggactgcacgggccgcctcgcagccggcatgctgttccagttcctgcaggccaccgcccaggaagaagggatctttgagtgtgcagacccaaagcttgccatcagtgctatctggaccttcagagacctaggggttctgcagcagacgccgagccctgcaggccccaggctccacctgtcccctacttttgccagcctggacaatcaggaaaaactagaacagttcatccggcagttcacttgtagctag

SEQ ID NO: 1638 - DNA, 318 bp, Homo sapiens
  SIMILAR (559)..(1164): 891254mologous to Cloning vector pSacBII SacB,accession number U09128,Smith-Waterman Score=955.
atgccttcccgcgggcaccctcagctcccctcaggctgggcccgcaagccccaggcttcggctactccggacaaggagcgggtgcgcggactgagaacaggcctggccctaaccctaacagcagccgcagctcatctcttccgtaaggaagctggaacccagggcttcctgttcctcaccgccacaatagagtcccgccccacttccggcgacgtaatccaatccgaggagctcttcctccccgggagcccgatggaaatccggatacctgaaaacgagccggagagacttgattgggccattcacgcctcaggatga

SEQ ID NO: 1639 - DNA, 531 bp, Homo sapiens
atgattatcatccctaaaaacctcaacatgtgtgctcttcagagcaaaccagaatctagaggatttggagaactgtcacaaagaggaaatgtaaaattcaatgttgagaccttgtgcagccatcagaaaaaaatatcaagactttctgctgccatacatcagctagatatatcagatattcgaccactcacggtgttgctgactctttgtataacattggcacttctgatgaggggggcacaacccgggatgaactcaggcaagattccatacagaatgtttattcctaatagccatagtgactcagaactcatgtcattccaagatagtgtaagacacaggcgaggtggctttcaaacttttgactgtgactcacagcaagaaacattttggacctggagcattggtaagcgtcacactgccaaagtgagagctgctggagaactcataatcccaggaacgcctcttctactctccgagtaccccagtgaccagagtgagagaagctctgaacgagggcacgcggcttga

SEQ ID NO: 1640 - DNA, 393 bp, Homo sapiens
  SIMILAR (72)..(43): 601254mologous to Homo sapiens potential tumor suppressor,accession number X65705,Smith-Waterman Score=44.
atggtcacggccacttctcttgcaccctccacacaaccctgtgccgtaggcgctgctgtttccccagcagcaataaccagagagaagggccaatcatcagatctcacctccaagcgaataaaaaccaagaaaagtacaggaagtagcagcaaccaggagggcaaacgccctggatgttccatgaacctgcagcgagccgagtgccactgccaagttccaggggccaccactgagtcactgcccgaggggatggctgcccatgagtgccgggaccaggagccctctggatggccgccctggctgctggcttgtcccttggaatcagatggaccaattccaccagtgttccagagaaatgaacaacacgtcctcccgcaaaaggaccctgagtag

SEQ ID NO: 1641 - DNA, 249 bp, Homo sapiens
  SIMILAR (15)..(113): 301254mologous to Dengue virus type 2 nonstructural protein,accession number U19778,Smith-Waterman Score=62.
atgacggccattatcatgactgaggtgtatgcagctgtcggggattacggcgacttcagaatttctggtgggcagggctcaaaggcagcaaatcacactggaagtcgagggttctgcatcgcctcgaacccgcaggccgtggcgggttctcctgaggaagcagggactggggtgcagggtgaagctgctcgtgccggccagcgcctgtgatcggactccaggaaaggcggggagcctgccggctactga

SEQ ID NO: 1642 - DNA, 498 bp, Homo sapiens
  SIMILAR (118)..(219): 411254mologous to Homo sapiens FT002,accession number AF167351,Smith-Waterman Score=61.
atgaggacaggtactcaaagaacacaaattgatcaggtggtagtatttgccttcagagttgggcatgcagccttcatcacattttgtgacagaacagagggaccgcctgcagttctgagactgcacgtggctgtccaggtgctgcaaattctcgacacagactccaggaggcgagtatctccaggacggccggggctgcggaagccctggagcagcttctatactttagagctttcatggcacaaatgccatgaaagcttgttaaaaacgacccgcgtaccccccttaggtggcaggtctcaggtgtggcccaagtttcaaggtgaacaagctcgtttcactacagggaagtttgaagggtgtccaccaatctggatttcctactccttcacaccagaaaagggtgataatactgcccttactaggccctggaactcagattacatgacagtgagtgtggctctaaataccacctatgtgcttatgactcctaaatga

SEQ ID NO: 1643 - DNA, 471 bp, Homo sapiens
  SIMILAR (5305)..(1577): 1001254mologous to Homo sapiens KIAA0433,accession number AB007893,Smith-Waterman Score=6491.
atgacctccggggccagcctggtcctggccctgcctctgcagccccacctggcagccaggcctgtccatgcttatcagtgcctgtgtttgctcagcatggggtctgagtcctccattgcatcctctttatcctccagcaaacagagagcatggagaaggcaccacggccttaactaccttgtgaagagtgacatcaccaaggagatgcctgcgtccaacaaacctagcattctccagagccccgtgcctgaccagtgcttggagcccatatgtgcttgtgtttgtgtggccgccagtctaggacccaacttgtcttgccaaaggtccaagttcctgagccccagcctgaccccggctctgacaccaagctcagagtggcctttgtggctcattggcaagattcagtctcttccacttctgtacattgccattgtcctcactgaggtctgggtgcatggagagcagatatga

SEQ ID NO: 1644 - DNA, 497 bp, Homo sapiens
  SIMILAR (352)..(465): 891254mologous to Homo sapiens CTP:phosphocholine cytidylyltransferase,accession number L28957,Smith-Waterman Score= 185.
atggggctgcagttgggagccatcacccgctgggggctcacagtgagtgcagcctcggtcatgggctctgctgacgcacctggggaaggagacggcagcccgcctctgatggctcgggctgcactgggggagatgttgctgatggcccctccagatgtgcaggctgcgtccctgctggctgtgctgctgctgctgctggagcgcggcatgttctcctcaccctccccgcccccggcgctgttagagaaagtcttccagtacattgacctccatcaggatgaatttgtgcagactcccaatgtcatgtctttgaattttctggaagaacaacacagcatttttgaaaatgtgattcctgatcattctgcagctgcccggatggtcagagtcttccaaatacctcccatcatcctggccgaattggggagcgatcccacgaaaggcaccgtgtgcttctacggccacttggacgtgcagcctgctgaccggggcgatgg

SEQ ID NO: 1645 - DNA, 643 bp, Homo sapiens
  SIMILAR (22)..(1266): 971254mologous to Homo sapiens putative 8-hydroxyguanine DNA glycosylase,accession number AF176815,Smith-Waterman Score=2198.
cggacgcgtgggcgtatttgcgcgtatgagatgcattgtctcttcctctggagttgagctgaatgaatacctccgaagccgttttgttctccaaatgggaatagctccactataccagcctcggtttccttccgggggacaacgtgggtcagggcacagagagatatttaatgtcaccctcttggggctttcatgggactccctctgccacattttttggaggttgggaaagttgctagaggcttcaaaactccagcctaatggatcccaaactcgggagaatggctgcgtccctgctggctgtgctgctgctgctgctgctggagcgcggcatgttctcctcaccctccccgcccccggcgctgttagagaaagtcttccagtacattgacctccatcaggatgaatttgtgcagacgctgaaggagtgggtggccatcgagaagcgactctgtccagcctgtgcctcgcttcagacaagagctcttcaaaatgatggccgtggctgcgggacacgctgcaccgcctgggggggcccgtttggcctcggtggacatgggtcctcagcagctgcccgatggtcagagtcttccaatacctcccgtcatcctggccgaactggggagcgatcccacgaaaggca

SEQ ID NO: 1646 - DNA, 789 bp, Homo sapiens
  SIMILAR (523)..(810): 511254mologous to Homo sapiens triple LIM domain protein,accession number AJ011654,Smith-Waterman Score=260.
atggggcgcgagcgcgatccgagcggctggacctggctgctccgctgtgccgcggccgcttgcgccctacttctgggctcccagcgccaggaaacccagctgctcctctcggagcactcggaccctgacattgagcaccgagttaggggagaaccaaaaaggactaccaggtggttaggtgttgagtgttggaggcaaggagtaattaacattgagacaaaagctcaagaacaactccagcccaaggggaaaaaggtttccagtcttttgaccgcgcttccggggtctatagatgagctcagtttgaaacgagatgtaaaggagtcgatttctttgccggcggttcccttccaaattgagttacttcttataagcaaaattaatatgcaaacaagactgctgcagctgccgctgaaattcgctgtggccgctgcctcttcccgctttaatcccagacctccagtcattgggcagctcctcagaggcaagaagtcaacaccatggcaacccgacaagcctatcaaatcaccggctggcgtgacagcagcaacactgcaggcaggagtgggctgggcggaagagcagagtggccactgcgctcaggtacacagtctgggagtggacagcagctgctggtctccacgttctggctacacatatgtgcaccacccagtccatacccctaccttatgtgccctagtaggttctggaggagaaaggggaggaggagaaggagagaagcatataggcttggaggaacaggaaccgcagaaaagagttttaaactaa

SEQ ID NO: 1647 - DNA, 444 bp, Homo sapiens
  SIMILAR (192)..(320): 341254mologous to Homo sapiens Fragment of human secreted protein encoded by gene 89,accession number Y02883,Smith-Waterman Score=71.
atgaaaactgctgctggagctccagacatcacatccatgtaccaagaaacagaaaagcagaaggtgcctctgcagcagcccctgcacctcaaccccttttcgcagccaactcccatggctcctcacggaaagggagctcagtggttcctactccaggacacttccccgagacttggcaaggtttgcaccattctgagacccgcacatcagacctccctgccagcctcccgcagccgccctggcttcagccgcccacctggcctgagcgctcagcacgtggactcgagctggctctgcacccagctcagaacacagctctcaactgtaagcatcagcaccaccccaagcctgaccattttctcacttactcccctttttgtaacatatgcagagttggagcgaacacctcagagaaaaagaggaaaagaaagagaagaaagttga

SEQ ID NO: 1648 - DNA, 465 bp, Homo sapiens
atgaaagcaggcagtttgacggctgtgttcaccattgcattgcccagggcctacaagagcaaccgacatatagtagatgctcaaatatttacttacacggatggggctctgccacaggcattggctataagaaggttggtctctcttagccatacgttgcgacagcaacaggaagagaaagatgcggcctcgttaaagcccattgggaaatgcacttctggtataggaacaaagaacaacaacagaaaaacccactcctttaaaggagcgagcctcagtgctttgaacgcctcctgctccatcacagtgactgctcaaggcaggacacctgatcctatcggaatccacccacggtctcctttagatgtgaagtgggaaacaaaggaatgggaagtgaaaggaaagataaattgggcagggaaatttgggaaggccatgaaaaggctctcgagctttgaaaattag

SEQ ID NO: 1649 - DNA, 948 bp, Homo sapiens
  SIMILAR (8)..(331): 691254mologous to Homo sapiens Human protein clone HP10531,accession number Y94896,Smith-Waterman Score=376.
atgtgctgggaaggggagcccagaggaggcctgggcgagcagcaaagcttccctgaagtcacgtctgagctgagagctgagcagcagcctgacctgaccatgcaaggagtggatggcagttccgagtcgatggagcagtgtgtgcaaaggccaggaggcagaggcgaactctgtgcagataagaaccagccgctcaaccaggataagggacttgccctactgcggataagcagcagcttcggcctgactccagatcccaacgttgtggaagccggaacgccccgagaacaggcggagagcggagggagcaccgcagggcgccggccaggccacggactgcctgggcacaagtggtcctgccagtgtgtgtcccgtagcaaccccgatggctctgagacaagaaactcaagggtcaagttcatggaaccttctgcaggaattgagagtgaagtggagagagagtggtttccaggccagaccacgggtgcatcattccgcatccccatctgcaaaaatgagggtgctcctgccttccctgctggcacatgggacaccggggcaaccgtgagcctggccaaaaggcttttggatgccaagagcatgtggtcctggggaccaccctacagaggccagggcaggatcatcgccacctccatctccgttcctcacgaggaggtccacagtttctgtgtgcaacaggctggccctgtctgggagctgggcctgctggcagtttcctggtctatgaacatgggcctggctctttcccacttgcagggtgatgagaactcatccgtcgtcatccaccggagatcccagacccagaccccatcgaaagctccagggaacaagctgggcccagctttaaatgaactgcaggaatctagaggcccagctgcaggggccatctggggcttccctccaccagtcacagcagctgtttgttga

SEQ ID NO: 1650 - DNA, 401 bp, Homo sapiens
  SIMILAR (94)..(369): 331254mologous to Borrelia turicatae repeat motif protein bdrA4-,accession number AF128447,Smith-Waterman Score=81.
aaatacttattgagtacctgaacatgtcgacccatgttctagatgttgaagatgggaaaaacaaagttcccaccttcagagatattatagatgatattcagcacattttcctcacagcagccagagtgatcctactaaagagtaaacccaagcatgccacccccctgcttggtggcttccactgcacttggactcgcatccacacttactctgacgtgctccctctccaggctcccctccttgtttgccatgcttgtcagattgaacaccttcagttcctcaaacatgccgtattctcctcttctgtacaggctcttcaagacctccacttgtctcatagaaagatccttaaacgtccagtctcagctaaaacatctcctcctcagaggggccttccctga

SEQ ID NO: 1651 - DNA, 483 bp, Homo sapiens
  SIMILAR (4)..(303): 271254mologous to Mus musculus jerky,accession number U35730,Smith-Waterman Score=115.
tcattgttgcaaggcaagatccagaggtacaagcaacaaatggaaatgctgaaaagcttcaaaggaggagggcaaagatccccaaagaggtttggtttaagaaatgtcaagataacaggagatgcagcttctgccaaccaagaggcagcagatgagttcccaggtgccattaagaaaataattgaagagaaaggatacctacctgaacaggttttcaatgtagacgaaagtgccctattctgggaaaaaaatgccacaaaggacattagtaaggaagagaaggaatcaccaggatttaagagaaaactgtgttcagatgttgtgcatgacttcccagaatttacgacagagcctatcaaggaaaccatgaaagagaccgcagatatggcaaaaaggagcaggtggggtggggtgggtaaagggtttcaagatatggatcttggagaaattcaaaagctaatagacaccacaccagaggaataa

SEQ ID NO: 1652 - DNA, 1123 bp, Homo sapiens
  SIMILAR (626)..(895): 251254mologous to Simian immunodeficiency virus rev,accession number L40990,Smith-Waterman Score=73.
atcctgtgtcatttattcttgaggaaaagacatggaagtataattttagacccattcctatggcaagaaaccctcataaatcattctgtctactcttccttccactcccgatgtcgcctaggcaactttacaggtacactgtttctgctgtactgggcatctggctctgctgaggagtggagctgagcacattctttcctcagttgtggtctgggaaactatactggcgcaaactgtattggtgggaacaatgcagtgttcagtcttcatggcaccttctcccttgctggagggaggccatctgtcaaccttccctgatatcatgaaggaccatccaacgcccagtcacacacaaaccttaataaccctcaaggacaagtggagcaagatctcagacgatctgttcccttttagttacaggaaacttgataatgaagatctccaccctggtcaagaacagaggaaagacctaatgcttaaaacaatacttcaagaaatgttcaacattccacgagaacaatatccacgaagctggatgcttcctgccctcaaatattggactccaagttcttcagtattgagactcagactggctgttcttgctcaagcttgcagacagcctactgtgggaccttgtgatcgtccagtttctggaatgtggaaattgctcaatcaacagttgctgactgaagggtggccagaaggaggtggcctgctgagacccaagggactggcacagtggagggctgggatgaggataaagcagctcaaatttggcagctcaaagctgtggcaagatccagaggtacaagcaacaaatggaaatgctgaaaagcttcaaaggaggagggcaaagatccccgtgagtaacagagctgacttccctaacaagagtagtccgtgtttaactctggcaccttcgagagcatcgaaaaacactagaaaactgtgttcagatgttgtgcatgacttcccagaatttacgacagagcctatcaaggaaaccatgaaagagaccgcagatatggcaaaaaggagcaggtggggtggggtgggtaaagggtttcaagatatggatcttggagaaattcaaaagctaatagacaccacaccagaggaataa

SEQ ID NO: 1653 - DNA, 177 bp, Homo sapiens
  SIMILAR (61)..(153): 511254mologous to Sus scrofa myeloid DAP12-associating lectin short form,accession number AF285449,Smith-Waterman Score=69.
atggcagaagagtatgagatagccaatatgctacagcaagcttttgagatggtggcaggtactcttgccattgagaattctgcagaaaccttgaaacatcttcagaacatcaccacactgaataaaagtatcattcaaatgacctattatccccagaccatgaatggaactttctga

SEQ ID NO: 1654 - DNA, 249 bp, Homo sapiens
  SIMILAR (198)..(154): 461254mologous to Homo sapiens CAP37 protein coding sequence,accession number R41924,Smith-Waterman Score=40.
atgggcagttccctcacaacaaagtatctggccccagatgtcaaggttggcagtgccaatgttgaggccctctgggtcctctatcttcacttccaagtgaatgcgggaaattcctggattaaaaactatgcttatgccgaacaatctaaattcaatccccccaaggtgctgaagaagtccagcacagaggtgcggaggagaggccagccctctttggagctcagcagttcagcgtctttggacagctag

SEQ ID NO: 1655 - DNA, 1359 bp, Homo sapiens
  SIMILAR (30)..(632): 651254mologous to Homo sapiens Aop1_Human, MER5(Aop1_Mouse)- like protein,accession number D49396,Smith-Waterman Score=539.
atgtatttgtttctcaataggtaacattcaggttgcttccaaattttcagtctaataaagaagaatgcagacatctttgaacctttctcagataaatctcttagcacagattgttaagaagcagaattaccagatcaagggtatgggcacttccaggctgattcgtgttgacaaaacacaaacttggagatttacactcaacacggccttctatgagggcgattatgtcactacttcctcatcggaagcagatattattgtttctcagatacttgcaccaggatggacaggcccaaatttgtggccttattaactgtggtgccctaggaagggaatgaaggaatgttttcccgaacgagtctttctgatggcagaagtggggaagcaggtgctggaggcaggacccattcacttcagctccaggaacacaggtgccatgcacagcaaaaccagctgtgttattgacacttttctcatgtcagactccattctgggtgtggggttagaggcaggcagaaggggtgcttaagccaactcagcctgagttagttcaaacggtgaagccagcaagaggagtggcctgggtaggtaatgcctccctccagggcttcatccagagaaggatcaggggaggctccttccaaatgcaaggctttgggatggttcttgccttgctttttttgttgcaactcttacttcgtggatcttgtcttagcttacttctcgttttggtggaaacaccttgcttttatcatctccagagaataaatctgttctctttaagctcatctctctgggaagaggctgtgttcacgtccagatgtcctgcattgcagggccagacccaaccacagccagcgtgaacacgcttcaaggctgcaggggactggggtatcaggatccagcactgaggaaaagcaggggacccacttggggcactaatgctctgaagtgagtggaataaagcaggtcactcttcaaagacctctgggttccagccaagccaccccagtgctggggaactctgatagccaatcatcacgtctgtgtaattctcccttctcagagagggctgacaggagcgctttcagccatcttatcccacccttcaagtgagctatacgaggaaggaaaatcagaacgggtaaatgacagcaacaatcctggcctctctctgctgagctcttagggtaacattcccctgtgtcctgcctcaaactcaggaagtccaaaagtcactaaatcatcttctccacctcacctgcttaattttcactactagtttcctctttcttcatcttactactgttatttcctttaggggaaagtgaaagcaaagaaaagcagccacatctgtca

SEQ ID NO: 1656 - DNA, 564 bp, Homo sapiens
  SIMILAR (172)..(11): 421254mologous to Homo sapiens A human prostate specific antigen variant polypeptide,accession number B08445,Smith-Waterman Score=71.
atgggacgtgtgggagaaaatgatccaatagaaagggagatgctggtgatggatgcaggagaagggaaaattgcagaagagaagtccttggtagatgagaaggagtggggagcttggcctcagcagaaggcgagtttgtgttacaacttgttggaggaaggacttccccctttctcttgtccctttagctttccctttttcgataaacgtctgttgaacacctacccgtggcaggtattgattgggctttgtgctgggaatatggctgcagacaaggcaggaggattcacatctatcctccctcaagcctgcagggacagtactgaacttccccctaaccacagggaagggaaggatagagctacagaaatgatagcaggccaagatcccattggtgtggagtccctgaaatggggtcatgaggcactggataccaagcatatcctgaagtgcactggattgcactgtttagagcctcctgtccctgctggggaggagctttgtacagtaactaccttggttcatggatcttctcacccagtgattctcaaaatgaactggtga

SEQ ID NO: 1657 - DNA, 1359 bp, Homo sapiens; identical to SEQ ID NO: 1655
  SIMILAR (853)..(794): 431254mologous to Homo sapiens Human secreted protein, SEQ ID NO: 4506,accession number G00425,Smith-Waterman Score=57.

SEQ ID NO: 1658 - DNA, 1743 bp, Homo sapiens
  SIMILAR (1)..(702): 921254mologous to Homo sapiens putative p150,accession number U93574,Smith-Waterman Score=1085.
atgattatctcaatagatgcagagaaggcctttgacaaaattcaacagcccttcatgctaaaaactctcaataaattagggattgatgggacgtatctcaaaataataagagctatctatggcaaacccacagccaatatcatactgaatgggcaaaaactggaagcattccctttgaaaactggcacaagacagggatgccctctctcatcactcctattcaacatagtgttggaacttctggccagggcaatcaggcaggagaaggaaataaagggtattcagttaggaaaagaggaagtcaaattgtccttgtttgcagatggcatgattgtatatctagcaaaccccatcgtctcagcccaaagtctccttaagctgataagcaacttcagcaaagtctcaggatacaaaatcaatgtgcaaaaatcacaagcattcttatacgccaataacagacaaacagagagccaagtcatgagtgaactcccattcacaattgcttcaaagagaataaaatacctaggaatcgaacttacaagggatgtgaaggacctcttcaaggagaattacaaaccactgctcaatgaaataaaagaggatacaaacaaatggaagaacattccatgctcatggataggaagaatcaatattgtgaaaatggccatactgcccaagctgggtaagaattttctttgtataaatggtaaatccaggaaagagtacaagtttttgatctgtcactttcaaaactgccaagcacctcagcatttctatgagctttttagatcttctgccttgtcccaatctgaggacgctgaggaagagcttgcaagaaaagacggtctggagtggacctccaagcaaactccagcagacctgcagcagaggggcttaactgttagaagaaaaactaacaaacagaaaggaatagcatcaacatcaacaaaaaggatgtccatgcaaaaaccccatccaaacgtccctaacatcaaagaccaaagaattaggaaaaactacttcaaatttcatatggaaccaaaaaaagcccatatagccaagacaatcctaagcaaaaagaacagagctggaggcatcaagctacctgatttccaactatactacgaggctacagtaatcaaaacagcatggtactggtaccaaaccagatacatagaccaatggaacagaacaaaggcctcagaaataacatcacacatctacaaccatctgatctttgacaacccttacaaaaacaagcaatggggaaaggacttcctatttaataaatgctgttgggaaaactggctagccatgtgcagaaaactgaaactggaccccttctttacaccttacacaaaaattaactcaagatggaataaagacttaaagctaagacctaaaaccataaaaaccatagaagaaaacctatgcaataccattcaggacataggcatgggcaaggacttcatgactaaaacaccaaaagcaatggcaacaaaagccaaaattgacaaatgggttctaattaaactgaagatcttctgcacagcaaaagaaactattgcgggatctggccagcagcctgcaatgcactggggctctctctttgttcccaggtggatcggcaggtcgagaaataatagacacacacaagatagtgaaagctgggtccaggggggtaaccgccttctggtcacatggtgccgccaatgcactggatataccagcatttattactaa

SEQ ID NO: 1659 - DNA, 615 bp, Homo sapiens
atgtgcaaaagtgtggaacttcctatagacttgttgagtggctttgacaaaaatgttgataatgatatgagcaacaatgtccaggctgaggtggtctcagatggagatgaggaacttgggaattggagcaaaggtgactcttatgttttagcaaagaggctggtggcattttgcccctgccctagagatttgtggtactttgaacttgaaagagatgatttagggtttttggtagaagaaatttctaagcagcaaggctttcaagagaaaagtgtggaggaagagcagagttgcaacaggctgcttacaggctatccaagtgaaagggttgatatgaaagttggagatgaagctccaggttctctaagaccttatgacagtaccttgatggaaaagttgaagtcatattttcaggcttgctttgcttctctgtgcattgttggcactgcgggaccagaaggcagtgaccccctggacccagctttcactatcttgtgtgtgtctattatttctcaacctgccgatccacctaggagcaaagagagccccattgtattgcgggctgctggccagatcctgcaatacattggtatctttacaaatttcttagactag

SEQ ID NO: 1660 - DNA, 668 bp, Homo sapiens
  SIMILAR (337)..(681): 811254mologous to Homo sapiens line-1 reverse transcriptase,accession number U83303,Smith-Waterman Score=477.
atgcacaagtatgttcgttacagcactgttcacaatagcgaagacatggaatcaactcaaatgtccatcaatgatagactggataaagaaaacatcatacatatacatcgtggaatactatgcagtcataaaaagaaacaagatcatgtcctttgcaagaacataggtgaagctggaaaccattatcctcaacaaaggaacactggaacagaaaaacaaatacagtgtgttctcacttataagtggaagctgaacaataagaacacatggacacagtcagaagaacaatatgcagtggggcctgttggagggcggatcggcaggttgacaaataatagacacacacaagatagtgaaagctgggtccggggcgggtcactgccttctggtcctggggtgccaacaatgcactgaatataccagcatttattattaagtttagtgagggcaggggtaggttagtgagggatttagggtcatttgattatgaggtgagatggtcacatggggatgaagtaattctttaacataacatctgtatgcagaagtacagtatacagagataagaatttacaatatagtgtgtgcatcagtaatttctaacagagccttaaaacagaaacacattctttccataacctatgattagcaagatattaatcagcagt

SEQ ID NO: 1661 - DNA, 618 bp, Homo sapiens
  SIMILAR (68)..(166): 411254mologous to Caprine arthritis-encephalitis virus tat protein,accession number M34092,Smith-Waterman Score=72.
atggaggctgaattttacatggtgattcttacctgcttgatcttcaggaactcagaagggtttcagattgtccatgtccagaaacaacagtgtcttttcaaaaatgagaaagtggtcgtgggctcatgcaacaggaccatccagaaccagcagtggatgtggactgagaatgaaaagctccttcatgttaaatctgcactgtgcttggccatctccaactcttcccgcggcccctcccgctcagccatcttggaccgctgttcccaggcaccccgatggacctgctatgatcaggaaggcttccttgaggtggaaaatgcctctctctttctccagaaacaaggctccagagtagtggtcaagaaggccaggaaatacctccatagctggatgaaaatagatgtcaacaaggagggaaaactggtcaatgaaagcctctgtttacaaaaagtggcaaaatctccaaatttatcagaaaagagtccttttcaggaaggaaggagtccttttcatgaaactccaaagaagcaagggacagtagctgattataagtcaatttttgagaagaatccatgcaaaacaacaattgtggatgacaaagtcttaggacagcaatag

SEQ ID NO: 1662 - DNA, 579 bp, Homo sapiens
atgaccacagagttcaggcaggctcggaaactaagtgaagtggacagagtaggcaccgaagaggacattccgcatcaacagcaaatggctgcaacttctgtgccaattgttgccaatccattttactatcttatcatcacgcctaatgttaagcttgaccaagaagctggactctttacaaagcaagaactcatctacaaggctgaaaatcatgcgggaatgtcaaagcagtttttgcttggctacaaaggaattaacaagaggatgcctccagatgcggtagactgtggatttcccaggctgccctcaaaacatcatgtgatcattactaaaataatggcatctgaatgtcctgagccaactccgaatggaaccccttgtgtcctatctgagaacaggaaagagatcagcaatcatatcagacagtcacagacaattcagaatcctgccagaccttacaatgggaactgcagccattcaattggaaaacttaaatgtggtgagagtatttggatcctgaggtgtcaggagccaagtggtggcattcgactgccaaaggactcacacaagaaacaatga

SEQ ID NO: 1663 - DNA, 502 bp, Homo sapiens
ggggggatgcacatgtcagcagaaatcctggttgtatggtaatgttatcagctgcccttttggagctcagcttgaaagtgtgactaaagctcctctggctgctataaagctagtactttagacttaaagcattgtaagcagatgcctcagagtggaaagttgcccgggcctggccgggagctagtggagcaagttacaggaagaactagtgcctagagctggggggtggagagagcacttgtgcctcaccctttgcctgtcagttgttcagcgtgtaacagttccctgcttcttaggttctttctgtacccttttataagggtgtatccccttttggtaacttactgtttgttaatttgtagtgttccctgccagtaagcttgtaacactctattgactcaccttcgggtgggagggtaggaaagggagaggcctgcctcctaaacctgggaagatggggagagagtggtaaacctgagagcccaaaaaacaaaccaaaaca

SEQ ID NO: 1664 - DNA, 544 bp, Homo sapiens
  SIMILAR (402)..(238): 301254mologous to unidentified unnamed protein product,accession number A67890,Smith-Waterman Score=62.
agaaaaaactggctgcttctaagtgcgaagccggctgggcgggctggtgccagaaagggtgtgtcttcactgccctaagatggcctttaaggtatacttttgagggctttcttgggccactttccgtaaacacaggatgcaccgatggcaactggagttgtcatccgatggtggggagaggcgtgcagattttttttgaagggacgagccctgaaggaggataggcagacccaccagggcctcagggtacaagaaacccgaaaaaggactggaggctgcaggcaatacggtggtaggaatctctgccggtttccagcgtcgcggaagcaccaaagggcggtccctgaaggaaacgaggggtcttggggctggagagcggcgcggagcgtggtgggaatatcgtcacaacgccgctgtcctacatttctgtagcgaagacttgattacccctagctattacccgtgcaggagactgggccctggaccccaaatgagccaaagtctagttgagaaaaatttacacagaataacctcggagttcatg

SEQ ID NO: 1665 - DNA, 729 bp, Homo sapiens
  SIMILAR (799)..(536): 351254mologous to Homo sapiens Human microtubule associated protein Tau mutant fragment 17,accession number Y20252,Smith- Waterman Score=90.
atggctgctatccagccccagcagcagcacatcactgcaggagcagcagttctctgcagaggagcctgttggctggcagagagccctcggcagctagaagaagtcagcacagcacaaatgttcaggctccctctcatcacagaaggccgaaaagcccattttattttgcaagacttcaaaaacgtaaaaatgatcatcaaccgcgaacaaagtccttcacctgagaagtttaggaggcaggcctctccctttcctaccctcccacccgaaggtgagtcactagagtgttacaagcttactggcagggaacactacaaattaacaaacaggaccgccctttggtgcttccgcgacgctggaaaccggcagagattcctaccaccgtattgcctgcagcctccagtcctttttcgggtttcttgtaccctgaggccctgggctcgtcccttcaaaaaaaatctgcacgcctctccccaccatcggatgacaactccagttgccatcggtgcatcctgtgtttacggaaagtggcccaagaaagccctcaaaaggcccaggaggtccgcagtgggtgcggtacggtctcggaactgggctcccccagtcgccgccgacccggcaccagaagtcgtgggcggaacggcttttccagcgcttcggcgatctcctctgggactcagggatgctggagggggctggcgctcgggtgtgattgcagccagcgcctga

SEQ ID NO: 1666 - DNA, 192 bp, Homo sapiens
  SIMILAR (67)..(126): 451254mologous to Mus musculus Ig L-chain precursor,accession number X16955,Smith-Waterman Score=46.
atggtcagctataatccaaacacaccattgagtatcacagcaaaaacagactgccgacagaggcatttactctggattctcggcggcagtcctgctgctgttgtcattgcttgcacagaagcatcaaaatttgcagaactgctgtcagcagctcggaaaaattccaggaataagagtggagcaatcttttaa

SEQ ID NO: 1667 - DNA, 474 bp, Homo sapiens
  SIMILAR (2)..(214): 1001254mologous to Homo sapiens phosphoprotein associated with GEMs,accession number AF240634,Smith-Waterman Score=367.
atggagggactggtggaggaagcacttatgtttccaaaccagtcagctgggctcatgaaacagatgacctggaaggagatatttcaacaacttggaacagtaatgatgaagatgtgtatagggcacctccaattgaccgttccatccttcccactgctccaggggctgcttgggaacccaatatcgactggagccatcagtgcagtgcttttaccacgtgaacccagcaatccagagaagttgaaaggttttggttatgctgaatttgaggacctggattccctgctcagtgccctgagtctcaatgaagagtctctaggagaatttgagtggacgttgctgatcaagcacaggataaagacaggaatgatcattcttctggctgtgatagaaatggggattatgacaaaacagatacagactgaagggctcgtcctgccacagacagctttgatgactactcacctagaagag

SEQ ID NO: 1668 - DNA, 2828 bp, Homo sapiens
  SIMILAR (13)..(1065): 971254mologous to Homo sapiens Fanconi anemia complementation group A protein,accession number X99226,Smith-Waterman Score=1814.
gattagctgccccagcagaatcaatgttgtctgggtgatgaacttatggttggattagccaatcttcctataaagcctccatagctggatccactatcagcataactaatatttgttatccatttagtgtacaacattgaacttgaaacagccaagggtaaatagtaactaaagttaacatgccattatacatgcaatttacaacttagaggagtacttaaagaaatacaaggaaaagctttccctctgccaacatggcggcctcagcaaaatagatagaataagaaggggaagactatctccctaacagactttctggctgaggatgggggtactggtggaggaagcacctatgtttccaaaccagtcagctgggctgattgaaacggatgacctggaaggagtatgtttcgaaccacttgggcacagttaacgatgacgatgtgttatagggcgccctcccaattgaaccgttcccatccttccccactgctcccacgggctgcctcgggaacccaatatcgaccggagccgtcttccccaaatcgcccaccctacactgcttttctagggaaacctaccctatggatgttacagaagagttcaattaaaggaaatcctttccgaggatttaaatattaagtgcaagtgccgtttacccacgtgaaaccccagcaatcccagagaggttgaaaggttttgggttatgctgaatttgaggaccctggattccctgcctcagtgccctgaatcttcactgaccagtctctaggtaacaggagaattctgagtggagcgttgctgatcaagcacaggatagagagagggatgatcgttcttttggccgtgatagaaatgggggttctggcaaaaaaaagtacagagtgggagggctggtctctgctacagacagctttgatgactacccccctacgaagaggtgatgatagctgtgggagacaagtatcgagttgggttttatttcagaccggtttcgggatggggtatcgggttgggtttcgggaatggccccgccaggaataggattcgatatggtggccgggatcgctatgatgaccgaggcagcagagactattgatagaggctatgattcccggataggcagtggcagaagagcattttggcagtgggtatcgcagggatgatgattacagagaaggcggggaccgctatgaagaccgatatgacagacgggatgatcggtcgtggagctccagagatgattactctcgggatgattataggcgtgatgatagaggtcccccccaaagacccaaactgaatctaaagcctcggagtactcctaaggaagatgattcctctgctagtacctcccagtccactcgagctgcttctatctttggaggggcaaagcctgttgacacagctgctagagaatgatgatttagaagaacggctacagaaggaacaagagaagttgcagcgtcagctggatgagccaaaactagaacgacggcctcgggagagacacccaagctggcgaagtgaaggaacttcaggaacgggaacggtcgaggacaggaagtgagtcatcacaaactgggacctccaccacatcttagcagaaatgcacgaaggagagagagtgagaagtctctagaaaatgaaacactcaataaaggaggaagattgccactctccaaccttctaaacctcccaaacctggatcagcccctaaaggtaatgccagccccctccaccaaaggaggaatgcttgggtgaagccgaagttcttaaccctcctgcttcgatctcaagagctcaagacacagaggcaggcagttcccttacaagtgggtgggggggaaaagttaggttcccagcttcaaccatctggaggaaaggaccaggaaggaaaaggatgaaaataatagtagatggggatgaatgccccccaaagggcccaaactgggaaactcctagcccgtggtccagggaggaccgggagggtaacagagacccactgggaaggaagtcagataggaaagatgggcaaaaaaggattcaagacttccagattcttgcacctgaagccaaagaaacctgaaggaaaattccagctttccaagttcagtttcttgcaagcaagtattgctgctctctctgtttgatggtgaagatgaaattgagggagaagattatgccgaatagacctctacatcctgtgcttttctcctagtttctctccaccctggaacattcgagagcaaatcaaaacctctatccagacaagacaaaataaaactcaacatctcctgaagacctttcttacctttttttaaaaaaaaaaacaaaaaatggaaattattttgcatgctgctgcagccttttaaagtattgaagtaactggagaattgccaatacagccagagagaaagggactacagctttttttaggaggaaaagttgtggtgcgttatgtcaccatgcagtttgccagtgtggattagtgcctaggggtcttccatttagcagaaatgggtaatgacagtgatattaatgcctgggaacctggttggggccagtaggggagggaggtagaaggaaaagtgtgagattttctaccttttagtttttattcctattgtgggcatatatgaattctcaaacattatctgaataaattttccactcttggaaaggtagatttagcctcaagttgttctagtctccaggaggctgccagcccctcctcttatttaattctgagttttgggggccagcctagagggaattcctttttttttttttttaaccccccaggggggtagttgggaatgagacta

SEQ ID NO: 1669 - DNA, 1462 bp, Homo sapiens
  SIMILAR (461)..(541): 741254mologous to Homo sapiens Human secreted protein, SEQ ID NO: 6395,accession number G02314,Smith-Waterman Score=100.
tggagcccaatgaacaatcctttttgaaagctgcctatgaaactccaacatgcagctaaggtggaaagccattgtactagaggtctacccttactcccgtgctgctatatcctgtactgatagtactttgcatcctgatgccatcatcacattgacttcttcagctctgccccgcctcgcctctctgcggcaacgcccccctcttctcgcgacaccaaccagtcccacagctcagctgcgcccccttaaggcattgccccttcctcacccacagctccgcctacccccgccccgcgaccgctgggcttgtggccaaagcctaggttccaggaaacacctgcttgtttttgagaaattttatgacaaggtacctgaaaatgtaaaagcgactttggaactggataacaggcagaagttggaacagtttggagggctcagaagaagacaggaagatgtggaaagtttggaacttcctagagacttgtggaatggctttgaccaaaatgctgatgttgatatggacaataagatgtggcttaaaggggccaacatagagctcaggtcattgcttcagagagtgcaagccccaagccttggtgggttacatgtggtattgggcctgagggtgcacagaagtcaagaattcaggtttgcaaacctctgcctagatttcaaaaaatgtatggaaatacctggaggtccagacagaggggtgctgcagggatggagccctcatggagaacctctgctagggcatgaggaagggaaatgtggggtacaagcacccacagagttcccactggggtactacctagtggagctgttagaagagggctaccatcctgcaggccccagaatggtagatccattgacagctttcaccatgcagctgaaaaagctgcagacaatgccccctcgtgaaagcagccaggagggggctgtaccctgcaaagccacaggggaggagctgcctaagaccatcggaacccacctcttgcatcagcgtgacctggatgtgagacatggagtcaatgaagatcattttggagctttaagatttgacttccgctctggatttcagacttgcattgaacgtttagcccctttgttttgtccgatttcttctatttggaatggtattcccttcaaattgtcttctattaaaatctctgaatccaccaacactcaggcacttccagtagaagtgggacaatccgtgcttcacactctgatgctggtgaacatgtatagagcttactatgctcagcactgttacatgaatttatatgtgttaactgatcaagtctttagaccactcaaggtggggctgaaagaacaggttctgttccagactttctggactgatgtccaaaagaataccaagctgatccacagaggagctactactatccctgaagcagctgctagtactgctgccacagctgcctctcacagtgactga

SEQ ID NO: 1670 - DNA, 432 bp, Homo sapiens
atgaatcatctagaaggaggaccagctggaagatggaagcaggactcttcaattggaaccaacaacgcacctgctattagttctcaaaatgcagaatgttccctacttgcagatactgtatcaaaattgatcttcctaacagacctgcatttgcaatgcctgtcttctgcacatcaacatcagtgccatgggaaactcgctatgttggtcagtttccacatcgcagcactgtcctggctgaggaaggacggagccagtcctcaagccctcagcacagctgatcctattaggaaggagctgaagagccaaggccagtgttctggaggagctggcacgaaggctggtttcccgtgcaatgtctttgagaggatggcgtggggagaagatgctttacagaaaatgagccctctgccctttctggtgtcaatttag

SEQ ID NO: 1671 - DNA, 404 bp, Homo sapiens
  SIMILAR (350)..(93): 381254mologous to Brugia malayi a2 (IV) basement membrane collagen,accession number U07224,Smith-Waterman Score=98.
gcagcgcccagcaacaagacagagctgtcctggagtccgcggctggccgcgtgagtaggtaggtcgcgcgcgggtaggcgaacgcgaactgctgggctgcaggcgggcccttcaggacccggcagcgcgagagggcagccctggagggacccagctgcagggccagggcgccatgacctttcgtagtgggggcggggacgcgctgggaaaggccgcctgtcttgtgccagccgcctcacgcccccagtctcccattttgcagatgacctcgcgagaggtcacgccgcaagtcggcaaccgggcaggaattggaatccgcgtctgcctttttcccccaagagacccagaatcctggcagccggtttcaaagctgttgtacgtacaccatacctcggggttcagaa

SEQ ID NO: 1672 - DNA, 1917 bp, Homo sapiens
  SIMILAR (1509)..(2171): 321254mologous to Mytilus edulis precollagen P,accession number AF015539,Smith-Waterman Score=134.
atggctgattctaacactaagcaggaaatatacaagatgcagcccgaagcatcttttggtgtctgccagagattaaagaaatcctcaaaaatcccagtcgtgggcagagtattacccgagtgtctgtgcttgcatttatgtcggacgaacgaggctgcggggaagaagatggcatctctgcgcttcgccaaggcattctttgtggaccacaactcccgcaccaccactttcattgatccccggctcccacttcagagcagtagacccacaagtgcgctggttcatcggcaacacctgacaaggcaacgcagccacagtgcgggtgagagtgcctaccgcatgtttacaaacaacacgtgtttgaagcacatgatcaccaaagtccggagggacacccaccactttgaacgctaccagcataaccgcgaccttgtgggattcctcaacatgttcgcgaacaaacagctagactgccgcggggatcctctagagtcgcatccgactgatcaaatgctcagctacaaccttggcagaaggctcccagctgaccacgtgagtgggtacctccagtttaaagtggaggttacgtcttctgttcatgaagaaatgctgttttctcattcagatgcctctccagaagctgttggcacaatacttggagtcaattctgtgaatggagacttaggtagcccttccgatgacgaggacatgccagggagccatcacgacagccaggtgtgctctaatgggccagtttctgaggacagtgctgccgatggaacccccaagcattcattcaggactagctccactctggaaatagacacagaggaattaacctctacgtcttcaaggacctcacctcccagaggacgtcaggattcactcaatgattacttagatgctatcgaacacaatggccactccaggccggggacagcgacctgctctgagaggtccatgggtgcctctccgaaactgaggagtagttttcccactgacacaagactcaatgccatgcttcatattgattcagatgaagaagatcacgagttccagcaagacctgggttacccatcttccttggaggaggagggaggcctgatcatgtttagcagggcatccagagctgatgatggaagcctgacatctcagacaaagctggaggacaaccctgttgagaatgaggaagcctccacacacgaagctgcttcctttgaggataagccagaaaatcttccagagcttgcagagagctccttacctgcaggcccagccccagaggaaggtagatcagccacaagtggcgcagacacagggacttccgatgcatcaggaggaagccgaagagccgtcagtgagaccgagtctctcgatcagggctctgagccttcccaggtgtcctctgaaacagaacccagtgatcctgccaggacagagagtgtgagcgaagccagcaccaggcctgagggagagagtgacctggaatgcgctgacagctcctgcaatgagagtgtgaccacgcagctgtcctctgtggacacacggtgctcctctcttgagagcgcacggtttcctgaaaccccagcctttttcttctcagggaggaggaagacggagcctgtgcaagcagagcccacccagcagtggccctgccgaagggtcgcaggaatccgtgtgcactgctggttctttacctgtggtagcaggagccctatgacagatcagctgcgaacaatgcagaagaaagggaaacataatttttctggaggacccaaagtccagatgcaagccagaccaagccccacggctgtcttacctgcaggtgtgtgcagcaccagaagccccaaaacagtgttcacatctccccatctggccgggccacactcactccctgctgtggcccagattgcctga

SEQ ID NO: 1673 - DNA, 375 bp, Homo sapiens
  SIMILAR (3)..(374): 841254mologous to Mus musculus IGFBP-like protein,accession number AB006141,Smith-Waterman Score=587.
cgctgcgcctgcgcgctcggcacacgccccgcgcgcaccccggtcacctgcacaaggcgcgcgacggcccttgcgagttcgctcctgtggtcgtcgttcctccccgaagtgttcacaacgtcaccggggcgcaggtgggcctgtcctgtgaagtgagggctgtgcctaccccagtcatcacgtggagaaaggtcacgaagtcccctgagggcacccaagcactggaggagctgcctggggaccatgtcaatatagctgtccaagtgcgagggggcccttctgaccatgaggccacggcctggattttgatcaaccccctgcgaaaggaggatgagggtgtgtaccagtgccatgcagccaacatggtgggagagg

SEQ ID NO: 1674 - DNA, 1250 bp, Homo sapiens
  SIMILAR (99)..(545): 771254mologous to Mus musculus IGFBP-like protein,accession number AB006141,Smith-Waterman Score=652.
gggcgggagcggtgactgctcggcgggcgcggagcggagcgcgaagcagaggcgccgccgctgtcccggagcaagccatgccgcgcttgtctctgctcttgccgctgctgcttctgctgctgctgccgctgctgccgccgctgtccccgagccttgggatccgcgacgtgggcggtcggcgccccaagtgtggtccgtgccggccagagggctgcccggcgcctgcgccctgcccggcgcccgggatctcggcgctcgacgagtgcggctgctgcgcccgctgcctgggagccgagggcgcgagctgcgggggccgcgccggcgggcgctgtggccccggcctggtatgcgcgagccaggccgctggggcagcgcccgagggcaccgggctctgcgtgtgcgcgcagcgcggcaccgtctgcggctccgacggtcgctcgtaccccagcgtctgcgcgctgcgcctgcgcgctcggcacacgccccgcgcgcaccccggtcacctgcacaaggcgcgcgacggcccttgcgagttcgttcctatcactcgtttttataactgctttcctcagccgttaattcacaggcaattctctttgtctccagacaggagacagagtgagaccctgtctaaaaagaagaagaagaaggaggaggaggaggaggaggaggaggagggggaggaggagaaggaagaagaaggatgcaaaagcaatttccaacacaccattaactttaaagaaatctcagagggatttgggaagattttttcattccagccatcaatgatcgatataattgacgaggcctctacactgcacgttgcccaacacgctgtggtgctggatgccagggtggctgagttgctgtccaatgcagctcctgtggtcgtcgttcctccccgaagtgttcacaacgtcaccggggcgcaggtgggcctgtcctgtgaagtgagggctgtgcctaccccagtcatcacgtggagaaaggtcacgaagtcccctgagggcacccaagcactggaggagctgcctggggaccatgtcaatatagctgtccaagtgcgagggggcccttctgaccatgaggccacggcctggattttggtgtcagacctgcatcattgtctgaaggctctccccacctactcctactccagcaccctttctccttcacaggtgtttctcctaatacatctcttgcacattggaccctatcctggtgcctgcatcttggaggccccaccctag

SEQ ID NO: 1675 - DNA, 3126 bp, Homo sapiens
  SIMILAR (2810)..(2196): 731254mologous to Homo sapiens kelch-like protein C3IP1,accession number AF190900,Smith-Waterman Score=705.
tttttttttttttttttttgcatttgagaccggtgatttttaatattttcttaaaaaaatacaaaggaaattaactctgtaggtcaatacaactcagggaaagagggaaaaatggaatttcagagcaaaggttgtttaggttatcacattcccacactcctaatacccacaaaacaagaatttcactccatgacacagaggaacattgaatggtagctcagaaatgttgatagctgaggtactgaaactaacaaaaggattttggttgtccttgattattctgtcctgtgatgaataaaatctacactaaaggacaggtaaggggaaacttatagcagaaaaaagactaagatgtaccaaaccacagcagtacaaacccactcccttggcagacatgtgctttctaaaaagaatgggggcagtaatcagggtagcctggaacctactagggctactggtcacttcccagccccatcccccaaataaatagtggtgggaagtgtaatagtggtagtagtatttgatcccaccaagaaaggctttcacccccattcaaggcaaacattgccatggctagatgaagccctggcaggtaataagatggacttgtaaaatcacaggttcttctagtttatccccagttatactggaactccccacattgatgtcatcttctctcatcccaacatttgttcactcttttatgctgtctccagtgcgaaaggacctcggggaattaaaaagatccttcaaataatatacccttctcagtcttccaggttatgtaatacttcagtgctgttctaggttcactcacaatcaaattccagtttaatccacttaattctaacttcaattctgatatacaaatcctgacctccaaaagaagtgtcagatgagtctctctctcccttgtccccaaagttttgtggggctctcccttttgtttccctctagaatggaactgtgttgcccctagctacctgtatatgagaaaaatgtagttgttcctggaaaaaaaaaaaaaaaagacttggattttaccaagtttacttaaactggtatctttccaatcatctaggctggatattgcccatatctagtaggctatactcaccttagttctttgcaacatatgaggcacaacgtacatatagtacaccaagcatgtggtaagttagaaatgacaggaaagtgctccccaaagcagtgggagaggcaatgtggtctctcacatccattcaatgtgcattctttttcctggaatatctgttacccacccttctcaggaacaagaaccaggacgacggggagtatgtgtcaaaataagtacaatcatcaactgcactggtgccctgtaatcaccccggtgcacgtaagtgagaaaacagacattcttggaaaggatttttgattctccccactaactgtccactggactggtcactagctctggatggtgctcccaacaatggtcacttctcgcggagaacacaaacaccagcatcacagcgctgggttcccatggatgtcacgacttcccagctgtcgatgatagggtcataacattcaatgctacttagcaggggaattaccatcatatcctgcaattgcatagagtctcccccgaaggcactgtgggcccctacatagcatccgtgggagtgggtcatactgggtgacagttgtccccaggaatcagtgccgaatgtttgtatgcttccaacggaagaaaggtgggctgtaccatcaaatccccccaccacataaatatggtcattccagcagggctactcctgcaccagaacgcttggtggccattggtgtaaacattaagtccaatgtcctgtatgagggtcgtatttctcaactgaatttaagatattcaagccgtcatatcctcctagacagtagatcactccactggccactacgagtccggcaccttcccgggctgtctggcatatctcccagcatgctccactggtcaatgtttggatcataggcgctccatactggtgtgacgcctgcttccattcaaagcctccagagacataggttcatatctaggcgagcccttgtcctgggtccctgcatctgactccgaagttcaggcctcagatgaaacttctttgcttcatcaaccagatccctgcattgtaaactacagcggatgaaaggctcagcatctattacatctgtgatatacctggggggttagtaggggcaatccgcacattctgtagcaggttaggcaaggattcttcccgctctttcttggcatgcttcacccagttgatgacagcctcaaagactgggctcttcagaatccacctgaatttcggtcggcacttgattagcttttccacctctccttgacttcaggaagaatgaactctttcatgctgtaccacttcaggaaaatgcttctggctaaaaacctcagctgcttgcatcaggtcaacacaattgtgggtttcagcaaaatccctaatacccaggcaattagaagggtccaactgactttctaagaactcacagcaggcttgtttcacacctttcaactgaagcagacaggctgcaggaagtatttcctgtacattctccactgtcacatgtactgtttctgtgtacacaaagtccaataaaatttccatggtagaggcaagtcaaaccttggatgtcaaacaataaggtttccccttctctgagagctcactagtgaacatggcacaagaaagtaatcactacaggcagccagcacaatccgatgggcagggaagtctttctgctctactctcaatgtcacatcacagagggtattgctcttcctgagggagttcattgaattgaggatggatttagcatgagtatttgtcattatgtctttgggggccataatgcctcccataaagcagtgcggagaaagaacaaaaataggtccttggattctgcaactctgcttctgaacccacacagccgcaccgggcccgtccccagcctgtggggatggagtgcggcgcggggctagcaggcggctcgggaggagccgaagcgccgcccagacccggaggcttctggaggctctggagccgttccgggtctggcccctgcggccgcaagctt

SEQ ID NO: 1676 - DNA, 474 bp, Homo sapiens
  SIMILAR (295)..(372): 381254mologous to Methylobacillus flagellatus putative,accession number L37434,Smith-Waterman Score=65.
atggaaatcttgacaacatgtgacaaaggacttatatttacaggtaatactagaaaatcagaaactagtaccagcgaatgcacttgtccgctggatattaactgttccctttcccactctcctccgagcccttcagatgaggaaacacagcaccacactgacagtctgcatgtcagaccgaggaaaggatatttactgtgcatctaccatataccagatatagtcgctgtgatggttaatattcagtgtcaacttgattggattgaaggatgcaaagtattgttcctgggtgtgtctgtgaaggtgttgccaaaggagattaacactggaatcagtggactgggaaaggcagacccaccctcaatctggaaaagtcaagaacaagatggtgttcttaaagagaccgacaactgccaaaatggagtcaccttcggactgctactggctaaacgaatctctctccttccttcttaa

SEQ ID NO: 1677 - DNA, 1298 bp, Homo sapiens
  SIMILAR (728)..(1075): 371254mologous to Homo sapiens Bcl-2 binding component 3,accession number U82987,Smith-Waterman Score=117.
tttttttttttttttttggggccaactgaattcaacaagtatttattgagtgtctattatgtgctagatactgagacacatcagagaacaaaaccaaaagccctgcccttgtcgggcttacagtctagcacttaccgccagttaacctgcaggctacctggagccccgggcaagtcaccgcacctctgtgccctcggtcctcagctgcccaatgggagaataagcagacctggctcaaaacatgaatcatgtgccttggtgtaactgcaagatgcccaaactgcatcccccacaacccaccacgtaggacagcagacaggggcctggaagttgatttttaatgataaatgtacaatgaagggtagggcagaggggctaagcctaactgtcctggggtgcctgtggtggtggtaaaatggcctaacacaaactgttgctgctgctgctgcttcttggtgcgtcgccttgctggcgagggtccttggccttctctgtaagctgccagtgccgtctcctctgcccttctcccttggcttccattggctgtcctcaaacaaatgttttggaaggggccgtcgcccttgcagcttaacccaagatatattcaaaaacccttccataatccttggtcaacgttgcttttgaatcggggcaaagaccaaattccctggacagctctggaagacaccaaattaagctaggaggagaccccaggcttcccggcggattttcagtcccagcccactgttgtcaagagttcacaacagtaaaacacatcgtttcctccaccaccattcagccggggcgtggttggatgttcccaggtgaaggtagtcatggtctgattctgtgggtccacaatagagtcctccaggacgttacacccgagtgagcaacattggcaaggaaaataagtcgctcgggcccagcgtgggcattcctgttggtctttggtcaggagtcgccggggacagcagtttctggtcaggggtcacctcccggtgtactatgtcttccgtcaagacatgtttgctatagggattcgggtacccgctgccagaaaggcgggaaacactttggtcccaggaactccggagcacgctctggcccaggaaatacttcaccatcgtcccggccgaagcgggctcagcacccgcgcagcatcaggggtgcggagcctgggaggcacgcgagggccgggccgggccggggctcggcgcacacccgccagccaggctcgtagctcagctcaccaccgcaccgcgcccaagcagctgccgccgccgccgccgccgcca

SEQ ID NO: 1678 - DNA, 465 bp, Homo sapiens
  SIMILAR (150)..(212): 571254mologous to Escherichia coli glutamyl-tRNA synthetase,accession number X55737,Smith-Waterman Score=69.
atgcacattgatgattcttaccaagctcagtctgtcacaaagcctattctgaaatgcttcacgtccaagtctacaatgggctttcacagcgttatgaatcccatgcaagattttgggtatgagtgcgcaatacgaggtatgattggcttctgcacctgggtggcctccgcactgccttgtacaactacatctttgctaaaagtaccaggggagcttcatcctgaggctagaggacacagatcagactccgttgtgcctggggcagcggagaatattgaggacatgctggagtgggcactgaggggcttcccgggaggctcgtccatcgggcagcgacagaacgaaaagagcagccgtcgccgaccccaggcctgccgacaccggacccagttggccctgggccggggaggcgccccaggaaggaatggggacccgggatcgcaccctcagtgcgcgatcagctga

SEQ ID NO: 1679 - DNA, 633 bp, Homo sapiens
  SIMILAR (1)..(345): 1001254mologous to Mus musculus dynactin subunit p25,accession number AF190795,Smith-Waterman Score=624.
gtcataaggccaccattcaagaagttcagcaaaggtgttgcattctttcctttacatattggagaccatgtctttattgaggaagattgtgtggtcaacgcagcacagattggttcctatgttcatgttgggaagaactgtgtgattgggcgccgatgtgtgttgaaagactgctgcaaaattcttgacaacacagtattacctccggaaactgtggttccaccattcactgtcttctcaggctgcccaggactcttctcaggggagctcccggagtgcactcaggagctgatgattgacgtcaccaagagctactaccagaagtttttgcccctgacgcaagtctagcatctctgcctcatgtcttgaatctgcttgagctctaagatgaacctggggacaaagtgagccagtcagcacctacaaagagcttttgtgtctttgacatctaccaccctcctccttttaaaaaatttctttagaatttctcaatcttcaaggctctaagtgcttaagaattcactaacagacagaccatctggagggagctgtcttcaaatgctgtgcttacaccttatctatgaacagtcactttgtaccattatctgtggaacacagaatcatctgttccca

SEQ ID NO: 1680 - DNA, 1908 bp, Homo sapiens
  SIMILAR (89)..(364): 981254mologous to Mus musculus dynactin subunit p25,accession number AF190795,Smith-Waterman Score=476.
cgtgagcggccggaagtagccggaatctctgaaagactgtccgactgactctgacaggatccggggctgagggaaggaggcggcggccatggagttgggcgagctgctctacaacaagtctgagtacatcgagacggcatctgggaacaaagtcagtcgccagtcagtgttgtgtggaagccagaacatcgttctcaatggcaagaccattgtgatgaatgactgtattatccgaggggatctggcaaatgtaagagttggacgtcattgtgttgtgaaaagtcgtagtgtcataaggccaccattcaagaagttcagcaaaggtgttgcattctttcctttacatattggagaccatgtcttttattgaggaagattgtgtggtcaacgcagcacagattgggtgctttgctgatggtctggaaaaactgtgtgattgtgagtatgatgacttggctggcaaagcagcttcactttcccttcagctcccatccctcacttcggtgggaccctgtttctgtgactaagcaggggaagaaaagtcgtcatcaaaaagaggattccctttcttggagtaatagtgcttatttatccttggatgatgatgctttcacggctccatttcatagggatggaatgctgagtttaaagcaactactgtcttttctcagtatcacagactttcagttacctgatgaagactttggacctcttaagcttgaaaaagtgaagtcctgctcagaaaaaccagtggagccctttgagtcaaaaatgtttggagagagacatcttaaagagggaagctgtatttttccagaggaactgagtcctaaacgcatggatacagaaatggaggacttagaagaggaccttattgttctaccaggaaaatcacatcccaaaaggccaaactcgcaaagccagcatacaaagacgggcctttcttcatccatattactttatactcctttaaatacggttgcgcctgatgataatgacaggcctaccacagacatgtgttcacctgctttccccatcttaggtactactccagcctttggccctcaaggctcctatgaaaaagcatctacagaagttgctggacgaacttgctgcacaccccaacttgctcatttgaaagactcagtctgtcttgccagtgatactaaacaattcgacagttcaggcagcccagcaaaaccacataccaccctgcaagtgtcaggcaggcaaggacaacctacctgtgactgtgactctgtcccgccaggaacacctccacccattgagtcattcacttttaaagaaaatcagctctgtagaaacacatgccaggagctgcataaacattccgtcgaacagccccggatcctgtcagagtcagtcggtcagtctttcagagattccggctacttccggccgctcctccacttccgctccaggtggcccactgggactcatcgacagcgcggctctcctttaggcggcctcgctccactgctcggccgtctacggctgcgcgtgcgcaggccgaatggtggatttaattggccggagtttagggcgcgcttggcccgcggccaactgggtcccggtgtcggcaggcctggggtcggcgacggctgctcttttcgttctgtcgcctgcccgatggacgagcctcccgggaagcccctcagctgtgaggagaaggaaaaggtgccgggggggcgccgatgtgtgttgaaagactgctgcaaaattcttgacaacacagtattacctccagaaactgtggttccaccattcactgtcttctcaggctgcccaggactcttctcaggggagctcccggagtgcactcaggagctgatgattgacgtcaccaagagctactaccagaagtttttgcccctgacgcaagtctag

SEQ ID NO: 1681 - DNA, 612 bp, Homo sapiens
  SIMILAR (419)..(231): 311254mologous to Pseudorabies virus glycoprotein gII,accession number U27484,Smith-Waterman Score=74.
atgaagcatggaaaggaggaagggcaagctttctgcagtgaggacagtgcctgccagagaaaaccagatcctggggaggggtttctccagaaagagaaagtcaaagctgcagggcatccttcgttccagagctggcaccttggaaggcccttggtcactgaaggcagtgatgatggtaacagcagtaaatcatcatttatggctgatgagggaaggccagggagggcaggtccatcttcagtggcattgggcctaggctgggatgctgagttatccactggagcatcagcagtacaggcaggcacagaggcagtggatccatcggaggtggcaggtgtaggatcgtctgacgatgccctgtcccttgcctcatgctccggcagggtacaggctcgcacctggggcctcatggagcatctctctaagacctctgtgtcctggtcattgaatgggcacttgagtcacccagggccattggaacaaagaggaagaatcaggccccacgatgttttgggagagtgtttagcacaggaaaatgcacagaatacatgcacgacacgggggcactgtcagtgtgggagcaatggtttacaacctccagccctaatctga

SEQ ID NO: 1682 - DNA, 496 bp, Homo sapiens
  SIMILAR (5)..(166): 741254mologous to Homo sapiens Human secreted protein, SEQ ID NO: 7878,accession number G03797,Smith-Waterman Score=209.
gagacagtctctctctgtcgcccaggctggagtgcagtggcgcaatctcggctcactgcaagctccgcctcccgggttcatgccattctcctgcctcagcctcccgagtagctgggactacaggcacccaccaccatgcccggctaatttttatttttttgtatttttagtagagacggggtttcaccgtgttagccaggatggtctcgatctcctgacctcgtgatccgcccgcctcggcctcccaaagtcctggggttacaggcgtgacgaccggtgcccggttgcattctgttattttttaaaaggaaaagatggctgagtttttaaaaaataataacaaaaacatataagcagcagctaggatcataagaaaacccaaggctggcaattgaaaagacacgtgcaggagccggctggagtccagcgctcctcttctcttctgttgatgcggtgcttctttagcctcgtgccgaattcttggcctcggggcaaa

SEQ ID NO: 1683 - DNA, 2932 bp, Homo sapiens
  SIMILAR (859)..(1110): 971254mologous to Escherichia coli acriflavine resistance protein,accession number M94248,Smith-Waterman Score=394.
gtaatgcagagataataaaacttcttaggtccataggtcttataataatttaataacctaaacatggtatacaaattcctccaaacccaataacataattatagtttcaaaaagttccccaaactttcaagttagattttattgctttgatgagtggctttaaatatgaaaagtcttgcctgtgaagggcaatccttttcccgtggactgggatctatagaaatacagaaatgtgcccaggggttcatctccctaataaccatcattcacatttctcaacctccctaataaccagccaccatgtgagaaggatccacagttactgtttatgactataattaactagtacctgggactggtcagtggagttggttgcaacctgatgctaaggatgtcaaagttgtctcggcctctgttcccagccagtaagtaattccctggcctcgggccataccccctaatcttggtcagctgattatgacaggcagacagcacagtaaataacactatatattaagaaaacccaaagcatatgtatcaatggtatatacccaacagcatcctaggaatggagagtctgtagcaagggcctccaatgtgaaggtcaacacagtcactgtgatgcgtgtatttccattttgtaaagcatgatctctggtggtcatttttatcttcctaacttattggaaaagtctcctgttttgggggcccgcccctggtcacagccagactgactcagtttccctgggaggtcccgctcgagcccgtccttcccctccctctgcccgcccccagccctcgccccaccctcggcgcccgcacatctgcctgctcagctccagacggcgcccggacccccgggcgcgggatccagccaggtgggagccccgcagatgaggtctctgaaggtgtgcctgaaccagtgccagcctgccctgtctgcagcatcggcctgatggggtggtgactgatccctcagggctccggagccatgtggcccaacggcagttccctggggccctgtttccggcccacaaacattaccctggaggagagacggctgatcgcctcgccctggttcgccgcctccttctgcgtggtgggcctggcctccaacctgctggccctgagcgtgctggcgggcgcgcggcaggggggttcgcacacgcgctcctccttcctcaccttcctctgcggcctcgtcctcaccgacttcctggggctgctggtgaccggtaccatcgtggtgtcccagcacgccgcgctcttcgagtggcacgccgtggaccctggctgccgtctctgtcgcttcatgggcgtcgtcatgatcttcttcggcctgtccccgctgctgctgggggccgccatggcctcagagcgctacctgggtatcacccggcccttctcgcgcccggcggtcgcctcgcagcgccgcgcctgggccaccgtggggctggtgtgggcggccgcgctggcgctgggcctgctgcccctgctgggcgtgggtcgctacaccgtgcaatacccggggtcctggtgcttcctgacgctgggcgccgagtccggggacgtggccttcgggctgctcttctccatgctgggcggcctctcggtcgggctgtccttcctgctgaacacggtcagcgtggccaccctgtgccacgtctaccacgggcaggaggcggcccagcagcgtccccgggactccgaggtggagatgatggctcagctcctggggatcatggtggtggccagcgtgtgttggctgccccttctggtcttcattgcccagacagtgctgcgaaacccgcctgccatgagccccgccgggcagctgtcccgcaccacggagaaggagctgctcatctacttgcgcgtggccacctggaaccagatcctggacccctgggtgtatatcctgttccgccgcgccgtgctccggcgtctccagcctcgcctcagcacccggcccaggtcgctgtccctccagccccagctcacgcagcgctccgggctgcagtaggaagtggacagagcgcccctcccgcgcctttccgcggagcccttggcccctcggacagcccatctgcctgttctgaggattcaggggctgggggtgctggatggacagtgggcatcagcagcagggttttgggttgaccccaatccaacccggggacccccaactcctccctgatccttttaccaagcactctcccttcctcggcccctttttcccatccagagctcccaccccttctctgcgtccctcccaaccccaggaagggcatgcagacattggaagagggtcttgcattgctatttttttttttagacggagtcttgctctgtcccccaggctggagtgcagtggcgcaatctcagctcactgcaacctccacctcccgggttcaagcgattctcctgcctcagcctcctgagtagctgggactataggcgcgcgccaccacgcccggctaatttttgtatttttagtagagacggggtttcaccgtgttggccaggctggtcttgaactcctgacctcaggtgattcaccagcctcagcctcccaaagtgctgggatcacaggcatgaaccaccacacctggccattttttttttttttttagacggagtctcactctgtggcccagcctggagtacagtggcacgatctcggctcactgcaacctccgcctcccgggttcaagcgattctcgtgcctcagcctcccgagcagctgggattacaggcgtaagccactgcgcccggccttgcatgctctttgaccctgaatttgacctacttgctggggtacagttgcttccttttgaacctccaacagggaaggctctgtccagaaaggattgaatgtgaaacgggggcacccccttttcttgccaaaatatatctctgcctttggttttat

SEQ ID NO: 1684 - DNA, 4281 bp, Homo sapiens
  SIMILAR (4019)..(1500): 1001254mologous to Homo sapiens Dsc1b precursor,accession number X72925,Smith-Waterman Score=4415.
gaattccgtttttttttttttttttgagacggagtttcgctcttgttgcccaggctggagtgcagtggtgcgatcatggctccctacaacatctgcctcctgggttcaagcgattcttgtgtctcagccacctgggtagctgggattacaggcaccggccaccgcacccagctaatttcttatatttttagtagagtgggggtttctcatatacattctagtccctaattctgactgcccattttcttaaagtaactgtaaatttaggctgagtcttaagttctaatacagatggtaattcaatttctggcatattcaaggtgctagtctctgtatatcagagttgcagcctaatgcatcagggctagttgtccaaatgcttggagatggcaggtggcaaccacagataaggcaggcctatgtcaaactcaagagtgaatgtttttgctaaagtatttatatttttaaaatgttagtagtaaaccatgttgagcaaacgaaacatatttgtgagcataagtcaacccatggacctcagggctgcaattctttcatggaaatcttctcatgtaatcttcataaaatctctgcccctcaatttgctatgagcttgttctggtccttatctttccaagaaccttagaagttggagtgacctaacaacaaatccacatgggcagaggtccagggactgagctctgaaggatcctgaaagaaaacaatgctgggagcactgctctgaggagtacaaaagtgtaaaagagaaatgaacttaatcacaaaactgaagattgcactgaagaatacttaaaagtcctttttaaaccactcaggtggagagaatgcaattatctggcaccaactatgttctaagaacataattctccccaagattttgaagaacatatttaattcgtacatctacaatgcaaattcatctttcattggcctctataatacccagctttcccaaatgctcttccacagcacaaaaagtaacatcagtttgcaaataaaaggtgcaagaaggtgtacagtacagtcgtgaaaagggcaatatatacatgcatataaaagagaattaacaaacaaaaccttgatttctagagaacatggaagttataccagacaaggagaatgtaggggaatctcatatttatagtacccttacctatacatgacaaagtttacctccataaacaaaaacattagcagatgctgctaacattctgcaagtaataaattcctacttatgcatctgtggatattacactattaaaaggcacatttatttcttgatgcatgtctttgctaatgtcctaaatttgggttccaggtgatctagaaactccagtccctcttcttcctgccgatcgctgcagcaacctactgagccggccagagaacctttgccttcatagttatacgaacaaacgtagtcttcacaatgtttatgctcctcatcttgtccacacaaatacaccttcttttactgtttaatttttaatcagagtgtgtcctctaatggattcttcgccaagccgaggttgggtgaaactctgccagtccgtgtacgcatatctgccagtatctccctgccccactcccttgacggactccaaggtctgatgtccacctcctttgttggaatccaaagtgtagcctcctttgaccatctcaaaactttgctgtgttttgattccctggccaccaacagtaccaacagacatgcttgtgtcacaaatgttggatgtctgcatggggagtctaatatttgcttccgttacttcttctccaggtccttcagtatttgatacaattaaattttgctgggctatgtcttctggaaaacatttcttgactgttctcttagcagtgacacagaaacatgtaaacagaatacataataacaatacagaacccaacaccatagcaagaatagcccatcttccaagtattacatttggtctaacgtctcttgtacttttatccttcattctacactcagatggagttgaacagtcacatactctcactgttaacatatgtgttgcaactaaaccatgcctgtcttttatttgaataggcacagaataatagttataatcaagattttgccgttgacgaagaatggcagttttaccatccttttcttctatgttccagtttttactggcagaattatccagaaagaattgaaaaggtggtccattttcaggtccatctggatctacaggtttcagaacagcaaaatcctcattattctgacaaatggtcacttctttgtcaatttgaggtgcgtgatcgttgtaatcatccaaatgaactactaatgttccagtgcaagatcggccaactgcatccactgcaacaactgaaatattgtattggttgttttttacaaatttggattctctatctagtacttttagagttctcaagtcgccagtgtgttgattaatttcaaaccagttatcttcatcccctaacttctgataccttaagccttcaccactggatatttccgggtccagtgctttgtatccaaggagttcttggccagctgggaagccatcttgactctgaataactttcactggagggtggcattcagggccctcatcactgtctataattttaacggtgacagttgtagtgcacattgtaggagtttgtgagctcgctgctttagagaattgtgcctcgttaatgacaccaacttgcaaaataacttggcgattgacttcatagttcaatggcttgacaacacacagcactccttcatttgtatttggatctgtgctaattatgaagtttccattttcatttccttgtaagattttgtatacagcctttgagtgaggagtgtttggcaaatcctgatcctgtaccttcattcgcaaaatctccacgtcaattctgttttcttctacttctgtaacataagaagtttctgtgaaagatggtggattgtcattttcatcctcaagtgaaatagtaattgttcctgtattaaataaaccgaaaggctgaccacccatgtctcgcacttccattattaactggtaagtatcacatttttctctatccagaaaaggtgtagttgtggtgatgacaccggtatctgggtgtatggagaaatgctttggatgatctgggatttgttgtaagattttatatttcagacgagtatggagagtgtcaggttcgtcaaggtctgtggcggtcacttttcccactgaagttccggatcggcaattttcaggcacagtaaagatagtcactctgtgttcaaaatatggggcgttatcattatcatcttcaattttgatgatcaaagggagtggatattctggtgcatagccatctgcagttgttgcatagccatataacgcaaactgttcgtatttctcacggtcaatgctccttgtacaaaagatatccccagtgtctttctctatgtaaaacaaattgaagggttctttgtccacgcctggcccacttatggaataaaagatggtgtaattctgtgcagcatcagattggatctgctgaacgtgttgtggaaatggacccaacgagttctccatcaatgaagctggaataggagcccatcgtctcttgctgcgcttgagggctgtgtctttggtatgtctcttcttaggagacttgttttctcttgctgacagtacaacttttatctcttgttgttcccgtctctgaccatctgaaaggaaaatggaaaaacttttcctttcagaagacaaaatgaggtcatgtgttgtgtaaattgagccatcttctagaattctgaaggcagggtcactggaccggattaggctggccgacttgagacactcctccagattcactttgcctacaagtgtttcagcctgaagatgagaaggaactcgaagataaactttctgacaagcatcgcaaagtaatgttaaaaccaggagagagaaaaggagctgcttacagaagatgctccctggggcagcagaggccagagccatcagaagcagtcccaatggccagggacggtggccagataacagggcagcctgggatgcacagagcggctaagaagacgctggcacttgcacagggtattctgctgccaccttgatgcagctgagcttggtttggaagacagtccggaggcaagtgataaacagtaggaggagcaacgggagaatttctttccccctattccctggccagtctccttccttccagttcaattacgtctaaatgcaaagaggctttcctacaagt

SEQ ID NO: 1685 - DNA, 1512 bp, Homo sapiens
  SIMILAR (1282)..(1566): 731254mologous to Mus musculus Pro-Pol-dUTPase polyprotein,accession number Y12713,Smith-Waterman Score=381.
agcctagcactctgacctagcagtcaacatgaaggctctcattgttctggggcttgtcctcctttctgttacggtccagggcaaggtctttgaaaggtgtgagttggccagaactctgaaaagattgggaatggatggctacaggggaatcagcctagcaaactggatgtgtttggccaaatgggagagtggttacaacacacgagctacaaactacaatgctggagacagaagcactgattatgggatatttcagatcaatagccgctactggtgtaatgatggcaaaaccccaggagcagttaatgcctgtcatttatcctgcagtgctttgctgcaagataacatcgctgatgctgtagcttgtgcaaagagggttgtccgtgatccacaaggcattagagcatgggtggcatggagaaatcgttgtcaaaacagagatgtccgtcagtatgttcaaggttgtggagtgtaactccagaattttccttcttcagctcattttgtctctctcacattaagggagtaggaattaagtgaaaggtcacactaccattatttccccttcaaacaaataatatttttacagaagcaggagcaaaatatggcctttcttctaagagatataatgttcactaatgtggttattttatattaagcctacaacatttttcagtttgcaaatagaactaatactggtgaaaatttacctaaaaccttggttatcaaatacatctccagtacattccgttcttttttttttttttttttttttttgagacagtctcgctctgtcgcccaggctggagtgcagtggcgcaatctcggctcactgcaacctccacctcccgggttcacgccattctcctgcctcagcctcccgagtagctgggattacgggcgcccgccaccacgcccggctaattttttgtatttttagtagagacagggtttcaccgtgttagccaggatggtctcgatctcctgaccttgtgatccacccacctcggcctcccaaagtgctgggattacaggcgtgacatctagcgctccggccacattcagttccttatcaaagaaataacccagaccttaattcttgaatggatacgattatagcccactatttaagtaaaaaaatattaggaaaagggttaacttaaatagatcttaggcaaaataccagctgatgaaggcatctgatgccttcatcggttcagtcatctccaaaaacagtaaaaataaccactttttgttgggcaatatgaaatttttaaaggagtagaataccaaatgatagaaacagactgcctgaattgagaattttgatttcttaaagtgtgtttctttctaaattgctgttccttaatttgattaatttaattcatgtattatgattaaatctgaggcagatgagcttacaagtattgaaataattactaattaatcacaaatgtgaagttatgcatgatgtaaaaaatacaaacattctaattaaaggctttgcaacac

SEQ ID NO: 1686 - DNA, 2215 bp, Homo sapiens
  SIMILAR (1861)..(1887): 771254mologous to Canis familiaris D4 dopamine receptor,accession number AB030235,Smith-Waterman Score=40.
ttcaatgctctacatgcacttatatttcatttaattctctctgcaacctgagatggtatagccacctcattttacagagttgaaactgaggctcagagactgaaagttaagcctgaggttgcagtcaataagaggcagagctggaactgaaacctacctgtgtctgaccaccagttcgtgttctgacggcaggctagtctgcatcacagagtgtggagtagatggtgcatgcctgctaggatgggctaggtatcactgtaggtaagaaacagccccaaactatggaaatgtacaccactgaaggctcttttcctgcccatgctgcacatcctccatggctctcctgtgccctgtgccccacatgccctcatcctgccacgagaataaaggagcagcctccatatgggagctgtcagctgctctaagagatgaaggagagggtggccagactcaatggctcccaactcttttgcctcgaggggacacgcttcacttccactcacatctcttggggcaaagcaaatcccatgggtacatccactttcaagtggcccaagagagaacctgaaatactcggtggactccattaaggctgacatatggtgtcagcctgcatgggagactgtggaggggcagaggaggcgagcggggaactgatggcaaatgacaggaggactaagccaccgcagatttgctttatcctcagccaggtggagtttgtcccagagctgcacaaaatcatcaccagcatgatgaaacagagtagacttcagaaaaagcagtttggtcagatgtaatcagcagtgaactcagaatcaattgagtggccttggagtcagtaaatctctgactgcctcagttaccccatatgatagttttgaggatgggaactttgagagagttgatttggaaggatatcaagagtaaaaattccaacatttttagttcctttaagttaaatccaggcactgtctttcctgcaagtctcctgttcctttcagattgcacaggttcgagagtgctcagattagggctggaggttgtaaactattgctcccacactgacagtgcccccgtgtcgtgcgtgtattctgcgcattttcctgtgctaaacactctcccaaaacatcgtggggcctgattcttcctctttgttccaatggccctgggtgactcaagtgcccattcaatgaccaggacacagaggtcttagagagatgctccttgaggccccaggtgcgagcctgtaccctgccggagcatgaggcaagggacagggcatcgtctgtggggatagtgggggtagtgggggtagtggtcagccagatttggtgactctacttgctcaccagatgatcctacacctgccacctccgatggaaccaaagcctctgtgcctgcctgtactgctgatgctccagtggataactcagcatcccagcctaggcccaatgccccttaaaatggacctgccccctggggacccaggagtcctacccctcagctgtccccaggagtgcccagaccctcatttttatccaggacctaggagccctacccctggccttccctcttcacccgtaaatgatgattttctgctgttaccatcatccctgccttcagtggccaagggccttccaaggggccagctttggaacaaaggatgcccttgggaggtgatgacactcaggtacacgggtgctcaacagattgcttcctcctatcctcaagacggtctttgcatgcatgcagccattggcactcccattgtgtggaagaaaaccagcccagggtcacgcagctggtcagcagcaacatagctggtctcaaatataaggtgcctgaccatgcctccatgaggggccgcctccaagggaggttgatcctggctttggggagcctttcctgggctgcacgaataacctccattgttcgagaccccaaactctgctcacatcttcctttccctatctctgcttgggctatgatcacggtgactctagcagcccttcatccaccctatagtactctctgccattcacaatatacaaaaatgtgtcttcaacccccacttacttggtctctccttttacaaccaccacaaccgaaatctagggcttttttttttttttttttctttttgagacagagtctcattccagcctgggtgacagagtgagaccccatctcaaaaacaaaacaccaaacaaaaaca

SEQ ID NO: 1687 - DNA, 14533 bp, Homo sapiens
  SIMILAR (14135)..(9516): 1001254mologous to Homo sapiens BRCA1 mutant from patient BT098,accession number R81483,Smith-Waterman Score=7947.
acaaaaataagaaatctcatgaacagctgtcagctctgaaagggagcttctgtcggaaccagttcccagggcagagcgaagttgaacatctcacaaaagtgacgggcctcagtaccagagaggtgcggaaatggttcagtgatcgtagataccactgccggaacttgaagggctccagagcgatgatacctggagatcacagttccatcatcattgactctgtgccagaggtgtccttctccccatcgtccaaggtccctgaggtaacctgcattccgacaacagccacactagcaacccacccttctgccaaacgacaatcttggcaccagactcctgacttcacaccaaccaaatacaaggagagagcccctgagcagctcagagccctggagagcagttttgcacaaaaccctcttcctcttgatgaggaactggaccgcctgagaagtgaaaccaaaatgacccgacgagaaattgatagctggttttcagagagacggaaaaaagtgaatgctgaggagaccaagaaggctgaggagaatgcctctcaggaggaagaggaggctgctgaggatgagggtggagaagaggatttggccagtgagctaagggtctctggtgaaaatggctctctggaaatgcccagcagccatatcttggcagagcgcaaagtcagccccattaaaatcaacctgaagaacctgagggtcactgaagccaatggcaggaacgagattccagggctgggtgcctgtgaccctgaggatgatgagtcaaacaaactggcagagcagctcccaggcaaagtgagctgcaaaaagactgcccagcagcggcacttgctgcggcagctctttgtccagacacagtggccaagcaaccaggactatgactccatcatggcccagacgggtctgccacggccagaggtggtgcgctggtttggagatagcaggtacgcactgaagaacggccaactcaaatggtacgaagactataagcgaggcaacttcccaccagggctactggtcattgcccctggcaaccgggagctcctgcaggactattacatgacacacaagatgctgtatgaagaggacctgcagaacctctgtgacaagacccagatgagctcccagcaggtcaagcagtggtttgctgagaaaatgggggaggagaccagagccgtggcagacacaggcagtgaggaccagggccctggtactggtgagctcacagcagttcacaaagggatgggtgacacctattcagaggtgtctgagaacagtgagtcgtgggagccccgtgtccctgaggccagctcagagccctttgacacatcgagtccccaggctggacgtcagctcgaaacagactgaatttgatctgattaatgtgaaggactggccagtctgggaaaccgcctgccacgtggaagagccaaacccgactctctgctgccacatgccgttcccatgcccggctgctgggcacctgggagagcttccagaatcctcgcagacagcccagagcctgccgctaccctcggcctgcccaccaccaagcaagcagcaagcaagatggggttctcatcagttcttcctcccacaatgtaggacctttcctttaccttccaatggataaaatagttcagagttcatagtcatattcatagacacagaatcaagcttttaacatatacatccacctctatatgttaaataaaacatcagattatcaacactgtcattacgtagaaactttggttagccaagcagtgcattgtcagttacgtcatctctaaaaatgacctgtgtctgttctctggggattgctgggtcacaggtgcccctcaccttccacagtcaggcagggaagttataggcacaaagctacgtctggaacccctttgtgccccctttgtgttcctcaaggaagcagtacctttgaagagatctctgctgcattaagtgatgaccggctacgtttcatgtcaggcttgctttgccttgtgggctactcagtgcagaacctgctgtaaccctcagttcaaaaaatggactggcaatgtgattagcgttggatgctttaccattctctttagttgttaccgtaattctgctttttcatgggagtttgaatcatggaccataacttttcagttatcagatcaactaaagaaacatttgttgttaagcctaatgtgctgacctatgtgcctgcattttttttttaatctagacatgtttggagtgagagaaagatggaaaaaagacatggggtagggacgtaagtggaaatctatagccacagcctgaagctttgaccactgcggttttcagagccctttctccacactcatttcagagcctcctatggtttgggaaggaataacacactggcccattagtaagggtgaaggctggagggatttgttgacttcttggaattatcagaggtagggtggtctttagcacaaagacttgcatgcagagatccctggcagaacacccagagtgcccgtggctcccaccccagggtctggccggtgtgctggatgcatgcccaagggtgctgggcatcactggtccttgtgaggatgcttttaaagttttatatttatgtccccaaacttggaaacaagaactctactttagcctaaccctcatgtccttttttgaattgagaaaattacaggaaatggtgcctttgaaaattagaaaacttgcttacagagctgttctaaatggtaaatcctcaatttccccaagaccggttgctctgagagtagctggtaaagaggggcgaactaaagacctgtccacctgtagctccgctcatttcttagaaaccacctgcttcccagagtgccaagccacaagtaccaggcttcgtgggcacagacacctcctgggctgggcagagtgacagtgctagaagaccccagagagagggcaagggctttgggcaagaagcactggtggtgttttagggaccgtccttctcccctacccagggaactggacctggcagggcaccgtgctcatgtggctccaaggacaagcatggcggtggccccttctgccttccaggagaggtcttgcttttgaaactaaaatcatgttcttctaaagtgtcatcttctgccctccctgtcccaatagggaccacatcttatttgtctcaaacagggacttgtgagtacttggcaagttttgcagcctatttttgtattcttaatttggggagtaaagatgtttggtctcaaaaacctttgaggaattgccaagaatggcgagtgattgctttccttcagagaacagacacttggaatttctccttttagtgtttatatacgtgcagattaatttatatatatatatatacacacacacatatacagtataaatactcatttgattctcgtaaaacgcgcatctggcgtgtgcagttgagaaacttggtggcacatgggtgttgggggagtagcctgtgttggagggacaccagtgcactaggcagctggggcggcccaggctgaagccatctccgggtgtctgagaaaccacccagtgcctcacctccagatcctgctggcatcacctccagagccctgcatgcactggctgaagagttggtctgtggagaggattttcttggttacttgtattcacggttaatttacaacccaaacagcaaaacacagttggtggacaagttcatgcaggacctacagtgacccagccatgggcactagctcatctttcaggtggaaaagtacagtgctgcctgccctggtatgtttttcttatagatgttagccctgcccaacagccagggctacactacaaaaggcaagaatgcccatgtaaggagcccagcagtctggacagatccttcttcctctgctgttggatgagagtgagtgagtatggtctggaccttatccttgaaagatgatcaaaagcgatgatgagggaggcagtcatcacgcaggtgcttaaagggacattgtaggaggtactcaagggtttgggggcaaaaccctgaatccagccagtcgtgcacagagacacacccacactagcccagtggcagtgggggatgtgggatggcagcagccaggtatgtagccctgtcacaggacagctcactgtggttttgcacactgcctaagggttaaattgtgttgttgccttcagtagaaggcatttgtgggctgcagagttgagagttgggtgaggttagtctctcctgaagaaaaagcctataaaaagtggctaatcttatcccttttctctgtatgcagttggactcgtcagagatagtaaaatcatcttttagtgtttttttgttgctgatgtcttgtacccatttgttttttacatggggttgtagatcgagttctcaaaggtgaaaccagatgatcattctgataaaggaaatttaaatttgatacatatgctttgtatattttgattacttgttttcgtttttgactataaaggagctttttttcttgctcagagtttacctgggagatttcaccagtttgactcaccatttgcagatgtgcttttgtattaaatttaaattttcacatatcacatccattctcaaggtagttatatgctggagaagaaaaatcctctagacacatgaaggcccacatagtcaagtcttccagggcaaagccagcagcccacccaggtcaggtagccagcagggctcagttcccctcactccagacacggaccctcctcttcagggtctcttgacccagcttccttctctccttttacctgagagcacagacctctctcagccagcctgcccagaccacggggggctactcccatgtagtttggggagcacttgatctcagaaaagctccattgtctgagcaaatgggcagttgtggagctcaagcctttctcctgtgctcaagtcccttccccaagcaaggcttcaacctcatctacccaccatgtagttttctctggccatttaagtggggcggcagggacatggttgggccatgccacaccagggctggtgaggcaaccagttttgattttgacagagtggctggaggaaaagtggcaatcaaggtgctgcttggtttgctctgagtgcaaatggaaccaacaggtttctgctgcaatctgtgtgttcccagtgccaggtcacaccaggaggggtggggcagggctaaccaagtggtctctgaactcaccgagcgtctgcacttggttgtgaagttaatgggagtacagagagcgtctggccttggagaggggttgagagcctcctttttggttcttcattcctgagctcttgcctgcccacaaatctgacctctttgaatggggacgcagtccttcaacagagaagtttctatggcaaagaagtttctatttagctctagatccagcagagtcatccattctaactgccctgaagtctagagcaggggagggaacccagaggctggggatgagactaggcagaccctggttaccatatggacaaggacaggggaaagcacccccttcctcaatttctgaaagttctatctttgggttcgcaggactttgaggatgataaagaacatataggtactagcttgttgttgctggtccaaagcttccacagccctgagaatttggctttcgtggctgctctggcagctgagcgaagggaggaaggcagccgctctggtggggactctaggcaccttccctgctgtccacttggataggcggtgagccccagggtactgagaggagcctgagcatttacctgccattagtgcctcttccttcaggagactggcttgaaacgtgtgttcatgtgcgcgtgcacacacacacatgagcaactgtatgtgttaatgaatagtttttcttggttaatgctttttaacttctgttcctttccgtaagtggatgattcaaaattaacgtgacttggctgggcgcagtggctcacacctgtaatcccagcactttgggaggccaagggaggcggatcacctgaggtcaggagttcgagaccagcctgatcggcatggtgaaaccccgtttctactaaaaatacaaaaattagccgggcgtggtggtgcgcgcctgtaatcccagttactcaggaggctgaggaaggagaatcacttgaacccgggaggtggaggttgcagtgagctgagatcgtgccactgcactccagcctaagaaattgagcaagaccctatctcgaaaaaataaaataataacataaagaaatgatcacaggcagaaactgtatgcacacaccgagtgtggaaaagccctcttgtggaagtcagttatttgtgtacatcagaaaattctggaaggagagaaaccttgtgaaggtactaaatatgacaacatcttcagtaacagaggatgtccccctgtacccagaatggtgcatgctgtggagataccctgcaagtagaccgaatgtgagaaagccacaggagtacatgggcctcgcggtgcatcagagttcctgccagagaggcccacaggcatgaacatggcagagtgtgaaagtcgtctgcgggaagccaggactctatgccagaaacttcacactggggagatatcctcagtgcaatcagtgtagaaatgcctctactaagaactgcttctgattctgaatcacagagttcacagtggagaaaaccacatgaatgtaaaactgtggaaaagttttcagctagaagccagagaattcacactgggagagacatgagaaaacagcaaatgcaggaaaactttcccttggagatcagagctcactgatctcagagttcatacaggagaagagccctatacaatcacgagggtggaaccgcctttggcaagaaaacacgccccattacccatgagagagctgcacaggagagaaaccctatggaataaataattctggaaagcattcagcaacaaatgaaacgtcctaatgtgcactatagagaagccctaggaacacaacaaatgtggagaaggagagtcagtagcgcaacagaaatgtttctcagaggagaagcttttaagttaattacttaaaacctgcagaagcacctagtcccacggtcaaaaccaactgcgcaccagagaagctgcatgggaaagtttgtatgttggataaagtgtggttcaccctcaaaactagctccagacatcacagactagagaatgtatactgatcttaaacagtggtcaatttaacaaatgtaaattctactcccagggacataaaattccataacttaaaccaagctttttgtaaaaactatcagtgaaaaacaaatgtgcgtgcatctgcagcccaagcctcttcctccccaggcctggcgctcagcttgcaaatggacttcccagtacctatgaggaatgaagggtttccatacccgtcctgagccatccacttgggattcaccctcaccacggccatgactctctgtcactgctcccaacctggagctcctaaacccatccccaacccgaacacaacacaaatgcacccctgctccttgttctcacatcactaacattacacacgtgtatctgaatttcttcaggtttgggggtttttttggtgtttttttgttttgtttttttgagacggaggacggagtctcgctcttgtggcccaggctggagtgcagtggcacgagtctcggctcactgcaacctctgcctccccgagttcaagcgattctcctgcctctcagcctcccgagtacctggtagctgggtttacaggcatgcaccaccgtgcccagctaactttttttggtatttttagtagagacgggggtttcaccatgttgggccaggctggtcttcgaactccgtgacctccaggtgatcccaccccgcctttggcctccccaaagtgctgggaatttacagggcatgagccaccatgcccaggtttcaagtttccttttcatttctaatacctgcctcagaatttcctccccaatgttccactccaacatttgagaactgcccaaggactattctgactttaagtcacataatcgatcccaagcactctccttccattgaagggtctgactctctgcctttgtgaacacagggttttagagaagtaaacttagggaaaccagctattctcttgaggccaagccactctgtgcttccagccctaagccaacaacagcctgaatagaaagaatagggctgataaataatgaatcagcatcttgctcaattggtggcgtttaaatggttttaaaatcttctcaggtgaaaaattaccataattttgtgctcatggcagatttccaagggagacttcaagcagaaaatctttaagggacccttgcatagccagaagtccttttcaggctgatgtacataaaatatttagtagccaggacagtagaaggactgaagagtgagaggagctcccagggcctggaaaggccactttgtaagctcattcttggggtcctgtggctctgtacctgtggctggctgcagtcagtagtggctgtgggggatctggggtatcaggtaggtgtccagctcctggcactggtagagtgctacactgtccaacacccactctcgggtcaccacaggtgcctcacacatctgcccaattgcatggaagccattgtcctctgtccaggcatctggctgcacaaccacaattgggtggacacctgtgccaagggtgaatgatgaaagctccttcaccacagaagcaccacacagctgtaccatccattccagttgatctgtgggcatgttggtgaagggcccatagcaacagatttctagccccctgaagatctttctgtcctgggattctcttgctcgctttggaccttggtggtttcttccattgaccacatctcctctgacttcaaaatcatgctcattcagcatttttctttctttaatagactgggtcacccagaaatagctaactacccattttcctcccgcaattcctagaaaatatttcagtgtccgttcacacacaaactcagcatctgttttcataacaacatgagtagtctcttcagtaattagattagttaaagtgatgtggtgttttctggcaaacttgtacacgagcataaattcttctggggtcaggccagacaccaccatggacattcttttgttgaccctttctgttgaagctgtcaattctggcttctccctgctcacactttcttccattgcattatacccagcagtatcagtagtatgagcagcagctggactctgggcagattctgcaactttcaattggggaactttcaatgcagaggttgaagatggtatgttgccaacacgagctgactctggggctctgtcttcagaaggatcagattcagggtcatcagagaagaggctgattccagattccaggtaaggggttccctctagatcttgccttggcaagtaagatgtttccgtcaaatcgtgtggcccagactcttccagctgttgctcctccacatcaacaaccttaatgagctcctcttgagatgggtagtttctattctgaagactcccagagcaactgtgcatgtaccacctatcatctaatgatgggcatttagaaggggatgacctttccactcctggttctttatttttactggtagaactatctgcagacacctcaaacttgtcagcagaaaggccttctggattctggcttatagggtattcactacttttctgtgaagttaatactgctttttctgatgtgctttgttctggatttcgcaggtcctcaagggcagaagagtcacttatgatggaagggtagctgttagaaggctggctcccatgctgttctaacacagcttctagttcagccatttcctgctggagctttatcaggttatgttgcatggtatccctctgctgagtggttaaaatgtcactctgagaggatagccctgagcagtcttcagagacgcttgtttcactctcacacccagatgctgcttcacctaagtttgaatccatgctttgctcttcttgattattttcttccaagcccgttcctctttcttcatcatctgaaaccaattccttgtcactcagaccaactccctggctttcagactgatgcctcatttgtttggaagaaccaatcaagaaaggatcctgggtgtttgtatttgcagtcaagtcttccaattcactgcactgtgaagaaaacaagctagcagaacattttgtttcctcactaaggtgatgttcctgagatgcctttgccaatattacctggttactgcagtcatttaagctattcttcaatgataataaattctcctctgtgttcttagacagacactcggtagcaacggtgctatgcctagtagactgagaaggtatattgtttactttaccaaataacaagtgttggaagcagggaagctcttcatcctcactagataagttctcttctgaggactctaatttcttggcccctcttcggtaaccctgagccaaatgtgtatgggtgaaagggctaggactcctgctaagctctcctttctggacgcttttgctaaaaacagcagaactttccttaatgtcattttcagcaaaactagtatcttcctttatttcaccatcatctaacaggtcatcaggtgtctcagaacaaacctgagatgcatgactacttcccataggctgttctaagttatctgaaatcagatatggagagaaatctgtattaacagtctgaactacttcttcatattcttgcttttttatttcaggatgcttacaattacttccaggaagactttgtttatagacctcaggttgcaaaacccctaatctaagcatagcattcaattttggccctctgtttctacctagttctgcttgaatgttttcatcactggaacctatttcattaatactggagcccacttcattagtactggaacctacttcattaatattgcttgagctggcttctttaaaaacattttctctaatgttattacggctaattgtgctcactgtacttggaatgttctcatttcccatttctctttcaggtgacattgaatgttcctcaaagttttcctctagcagatttttcttacatttagttttaacaaatgacttgatgggaaaaagtggtggtatacgatatgggttttgtaaaagtccatgtttatttggagtaatgagtccagtttcgttgcctctgaactgagatgatagacaaaacctagagcctcctttgatactacatttggcattatcaactggcttatctttctgaccaaccacaggaaagcctgcagtgatattaactgtctgtacaggcttgatattagactcattctttccttgattttcttccttttgttcacattcaaaagtgacttttggactttgtttctttaaggacccagagtgggcagagaatgttgcacattcctcttctgcatttcctggatttgaaaacggagcaaatgactggcgctttgaaaccttgaatgtattctgcaaatactgagcatcaagttcactttcttccatttctatgcttgtttcccgactgtggttaacttcatgtcccaatggatacttaaagccttctgtgtcatttctattatctttggaacaaccatgaattagtcccttggggttttcaaatgctgcacactgactcacacatttatttggttctgtttttgccttccctagagtgctaacttccagtaacgagatactttcctgagtgccataatcagtaccaggtaccaatgaaatactgctactctctacagatctttcagtttgcaaaaccctttctccacttaacatgagatctttggggtcttcagcattattagacactttaactgtttctagtttctcttctttttcttctcttggaaggctaggattgacaaattctttaagttcactggtatttgaacacttagtaaaagaaccaggtgcatttgttaacttcagctctgggaaagtatcgctgtcatgtcttttacttgtctgttcatttggcttgttactcttcttggctccagttgcaggttctttaccttccatgagttgtaggtttctgctgtgcctgactggcatttggttgtacttttttttctttatctcttcactgctagaacaactatcaatttgcaattcagtacaattaggtgggcttagatttctactgactactagttcaagcgcatgaatatgcctggtagaagacttcctcctcagcctattctttttaggtgcttttgaattgtggatatttaattcgagttccatattgcttatactgctgcttataggttcagctttcgttttgaaagcagattctttttcgagtgattctattgggttaggatttttctcattctgaatagaatcaccttttgttttattctcatgaccactattagtaatattcatcacttgaccattctgctccgtttggttagttccctgatttatcatttcaggagtcttttgaactgccaaatctgctttcttgataaaatcctcaggatgaaggcctgatgtaggtctccttttacgctttaatttatttgtgaggggacgctcttgtattatctgtggctcagtaacaaatgctcctataattagattttcagttacatggcttaagttggggaggcttgccttcttccgataggttttcccaaatattttgtcttcaatattactctctactgatttggagtgaactctttcacttttacatattaaagcctcatgaggatcactggccagtaagtctattttctctgaagaaccagaatattcatctacctcatttagaacgtccaatacatcagctactttggcatttgattcagactccccatcatgtgagtcatcagaacctaacagttcatcacttctggaaaaccactcattaactttctgaatgctgctatttagtgttatccaaggaacatcttcagtatctctaggattctctgagcatggcagtttctgcttattccattcttttctctcacacaggggatcagcattcagatctacctttttttctgtgctgggagtccgcctatcattacatgtttccttacttccagcccatctgttatgttggctccttgctaagccaggctgtttgcttttattacagaattcagccttttctacattcattctgtctttagtgagtaataaactgctgttctcatgctgtaatgagctggcatgagtatttgtgccacatggctccacatgcaagtttgaaacagaactaccctgatacttttctggatgcctctcagctgcacgcttctcagtggtgttcaaatcattattactgggttgatgatgttcagtatttgttacatccgtctcagaaaattcacaagcagccttttttgcagaatccaaactgatttcatccctggttccttgaggggtgatttgtaacaattcttgatctcccacactgcaataagttgccttattaacggtatcttcagaagaatcagatcccaattcaatgtagacagacgtcttttgaggttgtatccgctgctttgtcctcagagttctcacagttccaaggttagagagttggacactgagactggtttcctgcaaggaaggattttcgggttcactctgtagaagtcttttggcacggtttctgtagcccatactttggatgatagaaacttcatcttttagatgttcaggagagttattttccttttttgcaaaattatagctgtttgcatactccaaacctgtgtcaagctgaaaagcacaaatgattttcaatagctcttcaacaagttgactaaatctcgtactttcttgtaggctccttttggttatatcattcttacataaaggacactgtgaaggccctttcttctggttgagaagtttcagcatgcaaaatttgcaaaatatgtggtcacactttgtggagacaggttccttgatcaactccagacagatgggacactctaagattttctgcatagcattaatgacattttgtacttcttcaacgcgaagagcagataaatccatttctttctgttccaatgaaccagccggtgttttttgttttgttttgttttgttttgttttgagacagtctcgctctgtcgcccaggctggagtgcaatggcgcgatctcggctcactgcaacctccgcctcccgggttctagcgattctcctgcctcagcctcctgagtagctggagcggcaccacgcccggctaatttttgtatttttagtagagacggagtttcaccacgttggtcaggctggtctggaactcctgacctcatgaccagccgacgtttttaaagacatagtgtccccctcaaggcatattccagttcctatcacgaggattcccccacggacactcagtgcccccttcctgatcctcagcgcttccctcgcgacctacaaactgcc

SEQ ID NO: 1688 - DNA, 472 bp, Homo sapiens
  SIMILAR (7)..(369): 461254mologous to Homo sapiens KRAB zinc finger protein HFB101S,accession number AB029149,Smith-Waterman Score=238.
  misc_feature (1)...(472): n = a,t,c or g
tggggangnnnnnaatcgagatccatagcccgtgtggtggaattctttctctgctgtggatgccacttttggaatacgccaggaacatgctaaggacctggagctctctaccctggacccgttttcgggtttgcttgctctctctctctctctttctctgggctaatcgtttagaggacagtcgctcctgccaacctaatcccatgagcctgactaccttgccgggccacaggctcaaagaagcagtgtggctgccagcaccctcacgcaccatgagtcctcaccttgaccctaatcaacttgggattctcctcagagtacttagaaaggaaaaggaagacggtgactaccctgacatgatggccacccacccgagctccaggtatgaagcctgctcctctggaattactctagcggccccgccgacccacggcccacgacccaccgacccacgaatcggcccggcccccgn

SEQ ID NO: 1689 - DNA, 735 bp, Homo sapiens
  SIMILAR (988)..(530): 991254mologous to Escherichia coli alternate gene name yibK,accession number U00039,Smith-Waterman Score=805.
atgctaaggacctggagctctctaccctggacccgttttcgggtttgcttgctctctctctctctctttctctgggctaatcgtttagaggacagtcgctcctgccaacctaatcccatgagcctgactaccttgccgggccacaggctcaaagaagcagtgtggctgccagcaccctcacgggctttggcatcagttaaaatgccaacctcttgggaggatcagcctcttaaatctcccatcgtgaaagcaggttctgatagagggacaaagagagaggaggaacatgaaatcattctagagcctgttccacttcttgcccagaccctggagatggtctcccaattggtccgcatgcagctggcctctcttccctccaatctttcaacaccctgcaccatgagtcctcaccttgaccctaatcaacttgggattctcctcaaagtacttagaaaggaaaaggaagacggtgactaccctgacatgatggccacccacccgagctccaggtatgaagcctgctcctctggaattactctagagaagcctgagaaattgcggagtgggaaggtgaaggaagaagttgactcccttattgggtcagcttttcctgtcacacctcaaggtggttggcaaaggcagagctggtttggcaaggaccgggaccagaagagggatgaacaggtgtctgcaacagattcctttgaagaatactttaatggccttatgccataa

SEQ ID NO: 1690 - DNA, 677 bp, Homo sapiens
  SIMILAR (671)..(525): 361254mologous to Mus musculus Peg1/MEST protein,accession number AF017994,Smith-Waterman Score=63.
tttttttttttaacctatctaaatttaagttatttatttaagccaatctccttgcccaacaaggcaaaagggatggggagacccaagtatacccagtcattcattttgatacaaagtaaagaaaggttaaccttaaggtcccccaaaaaactttttctgggtccaatgtgccaagagtaaacggtcccaaaacccagtgcttgttgggtgcccctggtgccccgggtaagtggtcccaaaattctctttaattccatccttccgtaagcccagttgggaagtggaattccacaatgaggggttatggaatcagagtatcggttacccattcttccccaagggaaacgggcttggtgcctgatggcggagatggggggtaggccgatgaactccgggtctctccgtgctctcccgtgggtgcggactttcagggtacacatttcagcattgctgacttgccaccccgggggaagcgcgaccgaagaaaggtgaagagtcttccacatggcgaagctgagaccctacttcgccatggggcgccagctcgyacatagggccgcccccagctggtggggcggaacccgacgccaggcaagccgaagaaaccggaggacaccaccaactaccgccatttttgatctggactgccgcaagcgccctcgtgccaaaatcttggg

SEQ ID NO: 1691 - DNA, 453 bp, Homo sapiens
  SIMILAR (89)..(130): 571254mologous to Pneumocystis carinii major surface glycoprotein,accession number U17115,Smith-Waterman Score=38.
atgaatgaaagccagcgcagatctagtatcctctgcccggttaatacctgtctgaaagccgcgggccctgccccagcagcggatgccaagagcgcgagccagaggtcacagaagctcagcggggagcggggctcgcacaatgcagccagccaaaccatcaaccaaagggtataccaaagaaaatttcagaaacacaaagtctcaaaacttttacttcccaagtaccttttctcaaagcagctgctggaggatatgctccaccaaagtgaggaagtaaaacgagaaagaggaagaaacaagctccagaaaacaggggatgcgacacaggagagaagcagagggaatttccaagatgatggtaaagggaagtcacaggatgacaattgtgaagcaggccaagagatcaataagttcagactagaacaggaagacaaaggactccaaccaagatga

SEQ ID NO: 1692 - DNA, 379 bp, Homo sapiens
  SIMILAR (90)..(377): 981254mologous to Homo sapiens SIL1 protein,accession number AJ299442,Smith-Waterman Score=481.
  misc_feature (1)...(379): n = a,t,c or g
cccagagcctgccttcatctaggatggctcctctgggcatgctgcttgggctgctgatggccgcctgcttcaccttctgcctcagtcatcagccagggcaggctgtccctgcaggatcccacgtacggctgaatcttcagactggggaaagagaggcaaaactccaatatgaggacaagttccgaaataatttgaaaggcaaaaggctggatatcaacaccaacacctacacatctcaggatctcaagagtgcactggcaaaattcaaggagggggcagagatggagagttcaaaggaagacaaggcaaggcaggctgaggtaaagcggctcttccgccccattgaggaactgaagaatgactttgatgagctgaatgn

SEQ ID NO: 1693 - DNA, 627 bp, Homo sapiens
  SIMILAR (29)..(625): 1001254mologous to Homo sapiens SIL1 protein,accession number AJ299442,Smith-Waterman Score=1006.
tttcgtcggaggccgaaggtccctgactatggctccccagagcctgccttcatctaggatggctcctctgggcatgctgcttgggctgctgatggccgcctgcttcaccttctgcctcagtcatcagaacctgaaggagtttgccctgaccaacccagagaagagcagcaccaaagaaacggagagaaaagaaaccaaagccgaggaggagctggatgccgaagtcctggaggtgttccacccgacgcatgagtggcaggcccttcagccagggcaggctgtccctgcaggatcccacgtacggctgaatcttcagactggggaaagagaggcaaaactccaatatgaggacaagttccgaaataatttgaaaggcaaaaggctggatatcaacaccaacacctacacatctcaggatctcaagagtgcactggcaaaattcaaggagggggcagagatggagagttcaaaggaagacaaggcaaggcaggctgaggtaaagcggctcttccgccccattgaggaactgaagaaagactttgatgagctgaatgttgtcattgagactgacatgcagatcatggtacggctgatcaacaagttcaatagttccagctccagtttgga

SEQ ID NO: 1694 - DNA, 369 bp, Homo sapiens
  SIMILAR (254)..(643): 861254mologous to Mus musculus Zfp-29,accession number X55126,Smith-Waterman Score=572.
atgcgccctgacccggagcgccccgcgacgcggggccggcattcggccgcgacggccgtgccaggctcggcgcgtatccgcgttaccaccccctatttcaagtgccacgcaaaggccttatctgttaaagggatatttaccgagatatttacagtgctgcctggatggcctgccaaaactgcaacactagctgccaccagcattgctgcccataaaggagcagagtgcagcagtgggtacggcaggatacagcaagagctgaagacccttgtgatctctggcaacaaaggaatttctgccttacctgcatcagacaaccttttgaaatcagtaggaccatccctgaagcagctggcacagaagacctga

SEQ ID NO: 1695 - DNA, 543 bp, Homo sapiens
  SIMILAR (201)..(121): 511254mologous to Homo sapiens Protein derived from G-CSF stimulated monocyte (Clone GIG1b),accession number R47501,Smith- Waterman Score=71.
ctatggagcagtctgtccctcctggctcatctggggcaatatgagagcaaatggggctagaacaaaactggatgaaaggagaaactctggggctgctgaattcacatgccgatggtgctggcccaggagttggagaagcttcaggaggatccatccaggggaaggtggaacagttgcaggcccagctgctgtctcatgcaagaggtgatccagcagcgaagagacatatataaggtagcaaatggctgctgctttactcccctctccaaattttgcccgagaatctctcctgtgacccaccctcctttgtggctgccctgatggaaggggctcaggagcaacagccttcatggtgcccaccctctgggccagaacaacggatgccccacaactgagtttagtgcctccaagaaccacaggtgagggttctctgaggcactgtgaagaatctgatagtcgaactgaatgaagccaagtccagtctttacggaaaaatttacacaacacttccaggtgggcagattcaaagacaggatgaatcat

SEQ ID NO: 1696 - DNA, 885 bp, Homo sapiens
  SIMILAR (372)..(884): 991254mologous to Bacteriophage P1 non-essential to replication and lytic development,accession number X15639,Smith- Waterman Score=868.
tttttgtattttcttcactccactgttacattttctgtttgtatcataatgccattttttttctttttaccatatgacttcctggtggaaggtggaaacccagcattcagatgatcatttgaaacatcatcttcccctgtttgttagcttgggatctggccgtcctgcagtctttccgtgtgttgatggttgtgtgtgaagattatttgtgcatcatttagtctgcatttattcatcttgtgagctgaggattctgctaagcaccccagagatggatggaggctggcagggattcgccttcatcctgtgattcagcaatgcaggctcctccacccgtggtagcgccgtgtcaatacgtagcttctcaggtcgaaggccgtggcggcggcacttttgcccatgaattgctcgctgtggagtacgcaggctggatttctcccgcgtttcggctgaaggtaaaccagccatttatcgactatcgaaccggaagattacaacctgctattccgcagagtctccctgaagctctccgtttggctgccgacctggcagagcaaaagcaacggctggagcaaaaaatgcttatggatgcacctaaagtcgaattcgctgaacgcgttgctaccgccagcggggttctaatcggcaactatgccaaagtgctcggcctgggccaaaactatctcttcacctggttgcgtgataacggaattctgatcgcaaccggtgaacgcaggaacgtccccaaacaagaatacatatctcgtgggtatttcacccttaaagaaaccgtgatcgatacaagcaatggaagcaggatttctttcacgactcgtataaccggcaaaggtcagcagtggctgatgaagcgattgcttgatgctg

SEQ ID NO: 1697 - DNA, 597 bp, Homo sapiens
  SIMILAR (307)..(456): 321254mologous to Homo sapiens Human proinsulin analogue peptide Z,accession number W81847,Smith-Waterman Score=74.
atggttcagagggatcaaggggcctttaaaacacatcacaaggccaaccccagtgtctggccaggtgagcaccagactcatactggactcaacgtcattcctcggatttctgggcttggaaacaaggaccacaatgctcagtcgctttctggtcacatcagcttaagactgccagtggttctgtttcttgatattttggtatctgtggggatcctggaaccaatttctgtgagattttttctgatgatcatcaaacttgggtttttacatcatttaggcacttattcatccactcagtgtgctagacgcttcaacaggcaccagccaaagtgtgaaaaccaaattgtgcatctacctctccttaaccagctgcaggcctcctcacttcttgccacagcaaagcagcagcagcaaaaccctttgctagaagaaatgggaagcctgcggccttgtgaagaaggtgcttgcttcgtctttgccttctgccatgacaacatgaacattgtcgggaacatgctgctttccagacagacatatcctccagttcacctgctccttttacctcctcacaagtgtcattatgacctgcagagttaa

SEQ ID NO: 1698 - DNA, 339 bp, Homo sapiens
  SIMILAR (103)..(303): 261254mologous to Maclura mosaic virus polyprotein,accession number U58771,Smith-Waterman Score=81.
atggaagttactcgagtgaacaaatgccgagaattttctatggttttgtttggtctagggggcaaggacaccatactgttcagcgaccccactcttcctagtggacagaggtcgagatccccactgctgaagtttgtcgagcagcccactgagaacaaagcagatcccaaggatgggaaatcttggcacattgcctggtatatgggaagtctgcgaagcagtagaatagagagaaaagctcctgctttaccagatagacagttctggaggcagggtgttctggaagggatcaaagacccatatagagacccagataagccaacaggtttgagaacctga

SEQ ID NO: 1699 - DNA, 675 bp, Homo sapiens
  SIMILAR (100)..(2): 1001254mologous to Homo sapiens Protein sequence encoded by clone p199-7 (PL mutet.rsT4),accession number P93369,Smith-Waterman Score=203.
atggacgatatcccgcaagaggcccggcagtaccggcataaccaagcctatgcctacagcatccagggtgacggtgccgaggatgacgatgagcgcattgttagatttcatacacgggtcaccgtcgacagcgacacacttgcatcggatgcagcccggttaacgtgccggcacggcctgggtaaccagtgcggatgttcgactccaaacatcaaagccaacgagaggttcaggttactcctccttgaccccaaacatccagtgagtggagactggcctgttcacagagtaaaatatgtcgtctctaattcggcaaagacggtgatgactgtatatatgcaggccaattccgtaagtaaagtttcatgtaaaactaattaccggatattccaaccaccccctgtgcaggccagccgcatgcacaagggacaggatttattccccactggaagcaactggaaaactggaaaaaaatatacaaaacagcagttctcaagacattgtgtgccggcaacaaaggacagtgatgctggagagatgagaaataagcaagtctgggaccacggtcccactcgtatcgtcggtctgattattagtctgggaccacggtcccactcgtatcgtcggtctgataatcagactgggaccacggtcccactcgtatcgtcggtctga

SEQ ID NO: 1700 - DNA, 699 bp, Homo sapiens
  SIMILAR (126)..(1): 781254mologous to Homo sapiens Human secreted protein, SEQ ID NO: 7217,accession number G03136,Smith-Waterman Score=163.
atggctaaagctggaaatcatcatcctcagcaaactaacacaggaacagaaaaccaaactctgcatgttctcacttataagagggagatgaacaatgagaacacatgtacacagggagggggacatcacacaggtacctgtgcacaacatgcagaggtgatcgactgtgtgcctgccctgggggactctactgaacattgctctcttcggtacctttcctgcctctattgttcaggggcagcatgtctcctgaacctggccctcttctacctctatggaacagatttacctttggagagatttacagctgaaaatggacagtggggtggcattggtgaaaggcaacacagaaataaacttcggatactgctctatggggaattcctttgtggcaaccaaaacagctgtccactggtaggcttagcttcaactattaattcagctgtggcacaggagcaagcttcagagatgcgctctgtggaagggttctctcgatccctggaattttggtgttacattctcagtctatattgggtatctgctctcctgaagaatctttgctttttgcacacagagccgctgaaaacgactgaagagagcaagggatttcctgggacatctggctctggaggtgagcgacagcagggaatgacgtcagggacctgggagactgatcacctggatggtgactttttatga

SEQ ID NO: 1701 - DNA, 1017 bp, Homo sapiens
  SIMILAR (113)..(688): 291254mologous to Homo sapiens PTB-associated splicing factor,accession number X70944,Smith-Waterman Score=136.
atggatcccagccccaaacctcacgccataaagccccgaagaggcgggttgggggcgggggccggggcggacttccaggggcgtggctgcgcgcctgcgaccccggaccgtgccaatctcgccgccgccccaaaacctgtgggaaaccccagtcctgccacccactcctcctggaggacgcagacaggatctgctctgcaggagcccaggccggccgatccgcgtcccggccacaaagttgcacttcgagagcccaaatcacccgcagacaaaacccatctttgggaacaaagtacccgcttgcaggcgctcttcccgggctggaaggctggcgtgcggaaacggacacacccacccgtggggcccgcctctagctaccgcgggaccaccggttaccgagccagggacccggctcccccagttctccggagcggctggggagctccagccgactcgcagtattcccggagcaggcaccgcaggaccctggctccacgcccctcggacgctttctcctcagatgccgcccggcgggccggggtccccctggcgggctgcgcgggcgctgcgcgagctaaaccaaacctggccggaaaagacgcggccaaggcccgctccgtccacgcttcccgccggcccggcaaggggttccggagaacggcttgggggggcgagaaccatgggcgggggaaatggaagacagagggaactgaagcacgggggtcttcgatgagcagtgcggatgttcgactccaaacatcaaagccaacgagaggttcaggttactcctccttgaccccaaacatccaagtaaaatatgtcgtctctaattcggcaaagacggtgatgactgtatatatgcaggccaattccgtaagtaaagtttcatgtaaaactaattaccggatattccaaccaccccctgtgcaggccagccgcatgcacaagctgaggacccctaaaaaacagcagcccaccctaaggtgtataccccagactcacatgtcactcgactaa

SEQ ID NO: 1702 - DNA, 727 bp, Homo sapiens
  SIMILAR (235)..(414): 381254mologous to Mus musculus alpha-1 type 1 collagen,accession number U38544,Smith-Waterman Score=71.
gaacctggccctcttctacctctatggaacagatttacctttggagagatttacagctgaaaatggacagtggggtggcattggtgaaaggcaacacagaaagatactagcagaggacagtcaaggacaccagttaacaaatgcaatggcagtgaaaatggattctgactctccactcagcaaaataattggtgtcccaagtccttcaagtttacttctttcctctgaatccgcccggcgggccggggtccccctggcgggctgcgcgggcgctgcgcgagctaaaccaaacctggccggaaaagacgcggccaaggcccgctcggtccacgctttccgccggcccggcaaagggttccggagaacggcttgggggggcgaaaaccatgggcgggggaaatggaagacagagggaactgaagcacgggggtcttcgatgagcagtgcggatgttcgactccaaacatcaaagccaacgagaggttcaggttactcctccttgaccccaaacatccaagtaaaatatgtcgtctctaattcggcaaagacggtgatgactgtatatatgcaggccaattccgtaagtaaagtttcatgtaaaactaattaccggatattccaaccaccccctgtgcaggccagccgcatgcacaagaaaaaaggggaacgtgtaaccctagaaattgatggagctgaaatggatcttcaagtaaatatcgtggtttga

SEQ ID NO: 1703 - DNA, 798 bp, Homo sapiens
  SIMILAR (36)..(140): 331254mologous to Homo sapiens Human secreted protein encoded by gene 64 clone HHGDI71,accession number W67870,Smith-Waterman Score=71.
tcagtgctctcagaggattcttcttctcttttctaatctccaaatgttggtgctccttgggcttgatttttttgtcctcagccatcccctcgcctaaaaatgccccagaagcctgtcaacatctggatccatatttccatttgggagccccctggagccctggactggtctccataatttctcaccttgtgctctggagctgtgccttcagctgtttcttctccatctgcattgggatgtctcagcttttaccactggacttggggtctaccttacagacctggcccctttccagggctccccagctctgaaaatggcattgccatctcaccagtaaggcaaaccagaagctcaggggtcatcctgaacgctgccctcttccagcccctcttcattccatccagcaccaagactaaccagaatatgcagatcatgtccaaatcctgtccactacaacaaagcttccgaactagcctccctgtctacccatgctgctctaatgatttctccacagaacagccagagtcccaggcagattacagcaacataccagggcagaatgtcataaatggagccatatgttcctgtcagtacaaaatggaaccatatggcgttcataaaaatggctctgagggtggaaagaagaactggatcctatttggccagtctccacctgaaagtcaatccttccaggcctacattgggtcccctcttagaccttctcttctagcagctgacacagtccacggttgtgtatcgctggcattatctgctcaatgttgtgccctttcccattag

SEQ ID NO: 1704 - DNA, 1128 bp, Homo sapiens
  SIMILAR (224)..(289): 451254mologous to Homo sapiens Human secreted protein sequence SEQ ID NO:170,accession number Y87131,Smith-Waterman Score =43.
atgaagggtaactggaactctcataggttgctggtggaagtgccaaaatggacccccttgtgggccttcatcaacatccttagcgggcttgtctttctgcatccagtgcctatgtctggcgaggtccaggactcagccccaggcctcttctccttggcattccctcagggacctcacatcaacacatctggatgggctggcttcaagtctgaactctgccacctccttgttgtgggcaagtttctcaacctctgtgtccgcaggccccacaaagtcaactttgaattgtggccattacccctccctaatccacttgcttctccaagtcccagtgagatcgtcataagacaaatatctgcctgtggctcttacctgctcaaaacccttccacggcatcctattgcctacaagattaagtccaagatgttgagcatctttttcgtctccttgtttcctccattggtcacactcaactacagatgcttcttgacttatgatggggctacatccaaattaacccactggctccccagctctgaaaatggcattgccatctcaccagtaaggcaaaccagaagctcaggggtcatcctgaacgctgccctcttccagcccctcttcattccatccagcaccaagactaaccagaatatgcagatcatgtccaaatcctgtccactacaacaaagcttccgaactagcctccctgtctacccatgctgctctaatgatttctccacagaacagccagagtcccaggcagattacagcaacataccagggcaggaaactgttcttgatgagggtctagtggcccctaattactacatccagtgggctctcggtccctgtctagctggcctttctcttttgtctgttggctctcttttggaagtgctccacatccccagttcctgtcagtacaaaatggaaccatatggcgttcataaaaatggctctgagggtggaaagaagaactggatcctatttggccagtctccacctgaaagtcaatccttccaggcctacattgggtcccctcttagaccttctcttctagcagctgacacagtccacggttgtgtatcgctggcattatctgctcaatgttgtgccctttcccattag

SEQ ID NO: 1705 - DNA, 402 bp, Homo sapiens
  SIMILAR (2)..(124): 1001254mologous to Homo sapiens dJ68O2.2 (myosin, heavy polypeptide 9, non-muscle),accession number Z82215,Smith-Waterman Score=199.
  misc_feature (1)...(402): n = a,t,c or g
ccggcagaagctgagcctgagcaccaagctcaagcaggtggaggacgagaagaattccttccgggagcagctggaggaggaggaggaggccaagcacaacctggagaagcagatcgccaccctcctttaccgaggacagcctgcctctgccacagcaaggctgtcggggtcaagctggaaaggccagcagccttccagtggcttctcccaacactcttggggaccaaatatatttaatgggtaagggacttgtcccaagtctgacagccagagcgttagaggggccagcggccctcccaggcgatcttgtgtctactctaggactgggcccgagggtgggttacctgcaccgttgactcagtatagtttaaaaatctgccacctgcacaggtatttttgaan

SEQ ID NO: 1706 - DNA, 519 bp, Homo sapiens
  SIMILAR (517)..(299): 931254mologous to Homo sapiens nonmuscle myosin heavy chain (NMHC),accession number M31013,Smith-Waterman Score=327.
cggaattttatcatttattacaagaaaggggaaaaaagaaaaccttattttgctttcaaaaatacctgtgcaggtggcagatttttaaactatactgagtcaacggtgcaggtaaaccaccctcgggcccagtcctagagtagacacaagatcgcctgggagggccgctggcccctctaacgctctggctgtcagacttgggacaagtcccttaaccattaaatatatttggtccccaagagtgttgggagaagccactggaaggctgctggcctttccagcttgaccccgacagccttgctgtggcagaggcaggctgtgagtgcttctgcctcatctcctggatctgggcctcgtgggtcttggcctcctcctccagggtcttcttcaggatgttcacctcctgctcacgttttgacctgagctcctgctgggcagctgtggaatccagcgtgtcctccaactctgttttcagagcctctagctcttccccaaggtcccgtttctgcttctcagctt

SEQ ID NO: 1707 - DNA, 6432 bp, Homo sapiens
  SIMILAR (2632)..(6117): 991254mologous to Homo sapiens dJ68O2.2 (myosin, heavy polypeptide 9, non-muscle),accession number Z82215,Smith-Waterman Score=5607.
atggtacgattcgtggtgcatccggccggtggatttaggatactaagcagtgcgccaggtgtgagggtagactgcgagatccccacaaagacagcatctgtgacactgtgctccctgtctgggaaacgggcagctctttgggagcaagaccgagaagatcaatccatcttgtgcactggtgaatctggagctggcaagacggagaacaccaagaaggtcatccagtatctggcgtacgtggcgtcctcgcacaagagcaagaaggaccagcgcaccatagctgtcatgtcccatgcggaacctgaccccggcacggtggatggggactccgctctcacggagccctccacgctctgtggtccagaccagatgcagatggccggctgccctcacctgccaccgccgtgccagtcagaagcagtgccggggagttctcacgttggagtttttcagaggcagggcaggctcggcagcccaggtcgctgcccggccttcactgcgtccctgggttccttgcagggcgagctggagcggcagctgctgcaggccaaccccatcctggaggccttcgggaacgccaagaccgtgaagaatgacaactcctcccgcttcggcaaattcattcgcatcaactttgatgtcaatggctacattgttggagccaacattgagacttgtatccttgtgcttgtgttgctccttaatatttgcaaagatcttttggagaaatctcgtgctatccgccaagccaaggaagaacggaccttccacatcttctattatctcctgtctggggctggagagcacctgaagaccgatctcctgttggagccgtacaacaaataccgcttcctgtccaatggacacgtcaccatccccgggcagcaggacaaggacatgttccaggagaccatggaggccatgaggattatgggcatcccagaagaggagcaaatgggtacagggctggccctcctatggtcgagtgtggggcagaggaaggctggcctgctgcgggtcatctcaggggttcttcagctcggcaacatcgtcttcaagaaggagcggaacactgaccaggcgtccatgcccgacaacacagctgcccaaaaggtgtcccatctcttgggtatcaatgtgaccgatttcaccagaggaatcctcaccccgcgcatcaaggtgggacgggattacgtccagaaggcgcagactaaagagcaggctgactttgccatcgaggccttggccaaggcgacctatgagcggatgttccgctggctggtgctgcgcatcaacaaggctctggacaagaccaagaggcagggcgcctccttcatcgggatcctggacattgccggcttcgagatctttgatctgaactcgtttgagcagctgtgcatcaattacaccaatgagaagctgcagcagctcttcaaccacaccatgttcatcctggagcaggaggagtaccagcgcgagggcatcgagtggaacttcatcgactttggcctcgacctgcagccctgcatcgacctcattgagaagccagcaggccccccgggcattctggccctgctggacgaggagtgctggttccccaaagccaccgacaagagcttcgtggagaaggtgatgcaggagcagggcacccaccccaagttccagaagcccaagcagctgaaggacaaagctgatttctgcattatccactatgccggcaaggtggattacaaagctgacgagtggctgatgaagaacatggatcccctgaatgacaacatcgccacactgctccaccagtcctctgacaagtttgtctcggagctgtggaaggatgtggaccgcatcatcggcctggaccaggtggccggcatgtcggagaccgcactgcccggggccttcaagacgcggaagggcatgttccgcactgtggggcagctttacaaggagcagctggccaagctgatggctacgctgaggaacacgaaccccaactttgtccgctgcatcatccccaaccacgagaagaaggccggcaagctggacccgcatctcgtgctggaccagctgcgctgcaacggtgttctcgagggcatccgtatctgccgccagggcttccccaacagggtggtcttccaggagtttcggcagagatatgagatcctgactccaaactccattcccaagggtttcatggacgggaagcaggcgtgcgtgctcatgcatcctgttgtttctggcgtgtccaggttagcagctgctacctttggccttgttttacttcacgttctttctaaagaatcagaaagctttggctgcagaataaaagccctggagctcgacagcaatctgtaccgcattggccagagcaaagtcttcttccgtgccggtgtgctggcccacctggaggaggagcgagacctgaagatcaccgacgtcatcatagggttccaggcctgctgcaggggctacctggccaggaagactccttaccgtgtgacccttgtggggacagcacccagagcctgcctgtccctaaagaaccctgtgattccaggggagcaggccatcctcgagtccagactcatctttgactccctggggaatgacggctcccctgctgcaggacagcggctagcatttgccaagcggcagcagcagcttaccgccatgaaggtcctccagcggaactgcgctgcctacctgaagctgcggaactggcagtggtggcggctcttcaccaaggtcaagccgctgctgcaggtgagccggcaggaggaggagatgatggccaaggaggaggagctggtgaaggtcagagagaagcagctggctgcggagaacaggctcacggagatggagacgctgcagtctcagctcatggcagagaaattgcagctgcaggagcagctccaggcagaaaccgagctgtgtgccgaggctgaggagctccgggcccgcctgaccgccaagaagcaggaattagaagagatctgccatgacctagaggccagggtggaggaggaggaggagcgctgccagcacctgcaggcggagaagaagaagatgcagcagaacatccaggagcttgaggagcagctggaggaggaggagagcgcccggcagaagctgcagctggagaaggtgaccaccgaggcgaagctgaaaaagctggaggaggagcagatcatcctggaggaccagaactgcaagctggccaaggaaaagaaactgctggaagacagaatagctgagttcaccaccaacctcacagaagaggaggagaaatctaagagcctcgccaagctcaagaacaagcatgaggcaatgatcactgacttggaagagcgcctccgcagggaggagaagcagcgacaggagctggagaagacccgccggaagctggagggagactccacagacctcagcgaccagatcgccgagctccaggcccagatcgcggagctcaagatgcagctggccaagaaagaggaggagctccaggccgccctggccagagtggaagaggaagctgcccagaagaacatggccctcaagaagatccgggagctggaatctcagatctctgaactccaggaagacctggagtctgagcgtgcttccaggaataaagctgagaagcagaaacgggaccttggggaagagctagaggctctgaaaacagagttggaggacacgctggattccacagctgcccagcaggagctcaggtcaaaacgtgagcaggaggtgaacatcctgaagaagaccctggaggaggaggccaagacccacgaggcccagatccaggagatgaggcagaagcactcacaggccgtggaggagctggcggagcagctggagcagacgaagcgggtgaaagcaaacctcgagaaggcaaagcagactctggagaacgagcggggggagctggccaacgaggtgaaggtgctgctgcagggcaaaggggactcggagcacaagcgcaagaaagtggaggcgcagctgcaggagctgcaggtcaagttcaacgagggagagcgcgtgcgcacagagctggccgacaaggtcaccaagctgcaggtggagctggacaacgtgaccgggcttctcagccagtccgacagcaagtccagcaagctcaccaaggacttctccgcgctggagtcccagctgcaggacactcaggagctgctgcaggaggagaaccggcagaagctgagcctgagcaccaagctcaagcaggtggaggacgagaagaattccttccgggagcagctggaggaggaggaggaggccaagcacaacctggagaagcagatcgccaccctccatgcccaggtggccgacatgaaaaagaagatggaggacagtgtggggtgcctggaaactgctgaggaggtgaagaggaagctccagaaggacctggagggcctgagccagcggcacgaggagaaggtggccgcctacgacaagctggagaagaccaagacgcggctgcagcaggagctggacgacctgctggtggacctggaccaccagcgccagagcgcgtgcaacctggagaagaagcagaagaagtttgaccagctcctggcggaggagaagaccatctctgccaagtatgcagaggagcgcgaccgggctgaggcggaggcccgagagaaggagaccaaggctctgtcgctggcccgggccctggaggaagccatggagcagaaggcggagctggagcggctcaacaagcagttccgcacggagatggaggaccttatgagctccaaggatgatgtgggcaagagtgtccacgagctggagaagtccaagcgggccctagagcagcaggtggaggagatgaagacgcagctggaagagctggaggacgagctgcaggccaccgaagatgccaagctgcggttggaggtcaacctgcaggccatgaaggcccagttcgagcgggacctgcagggccgggacgagcagagcgaggagaagaagaagcagctggtcagacaggtgcgggagatggaggcagagctggaggacgagaggaagcagcgctcgatggcagtggccgcccggaagaagctggagatggacctgaaggacctggaggcgcacatcgactcggccaacaagaaccgggacgaagccatcaaacagctgcggaagctgcaggcccagatgaaggactgcatgcgcgagctggatgacacccgcgcctctcgtgaggagatcctggcccaggccaaagagaacgagaagaagctgaagagcatggaggccgagatgatccagttgcaggaggaactggcagccgcggagcgtgccaagcgccaggcccagcaggagcgggatgagctggctgacgagatcgccaacagcagcggcaaaggagccctggcgttagaggagaagcggcgtctggaggcccgcatcgcccagctggaggaggagctggaggaggagcagggcaacacggagctgatcaacgaccggctgaagaaggccaacctgcagatcgaccagatcaacaccgacctgaacctggagcgcagccacgcccagaagaacgagaatgctcggcagcagctggaacgccagaacaaggagcttaaggtcaagctgcaggagatggagggcactgtcaagtccaagtacaaggcctccatcaccgccctcgaggccaagattgcacagctggaggagcagctggacaacgagaccaaggagcgccaggcagcctgcaaacaggtgcgtcggaccgagaagaagctgaaggatgtgctgctgcaggtggatgacgagcggaggaacgccgagcagtacaaggaccaggccgacaaggcatctacccgcctgaagcagctcaagcggcagctggaggaggccgaagaggaggcccagcgggccaacgcctcccgccggaaactgcagcgcgagctggaggacgccactgagacggccgatgccatgaaccgcgaagtcagctccctaaagaacaagctcaggcgcggggacctgccgtttgtcgtgccccgccgaatggcccggaaaggcgccggggatggctccgacgaagagcccatccgaaggtcatcatcctcaaagatcaaagataaattcatgaagataaggaaaaaccagcacaaaaacgctgaaaattccaaagaccagaatgtctcttctccaaatgattgcaactcctctccagcaagggcacaaaactggatggagaatgaatttgacgaattgacagaagtaggcttcagaagatgggtaatgagaaactcctctgagctaaaggagcatgttgtaacccaatgcaaggaagctaagaaccttgatgaaaggttacaggagctgctaactagaataaccagtttagagaagaacgtaaatgacctgatggagctgaaaaacacagcatga

SEQ ID NO: 1708 - DNA, 404 bp, Homo sapiens
  SIMILAR (124)..(399): 821254mologous to Homo sapiens cellular myosin heavy chain,accession number M81105,Smith-Waterman Score=386.
tttcgtccgcctcgtgcgctcgccccacccggccgccgcccgagcgctcgagaaagtcctctcgggagaagcagcgcctgttcccggggcagatccaggttcaggtcctggctataagtcaccatggcacaacaagctgccgataagtatctctatgtggataaaaacttcatcaacaatccgctggcccagaccgactgggctgccaagaagctggtatgggtgccttccgacaagagtggctttgagccagccagcctcaaggaggaggtgggcgaagaggccatcgtggagctggagcacaatgggaaaaatgtggaggtgaacaaagatgactcctctaagaggaacctccctcaaatcttcaaggttgaggaaatgggtcagctgacgcgcctttaacg

SEQ ID NO: 1709 - DNA, 421 bp, Homo sapiens
  SIMILAR (128)..(418): 561254mologous to Homo sapiens PRO2221,accession number AF116695,Smith-Waterman Score=252.
gcgcggggacctgccgtttgtcgtgccccgccgaatggcccggaaaggcgccggggatggctccgacgaagagcccatccgaaggtcatcatcctcaaagatcaaagataaattcatgaagataaggaaaaaccagcacaaaaacgctgaaaattccaaagaccagaatgtctcttctccaaatgattgcaactcctctccagcaagggcacaaaactggatggagaatgaatttgacgaattgacagaagtaggcttcagaagatgggtaatgagaaactcctctgagctaaaggagcatgttgtaacccaatgcaaggaagctaagaaccttgatgaaaggttacaggagctgctaactagaataaccagtttagagaagaacgtaaatgacctgatggagctgaaaaacacagcatga

SEQ ID NO: 1710 - DNA, 385 bp, Homo sapiens
  SIMILAR (235)..(384): 921254mologous to Homo sapiens human non-muscle myosin heavy chain,accession number D11393,Smith-Waterman Score=222.
tgtacttaattcctggcagggaaggacaaggggtgagttggagagagacatgccaggggctagcagtttgcagtgatgtcctcttcctgcatccaggagttgggtgcgagtgtctgtgtgtttgtgatgctttaagcctgacacacgtttcataacgagtgctcagtattttgtataagtaattgacacggagacagaacccatggcactgagggctatgtgggctccccctgcattgcagagcgcctccgcagggaggagaagcagcgacaggagctggagaagacccgccggaagctggagggagactccacagacctcagcgaccagatcggcgagctccaggcccagatcggggagcttaagatgcagctggccaagaaag

SEQ ID NO: 1711 - DNA, 417 bp, Homo sapiens
  SIMILAR (247)..(414): 961254mologous to Rattus norvegicus nonmuscle myosin heavy chain-A,accession number U15764,Smith-Waterman Score=273.
cgcaccatagctgtcatgtcccatgcggaacctgaccccggcacggtggatggggactccgctctcacggagccctccacgctctgtggtccagaccagatgcagatggccggctgccctcacctgccaccgccgtgccagtcagaagcagtgccggggagttctcacgttggagtttttcagaggcagggcaggctcggcagcccaggtcgctgcccggccttcactgcgtccctgggttccttgcagggcgagctggagcggcagctgctgcaggccaaccccatcctggaggccttcgggaacgccaagaccgtgaagaatgacaactcctcccgcttcggcaaattcattcgcatcaactttgatgtcaatggctacattgttggagccaacattgagacttgtatccttgtg

SEQ ID NO: 1712 - DNA, 512 bp, Homo sapiens
  SIMILAR (64)..(264): 971254mologous to Escherichia coli ProQ,accession number L48409,Smith-Waterman Score=336.
tcgagaatttaatcatttattacaagaaaggggaaaaaagaaacccttattttgctttcaaaaatacctgtgcaggtggcagatttttaaactatactgagtcaacggtgcaggtaaaccaccctcgggcccagtcctagagtagacacaagatcgcctgggagggccgctggcccctctaacgctctggctgtcagacttgggacaagtcccttaaccattaaatatatttggtccccaagagtgttgggagaagccactggaaggctgctggcctttccatctcaggctgcaggagaagaggcttattcggcaggtttggcctcagccccatccgctttgccatctacctcttcgtcggagccatccccggcgcctttccgggccattcggcggggcacgacaaacggcaggtccccgcgcctgagcttgttctttagggagctgactttgcggttcatggcatccgccgtctcagtggcgtactccagctcgcgctgcagttcccgccg

SEQ ID NO: 1713 - DNA, 483 bp, Homo sapiens
  SIMILAR (229)..(615): 851254mologous to Homo sapiens COL4A5 (Collagen Alpha 5(IV) Chain Precursor),accession number AL031622,Smith-Waterman Score= 618.
atatgagatcctgactccaaactccattcccaagggtttcatggacgggaagcaggcgtgcgtgctcatgcatcctgttgtttctggcgtgtccaggttagcagctgctacctttggccttgttttacttcacgttctttctaaagaatcagaaagctttggctgcagaataaaagccctggagctcgacagcaatctgtaccgcattggccagagcaaagtcttcttccgtgccggtgtgctggcccacctggaggaggagcgagacctgaagatcaccgacgtcatcatagggttccaggcctgctgcaggggctacctggccaggaagactccttaccgtgtgacccttgtggggacagcacccagagcctgcctgtccctaaagaaccctgtgattccaggggagcaggccatcctcgagtccagactcatctttgactccctggggaatgacggctcccctgctgcaggacagcggct

SEQ ID NO: 1714 - DNA, 7736 bp, Homo sapiens
  SIMILAR (999)..(1931): 791254mologous to Homo sapiens nonmuscle myosin heavy chain- A,accession number M69180,Smith-Waterman Score=1224.
gccgctccgcgattcccgggtcgacgatttcgtggcgcgcagatcaccgcggttcctgggcagggcacggaaggctatgcaaggctgacctgctgcagctcccgcctcgtgcgctcgccccacccggccgccgcccgagcgctcgagaaagtcctctcgggagaagcagcgcctgttcccggggcagatccaggttcaggtcctggatataagtcaccatggcacagcaagctgccgataagtatctctatgtggataaaaacttcatcaacaatccgctggcccaggccgactgggctgccaagaagctgctatggcctgcctccgacaagagtggctttgagccagccagcctcaaggaggaggtgggcgagagaggccatcgtggagctggtggagaatgggaagaaggtgaaggtgaacaaggatgacatccagaagatgaacccgcccaagttctccaaggtggaggacatggcagagctcacgtgcctcaacgaagcctcggtgctgcacaacctcaaggagcgttactactcagggctcatctacacctattcaggcctgttctgtgtggtcatcaatccttacaagaacctgcccatctactctgaagagattgtggaaatgtacaagggcaagaagaggcacgagatgccccctcacatctatgccatcacagacaccgcctacaggagtatgatgcaagaccgagaagatcaatccatcttgtgcactggtgaatctggagctggcaagacggagaacaccaagaaggtcatccagtatctggcgtacgtggcgtcctcgcacaagagcaagaaggaccagggcgagctggagcggcagctgctgcaggccaaccccatcctggaggccttcgggaacgccaagaccgtgaagaatgacaactcctcccgcttcggcaaattcattcgcatcaactttgatgtcaatggctacattgttggagccaacattgagacttatcttgtggagaaaatctcggtgctatccgccaagccaaggaagaacggaccttccacatcttctataatctcctgactagcggctggagagcacctgaagaccgatctcctgttggagccgtaccaacaaataccgcttcctgtctaatggacacgtcaccctccccgggcagcaggaccaaggacatgtcccaggagaccttggatgccatgaggattatgggcatcccagaagaggagcaaatgggcctgctgcgggtcatctcaggggttcttcagctcggcaacatcgtcttcaagaaggagcggaacactgaccaggcgtccatgcccgacaacacagctgcccaaaaggtgtcccatctcttgggtatcaatgtgaccgatttcaccagaggaatcctcaccccgcgcatcaaggtgggacgggattacgtccagaaggcgcagactaaagagcaggctgactttgccatcgaggccttggccaaggcgacctatgagcggatgttccgctggctggtgctgcgcatcaacaaggctctggacaagaccaagaggcagggcgcctccttcatcgggatcctggacattgccggcttcgagatctttgatctgaactcgtttgagcagctgtgcatcaattacaccaatgagaagctgcagcagctcttcaaccacaccatgttcatcctggagcaggaggagtaccagcgcgagggcatcgagtggaacttcatcgactttggcctcgacctgcagccctgcatcgacctcattgagaagccagcaggccccccgggcattctggccctgctggacgaggagtgctggttcccccaaagccaccgacaagaagcttcgtggagaaggtgatgcaggagcagggccacccaccccaagtttccagaagcccaagcagctgaaggacaaagctgatttcttgcattatccactatgccggcaaggtggattacaaagctgacgagtggctgatgaagaacatggatcccctgaatgacaacatcgccacactgctccaccagtcctctgacaagtttgtctcggagctgtggaaggatgtggaccgcatcatcggcctggaccaggtggccggcatgtcggagaccgcactgcccggggccttcaagacgcggaagggcatgttccgcactgtggggcagctttacaaggagcagctggccaagctgatggctacgctgaggaacacgaaccccaactttgtccgctgcatcatccccaaccacgagaagaaggccggcaagctggacccgcatctcgtgctggaccagctgcgctgcaacggcgttctcgagggcatccgaatctgccgccagggcttccccaacagggtggtcttccaggagtttcggcagagatatgagatcctgactccaaactccatttccaagggtttcatggacgggaagcaggcgtgcgtgctcatgataaaagccctggagctcgacagcaatctgtaccgcattggccagagcaaagtcttcttccgtgccggtgtgctggcccacctggaggaggagcgagacctgaagatcaccgacgtcatcataaggaaacagacctgctgtatgtgctaccaggccatgaatgcatttcccaagccggatgcagctgcttaccgccatgaaggtcctccagcggaactgcgctgcctacctgaagctgcggaactggcagtggtggcggctcttcaccaaggtcaagccgctgctgcaggtgagccggcaggaggaggagatgatggccaaggaggaggagctggtgaaggtcagagagaagcagctggctgcggagaacaggctcacggagatggagacgctgcagtctcagctcatggcagagaaaattgcagctgcaggagcagctccaggcagaaaccgagctgtgtgccgaggctgaggagctccgggcccgcctgaccgccaaagaagcagggaattagaagagatctgccatgacctagaggccagggtggaggaggaggaggagcgctgccagcacctgcaggcggagaagaagaagatgcagcagaacatccaggagcttgaggagcagctggaggaggaggagagcgccccggcagaagctgcagctggagaaggtgaccaccgaggcgaagctgaaaaagctggaggaggagcagatcatcctggaggaccagaactgcaagctggccaaggaaaagaaactgctggaagacagaatagctgagttcaccaccaacctcacagaagaggaggagaaatctaagagcctcgccaagctcaagaacaagcatgaggcaatgatccctgacttggaagagcgcctccgcagggaggagaagcagcgacaggagctggagaagacccgccggaagctggagggagactccacagacctcagcgaccagatcgccgagctccaggcccagcatcgcggagctcaagatgcagctggccaagaaagaggaggagctccaggcccgccctggccagagtggaagaggaagctgcccagaagaacatggccctcaagaagatccgggagctggaatctcagatctctgaactccaggaagacctgaagtgcgagcggggcttccaggaataaagctgagaagcagaaacgggaccttggggaagagctagaggcgctgaaaacagagttggaggacacgctggattccacagctgcccagcaggagctcaggtcaaaacgtgagcaggaggtgaacatcctgaagaagaccctggaggaggaggccaagacccacgaggcccagatccaggagatgaggcagaagcactcacaggccgtggaggagctggcggagcagctggagcagacgaagcgggtgaaagcaaacctcgagaaggcaaagcagactctggagaacgagcggggggagctggccaacgaggtgaaggtgctgctacgcgggcaaaggggactcggagcacaagcgcaagaaagtggaggcgcagctgcaggagctgcaggtcaagttcaacgagggagagcgcgtgcgcacagagctggccgacaaggtcaccaagctgcaggtggagctggacaacgtgcccgggcttctcagccagtccgacagcaagtccagcaagctcaccaaggacttctccgcgctggagtcccagctgcaggacactcaggagctgctgcaggaggagaaccggcagaagctgagcctgagcaccaagctcaagcaggtggaggacgagaagaattcccttccgggagcagctggaggaggaggaggaggaggccaagcacaacctggagaagcagatcgccaccctccatgcccaggtggccgacatgaaaaagaagatggaggacagtgtggggtgcctggaaactgctgaggaggtgaagaggaagctccagaaggacctggagggcctgagccagcggcacgaggagaaggtggccgcctacgacaagctggagaagaccaagacgcggctgcagcaggagctggacgacctgctggtggacctggaccaccagcgccagagcgcgtgcaacctggagaagaagcagaagaagtttgaccagctcctggcggaggagaagaccatctctgccaagtatgcagaggagcgcgaccgggctgaggcggaggcccgagagaaggagaccaaggctctgtcgctggcccgggccctggaggaagccatggagcagaaggcggagctggagcggctcaacaagcagttccgcacggagatggaggaccttatgagctccaaggatgatgtgggcaagagtgtccacgagctggagaagtccaagcgggccctagagcagcaggtggaggagatgaagacgcagctggaagagctggaggacgagctgcaggccaccgaagatgccaagctgcggttggaggtcaacctgcaggccatgaaggcccagttcgagcgggacctgcagggccgggacgagccagagcgaggagaagaagaagcagctggtcagacaggtgcgggagatggaggcagagctggaggacgagaggaagcagcgctcgatggcagtggcggcgcggaagaagctggagatggacctgaaggacctggaggcgcacatcgactcggccaacaagaaaccgggacgaagccatcaaacagctgcggaagctgcaggcccagactaatgactgcatgcgcgagctggatgacacccgcgcctctcgtgaggagatcctggcccagggcaaagagaacgagaagaagctgaagagcgtggaggccgagatgatccagttgcaggaggaactggcagccgcggagcgtgccaagcgccaggcccagcaggagcgggatgagctggctgacgagatcgccaacagcagcggcaaaggagccctggcgttagaggagaagcggcgtctggaggcccgcatcgcccagctggaggaggagctggaggaggagcagggcaacacggagctgatcaacgaccggctgaagaaggccaacctgcagatcgaccagatcaacaccgacctgaacctggagcgcagccacgcccagaagaacgagaatgctcggcagcagctggaacgccagaacaaggagcttaaggtcaagctgcaggagatggagggcactgtcaagtccaagtacaaggcctccatcaccgccctcgaggccaagattgcacagctggaggagcagctggacaacgagaccaaggagcgccaggcagcctgcaaacaggtgcgtcggaccgagaagaagctgaaggatgtgctgctgcaggtggatgacgagcggagtaacgccgttcagtatcaaggaccaggccgacaagtcatctacccgcctgaagcagctcgagcggcagctgcagcaggccgaagaggaggcccagcgggccaacgcctcccgccggaaactgcagcgcgagctggaggacgccactgagacggccgatgccatgaaccgcgaagtcagctccctagagaacaagctcaggcgcggggacctgccgtttgtcgtgccccgccgaatagcccggaaaggcgccgtggatggctccgacgaagaggtagatggcaaagcggatggggctgaggccaaacctgccgaataagcctcttcttctgcagcctgagatggatggacagacagacaccacagcctccccttcccagaccccgcagcacgcctcttccccaccttcttgggactgctgtgaacatgcctcctcctgccctccgccccgtccccccatcccgtttccctccaggtgttgttgagggcatttgcgcttcctctgctgcatccccttccagctccctcccctgctcagaatctgataccaaagagacagggcccgggccagggcagagagcgaccagcaggcttcctcagccctctcttgccaaaaagcacaagatgttgaggcgagcagggcaggcccccggggaggggccaagagttttctattgaatctatttttcttcagactgagggctttttggtagttgggagcccccgcagttcgtcagcctccctgacgtctgccaccagcgcccccactcctcctccttttctttgctgtttgcaatcacacgtggtgacctcacacacctctgccccttgggcctcccactcccatggctctgggcggtccagaaggagcaggccctgggcctccacctctgtgcagggcacagaaaggctggggtggggggaggagtggattcctccccacccctgtcccagggcagcgccaactgtccgctgtctccctcctgattctaaaatggtctcaagtgcaatgccccctccctgtcctttaccgaggacagcctgcctctgccacagcaaggctgtcggggtcaagctggaaaggccagcagccttccagtggcttctcccgaacactctttggggaccaaaatatacttaatgggtaaagggaacttgtcccaagtctgacagccagagcgttagaggcggccagcggccctcccagggcgatctttgtgtctactctaggactgggccccgagggtggtttacctgcaccgttgactcagtatagtttaaaaatcggcccacctgcacaggtatttttgaaagcagaaataaggttttctttttttcccctttcttgtaataaatgataaaattcccgagtctttctcactggcctttgtttagaagaggagtagcttcgtccctcactgggtctacactgggtttgccgaatttcacttgtattccctaactgttttgtatatgctggcattgaggacttacgggcaagaagggcatttttttttttttttaaagggaaacaaactcttcaaatcatgcaagtgattattaaaagctggcatatgccctacaaagctctggaattcagggtccccgttgctgtgcacaaaaggagtgagtcgaaactccccaccctacccccttttttatataataaaaagtgccttaagcatgtgtttgcagctggtcaccacctacatgtaaagctggtttacagatggtttttccactggagcatcacaataaagagaaccatgtgctaaaataaacagaaaaagaaaacacagacaagcgggggggggcgtttttaaagatcccaatttaactaccgggggcgctgggctttaaacttttttaagtggggaccctaaaataaattggctgggggccctattaaaaggctgagggagggaaa

SEQ ID NO: 1715 - DNA, 1197 bp, Homo sapiens
  SIMILAR (827)..(639): 381254mologous to Homo sapiens Human secreted protein, SEQ ID NO: 7249,accession number G03168,Smith-Waterman Score=77.
atgatccctgacatcagcaaacgcaaattcccagggtggacctggccagggagaaccccaaatgagtatttacttcctcacctggcctacatcttgtctataatctcacctttaactctagtcacaccaacagcttcaggcgagagaggaagaaacattggagaaatcaagttcaccagtgagggggacacttggtgtggcataaaattaatcattccttctcccccttccataccaaacttccaggatgcaagaatcacttccagagtggccccctcagaccttcttccacttagagccaaaattcagattagaattaagggacagggagttgatttgaaactgtttgcagagttttttctgaggtcatatgtttattgggaatcggggtcctctgggaatgctgctccagacctcctgcagattctgttgtgtttctccacttctggactccacacaaagcagtatacatgtatagtagcaagaactccctttgtgttagcaattccaaattggggtgagggagtaacaggacacagttgggatgggaaaatggaggaattcctacaggacgctgagccaagtagaaaagtggaaggggaagcccacatgtatgaaaaaggagaccaaacacaagaggcagccttgctttgtaacaactcgtgggaactgatccagtcctgcaagagtgagaactcactcattcacgggagagggtgttcatccattcctgagttgaacctggatatcaagaagaaggataatggctacccggtccccaaaaaagtccaaaatcaagatgtcagcagggccgtgcaccttctgaatgctttagtggcaaatccttccttatctcttccagattctggtggctgtaggctttccttactgtacatactcaattttgtgccttgtatccgagaggtgaacaggatgaggcgctatagctcatacaaactgtgcctgaattcaacagtctctggagttgctggcctaaagagggctacatttttggatggggagcctgcaatggcagcacgaacatccacgttagtagataaaagcaaggatccccaagcctggggcagtggactggtaccagtcagttgcctctcaggagcagcaggcgagcaagcattaccacctgagctccacctcctgtcagatcaactgcgtcagagtctcataggagcatga

SEQ ID NO: 1716 - DNA, 729 bp, Homo sapiens
  SIMILAR (505)..(696): 701254mologous to Homo sapiens bG98H19.1 (novel protein),accession number AL109956,Smith-Waterman Score=221.
atgatccctgacatcagcaaacgcaaattcccagggtggacctggccagggagaaccccaaatgagtatttacttcctcacctggcctacatcttgtctataatctcacctttaactctagtcacaccaacagcttcaggcgagagaggaagaaacattggagaaatcaagttcaccagtgagggggacacttggtgtggcataaaattaatcattccttctcccccttccataccaaacttccaggatgcaagaatcacttccagagtggccccctcagaccttcttccacttagagccaaaattcagattagaattaagggacagggagttgatttgaaactgtttgcagagttttttctgaggtcatatgtttattgggaatcggggtcctctgggaatgctgctccagacctcctgcagattctgttgtgtttctccacttctggactccacacaaagcagtatacatgtatagtagcaagaactccctttgtgttagcaattccaaattggggtgagggagtaacaggacacagttgggatgggaaaatggaggaattcctacaggacgctgaggcctatcagagaggagctgctcctaaatgtcgaattcttccagccggtggcaaggtgttaacctcagaagatgaatataatctgttgtctgacaggcatttcccagaccctcttgcacatggaaaatgtgctgtcagccaggtatcttga

SEQ ID NO: 1717 - DNA, 4029 bp, Homo sapiens
  SIMILAR (2614)..(4026): 951254mologous to Homo sapiens zinc finger protein ZNF135,accession number U09413,Smith-Waterman Score=2539.
atgaaggacactgcccccgtgctagagggcttgaaggaggaagagatgactaaggaggagatcagcatcctcagcaatgcctgctctaagctgcaggaacagaagaagtcactcaccaggaagaaggaggagctggagctgctgaaggaggacatgcaggactacagcgaggacttgcaggagctcaagaaggaactttcaaagactggtgaagaaaaatacatggaaggatctaaagccagcaagagattgacaaaaagggtgcagcagataatcgggcagatcaacggcttgatctcgcagctggagatggaccagtgggccagcaagctggccccggccaagggcgtgcccatgggggagaacgtcatcagtgttgccgagctcatcaacgccatgaagcaagtcaagcacattcccaaaagcaagctcaccagcctggccgcagcactgaatgaaaataaggatggcaaggtcaacgtcgaccacctcatcaaggtgattgagctggtggacaaagaagatgttcacgtctccaccagtcaggtggccgagattgtagcaacactggaaaaagaggagaaaggggaggagaatgaggaccacatggactctgcccacacggagctggctgctacgcccaccctcagaggcgtcaggagacacagcctggccccctcagggctgaagatgcctccattcacctgtggaccttgctttctagatttcagcatcaatagacctgtcttcctgcatgcttttagttggatctgggtcactgtggagacagagcgatctcctggcatctcaggtatgcattatctcaccgcccctctgctgcccttgattagtcacagacgccaagcccagcaatccctctactccagttttgcccagctattgggaatcttggacagcttccttaggcccctgtgcatccaggcgtctgagctgattctggatgcagtggcagcagccccagcactccccgaggaaagtgagtggctggagactacccagctccagcagagtctgcacaccagggcggaggccgaagcgccccgcgcccctggcttgctggggtcccgggcccgcttgcctctgaagccgagtatctgggacgagcctgaggaccttctcgcagggccctcctcagacctgcgggcagaagggactgtgatctcgagccccaagggtccaagtgctcagagaatcagtccccgaaggagaaacaggaacactgaccagagcggccgccaccagccatccctcaagcacaccaaaggtggtacccaagaggctgttgcaggcatctcggtagtgccgcgtgggccccgaggtgggcggcccttccagtgtgccgactgtgggatggtcttcacctgggtcacccacttcatcgagcaccagaagacccatcgcgaggaagggccctttccgtgccccgagtgtggcaaggtcttcctgcacaactccgtcctcactgagcatggcaagatccacctgctggagccaccgaggaagaaagccccccggagcaagggcccccgggagtccgtcccacccagggatggagcccagggcccagtggcccctcgcagccccaaaagacccttccagtgtagcgtctgcgggaaggccttcccctggatggtccacctcattgaccaccagaagctccacacggcccacggccacatgacacaagctgtttctcggaagaccctggacacctgctccgaagccaagcacgggatggggcttcccagggtctcagctgagaagcagcagttccacagcacagcctgtccccactgggggctcctggctctatcctatgccttaattgctgaacagtctccactgccatacttgaccacacccagcatacaacaggtcctacagagtgaagggatgagtgactcaatgagtgaggggaagtccctgtggagacaccgggacaccattgtgggctgcagtttccagccggggaagcctccctcgacctctgaggggagagcagggccagccgttcctgccagaagccagggcatgacccctggggtgcgcgtctccacagacccggagcaagtgacgtttgaggacgtggtagtgggcttcagccaggaggagtgggggcagctgaagcctgcccagaggaccctgtaccgtgatgtaatgctggacaccttcaggcttctggtctctgtgggacattggttaccgaagccgaatgtcatctccctgctggagcaagaggcagagctgtgggcggtggagtctagacttccccaaggcgtgtacccagacttggaaactagacccaaagtcaaactgtcagttctaaagcaaggcatctctgaagaaatatccaacagtgtcatcttggtagaaagattcctgtgggatggtctgtggtactgcaggggtgaggacactgagggccactgggaatggagttgtgagagtctagagagcctggcagtgccggtggccttcacgcctgtgaagacgcctgttctggagcagtggcagaggaatgggtttggggaaaacataagtctgaaccctgatctcccacatcaaccaatgactcctgaaagacaaagcccccacacatggggaacacgtggaaaaagggagaagccagacctaaatgttttacagaaaacctgtgtaaaagagaaaccctacaaatgtcaggaatgcggaaaggcctttagtcacagctcagcacttatcgaacaccaccggacgcacacaggagagagaccttacgaatgtcacgaatgcttaaaaggcttccggaacagctcggcacttaccaaacaccagagaatccatactggggagaaaccctataaatgcactcagtgtgggaggaccttcaaccaaattgccccactgatccagcaccagagaactcacacaggtgagaagccctatgaatgcagcgaatgtgggaaatccttcagttttaggtcctccttcagccagcacgagcgaactcacacaggcgagaagccctacgagtgcagtgagtgtgggaaagccttccggcaaagcatccacctcacccagcatctgcgaatccacactggggagaaaccctatcagtgtggtgagtgtggcaaggccttcagccacagctcatccttgaccaaacaccagcgaatccacacaggggagaagccctacgagtgccatgagtgtggaaaagccttcacccagatcacaccactgattcagcaccagaggacccacacaggagaaaagccctatgagtgtggtgagtgtgggaaagccttcagtcagagcacactcctgaccgagcatcggaggattcacacaggagagaagccctatggatgcaacgagtgtgggaaaaccttcagccacagctcctcactcagccagcatgagcggacacacacaggagagaagccctatgagtgcagtcagtgtgggaaggccttccggcagagcacacacctcacccaacaccagcgaatccacacaggggagaagccctatgaatgcaatgactgcggcaaggcattcagtcacagctcgtccctcaccaaacatcagcgaatccacactggggagaagccctacgaatgcaaccagtgtggcagagccttcagccagcttgctcccctcattcagcatcagaggatccacacaggagagaaaccctatgaatgtaaccagtgtggcagagccttcagccagagctcccttctcatcgaacaccagaggattcacaccaaggaaaagccgtatgggtgcaatgagtgtgggaaatccttcagccacagctcctcgctcagccagcacgaaaggacgcacactggggaaaagccctatgagtgtcacgattgcggaaagtcctttaggcagagcacccacctcactcagcaccggaggatccacacaggagagaagccatatgcatgcagggactgtggaaaggcctttacccacagctcctcccttaccaagcaccagagaactcacactggataa

SEQ ID NO: 1718 - DNA, 558 bp, Homo sapiens
  SIMILAR (240)..(473): 521254mologous to Homo sapiens BC331191_1,accession number AC007842,Smith-Waterman Score=210.
aacagtctccactgccatacttgaccacacccagcatacaacaggtcctacagagtgaagggatgagtgactcaatgagtgaggggaagtccctgtggagacaccgggacaccattgtgggctgcagtttccagccggggaagcctccctcgacctctgaggggagagcagggccagccgttcctgccagaagccagggcatgacccctggggtgcgcgtctccacagacccggagcaagtgacgtttgaggacgtggtagtgggcttcagccaggaggagtgggggcagctgaagcctgcccagaggaccctgtaccgtgatgtaatgctggacaccttcaggcttctggtctctgtgggacattggttaccgaagccgaatgtcatctccctgctggagcaagaggcagagctgtgggcggtggagtctagacttccccaaggcgtgtacccagagattaagggacatttccagtttttgcttctttcagacttggaaactagacccaaagtcaaactgtcagttctaaagcaaggcatctctgaagaaatatcca

SEQ ID NO: 1719 - DNA, 622 bp, Homo sapiens
  SIMILAR (143)..(367): 361254mologous to Lymantria dispar nucleopolyhedrovirus DNA binding protein,accession number AF081810,Smith-Waterman Score=96.
ggcgcggactttaggaggccgggtgtgcaggtagaggccggacacgagtagaggctagatgtgcaaatagaggccgggcacgagtagaggccgggcaccagtagaggccaggtgcgcgagtagaggccagttgtgcgagtagaggccgggcacgagtaggggccgggcacgcaagtaggggccgggcacaaggaggaggctgagcgcgagtagggacggggtgcaaagaggaggccgggcgtgagaaggccgcgcgcgaggaggccgggcacgaggtggaggacacgcgcaaggaggccgagattctcaccgggtctgtggagacgcgcaccccaggggtcatgccctggcttctggcaggaacggctggccctgctctggctggccctctgggtaaccccgtctccaacactctcagactgtctgccttggctgccgttcaggtgcggaggtgaggcccttctcgtagggtgaacgatgtacatggtggttctaggggcccagatctcagtcctcacaggaggtgtgcatgctttctggctactgggggcattgtggacagtcaggctcttccctacttcacccaccttggcgtctgtgctaatcaagggcagcagagggg

SEQ ID NO: 1720 - DNA, 2834 bp, Homo sapiens
  SIMILAR (735)..(1214): 951254mologous to Homo sapiens dJ1103G7.7 (PUTATIVE novel protein),accession number AL034548,Smith-Waterman Score=869.
atggccaccggcggcggcgcggaggaagagaggaaacgggggcggccgcagcttctgccccccgcgcggcccgcggcccggggcgaggaggccgacggcggccgcgagaagatgggctgggcccaggtggtgaagaatctagccgagaagaagggcgaattccgcgagccgcggccgccgcggcgggaggaggaaagcggcggcggtggagggagcgccgggctcggcggccccgcgggcctggcggcgccggacctcggcgacttcccaccggctggccgcggggatccgaagggccgtcggagagatccggccggcgaggcggtggacccccgcaaaaagaagggcgctgcggaggcgggcaggaggaagaaggccgaggcggcggcggccgccatggcgaccccggccaggcccggcgaggccgaggacgcggccgagcggcccctccaggatgagccggcggcggcggcggcaggcccgggcaagggtcgcttcctcgtccgcatctgtttccagggagacgagggcgcctgcccgacccgggacttcgtggtaggagcgcttatcctgcgctccatcggcatggacccgagcgacatctacgcggtcatccagatcccgggcagccgcgaattcgacgtgagcttccgctcagcggagaagctggccctgttcctacgcgtctacgaggagaagcgggagcaggaggactgctgggagacttttggtggtgctgggggcgaggcaagtccagcttgaagacgctcttcatcctcttccggaacgagacggtggacgtggaggacattgtgacttggctcaagcgccactgcgacgtgctggccgtgccggtgaaagtgaccgacaggttttggatctggaccggggagtacaaatgcgagatcgagctgcgccagggggagggcggggtcaggcacttgccaggggccttcttcctgggggccgagaggggctacagctggtacaaggggcagcccaagacatgctttaaatgtggttcccggacccacatgagcggcagctgcacgcaggacaggtgcttcaggtgcggggaggaggggcacctgagcccttactgccggaagggcatcgtgtgcaacctctgtggcaagcgaggacacgcctttgcccagtgtcccaaagcagtgcacaattccgtggcagctcagctaaccggcgtggccgggcacctaaacacccggctgcctgccagggtgaacacacaagccagcttatccctcttaaagtgcccaaaactttttttttaaaaccattttttatcgtttttgaaggagatctttttaaaacctacaagagacatctctctatgccttcttaaaccgagtttactccatttcagcctgttctgaattgggtgactctgtcacaattaacggactgcgggagaactgtagcgtgcagatgtgttgcccctcccttttaaaattttattttcgcttttctattgggtattcgttttgattcttgtactttttctctctctccttgcccccctcccgccctccccgccccataccttttcttcccctggaattttcaccctttgggcctgccttgctcatctttatgccccagcactaggtacggggcccaacacgtggtaggcactccatacagtgtttgactgaattgaaaacattgttgactgtggcttctatcagagtgtctaccttttgcagctctttcccctccctcatttaatttggctgcttttaatctacgtgggtctgaggaatttgtgaaaccagtgttgttaggaagtgtatataatctggaatcaatgaagctctggaatgggtgggccaagggcttcttcttatgggcacaaaggatggcatgggactttcatggacagctcttttgggtgggctcagaaggccatttttttatagaatcatcggaatctagaatattcctgctggaaagaacctgagagttggtttggaccaattccctggttttccaggcagatgaaacagggcccaaagaggttaaattgacttgggtgaaaatcacatatgcttgtctggtgcccagagccaagcctatagtagacgtcccctgaccccaaagccctggtgctcattccactacctcgtcacacgttcacaacaatttcctcaaccacttgagggcccagaaagtcttgatctctccagaatgatcagcccagaggaatgctgagaaatcacctggaggagggagcagaaagagaaggtttttaaggaggggcttctgaatacttggggagatacggaacggaccagggacccacactccaggggtgcattcgttgctccctggggggcaccactttctgggattaccagtgtgcccaggtccctttgggaggcccttaccccttcccccattccattgcccacccagtgagaaaatggggggtggcccctgtgttaaaggaaacctaccgaaaggttttacatttgtcacctttaggcctcaattagctacgaaccttaggagaaggcagcctagcttggagctcattgtgcaacttcctgatttttcaggagaaagatgggattttaaacccaaaatttatggagtgagttgtttaactcttaaaatgtacttggggagatagggccaagcggagaggtcatgggccaacttaagtgttatccgagtagaaaagacagtacactgcttttcttttaagtgtttgccttttcctttgctatatgttttgctatttccttgtggcttagaatgtacccattgattgttaaaagttttgttctgaataaatatttatcttttgtattgct

SEQ ID NO: 1721 - DNA, 2393 bp, Homo sapiens
  SIMILAR (968)..(1642): 681254mologous to Homo sapiens Similar to CG15084 gene product,accession number BC002905,Smith-Waterman Score=706.
atggagcctcttggcgtaagcgcggttgggcggggcattcctggattggcccactccggcgtcgcagaacgcttggcgtatcgtccttcagccaatcagcgtggagctgctgcctcgccccgcctcacgccggcgtcctgggggcgcggagagggcgcccaggttcaccgcgctctcagcgcgcacttccgggcacggtcagggcgtgacgtcgggaggagggcaggctcttcccgtgggttagttgattcacagcatccccagaaagtcagtcttgtcgtcgtcattcgccctttaccggtgacgaaatacaagcccagggaagcgcagtcactgaccaagacacgccgctttttggatgcctcctatgcctggcgggagtcttgtctgagctggcaccaccacacggcccacgacatcttcgcagggaagcctgtggaccctctgccaggctccacaagaggtcaggacagtgcaggtgaaaggaaaggggtcaacaagtactatcctccagacttcaaccctgagaagcatggctctctcaaccgataccacaacagccacccgcttcgggagcgggctcggaagctgtcacagggcatcctcatcatccgattcgaaatgccatataacatctggtgcgatggctgcaagaaccacatcggcatgggtgttcgttacaatgcagaaaagaagaaggtgggcaattactacacaaccccgatctacaggttccggatgaaatgccacctctgtgtcaactacatcgagatgcagacggaccccgccaactgcgactacgtgatcgtgagtggcgcccagcgcaaggaggagcgctgggacatggcggacaatgagcaggtgctgaccacagagcatgagaagaagcagaagctggagacggacgccatgttccggctggagcatggcgaggccgaccgcagcacactcaagaaggcgctggcgcacactgagccacatccaggaggcccagagcgcctggaaggacgacttcgccctcaacagcatgctgcggagaaggttccgggaaaagaaaaaagccatccaggaggaggaggagagagaccaggccttgcaggccaaggcgagcctgaccatcccgctggtgcccgagacggaagatgaccgcaagctggcggctctgctgaagttccacaccctggactcctacgaggacaagcagaaactcaagcggaccgagatcatcagcccgttctgggttcccttttgccccggaatccgcctccaacagcaaggtcagcggcgtcctgaagaagctggcacagagccgcagaaccgcgcttgccacctcccccatcaccgtcggggacctgggcatcgtgcggcggaggtctcgggacgtcccggcagagcccccagcatgcggccgacacccccaagtctggggaaccgcgggtaccagaggaggctgcccaggaccggcccatgtcccccggagactgtcctccggaaacaacttgagaccccaaagtgcagcagcccgagggggcaggaagggagccgtcaggacaagcccctgtcgccagcaggctcctcccaggaggcagctgacacccccgacacgcggcacccctgcagtctcggctcctccctcgtggcgggactactccgactcggagagagtcgtggagtgggttcggccacgtggaatccgcgtcctgggaacccgtggaatccgcgtcctgggaacccgtggaatccgcctcctgggaacccgtggaatccgcctcctgggaacccgtggaatccgcctcctgggaacccgtggaatccgcctcctgggaacccgtggaatccgcctcctgggaacccgtggaatcgggttggatgcgcatctccctctgagttgcgctgggcttggctgctgcaccatgaccctggaggcgatccgctactcgcggggctccctgcagatcctagaccagctgctgctgcccaagcagagccgctacgaggcggtgggctcggtgcaccaggcctgggaggccatccgcgccatgaagtttcctgaggccttcctagaagccgagcagatgccagcatcatgctccctgtacgggctatggaaccatggctgtaccgcaggtggcaaagcaggtctcaacagcaaacaaaagaccccagttttggcacttgggaagcagtctggtttgcagactgtgaagagcatgcaactggatggaacggcagacgtttctgagcacaaagaacatccacacatccattatgcacccgctgacaccatcaaaggagaatctccatcttttgaccccattttggaaactagcaggctgtcaatatctgttaaagggctgaacggtttctttgccaaacacgacttcaactggtag

SEQ ID NO: 1722 - DNA, 2329 bp, Homo sapiens
  SIMILAR (1300)..(1034): 651254mologous to Homo sapiens PRO2822,accession number AF119900,Smith-Waterman Score=273.
aattcatagttccttcctgtggagaagggtctgaaatgggaatcagtggtagaaggggctggtctcctgggcagggcttacatccactgagtcctaagattcctttcctgatctgcacctacgcctggtctgtatggtggaatttgtcagctggaactcagaaacaacaacttgaaaaaaataataataattagaacatatttgcataagatagctatttactctggaaaccaacaacttttgagatttcccttgccctgtggacgcccagctcctgtcatccttccttaggtcctgcagtacagtcttcccctgaatgccaccggggacccagggggactccacccccctaaagcaagcacacacatacttcacagttgatgagttgctgggtcttttgagtcccagctcataaaaccctccctttactccaccaagcccgacgacccattgacttgaggaaggggatttctacaagtctcaggattttagaaagtctgtaaagccatccatgcttccagaaagcaccgatctgttgtagttgcaaaaacaactctgtaatttgttggagggtctcaaactgacagcccagccgagacttgggtgggaagcccctggatctgttctccctgacttgcgggggggagcagccactaaggactttatcaggaagcccacatggaggctcccccaggcttggggccacctggtgaagggcccttttgctcctggcagcctgaggcacagctgcctgtattgtcctcatctgttctgactgaaggatggaggtgctgaataaattaggcctcaggcctctaccaccagagagctggagaatgggttccacgtcatttcaagggactggaattttttatgttcagggagcattgggaatcttcttctttccagggaggaatttagccctgcaaggttaggacttgaagagggaaggtatttaataactgggcgaggatgggtgtggtggctcacacctgtaatcccagcattttgggaggctgaggtggccagatcccaaggtcagaagatcgagaccatcctggctaacatggtgaaaccccatctctactaaaaatacaaaaaaaaattagccgggggtgtgtggcgggtacctgtagtcctagctacttgggaggctgaggcaggagaatggcgtgaacctgggaggtggagtttgcagtgagctgagatcgtgccactgcactccagcctggccgacagagcaagactcttgtctcaaaaaaatatagaattaaactaaattaaaaaataaatggaaccacccagcccatcccctacccacctgtcctgcattttttttctccttatcactgtctcaccactagaggccagctccaccagggcaagggtttttccctgcctgccacttgtatgccgagtgtccagaacaaagcctagcacaaggaaaagaaaaaagccatccaggaggaggaggagagagaccaggccttgcaggccaaggcgagcctgaccatcccgctggtgccccgaaacggaagatgaccgcaagctggcggctctgctgaagttccacaccctggactcctacgaggacaagcagaaactcaagcggaccgagatcatcaagccgttctggtttcccttttgcccccggatccgcctccagcaagcaaggtcagcggcgtcctgaagaagctggcacagagccgcagaaccgcgcttgccacctcccccatcaccgtcggggacctgggcatcgtgcggcggaggtctcgggacgtcccggagagcccccagcatgcggccgacacccccaagtctggggaaccgcgggtaccagaggaggctgcccaggaccggcccatgtccccccggagactgtcctccggaaaacaaactgagaccccccaagtgcagccaacccgaggggccaggaagggagccgtcaggacaagcccccttttcgccagcaggctcctcccaggaggcagctgacaccccccgacacgcggccacccctgcagtctcggctcctccctcsgtggcggacttactccgactcggagagtgacttgagcgatccccatcctggagactggacccgctctagaggcccggacacacccaggaggcccctcacagactgcagacccccggctcgcccaccagccctgggagagctcagatgccgcatccttccccagaccgcgccttcctgcaaccgtggagttatttatttggtcctggtgagggtgtttgtgccttgtgagactccggtacattaaagacctgtctcttcttccctgtcaaaaaaaaaaaaaaaaaaacc

SEQ ID NO: 1723 - DNA, 637 bp, Homo sapiens
  SIMILAR (261)..(160): 501254mologous to Homo sapiens Human secreted protein clone yb219_1 protein sequence SEQ ID NO:110,accession number Y73444,Smith-Waterman Score=74.
gaacccattggcccttggaactgggcccatccatgtccagtgggaaggagggcgaggcccagttcccaaaaaaaaaaataaatatatacaaggcagcagtcacaacaaaaacccccttaaatgcgctcccacaaaatctctcgccccacactagaaaatatcagctgaaactcctgcgggatggttccgagcaatcgcgaggcctcccgtgcggatggctgcggtggaagggcctgttgttatttgaggagactcagggcaggccagaaggcaactcttcatgctagtcttgagttaaagatccacccgcggctctgcctccgccccttggagatctgccctcggaactgcgttgctctggcgcccgaactagggtgggctggtttcagccagaccgccaaaaaacgtggatgctaaacacagagggaagagccagctcccattccctctctgagccttagatttttttgaattccgagagaggtcaggccggggtccccttcttgggtgagcgtccagccctttgaagttcaaacactgagaagccgataggcagctggctggcgtcacaggatcgagccgaggactgaaggcgcctcctaccgggaatccaccgcctccagacgaaaataggctg

SEQ ID NO: 1724 - DNA, 477 bp, Homo sapiens
  SIMILAR (1)..(543): 851254mologous to Homo sapiens hnRNPcore protein A1,accession number X79536,Smith-Waterman Score=844.
atgagggactgctgtgatgggctagacgaccagtgctggtgggaggaccgaggcccagagagaggtgagacctgccaaggtcctaaatttccctgtggcttcatagagctagccatacctgctctgcccactgtgaagggtggcaggaggatggaagacgaggtagtgcttctggaaattcgagatgccaagtccaagcctaggtgcctccctgcctccgaggagcctcccctgatgtcctggtcaccgcggcgctgtgctgtggccaccagcaagaccggcggcaccaaggggccccctagcggcccgaggagttgctgcagccacctgggcccagcatgtccttcccagacacccgcggatgtaggacctttcttggggacccagatcacgtgccaggcactgcgctgggtgccaggccagggaaacaccatctcctggcagccctgtgaggatcagaaggcccctggtgtgtga

SEQ ID NO: 1725 - DNA, 416 bp, Homo sapiens
cccagagcagaccaagacaccctccaacggcctattccctacatccacaatgacaaatgtgttttaacttacaggacagtaagcacgctgttgagaaaaatgtggagaccaactcaagaggacaaattactgatagattagtacagtctgaggtagctgtcacagggtaagtgatggcaccggtgttacctattggccatttctggccccaggatgaattcctgacctttcagaactcagcacgggaacagctctagcaggctccctcatcacacccccgccatactgaatatctgtggttcttgaatggcaattctttttgactaaaaccccctcctctcctcagtcagcaggccgaaattgatgtccctctcttgcccccaacctcctgtctctcttatgttcccactcgtgcc

SEQ ID NO: 1726 - DNA, 809 bp, Homo sapiens
  SIMILAR (130)..(963): 381254mologous to Rattus norvegicus ribosomal protein S2,accession number U92697,Smith-Waterman Score=244.
agtgccttcttctccctcctcccacctcccgccttggcaccaccaagtggccatcagctgaggggccgagggggtgtcagtggggaaacatgggactctattgtgaagcattagcacagatggaccccaggaccgtctgttgcctgctcctgacagacagcatctgttgggggcgggagggggagacgcaaagcggagaggcaatgatgtatattccattcattccattgcttatccccaaagggacccagcaaaagggcatcttgcacaacctcctctgtgaaggagccaccccagctatcacagagggttacctaatggacatgtctccttgcctgaaacctggagaagtggatgccacaggtgtggcacagcccctgtgtctaacagcctgtggagccagtcatccttcagctgacgtggaggcagacttccccagtttatgtagggcagtccacctccaggcctccaagcagaaagccctagagaaccccagagacagtaagcacgctgttgagaaaaatgtggagaccaactcaagaggacaaattactgatagattagtacagtctgaggtagctgtcacagggaaaaaacgtgagaagacaaattcagacaaagcccaagaaaaggatgctttgtgtcttctgtcccttgcatgccagacccgccctctaggaacacaaagcaacagtctcaggaagacccaggatgttgggaacagcattcctcttgctggggtctgctacagctggtgtgagcacgagaccctgaccttagaacatccaccccattcccaactcccctga

SEQ ID NO: 1727 - DNA, 1098 bp, Homo sapiens
  SIMILAR (966)..(1091): 501254mologous to Homo sapiens Human secreted protein, SEQ ID NO: 4473,accession number G00392,Smith-Waterman Score=77.
atgctcgctcctgaagtgggcaagactggagggggcaagtgggatcctagaggcaagtccggaggctgcggcaagtctccagccacactggagcaaacccggataccctatcatttcatgcaaatacctcagtatgtgtttcaaaaagatcaggagtttgctgaggctctgcctgtgctgcctcacccttctctccctggagaaaggcccctccaagaggctgttgcttttctttgttggcttctggtagatgtgctcctgaaggcaactgtctcaaaggtgggaggaggcagcgcacttgccagtgtggctcgggttatgaaagcacaggcttttagtcccctgctgaggatcctgcacaaagcctctacttccagcttcagggccaggaaagactcagcccacacacccagttgcctcttgaccccttcagggccagagagagcaggtccactcactcaggactcatgtcagccttctccccacgactccttcagagccccagctctccttgaacccagctccgcactgagcacagcagtagcctcccttagaagaagggaagagagactagagccagagcagagggtaggtgagctaggttcactgggggagcgccagcatgaaccctcagacaatcacgacttccaaccaaagtccaagcaggagcagcttcagaaaacactccagccttctggtggtccacattgttcttccttactgttgatggtattttggtggaaacagtggagaaaaactgaaccactgaaagctgaaagaacaggttacaaagaaaaagaaatttcaaccaaatgtagcagtagtccgagcggccagctttctcagtcaagtgcagcaggacccgcctggccagaggatgccagaccagaggccacctggtcagcaaccttgttgtcttttgacccaagatgcaaaaacgatagcatagaagagccatgttctgggctgctgcagtatgctgggggtccactccagtttccagtcaccttggattttccagcccctgaaggtgtcaacagggaagcctacaaaatagcaaagatggcagcctgcccctccctctgggagctccattga

SEQ ID NO: 1728 - DNA, 486 bp, Homo sapiens
  SIMILAR (135)..(290): 341254mologous to Homo sapiens 09-MAR-1992 Human interleukin 9 receptor clone ph9RA5,accession number Q47838_cd1,Smith-Waterman Score=87.
atgccgccggatgtctgccagccgggccgggacgctgcgtcagagccatgcatggcccgcttgtcctcaccgctcctttgtgaccgtcaaataaggccctccatggatgtcacaagactgtcaacattttcaagggcctcgtgcatgaaaataatttgtcaagtgcagaagctacatcatgagcagactgtctttggaacaagctgtggaatggaccgtggaatgaatgcaggcagccactctgcctccaagatcagcacagaaagaacccccagctccctgcacctggtctcagagactttgaactcaaacagacatcgcacatggaatgacacgcaagccctgtcccagataagcctgtcaatccccaatgcctccaggaagccagaggagccccctacacagcccacagagggcagagaaatgagtccgtcctgtggccctgatatcatcccatggagccagcacaccctgtggtccaactga

SEQ ID NO: 1729 - DNA, 374 bp, Homo sapiens
  SIMILAR (1)..(141): 821254mologous to Homo sapiens T-cluster binding protein,accession number D64015,Smith-Waterman Score=209.
gatgcagaaaatgcgattgtgcatatgggcggtcagtggttgggtggtcgtcaaatccgaaccaattgggccactcgtaaaccacctgcacctaaaagtacacaagaaaggtccacaggctcagaaaagatggaacgagtgactgtggagaagggtagaacatgggcctgcccagagcgcgaaggcagatacagaagagctgcccgtgaaggatgcaggtctgagcctcagccgagcgtggctgggcgaaatggaagcctttctctcctgctgcctctcctgctgcattttaccccgggagatgaaggttttggagacgttagtgacacatggatgttatcacagtgtacagctgtgacaggagtagcagaaag

SEQ ID NO: 1730 - DNA, 427 bp, Homo sapiens
  SIMILAR (44)..(403): 281254mologous to Drosophila melanogaster SRp55,accession number X58720,Smith-Waterman Score=111.
  misc_feature (1)...(427): n = a,t,c or g
ggaattcggggcttgagtggtgaaagagtgtcctgcttcctccgagagcttagctgggganaaagctgggagcgactcgagctgaggacgtggaagggcccgctccggacactgcgctccaaccaggaggagcaggaggaggaggaggatgaacaaaatggccgccgccaccagccaggcaggaaacagggcagagcgcaggcgcgacccgccaggtcaccgctcaggccagccgcgacagcctgcaagggggacgaccgaggggagagaaaaaagggccgccgaggaaaccctgggacccgctcacgacggatcacgtcgtcgctgtgggcctctggccggccgaagcccagctagctccgggagagatcgggcaaaaagagaaacgtcgtgaagccgaagtctctgggaattgtggtcctggaaa

SEQ ID NO: 1731 - DNA, 660 bp, Homo sapiens
  SIMILAR (12)..(1271): 241254mologous to Leishmania major L8453.1,accession number AC008054,Smith-Waterman Score=136.
atggggcccacgttcagctccctgtggttctcagagtctcaccggatgtctgccgcgctgcaggtgctcagcacagcccgccgacttcctggtcgtcgcacgtcctcacgtatgactacactacccagaagtctcctcttcacgtcccagcgcgggaccacaattcccagagacttcggcttcacgacgtttctctttttgcccgatctctcccggagctggctgggcttcggccggccagaggcccacagcgacgacgtgatccgtcggtccacaggctcagaaaagatggaacgagtgactgtggagaagggtagaacatgggcctgcccagagcgcgaaggcagatacagaagagctgcccgtgaaggatgcaggcctcagggagatgtgtcaaggaaccacagtcagtgcggctgggcgccctgctcagccaggagtttgtctgcagagcaggcctcttccccagagcagcggcccagcctgttggagagtagccaaccaagcgccgcagggcgcaggtggctcgtggcgcgggcgcgcgccgtcgcattgggtcctactggcttgtgtgcctgtggctccacgccgggcgcggagtctaccagagagaagaaaacccggagtcacttactcgacgacatctatgcagggcagtaa

SEQ ID NO: 1732 - DNA, 409 bp, Homo sapiens
  SIMILAR (2)..(409): 1001254mologous to Homo sapiens neuropathy target esterase,accession number AJ004832,Smith-Waterman Score=691.
agcaaagcaggagctggccaagctgatgcggattgaggacccctccctcctgaacagcagagtcttgctgcaccacgccaaagctggcaccatcattgcccgccagggagaccaggacgtgagcctgcacttcgtgctctggggctgcctgcacgtgtaccagcgcatgatcgacaaggcggaggacgtgtgcctgttcgtagcgcagcccggggaactggtggggcagctggcggtgctcactggcgaacctctcatcttcacactgcgagcccaacgcgactgcaccttcctgcggatctccaagtccgacttctatgagatcatgcgcgcacagcccagtgtggtgctgagtgcggcgcacacggtggcagccaggatgtcgcccttcgtgcgccagatggacttc

SEQ ID NO: 1733 - DNA, 452 bp, Homo sapiens
  SIMILAR (282)..(452): 1001254mologous to Homo sapiens neuropathy target esterase,accession number AJ004832,Smith-Waterman Score=282.
cgcgcattacgtggtctggcgataacgcgctgcgtccgctcgggcggaactacgtttcccggcatgcactgcgggccgccgggcctcagggaagagtcgcgcccccggggagggagcagcactggcccattctgcagatggggacatcgagtcacgggctggctacgaactcctcgggggcgaaggtggcggagagggatgggttccaggacgtcctggcgcccggggaaggctcggcgggacggatttgcggtgcgcagccagtgccgttcgtccctcaggtgcttggcgtgatgatcggggccggagtggcggtggtggtcacggccgtgctcatcctcctggtggtgcggaggctgcgagtgccaaaaaccccagccccggatggcccccggtatcggttccggaagagggacaaagtgctcttctatggccggaagattatgcggaag

SEQ ID NO: 1734 - DNA, 739 bp, Homo sapiens
  SIMILAR (1)..(132): 1001254mologous to Homo sapiens mucolipidin,accession number AJ293659,Smith-Waterman Score=243.
catcccggcggcgcaggcgcagaggagagcgagctgcaggcctacatcgcacagtgccaggacagccccacctccggcaagttccgccgcgggagcggctcggcctgcagccttctctgctgctgcggaaggtgtttccacaccggtagccagctgtgccctgaggtggaagaggaccggccacccaggaattttccaagtaacgactcggagtctccgggattcctatctcccggcccccgaatttccattaatattctagcgatgtcagaaacatcctcagcttcccagaaaaatcccagactccgggctaccagatcggccgtccagctggaatcaaccgatggaggctccgctgcaaactggaatgcgcgcattacgtggtctggcgataacgcgctgcgtccgctcgggcggaactacgtttcccggcatgcactgcgggccgccgggcctcagggaagagtcgcgcccccggggagggagcagcactggcccattctgcagatggggacatcgagtcacgggctggctacgaactcctcgggggcgaaggtggcggagagggatgggttccaggacgtcctggcgcccggggaaggctcggcgggacggatttgcggtgcgcagccagtgccgttcgtccctcaggtgcttggcgtgatgatcggggccggagtggcggtggtggtcacggccgtgctcatcctcctggtggtgcggaggctgcgagtgccaa

SEQ ID NO: 1735 - DNA, 776 bp, Homo sapiens
  SIMILAR (611)..(682): 951254mologous to Homo sapiens mucolipin 1,accession number AF305579,Smith-Waterman Score=116.
gagatcagctgatgccggagggtttgaagccgcgccgcgagggagcgaggtcgcagtgacagcggcgggcgatcggacccaggctgccccgccgtacccgcctgcgtcccgcgctcccgccccagcatgacagccccggcgggtccgcgcggctcagagaccgagcggtttctgacccccaaccccgggtatgggacccaggcggggccttcaccggcccctccgacacccccagaagaggaagaccttcgccgtcgtctcaaatactttttcatgagtccctgcgacaagtttcgagccaagggccgcaagccctgcaagctgatgctgcaagtggtcaagatcctggtggtcacggtgcagctcatcctgtttgggctcagtaatcagctggctgtgacattccgggaagagaacaccatcgccttccgacacctcttcctgctgggctactcggacggagcggatgacaccttcgcagcctacacgcgggagcagctgtaccaggccatcttccatgctgtggaccagtacctggcgttgcctgacgtgtcactgggccggtatgcgtatgtccgtggtgggggtgacccttggaccaatggctcagggcttgctctctgccagcgggactaccaccgaggccacgtggacccgggcaacgacacatttgacattgatcccgatggtggttactggtgagtgggcaggacgaggcttcactgttgggagcctgagctgctgggattaaaatcaacagctgtggctgggcacgg

SEQ ID NO: 1736 - DNA, 562 bp, Homo sapiens
  SIMILAR (4)..(531): 981254mologous to Homo sapiens neuropathy target esterase,accession number AJ004832,Smith-Waterman Score=893.
tcagatgccagcatctacgtggtgcaggacgggctgctggagctctgtctgccagggcctgacgggaaggagtgtgtggtgaaggaagtggttcctggggacagcgtcaacagccttctcagcatcctggatgtcatcaccggtcaccagcatccccagcggaccgtgtctgcccgggcggcccgggactccacggtgctgcgcctgccggtggaagcattctccgcggtcttcaccaagtacccggagagcttggtgcgggtcgtgcagatcatcatggtgcggctgcagcgagtcaccttcctggcactgcacaactacctgggtctgaccaatgagctcttcagccacgagatccagcccctgcgtctgttccccagccccggcctcccaactcgcaccagccctgtgcggggctccaagagaatggtcagcacctcagctacagacgagcccagggagaccccagggcggccacccgatcccaccggggccccgcagcatggacctacaggggaccctgtgaagccctggactcatcatcaataaacactgttacagc

SEQ ID NO: 1737 - DNA, 2860 bp, Homo sapiens
  SIMILAR (760)..(1041): 1001254mologous to Mus musculus early B-cell factor,accession number L12147,Smith-Waterman Score=481.
  misc_feature (1)...(2860): n = a,t,c or g
atgaagaggaagaccttcgccgtcgtctcaaatctttttcatgagtccctgcgacaagtttcgagccaagggccgcaagcccgcaagctgatgctgcaagtggtcaagatcctggtggtcacggtgcagccatgccaactctactaccctctccccagctcatcctgtttgggctcagtaatcagctgctgtgacattccgggaagagaacaccatcgccttccgacacctcttcctgntgggctactcggacggagcggatgacaccttcgcagcctacacgcggggcagctgtaccaggccatcttccatgctgtggaccaggtgctggtgggcggcagtacctggcttgcctgacgtgtcactgggccggtatgcgtatgtccgtggtgggggtgcccttggaccaatggctcaggcttgctctctgccagcggtactaccaccaggccacgtggacccggccaacgacacatttgacattgatccgatggtgttactggctggcaatgtcaccatccacttccggctgaagaccattaacctccagagcctcatcaataatgagatcccggactgctataccttcagcgtcctggagacaacagcttccggctcctgttgacgtggtggtcatcctcacctgctccctgtccttcctcctctgcgccgctcactccttcgaggcttcctgctgcagaacagtttgtggggttcatgtggcggcagcggggacgggtcatcagcctgtggagcggctggaatttgtcaatggctggtacatcctgctccgtgtgctcaccatctcgggcaccatcatgaagatcggcatcgaggccaagtgcgtcctgccaacaccctgggccccaggtcccatccctgctgtcagtgctatccggggccatatcctcccccaggccccccaaaggaagggctgggcagataggttgacgcagctcccacccgcagaacttggcgagctacgacgttgcagcatcctcctgggcacctcgacgctgctggtgtgggcacccactggctccatgaccacaccggctgtgccctcggcaaggccccgcccctcccaacccctctgggtgcccacagctgacctgagttgtggccacaccctcaacgaggcccctctgccccaacccagatcctcatcgccacactgcgggtggccctgccagcgtcatgcgcttctgctgctgcgtggctgtcatctaactgggctacgcttctgtggctggatcgtgctggggccctatcatgtgaagcctcttcatctacatggtgctcagcctcttcatcgcgctcatcaccggcgcctacgacaccatcaagcatcccggcggcgcaggcgcagaggagagcgagctgcaggcctacatcgcacagtgccagggacagccccacctccggcaagttccgccgcgggagcggctcggcctgcagccttctctgctgctgcggaaggactccgggcaccagatcggccgtccagctggaatcaaccgatggaggctccgctgcaactggaatggtgcttggcgtgatgatcggggcggagtggcggtggtggtcacggccgtgctcatcctcctggtggtgcggagctgcgagtgccaagtgagcacccgaggggcccctcttgggaggctaaaccccagccccggatggcccccggtatcggttccggaagagggacaaagtgctcttctatggccggaagattatgcggaaggtgtcacaatccacctcctccctcgtggatacctctgtctccgccacctcccggccacgcatgaggaagaaactgaagatgctcaacattgccaagaatggttttcttccagggtacctcactgaggatcctgcgcatccagaaagagacgcccacgctgcagcggaaggagcccccgcccgcagtgctagaagctgacctgaccgagggcgacctggctaactcccatctgccctctgaagtgctttatatgctcaagaacgccggtcagtgttggggtgcagggtgctgggccacttcgagaagccactcttcctggagctctgccgccacatggtcttccagcggctgggccagggtgactacgtcttccggccgggccagccagatgccagcatctacgtggtgcaggacgggctgctggagctctgtctgccagggcctgacgggaaggagtgtgtggtgaaggaagtggttcctggggacagcgtcaatagccttctcagcatcctggatgtctcaccggtcaccagcatccccagcggaccgtgtctgccgggcggcccgggactccacggtgctgcgcctgccggtggaagcattctcgcggtcttcaccaagtacccggagagcttgccccggcctcccaactcgcaccagccctgtgcggggctccaagagaatggtcagcacctcagctacagacgagcccagggagaccccagggcggccacccgatcccaccggggccccgctgcctggacctacaggcttgcagggtggcccccgctccgacttcgacatggcctatgagcgtggccggatctccgtgtccctgcaggaagaggcctccggggggtccctggcagcccccgctcggggccgccagaccagcagcatcttcgaggcagcaaagcaggagtggccaagctgatgcggattgaggtgggcagccgaggggagctgggcacgggcgcaagggaggcctggctgcgcccatctcaacccccctacctccccggacccctccctcctgaacagcagagtcttgctgcaccacgccaaagctgcaccatcattgcccgccagggagaccaggactccaactcctag

SEQ ID NO: 1738 - DNA, 893 bp, Homo sapiens
  SIMILAR (121)..(234): 761254mologous to Homo sapiens Krueppel-related DNA-binding protein,accession number M61871,Smith-Waterman Score=158.
gtgagggtggcccatattcctattgctgcagcagaaattgctgccatccctgacagaggagggcacctgagtgttggaaagcggaaactcacattttggtttttctatggagtgttgccattcagggatgtggccatagaattctccccagaagagtgggagtgcctggactctgctcagcagcatttgcacagggatgcgatgttagagaactatggaaacctggtgtctctggctgcaggagatcaaagccttccaggagatgcagctgcttcagctgtctgcagacaattatcaccttcagcctgtggggcaattttgggtctgcctccagttaatggagtggctccagtaagactgagagatttgtgaaaaatcaaacttccgcccaagaagccggcatttcagacctgactggccagtgtctcaaagacgtggatggtgaccagctctctccagaacagatggcgctccagctttgtgggagaaactttcaaggtaggatagtgactctgagaccaagattcagcaccctggtgaggctgtgcctatcttatgggaacactgtttgcagtggagatagagctctcatggacggatcctgtccaatgttaagactgtgtctcgtgtatttggatgcaactcacaagaggttgtattgtgccatatatctgtgtccaaattataagcacaatgatgaatcttttactgggagtcaagatatgtgcaggatggtgaaacttatcactggacctttccacagtgttattgtcacatatacctttgtccaacatccaatagatgaaaaaagatgcaaagaagacacatttgctttttatgcacacatcacttccagtcactatgttgagcagagtcagtgtgaggacaattga

SEQ ID NO: 1739 - DNA, 764 bp, Homo sapiens
ctttctatcaggggagggaggctgtgctctcactggcttcttgttagaagttctgcctgccctacagcctgcactgagggctctcatcactgcttctgagatcttaatgggggtcaacgaagatgtgggcttctctgagtttagaccatccatctgccaaggaaaaccaagccctgagactgatagagatgagagaagagaatggtgatgtccccaagacagagcaggcaggaagtttgaagcctctgagggatacaggaaaatctaacctcaaagagaagaagcccctggcaagcatcatttacttcctgtatgtatttgatgctctagggcaggggtccccagcccctgggctgcagacccgtacctgtctgtggcctgttaggaaccaggctgcacagcaggagcttcagggtacctggatatctcacatgttagctcagtactccatggctcatgtcctgggacagaaagccaggtggaattcatatcaccttttagacttagccttagatttcaagtggtgtcatttctgtcacattcatttggtgaaggcacttgtaaaggtcttcccacattcaagagatgagagctccttgactccaccccttgatggagcatcgacactatatagggaaaagagcgtgtgggaagaggaatatattgatgcggccatctttggaaaatacaatcctgctacacagataaagcatttggctgagtataatgagttaggcatcacgatgagtcctagaataagatga

SEQ ID NO: 1740 - DNA, 438 bp, Homo sapiens
  SIMILAR (221)..(382): 371254mologous to Homo sapiens Sequence of human microtubule- associated protein tau,accession number R59837,Smith-Waterman Score =65.
agtcagtcatgtccatggagaggttctgggactgcaggtcgtccatcactcagctctgatgccacttggcctgaggagcactggatgtgacttgatttgcagtcatttcaaggaatcatagagttgattggattttaaaattgggcttcagctaatgaatacatgtgcaatccagagtcaaaggcatgtgctgagatgtgatttcatggccatccggctccgggggagatgcggggctggccgcgcgtcacaaagaggagcccggcgcaatctggcaaaacccaactttccaccaggctcgccagggccgccagatacgtcaacagaatccatctttcgaagggcctggaaggcgccgggttttccgggccggggcagaacggcagatccggagactgcccggtgcggtgcctgggacgaaatcgtcgagccggtaaa

SEQ ID NO: 1741 - DNA, 1163 bp, Homo sapiens
  SIMILAR (736)..(638): 511254mologous to Homo sapiens Human bcl2 proto-oncogene wild type protein fragment 1,accession number Y21104,Smith-Waterman Score=84.
catggatgatgactgttgaatgctaaggctccatggctgagcgatgcctagtgtactcccctcaagaacacgaggagcttagaagagagaagcaggcctcatctggggcccaacacactggtggtctggctcagaaattgggcaaggataatcctaggggtgaagagcatcagagaattcacgcaattttgcccatttttcctttcttattcagggatgaatctggctgaccttcgtggaccctactctgtctcatgcagcctggcttctcacgtggcttgtacagggctctccatggatttgggcaaaccctcgtggcctcaagtgacagtcacatgactccaaccccaaccccactcttccctctggcttccttccctcctcccctacagtgtttccttcagttcccaaatcaactttctgcactggaatccttgtctcaggatatgcttctgggggaacctacgacacttgtcattgccagccccaaatctgcttctcttcctagggacctctatctcagtgaccacgccccccccgcctcctcccaccccttggtgtatatagtaaaggccgggcgccgcacgcagacacacactcgccaggacacaggcgcacacacgctcacgcacaaccagcagcggcggcggcgacagcgactcggtgacagcggcgacggcggctcccaccgcggcgcacccccttcaggcggccggcggcgaggccagaccggagagttccagcacactcgaccaccccgctgccccggcccggaaaacccggcgccttccaggcccttcgaaagatggattctgttgacgtatctggcggccctggcgagcctggtggaaagttgggttttgccagattgcgccgggctcctctttgtgacgtgcccgggtgcccatcatctcattctttccagactcaaagcctttccttcatggctcacaatgttgatgagcctcttgagtctgccacttcactgtcctctgatgtcagaaggagttggttttgtttcacatggcagaagcagactgtttactggagcacaggaagaatccgacattctggcgaaaaataattcattaacagccagggtattaccagttccctggaaaagctcctccagctgcactgtagcaactgttctttttcagcag

SEQ ID NO: 1742 - DNA, 360 bp, Homo sapiens
  SIMILAR (142)..(258): 401254mologous to Homo sapiens Human secreted protein HDPJF37, SEQ ID NO:164,accession number Y86249,Smith-Waterman Score =69.
atggctgagtgggctgcagtgaaggctgttggaagctggaagttgacagcaggccaaagacatgtcttagataaaggccgtgttttcagcatgaacgaccagagaatctaccaaatagaaacgatactcaacgtcaaattatgctgcctaatgaataagccctgctcttctcttgctagtcccaagtcggagcagcctccttgtctatggcggcttctgccattccctccaccctccatcactgaaactgctctgcctgatactgtcatctccaggctcaaagcgcttcaatgcttctccactgctctccggagaagcatggcacccatggagcaggacagacaatgcccttcccattga

SEQ ID NO: 1743 - DNA, 512 bp, Homo sapiens
  SIMILAR (272)..(430): 331254mologous to Arabidopsis thaliana DnaJ protein, putative,accession number AC069159,Smith-Waterman Score=77.
catctgcaaatatatcagacctaaaacaaaaatatcaaaaactcatattaatggttattggattttttccccctctttttggtgtacatacttggaaggacgcatctgtcacaggaaaatttttgtgaagcactcatcttctgacttgcccatgaattccttgttttaagcagtcaaggcaaacagtgtgcttctcaaattttagcacgcgtaacagttgcttggagagcttggtgaaacagagattctggagtcctccctctgaagatttgagtatcatccagataaacaaagtacagatgtaccagcaggaacagtggaggaatgtgtacagaagttcatcgaaattgatcaagcatggaaaattctaggaaatgaagagacaaaaagagagtatgacctgcagcggtgtgaagatgatctaagaaatgtaggaccagtagatgctcaagtatatcttgaagaaatgtcttggaatgaaggttggattttttttttctcttgacaacatt

SEQ ID NO: 1744 - DNA, 405 bp, Homo sapiens
  SIMILAR (9)..(137): 411254mologous to Homo sapiens Human secreted protein encoded from gene 65,accession number Y25775,Smith-Waterman Score=84.
atgaccttatttggaaaaagggtctttgcagatgtaattaaggtcacactgatgcaagaggtgggcacccatggccttgggcaactcggcctctacggctttgcagggtacagctcccctcctggctgctttcatgggctggctttgagtgtctgcagcttttccaggtgcacggtgcaagcttatcatccagataaacaaagtacagatgtaccagcaggaacagtggaggaatgtgtacagaagttcatcgaaattgatcaagcatggaaaattctaggaaatgaagagacaaaaagagagtatgacctgcagcggtgtgtgtactgccttgcacaaactcaacgaaagttcatcgatgatgactattgtcaaaatggcaaagcagataatagactgagttaa

SEQ ID NO: 1745 - DNA, 415 bp, Homo sapiens
  SIMILAR (203)..(84): 321254mologous to Leopardus pardalis MHC class II DR antigen beta subunit,accession number AF057860,Smith-Waterman Score=59.
cccacgcgtccggttaagtttagcagataaggcagtttatcacagtgtccgttcactcagacagcataagtatgtgttgataaaataatcttaaatacaagaactttagtaaagaaataagccacttcattaacattgtaaaatagttttaagatataaagtatgaaaggaattttacagtgtataaattttctgactttccaattagcaattataaatttttattgacaatcttattttgaaaaccccggagttttcaaatattctgcatttatgttgaccattttaccaagatgataaaacatgcattattttctccattttataatttttacagggggaacagcgaagccagatgatttattagttattgccggtgaaaatacagagatcctttgaaacatttgtctctcct

SEQ ID NO: 1746 - DNA, 273 bp, Homo sapiens
  SIMILAR (3)..(74): 581254mologous to Pseudorabies virus immediate-early protein,accession number M34651,Smith-Waterman Score=67.
atgcggctgctgcgggacgcaccaggcctagtcgcccgacagccgcccgaggagcagcccagccaccccagggcccggaggaccaaccgcttcgacaccgccccgggcggcggcagtgttggccggcgaggcgaggaggccgggccgccacgctcattgaatcagaaactcagtggtgggattcagcgatttgtatttgaacaagccccagggggaacagcgaagccagatgatttattagttattgccggtgaaaatacagagatcctttga

SEQ ID NO: 1747 - DNA, 1515 bp, Homo sapiens
  SIMILAR (67)..(1461): 1001254mologous to Homo sapiens E2F-3 transcription factor,accession number Y10479,Smith-Waterman Score=2364.
aaataataaagaaattgaaaacaatacattaatataccataacactaaaaagagcaggagcgagagatgagaaagggaatccagcccgctctggagcagtacctggtgaccgccgggggtggggagggggcggctgtcgtcgccgccgccgctgcagcctccatggacaaaagggcactgctagccagccccggcttcgccgccgccgccgccgctgccgccgccccgggcgcgtacatccagatcctcaccacgaacacttccaccacctcctgttcctcctccctccaaagcggcgccgtagccgccggccccctcctccccagtgcccccggcgcggagcagaccgccggcagcctcctctacaccacgccgcacggaccctccagcagagccgggctgctgcagcagccaccagcgctgggacgcggcggcagcggcggcggcggcggccctccggcaaagcgaaggctggagctaggagaaagcggtcatcagtacctctcagatggtttaaaaacccccaagggcaaaggaagagctgcactacgaagtccagatagtccaaaaactccaaaatctccctcagaaaaaacgcggtatgatacgtctcttggtctgctcaccaagaagttcattcagctcctgagccagtcacccgatggggtattggatttgaacaaggcagcagaagtgctaaaagtgcaaaagagaaggatttatgatatcaccaacgttctggaaggcatccacctcattaagaagaagtctaaaaacaacgtccaatggatgggctgcagtctgtctgaggatgggggcatgctggcccagtgtcaaggcctgtcaaaagaagtgaccgagctcagtcaggaagagaagaaattagatgaactgatccaaagctgcaccctggacctcaaactgttaaccgaggattcagagaatcaaaggttagcttatgttacatatcaagatattcgaaaaattagtggccttaaagaccaaactgttatagttgtgaaagcccctccagaaacaagacttgaagtgcctgactcaatagagagcctacaaatacatttggcaagtacccaagggcccattgaggtttacttatgtccagaagagactgaaacacacagtccaatgaaaacaaacaaccaagaccacaatgggaatatccctaaacccgcttccaaagacttggcttcaaccaactcaggacatagcgattgctcagtttctatgggaaacctttctcctctggcctccccagccaacctcttacagcagactgaggaccaaattccttccaacctagaaggaccgtttgtgaacttactgcctcccctgctgcaagaggactatctcctgagcctcggggaggaggaaggcatcagcgatctcttcgatgcttacgatttggaaaagctcccactggtggaagacttcatgtgtagttgattatgcttcgtgtgaactctccttaaaaaccgatatttttttatcatggaa

SEQ ID NO: 1748 - DNA, 1122 bp, Homo sapiens
  SIMILAR (607)..(1119): 991254mologous to synthetic construct tetracycline resistance,accession number V00083,Smith-Waterman Score=859.
atgagaaagggaatccagcccgctctggagcagtacctggtgaccgccgggggtggggagggggcggctgtcgtcgccgccgccgctgcagcctccatggacaaaagggcactgctagccagccccggcttcgccgccgccgccgccgctgccgccgccccgggcgcgtacatccagatcctcaccacgaacacttccaccacctcctgttcctcctccctccaaagcggcgccgtagccgccggccccctcctccccagtgcccccggcgcggagcagaccgccggcagcctcctctacaccacgccgcacggaccctccagcagagccgggctgctgcagcagccaccagcgctgggacgcggcggcagcggcggcggcggcggccctccggccccgggggccaaaaataatcggggctctggagagaggagggtcccggccgcacggatatcgggccccaagcggggatggaggcgtcgggggcggccgatgcaacggattgcgaggcggcggcggcagcccgggtgctgcggccggcagctgaaaaatggctccaggaagctgctgctgacaatgaatgaagggatacggtttacgcgccaaggacaggtgccggcagcgctctgggtcattttcggcgaggaccgctttcgctggagcgcgacgatgatcggcctgtcgcttgcggtattcggaatcttgcacgccctcgctcaagccttcgtcactggtcccgccaccaaacgtttcggcgagaagcaggccattatcgccggcatggcggccgacgcgctgggctacgtcttgctggcgttcgcgacgcgaggctggatggccttccccattatgattcttctcgcttccggcggcatcgggatgcccgcgttgcaggccatgctgtccaggcaggtagatgacgaccatcagggacagcttcaaggatcgctcgcggctcttaccagcctaacttcgatcattggaccgctgatcgtcacggcgatttatgccgcctcggcgagcacatggaacgggttggcatggattgtaggcgccgccctataccttgtctgcctccccgcgttgcgtcgcggtgcatggagccgggccacctcgacctga

SEQ ID NO: 1749 - DNA, 1185 bp, Homo sapiens
  SIMILAR (118)..(840): 991254mologous to Escherichia coli aldohexuronate transport system,accession number D13328,Smith-Waterman Score=1244.
atgcaactgtctctggatgccactatcattacatctctgtggcctcaaatgggtccattgcagaatcttgctatcttcagtgaccttaaagatgtttttgcttctggagaaggaaccagctgcatcaacggtgatctgctgacttcatacagtactccgtctgctcccacctcgcatcccatggcccagtgtccccccctttgttgccgggagttacagatcctaaaatgtgtcaagcgcagccccgccgatcccctgcgctccgagcacgccgcagggacccccggccgccaacgagcctccaaggccgactgggggctagcaccccaacagtcccccggtttcaacccctcagagccccccacaccccagttcactactccctcccccacccccttctccatccggggcgtgaccccttcctacgcccgagaaagaggaagcttcgagttggaggggaagggagagtggggcgcgcccacgaccccgcgcggtgcgagcccacctcccgccggggctggggacggtggggagggagggtattaccggagggccgccgccgccgccgctgccgccgcgtcccagcgctggtggctgctgcagcagcccggctctgctggagggtccgtgcggcgtggtgtagaggaggctgccggcggtctgctccgcgccgggggcactggggaggagggggccggcggctacggcgccgcttggagggaggaggaacaggaggtggtggaagtgttcgtggtgcctagaactatgtctagcacattgcaggttctcaataaatacttttactgcagactacacagtcgggcaatatatggatatagatattctgagtatgccaaattagtttctgactcgggagccttcataattgctattcctctgccagaatatcagcccccagataacccaagaaaaactgaaactggagaaacaaggcttggccataaaaggagctgtggccacactctgccccacatggacccatcggccacccttacccagaagtcgggaagtaaaaaccagtccaaagtgagaaaatcaacccgccactctccggaagctgcacagactttagatggagagcgccatgacacatacgtcccgccacgtttatttgcgcatgctcagcgacggtggcccgaagagatcaaattacatcattgctga

SEQ ID NO: 1750 - DNA, 471 bp, Homo sapiens
  SIMILAR (471)..(412): 951254mologous to Macaca fascicularis unnmaed protein product,accession number AB046093,Smith-Waterman Score=100.
aattttttttttttttttttttttgaagctgaggcagctttattgaaaggaaggccagtgagtgggactcacatttgatctgccccagagtggcgctgggaggttaccgagaacacagtcccgaggtgggggaggccctcagagtcacacctccaggctggactgagaggagctgggcttgtgacccatggggctcttgcccatcacagtgccagcgccagggggtggccagtggcgaaccacgtgccggtagaaggtggccaggtagtcgaagtagttgatgttgagtttccgggcgatgtaacggcccaagtattccatttgctcgtagtgctccgacagctgcaccagcaccaggggctccaacctgtggccgccgaggaccaggtggaagaagcaccttccgtgggcatcggagctgagcgccaggcgcacgtagaccagatgcaaggggccctggcacacggtgcg

SEQ ID NO: 1751 - DNA, 1050 bp, Homo sapiens
  SIMILAR (839)..(979): 891254mologous to Macaca fascicularis unnmaed protein product,accession number AB046093,Smith-Waterman Score=228.
atgagtgccgctgtgggcagtgggcggcggcagcggacgagcggccaggctgaccacctctgcctgactcagatgcctaagggccgggccggcaacctgcccacgacctccatcggctggcgcttccagctctggttcctaggactcacctgcccggagcgccacctggccagacgcctcaagaacaatagcttctacccatttgtgcaacaggagccaaacagtgcccccaatgctgggcggggcggggctgggctgggcttggaaaggcggggcgggggaagaaggagaacggccccgaggcctgaatggggcggagccagggccggggggtcctcacgcgccgcgccacccccagtcttcgtgctcgaatactacctggacacactgtggaaggggatgctgctcttcatcatcagcgtggtcctggtcagcttcagctccctgagagaggtgcagaagcaagagacctgggtcttcctcgtgtacggcgtgggcgtgggcctgtggctcgtgatctcgtcgctgccgcggcgccgcctggtgctgaaccacacgcgcggcgtgtaccacttctccatccagggccgcaccgtgtgccagggccccttgcatctggtctacgtgcgcctggcgctcagctccgatgcccacggaaggtgcttcttccacctggtcctcggcggccacaggttggagcccctggtgctggtgcagctgtcggagcactacgaggtctttgggtggggccgtttccgcacgcagagggtaaatacaacacggtcttcggtgctgggggccgtggagagggcgccggggcttcgggcaggacgggggatgcagcctgttgagcgccacctgctcccacagcaaatggaatacttgggccgttacatcgcccggaaactcaacatcaactacttcgactacctggccacctcctaccggcacgtggttcgccactggccaccccctggcgctggcactgtgatgggcaagagccccatgggtcacaagcccagctcctctcagtccagcctggaggtgtga

SEQ ID NO: 1752 - DNA, 762 bp, Homo sapiens
  SIMILAR (687)..(746): 451254mologous to Capsicum annuum alcohol dehydrogenase,accession number AB033369,Smith-Waterman Score=50.
tgagaagggaagctactttttcattgctgaagtccttgggcagtgggtaagaagaaaaggtaggaaggatgatggtgaagaatgcacttctctaaataggaatgagaatggctgaggccatttccctccttctgggtatcctgccatgaaattgagtagacctagggctcagtggctggaccagaatcaggaggactgatcagatgagggcccttggtttgggccacatttggtggggtatgctacagaatggagacaagacctcatgagctcataggggataatgtctccagacaagggcctcatccttcccatagttgcaagcatgctgcccatctagaattctacaacaaaggcaggcacaaaaacagtgagagggctcaggcagggaaaggtgtccactgggcacagctcatcattattgagtgtctggctgggtattatgatgtcagaggcatcagccacagaggatgttacccttcggatgcatacctcaatctgcctgaaaatcatggaattctggagatggaagggacctcagagattttctggttctctctgttctggttgacccagggcttcggtagacagctttgtcccagtgatgcctgggcatcccgaaagcagggtgagcttccaaccagagtgcagaaatacatggctgacagcaaggaagagaagtcctacaagtcccaggccagccaccagtattcctccacctcatcggagaggaatgtgctggcatgccgcaagttggtctga

SEQ ID NO: 1753 - DNA, 390 bp, Homo sapiens
  SIMILAR (5)..(208): 291254mologous to Mycobacterium leprae putative dTDP-(glucose or rhamnose)-4,6-dehydratase,accession number AL049491,Smith- Waterman Score=79.
atgctggactacttcaagggggccaaaaagtacaattttaccctgcaggcagaagtggggaaggaacaagaagaagaaaaagatttggagaataactccagcggttcccctgcagctccacatggcactccttggaaggaaaacctgtttgtatggctgggggcttcacgtgaggattcagaccaggatacagaaccaatcagaggcctgtcagtccagaagtccttccagaacaccagcagtcctgcattcatccatgtgctgaccacagtgcccactagagctccccgtgcagtcagagattcactgaagcctctgtcagacgtcatcatgaaatgtaccctgaaaagactcttgcacaggacaccctgctggcaacacgtggggtga

SEQ ID NO: 1754 - DNA, 867 bp, Homo sapiens
atgtttgaatttagggggaaaggccatcatgagaaatatgatgttggtaattttaacttttctttagtgcagtcatttaaagctgacaacaggtcacctagctggagagcggcagatttgccaccccacactcaccccggcagagtggaaaagcaactcttgaacaatgaaatgagtgaatgtggagatgaaactcaagaagcacagtttgaaaaccacagaatgagtggaatgcaagcctctgcttcttcaggtgaggattcagaccaggatacagaaccaatcagaggcctgtcagtccagaagtccttccagaacaccagcagtcctgcattcatccatgtgctgaccacagtgcccactagagctccccgtgcagtcagagattcactgaagcctctgtcagacgtcatcatgaaatgtaccctgaaaagactcttgcacaggacaccctgctggcaacacgtgggtctgtatgatggtgtctttaaaataaattcctgtcaacatccccgaggtaacccagaggccctggaggttcaactttctacctattctgaaatcctaaaccaattttcaagagaaggtgatgacagaaatgactcaccatattcaaggattttgatgaaggaccagtggtccaatagaaactggaatgtgcattacacttgggttgcatcttacagctgcagccaaatgtcaggaggatcagagattattggcagtgactgtggtggagctacggagttgaaagcccagtggggtggaaaagagtgcacagacacaccattgccagcagcagcagctctgttcaacaatcacaatgccaggaacagggcatcatcgaaaggctcttcctgtgactga

SEQ ID NO: 1755 - DNA, 667 bp, Homo sapiens
acaattctgcttattctctcaaagagattctaagatgcacctttagaactattaatagcaacctgcattttttttaatttatacttcagaatcctttaagaacctggtgttcctgagtggtcctgaatcatataagttggtaatggaagctgtaatgaccaagtcccctaaacatactatgtctttgccacgtgtgctgtgacttctctgtgggtgatttaatttatttggatccacctctgagtgagcgcacaagtgatcaggtgcttcaaagcccaacagaccagctcctcttcctccggatccctcttttgatcctgccccaggaaaagggatgcattgacactctccctgcatgcaccctggcgagaagcccacctgaaagtcactgtggttaaagatattggtggaggtaccccaggagcactgttacaaatccttcttgttttggcatctcgtacaacattattaagacacagctgagagttgatgggtgtgtaatgcatatgccaaggaaatgtcactaatcccaaagcaatcaaaaaggagacctcaaaccagatgttaatttgttctttgtgtaacaatgtaaccaaaatattgatgataaaagtcataatttaagattcagaataaatgggtttgatgtctgaaaaaaaaaaaaaaa

SEQ ID NO: 1756 - DNA, 1436 bp, Homo sapiens
  SIMILAR (217)..(303): 821254mologous to Homo sapiens unnamed protein product,accession number AK000427,Smith-Waterman Score=124.
atgctggcagaagaacacaccaacagagggacacccgcactctggctggtctcacaacccgcaggacaaggcagagtttggctggggcaatcggaggaactccagggaaaaaccatctcccttctggctcccccatcggcggagagctacttccactcgataaaactttgcactcattctccaagcccacatgtgattcgatccttccggtacaccaagagctcagagttctacagagtcaccactgaacaatatcagaaagctgctgaagaggtggaagcaaagttcaacccttatgacaatgtaagtggcatcagtgttgcctgtgccccatctcccttctcaagtgtgaaccgtttaaggcaggatgacttaagtcatcccaaagaaaggaaagttcacacaatttgtaaagatcttcccgaattctacctacctgataggcaagttataagcatcacttgcctgtcggaggctccacgaaatgctctggagcctttgagaggaaaggaccctgcctgcccctcagaagggagccaagaggaaggacagatggccatggggacccccccagtccacggaccactgaccatcaagaatgttgctatgggtttctctaggaagaactgggaccaccaggccctgataaaaggagtctatacaagatgtgaggatgagctggcagctgtggaggttacagaccagcacgtgtacagagaaatcgccatctttcttttagttcccagtatggctcctagtaggagaactcgttacttctccctcatttcaggcaacctgagcaccagtgaaactgtgactggcatttgcagggacctaaaaggtctgccttgttcccccacatatacactggctaatacggtgctgatgagaagtggagaagctaccccagtggcttctcagggggaaaggtttgagcagctgatggtgtttggcagatgtgacaagcactgggaatactgcccttttggagcttctggtctaatgggagaaataactgatcatccaaataacttgacaatggcaattgtgaaaagtgctgtcaaatgctatgagagcatgtcccatgggaatcgactgtgaggcattggagacaacctcttaaagctgatataaaggctaaaatagtaggcattaggggaagggcagcagggccaatgcatgttaagacgctgaggaaggagctgagctcctttggggttctgaagggaaatctattgtgagaaagtgtcgtaaagagagatggaggcaggggttacatcttgtaggacctagtaggtcataatcactattttggatgtatcccaagagaggtaggaaatcttgaagagttagggttgtaacctagaagttgtgagaccagatttgtggtttaaaaggggcactctggttgttgttgttttgataatgaattgagg

SEQ ID NO: 1757 - DNA, 338 bp, Homo sapiens
  SIMILAR (74)..(148): 561254mologous to Neurospora crassa hypothetical protein,accession number X01075,Smith-Waterman Score=64.
ccctgatccatgggctatgcatttcccattttccttggggatggtcatccaggcaaccagaatctccaggagtttgggagctggcactgctttatggatgatttccaccatgctgccacagttaaatccattctcttctgtcttggaattctgagtgatggttccatggagttagttcaacttatcccacagcttctcataaagaggtctctgtagctgctgccctggtgcaccccagcaccgccttcacaagcccgttccgaccacgggaggctcatgttgtcagcatctcttcatatcaggaacacagcaaggacgtcttttctcaccagttccat

SEQ ID NO: 1758 - DNA, 1449 bp, Homo sapiens
  SIMILAR (1031)..(1810): 761254mologous to Homo sapiens Human secreted protein clone dd119_4 protein sequence SEQ ID NO:108,accession number Y53051,Smith-Waterman Score=1047.
atggccgtggctgagagcattggagagtccatgtgtggccgcctggccggctgctgtcttagttcctccacgtggcacttgttgagcacctgtctctggctggaatgccgggtgccagaagaaactctgcaagtaaaactcaaccatcccaggacactggaaaatcaccactgtgatgggccaactctggttcccagtgacatttattcttcagggactgactctccacccccgaaaaatggtgtgccctgtatcaccaaaccatgtgggcagtgtggcctcattgggtctgggggtcttgttgtcctggattctgaaggaaaggagagagccgttaaagaaagcacgggcagcatagcctgtgctggagtctcctgggatccagaccaggaacacacatttttaacaagatccccagatgattctggggcacaccacgttcgagaaccgctagatgaagggctctctcccatctttgcagggctaatatatgaccaggctttggtgggaaaacagcccaggcacacgctgcctgtcatgtccctctgtgggcagaggccaacaaggatccagacctctggactggaaaggcagatgtggaagaagtggaagaactgtgacatcctccagcgttttgtcctacagggctggctgtctctttcccctgttcagtgcccatggatcagacacaggctctgtattgacgacgctgaaatcacttctcacaaaattggagaccgtgatcacattcacatggaaggggccttttggatctgcatccatctaggtcgtgctactcacggcctgtgcgatacattttcatccatggtgaatatttcaaccagaaccacacttcaaacctggacacacaacggcaagctggcctacatgcagaattccaagacagaagagaatggatttaactgtggcagcatggtggaaatcatccataaagcagtgccagctcccaaactcctggagattctggttgcctggatgaccatccccaaggaaaatgggaaatgcatagcccatggatcaggacttcacaggactgccacaagcgacactgaatggagagataaaaagatgataaaagtcacaggctacaatcctgttgggctttgcggctgtgggtttccagagcgaccgtccctgcaggcccctggacctgccaccttgtcagcagacccctggttttcctgtcacctatctggccatgttgcatcttcattgcctgcttgtctctccccctcacctaccatgaactggtcttctgagggcaggggctgtgcatccttcactctggagccctcagcactgactcggtgcacagagcccagagaaacagacatcagccacccaagaactgttcccacaagatctgttcccatagacccagactatacttcccatgctggtatgcctgatgagtgcctgcatctttaa

SEQ ID NO: 1759 - DNA, 402 bp, Homo sapiens
  SIMILAR (149)..(108): 351254mologous to Homo sapiens Human neurofilament-M mutant protein fragment 41,accession number Y20759,Smith-Waterman Score= 38.
atgaacagtgaatgcggctaccgtgcattgctgctcaggaatacatctcaagaactcaaaatacctaactctaaaagcaaagagactgccagtgataaaaattcagatgaacagcaaatcaaacgagcattcgagttaaatggccacactttcattattgttcttattattcacagtctgcattactaccacaacagtggcaccgttaagcaatccgtcatttgggccaaacggtcaggggtggaggaaggaggagaggtagaacaacagggtaaactgaaaacaatcaatcaaaaaaagacagaaaaaaagcaccgagccagtttcacaggctccgttgctccaaagccatcatttcaaggttatggctttaaaattatggaggaggcagctttcacctga

SEQ ID NO: 1760 - DNA, 525 bp, Homo sapiens
  SIMILAR (250)..(113): 361254mologous to Kaposi's sarcoma-associated herpesvirus K1 glycoprotein,accession number AF282187,Smith-Waterman Score=61.
gcccttgtgcggagccctgccaaggattagtcccagcctgctcctccattggcccttttgaccaactcccagtatgatgggcagatggaaagagagtggcttgtgacgctctccacacaatgaagaaagaaacatgccttctctcctcaacacacagcagctccctgtcatgaccccctgctgccgttacaaagtcattagcatctactgtgcccctgggggtgagggaaagccaaaccccggaacaatatcatctctgctaaagacacaaaacttttgcttatggcacaggcacagagaattctggataaacaggctcagggttttctggcacccagtgagtggctacctcagaaagtcaccttggtttgacaaggggcccatgagaaggatggagtttggggcatttttctcttaatcctcacaagttatggggagaaagagctactattctggaaattctgcccccaaatttattcttaaaaaaaaaaaaaaaaaacttatcgataccgtcgacctcgaccc

SEQ ID NO: 1761 - DNA, 417 bp, Homo sapiens
  SIMILAR (162)..(356): 351254mologous to Streptomyces ansochromogenes SanE,accession number AF228524,Smith-Waterman Score=72.
atgccttctctcctcaacacacagcagctccctgtcatgaccccctgctgccgttacaaagtcattagcatctactgtgcccctggggcaccttgtttttctgttgggtcgttccaagcagaagcgagaagtgaaatgctaggccaggatgggtgtatggaggaccacagtgttctgggtgctgcagcagacactacagagggcacagaagaggctcatgcagttcagcccttgtggcgctgccagggcattgtccggggaagggggtcagagcacagcatcaagccaggccgctgctctacctttatgaatgacctccccaatgtggacttcatcccagttctgcatgtggcccctttgtgtgaccctcatgaacacattctccaggtttatccccagcagtcctcctacacatga

SEQ ID NO: 1762 - DNA, 384 bp, Homo sapiens
  SIMILAR (47)..(178): 451254mologous to Homo sapiens homeodomain transcription factor ALX4,accession number AJ279074,Smith-Waterman Score=88.
atgcttgtcccagtcctgatcctaagcccctgcctcgttggcattgagccttgggaagtgtcaccccacaccaactccaccagctcctacgaaagcacccccaaatcataccctctaggcaccgcagcaaaagcagcttcagggcaatcccccagcacaacctcaccccttcctgagactgctccctccacccttcatgaacgggggctggaaaatgtggtctgctctgataaggatttgcgtcaggctactggctactcagcagccgagaagagcaagcctccaggcctctgcacgcgtgccttctgcccggaagccatccctgatgcccaagactgggttaagtgccagcccctgggctccctcagtgccttgaatttctga

SEQ ID NO: 1763 - DNA, 738 bp, Homo sapiens
  SIMILAR (260)..(141): 301254mologous to Homo sapiens Human prostate cancer- associated protein 62,accession number Y48276,Smith-Waterman Score= 39.
atgttagctggttgccatgatgtcttcatttgtccatcgctgcccctctgtgagcaggcagccatcaggacagagagtggcatgctggacaggccgactctgacaaggagcaagaggaaacaaactttccaaagatgtgctgcatcgattcctgagtggaagcacaggggagctgcagggagtgcagccctggcagtgtcagggttccctgcagcaccttctgtccctaatgctgagcagctgtcagagggagtgctgcagagagctgcccgctgcctgctcgggaaatcctttgcaaacttccccagtcacagagcattagagcggagcccagagccccatgattatgcacgtggagtggcagggtcagcgatgagaaattcggcaagttggctagcccagcctccttcccaacagtctccgccaacacccaacattgacagcaccagctctcaggagaatgctctggtggcagcacccacaagctctgtggtcacggctttccctgcctgcaggcagcaagtcatggtaggatcagaggagggctcggggccagcttccccttccctgaaccatgtctattgtaatctgacttctggccccattgtaggacaagccgcagataaaacctctcagacaccgagttatagaaggaagggctttattcagctgggagcattggcaagctactgccttaaaatccaagctctccgagtgcacaatttctgtcccttttaa

SEQ ID NO: 1764 - DNA, 280 bp, Homo sapiens
  SIMILAR (38)..(256): 271254mologous to Mycobacterium tuberculosis sigL,accession number AL021958,Smith-Waterman Score=70.
tgagcactggcaggcctgggggtcatttttcaaaatgcaccctcaggtgttgtaacattcatccagaatggagaacccacaggtcatctgtttcacaaggttccttattactcctgacagagaacaagagctttttaaaaattttgttgcagtagaaaacacaggcctacataagcagatggctctcagttctaatgtcatattggaacttctgccatctgtcagtgaagagcatctagcattcttgcaaagaacagctgtttacatccagactgcttag

SEQ ID NO: 1765 - DNA, 327 bp, Homo sapiens
  SIMILAR (22)..(171): 241254mologous to Homo sapiens BPAG1n3,accession number AF165191,Smith-Waterman Score=61.
atgtattatagccagaccacttgctacaagctttatagttccttatttaattctcatagcaactctgaaagtcaagacctacgacatttccattttacagatgaagaaacgggcttaaaaagcctaagtcacatgctcaaagtcacacaactagtgagtggtggagatgccttccagttagaactcactgaatccagggagagcggtccattgaggagccagggaattcagggtctcaaatattcactaaatctgctgctggtcaaagacactaagaagaagaaacaggacaaacaacccttgactgtccatgaagttgaaggctaa

SEQ ID NO: 1766 - DNA, 1257 bp, Homo sapiens
  SIMILAR (447)..(289): 561254mologous to Homo sapiens Human secreted protein, SEQ ID NO: 7678,accession number G03597,Smith-Waterman Score=142.
atgggactgaactctgcagacacagagagaagactagatcacagactagtgagtgagaaaagagccaaaatcaggtacttacaagaaggttcatgcttcttaccaaggcttacagtggacataggagagacaacctgggtccttccaggttctccagcaccctgggaagatcaaagtagccagagtccaagaagcactggtgcttccccaccaagactggcagcagataagtgcatcctggatggagcctctggagtagcttggactgtgtccagagttggttccttctggtgggttcttggtctcactgacttcaagaatgaagccttggacgtcaaggtgaatgttacagctcttaaaggtggcacgtctggagttgtttgtttttcccggtgggttcatggtttccctgacttcagcaatgaagctgcagaccctcgcgaaaagttctccaagtccccactcgacccaggacgtccagctggcttcacctctcaggactacaggggctccgaatccagagggaaaacacacagaaatgactatgctacaaggcagactgtgataagagctataatagaagcaaaacaacatgcattgggggaacagggaatgaacgatggctcccacctggtgaggaggggtggtttgcggaaaagcttgatggaaacaggattttcaagtcccatggacctgggaaaggtatcacttattgcaggtacagcaaagtctatacagaagaaaggaaaagctaagagttgggttttgaatcaaagccttatgagctctgacgccggcactcttagccgctgttatgtggcacataaagatgggaaggacaagagaggtgggcatggtgggaggcacgaggagtggagagtgcctggacgctggaacatgtgtggagaagctgtaagagggaagcagagtcacacggtcaggttcttaggtcatgctgggaagtgtgggctttatctggatgctgaacatcaaccagaacatttcaaggaagtcatggtagagccttggaaatctgcattgcaaacaagttcccagatgatgatgatattgctgcttcgaagaccacactttgataaccactattctggtaaagaagtaaaatccagagatgctacaaatcgagacaagaaatgtgataacaaaactcagcacgattctcgacaacaactcaggtctgtcaccatccatgtaactgtggggttcatgatcctacattttggctgtcaacaggaataa

SEQ ID NO: 1767 - DNA, 416 bp, Homo sapiens
  SIMILAR (139)..(255): 271254mologous to Tityus serrulatus immunogenic venom protein TsnTxp,accession number AF039599,Smith-Waterman Score=67.
ggtttgcgacagcagcaaacagcagtggtggacagtgagcgaaagctcagctcaagccgtaacaaacacggaccagaagagtgtgcagttgcaagatttaatagagtgaaaacagagctcccatacaaagggaggtgacccagagagggtagccgttgccagctcgaatgcctgggtttaaatcccggtcattgtccctcccgctgtgctctcagacaatagatgattggctatttctttacctcctgtttttgcctaatgagcgttttagtgagctctctttactacctgattggtcgggtgtgagctaagttgcaagccctgtgtttaaaggtggatgcagtcaccttcccagctaggcttagggattcttagtcagcctaggacatccagctggtcctgtctttcaatatgtt

SEQ ID NO: 1768 - DNA, 893 bp, Homo sapiens
  SIMILAR (3)..(176): 981254mologous to Homo sapiens envelope protein,accession number AF072508,Smith-Waterman Score=285.
tcgaagctgtaaaactacaaatggagcccaagatgcagtccaagactaagatctaccgcagacccctggaccggcctgctagcccacgatctgatgttaatgacatcaaaggcacccctcgtgaggaaatctcagctgcacaacctctactacgccccaattcagcaggaagcagttagagcggtcgtcggccaacctccccaacagcacttaggttttcctgttgagatgggggactgagagacaggactagctggatttcctaggcccactaagaatccctaagcctagctgggaaggtaaccacatccacctttaaacacggtgcttgcaactcagctcacacccgacccatcaggtaagaaagagagcccgctaaaatgctaattaggcaaaaacaggaggtaaagaaatagccaatcatctattgcctgagagcacagcgggagggacaatgatcaggatataaacccaggcattcgagccggcaacgactaccctctttgggtcccctccctttgtatgggagctctgttttcactctattaaatcttgcaactgcacactcttctggtctgtgtttgttacggctcgagctgagctttcgctcaccgtccaccactgctgtttgccaccgttgcagacccatcgctgacttccacccctccagatatggcagggtgtccgctgcgtttctgatatagcaaggcgcccattgccgctcccaatcgggctaaaggctcgccattgttcctgcatggctaagtgcccgggttcgtcctaatccagctgaacactagttgctgggttccacggttctcttccatgacccacggcttctaatagagctataacactcaccatgtggcccaaggttccattccttggaatcc

SEQ ID NO: 1769 - DNA, 150 bp, Homo sapiens
  SIMILAR (2)..(76): 401254mologous to Synechococcus PCC7942 MobA,accession number Y13330,Smith-Waterman Score=54.
atgctcatctggttggatgtgtttctggcttccaaagaaatatcagctgatgctccggaattaccctacaacgtggtggtagtcggcaagaagcctgactggttgctttctatctcttgccagttaaggcctaaacctgtttctgcttaa

SEQ ID NO: 1770 - DNA, 430 bp, Homo sapiens
  SIMILAR (105)..(152): 501254mologous to Arabidopsis thaliana F24O1.6,accession number AC003113,Smith-Waterman Score=38.
atggctgtggcaggggtcccggcagtttccttcaccagtccctgtgagccagcccccgcgctgtccagatcccagacctctcgcgggccggcgcagccttctaagggcggtcctggggtcctgggctcaaagtccagccttggccgcggccccacgggtacgcttgtgggccttccgtgctccaggagccgccagactctgcccggcgcggaatggaggtgtgaagccgcagaagctagggaggggctgacaaggaagagtcggttgcccgtggttccctacgcaactctgtgggtgcggggagtcgaagccttctgcactccaaggctcctggcatcgtccccgcgccaccccggcgtaccctctgatggtcgctgacagcttcacaggggaagatcgagactgacccttctcccgctacacatcccta

SEQ ID NO: 1771 - DNA, 344 bp, Homo sapiens
  SIMILAR (154)..(225): 331254mologous to Bos taurus vacuolar-proton-APTase subunit M9.2,accession number Y15285,Smith-Waterman Score=46.
ttaatggaaggcattctggcttcacatattatcacatgctccatcatttcacctagatagacgacaaaagctttcctgggaacattaaagacataataaatgtgtgttcacttacagagctttggatattttctgagctgtgtcagtcagttctgctgtcctttgctttggtcattggcctcagtctcttctatctgcgcgtcaccattgcttggatctgagatgattcttttgctcagttgttgttggatgtctgactcaaactgaatcactggtggctgcatcaaaagagaatgagaagagcctagataagtggaatgacattctgtttaaattattttagc

SEQ ID NO: 1772 - DNA, 318 bp, Homo sapiens
  SIMILAR (65)..(307): 381254mologous to Homo sapiens glycoprotein Ib beta,accession number L20860,Smith-Waterman Score=86.
atgaacacgagaaactgctcagtcctggctttaaacagtcctgtaatcacaacagccctgggtagacaggaaaacagcatcgacagatgttccaaggggttcatctgtcagacgcctgtccagaagggagggtggaatcctatccttcttcgcttctccccctgctgtgctgtgaatttgccttcttcagccattcactcattcatcagcaggtatttcctgagcacctgccaggtgtggtacacgctgctggagacatggagcaaacaggcaggaatggcccagccctgccctcacctaaaggtgttgaaagtatga

SEQ ID NO: 1773 - DNA, 618 bp, Homo sapiens
  SIMILAR (365)..(300): 541254mologous to Mus musculus lambda(5) precursor; 600 is 2nd base in codon,accession number X04769,Smith-Waterman Score=53.
atgatcattgtggagggatttgggctggaaggaggtaatgttcagaggggcagcaaatcttctcttgaccagtgggcagaactgtggggtaagaactacgttttgatcactgagggtaaaacatgcagattgaccaagaaagaaggttgtttcctacgctctaaagagctgtccctctttaaagtaacagttaaacttacaaggagattaagtaattctgtggaaggggaacctgaggttcaggcagcagcagttcaaggttacacaggtggtcagtggtggagccaggatttgaactcaggtctcttggaccccaaagacagtgtttttccttctgccctggagcgtgcttcaggcccaggggatgtaggaatggcggccccttttcccctaaatcgggtggggcccttcttctttggcattgtctaggtgatgtccccacactcctgtccctgacttccttgtaccttttcacccgagtgcttcactccacctctcagcgatgtggctaccctctgattccagagactcacaaacatgagtcaaagggttgctgggtctttatttgctacaggtggtggatattgtcctcaaaaactggacggggacagggggcga

SEQ ID NO: 1774 - DNA, 379 bp, Homo sapiens
gggggatgattgaatagagctggactaaattggtctaactaggacacttgaaggcttgtgaatcagttcacacgatcagtgtgaaaagcgggtatgaagacccagatgctggtgtgtacgtgtgcatataagccccaacagctagaaatcaagcctttctggcttccgattgttggagaagtggaaacagttaatggagtatgcaatgagattctgccagaaacggagtagaaaaactgtggctcacccgggacccagtctttccccaggttccccacagatgagctctgaatctgttataattgactcaccacgacctgcacgtacacatggaattcctcatggcatccttagatcttttttgccacatccttttgct

SEQ ID NO: 1775 - DNA, 378 bp, Homo sapiens
  SIMILAR (31)..(231): 371254mologous to Cyprinus carpio putative dopamine D3 receptor,accession number AJ133788,Smith-Waterman Score=92.
atggttactaaataccattgtttacaaaaagtagccaggtgtccttgggaagctgctgactcaagggttaagggacaagactccttagaccccaagtgtttgagtttaaataccgattccctcacttgtgtgagtagcagaggaacactgagtaaagaagaacaagaagcagaagtggaggaagcagaaaacaagaggcaggaaacaagaggtctggaaaggaaaaagctagaaatcaagcctttctggcttccgattgttggagaagtggaaacagttaatggagtatgcaatgagcatttaaagtttgtggaactaaaccagagggagacctgcagcaaaatccgaattcaaatgaaccaggtggaagcaagttag

SEQ ID NO: 1776 - DNA, 384 bp, Homo sapiens
  SIMILAR (80)..(18): 421254mologous to Dugesia japonica non receptor serine/threonine kinase,accession number AB014506,Smith-Waterman Score=51.
atgctggcatcccccctgtggctccaagcgctgagcttggcggcggggacctggcggccccggctcggctcgggacaggcaggaaactcagaaatgagagcagggttcttgcctggtgcaggcagccaggtccgagcacagctgcaggacagattaccaaagaccactgaaaccaaaggagccctctggccacacactgagctatgcgggatgtggagcatcgccccaggtgcagagaaccaggagctacagatagattctccccttctggggcagttgagcaatcaggtgtggagggaagatggctatggtaaggcctttaggttacggactcttagctccatggggatcactgaagaggccaatgagaatgttctgatttga

SEQ ID NO: 1777 - DNA, 4615 bp, Homo sapiens
  SIMILAR (3283)..(3441): 981254mologous to Homo sapiens Human secreted protein, SEQ ID NO: 6995,accession number G02914,Smith-Waterman Score=262.
atgaacgtgaaactgaaaagcaaagtaataccatcaacacttggcaaaatagaacctctccgctgtcagcgccagaaatacttacctgctgagaaaaggaaaagcacaacactgactttaccccgcgacgcttttaaaaaatccaaaatacccagcgcgatggggatgggattgcatcaaagctctcagagcacagctgcaaagggtaaagcaaagctagagctctactctggacctatcactctagacagtttctctgtgaggggcagttttatacacatttcaggtggcagaataaattcaatccttgtttctccatcttatcgagtagtagaagttagttacattctctttgaactcatcatgaattccatgaagactgaagaaaacaagtcatttagcgctatggaagatgaccagaggactagacctgaagtttcaaaggatactgtcatgaagcagacacatgctgacacacctgttgatcattgtctatctggcataagaaagtgtagcagcacctttaagcttaaaagtgaagtcaacaagcatgaaacagcccttgaaatgcagaatccaaatttgaacaataaagaatgttgtttcacctttacgttgaatggaaactccagaaaattagaccgtagtgtgtttacagcatatggtaaacccagcgagagtatctactcagccctgagtgctaatgactatttcagtgaaaggataaagaatcagtttaataagaacattattgtttatgaagaaaagacaatagatggacatataaatttaggaatgcctctcaagtgcctgcctagtgattctcattttaaaattacatttggtcaaagaaagagtagcaaagaagatggacacatattacgccaatgtgaaaatccaaacatggaatgcattctttttcatgttgttgctataggaaggacaagaaagaagattgttaagatcaacgaacttcatgaaaaaggaagtaaactttgtatttatgccttgaagggtgagactattgaaggagccttatgcaaggatggccgttttcggtctgacataggtgaatttgaatggaaactaaaggaaggtcataagaaaatttatggaaaacagtccatggtggatgaagtatctggaaaagtcttagaaatggacatttcaaaaaaaaaagcattacaacagaaagatatccataaaaaaattaaacagaatgaaagtgccactgatgaaattaatcaccagagtctgatacagtctaagaaaaaagtccacaaaccaaagaaagatggagagaccaaagatgtagaacacagcagagagcaaattctcccacctcaggatctaagccattatattaaagataaaactcgccagacaattcccaggattagaaattattacttttgtagtttgccccgaaaatataggcaaataaactcacaagttagacggaggccgcatctgggtaggcggtatgctattaatctggatgtccaaaaggaggcaattaatctcttaaagaattatcaaacgttgaatgaagccataatgcatcagtatccgaattttaaagaggaggcacagtgggtaagaaaatattttcgggaagaacaaaagagaatgaatctttcaccagctaagcaattcaacatatataaaaaggacttcggaaaaatgactgcaaattctgtttcagttgcaacctgcgaacagcttacatattatagcaagtcagttgggttcatgcaatgggacaataatggaaacacaggtaatgctacttgctttgtcttcaatggtggttatattttcacctgtcgacatgttgtacatcttatggtgggtaaaaacacacatccaagtttgtggccagatataattagcaaatgtgcgaaggtaaccttcacttatacagagttctgccctactcctgacaattggttttccattgagccatggcttaaagtgtccaatgaaaatctagattatgccattttaaaactaaaagaaaatggaaatgcgtttcctccaggactatggcgacagatttctcctcaaccatctactggtttgatttatttaattggtcatcctgaaggccagatcaagaaaatagatggttgtactgtgattcctctaaacgaacgattgaaaaaatatccaaacgattgtcaagatgggttggtagatctctatgataccaccagtaatgtatactgtatgtttacccaaagaagtttcctatcagaggtttggaacacacacacgcttagttatgatacttgtttctctgatgggtcctcaggctccccagtgtttaatgcatctggcaaattggttgctttgcatacctttgggcttttttatcaacgaggatttaatgtgcatgcccttattgaatttggttattctatggattctattctttgtgatattaaaaagacaaatgagagcttgtataaatcattaaatgatgagaaacttgagacctacgatgaagagaaagcccggcccaggccagcctaccggcgactaggatgctttcgctttcgctctcgctttccaatactcgggactggggaaaccgggagaatagaagcaggcaaggaccgccgtgggcacggggtcagtgagacagggtcctgctcgcggcgtcaaggaggagcgctgtgggtgtccccagcgcagccaatcggcttccgaagtagctggagctctggagcctttgcttcctcaaatacgagcgggaactgcgttgagcgctggattccaggccgagtgctggcgaggcgcgcagctgtcagaaaagagatagaaactcaccaaggccaagaaatgcttgtgcgtggcacagaaggaatcaaagagtacataaaccttggaatgcccctcagttgtttccctgaaggtggccaggtggtcattacattttcccaaagtaaaagtaagcagaaggaagataaccacatatttggcaggcaggacaaagcatcgactgaatgtgtcaaattttacattcatgcaattggaattgggaagtgtaaaagaaggattgttaaatgtgggaagcttcacaaaaaggggcgcaaactctgtgtttatgctttcaaaggagaaaccatcaaggatgcactgtgcaaggatggcagatttctttcctttctggagaatgatgattggaaactcattgaaaacaatgacaccattttagaaagcacccagccagttgatgaattagaaggcagatactttcaggttgaggttgagaaaagaatggtccccagtgcagcagcttctcagaatcctgagtcagagaaaagaaacacctgtgtgttgagagaacaaatcgtggctcagtaccccagtttgaaaagagaaagtgaaaaaatcattgaaaacttcaagaaaaaaatgaaagtaaaaaatggggaaacattatttgaattgcatagaacaacgtttgggaaagtaacaaaaaattcttcttcgattaaagtagtgaaacttcttgtacgtctcagtgactcagttgggtacttattctgggacagtgcaactacgggttacgccacctgctttgtttttaaaggattgttcattttaacttgtcggcatgtaatagatagcattgtgggagacggaatagagccaagtaagtgggcaaccataattggtcaatgtgtaagggtgacatttggttatgaagagctaaaagacaaggaaacaaactacttttttgttgaaccttggtttgagatacataatgaagagcttgactatgctgtcctgaaactgaaggaaaatggacaacaagtacctatggaactatataatggaattactcctgtgccacttagtgggttgatacatattattggccatccatatggagaaaaaaagcagattgatgcttgtgctgtgatccctcagggtcagcgagcaaagaaatgtcaggaacgtgttcagtcttaaaaaagcagaaagtccagagtatgtccctatgtatactcaaagaagtttccagaaaatagttcacaaccctgatgtgattacctatgacactgaatttttctttggggcttccggctcccctgtgtttgattcaaaaggttcattggtggccatgcatgctgctggctttgcttatacttaccaaaatgagactcgtagtatcattgagtttggctctaccatggaatccatcctccttgatattaagcaaagacataaaccatggtatgaagaagtatttgtaaatcagcaggatgtagaaatgatgagtgatgaggacttgtgagaattcagtctactggatttaagggaatggcttatggagttgttatttcataggcattgaaaatggttttctaaactccaaaatggtcatcttatcaataataataatattgaccatttcctatctgccaggcatttttctaagcacatgaagaaattagtcctaacaacactatgagatggactataacttgcccaaattttttttttttttttttgagactgagtctcactctgtcgcctggggctggagtacagtggtgcgatctcagctcactgcaacttccacctcccagggttcaagcgatta

SEQ ID NO: 1778 - DNA, 443 bp, Homo sapiens
  SIMILAR (436)..(311): 781254mologous to Mus musculus transcription factor TEF- 1,accession number Y10026,Smith-Waterman Score=162.
tttggtaaaatagctgttatcctctgtcagaacacaaacaaacaaactttgagaggggaggaaggaaaccgtctagctcagggctcacttaggagagggatgagattagaaagttcaacacactgcttgtgcagcggagataaagtcaagaccctagcacccacttataaatatctcgttatattaaaaaaaaaaaaaaatgtccagggcccacctggctctgctcctgcacagaaagggttcatcttcactttgtgatgctgggccccacgctcgctggtggagacctcgaagacataggcggtgcagacagcagttcctgggtgtctctgtttgtcaccacctggaggatagtgaagttttccaggacgctgttcatcatgtatcgctcaggcagctgcgcaacttgtgcaagaaattcacaggtactcgcacatgggcga

SEQ ID NO: 1779 - DNA, 2432 bp, Homo sapiens
  SIMILAR (2107)..(1208): 911254mologous to Mus musculus transcription factor TEF- 1,accession number Y10026,Smith-Waterman Score=1439.
  misc_feature (1)...(2432): n = a,t,c or g
tttttttttttttttttggtaaaatagctttatcctctgtcagaacacaaacaaacaaactttgagaggggaggaaggaaaccgtctagctcagggctcacttaggagagggatgagattagaaagttcaacacactgcttgtgcagctggagataaagtcaagaccctagcacccacttataaatatctcgttatattaaaaaaaaaaaaaaaatgtccagggcccacctggctctgctcctgcacagaaagggttcatcttcactttgtgatctcacaggtcatggagtgagggtggtagagaggggcagaaatttcagggggaggggtggctgggaaaaagtaaaggggacaagccaatgtgtaactagcgctctccaagacatgcagaggagtgggggtggcctgtcaggggctgaaaagaaaagccagtgctgtacctggggggttgtctcactcctgtccccacaatccctgatactccggagtgatctgtcctttcagacacccactgtgaggtcccaatatcggggtttatcctttcctcagtcccagcctgttcagctctccaaccaagttttgggggcccctctaatgggggggatggcctcagttgcttaggcctctgaggtcaacccctttacatcacagccctctccccaaataagaagcatgaggtgagctggaggaccctccctgggaggagggtgttctggggggtgagccagttttggggtcccccttcagtccctgaccaggcggtaaatgtgatgctgggccccacgctcgctggtggagacctcgaagacataggcggtgcagagcagcagttcctgggtgtctctgtttgtcaccacctggaggatggtgaagttttccaggacgctgttcatcatgtatcgctcaggcagctgccgcaacttgtgcaagaaattcaccaggtactcgcacatgggcgagcgcagcaggcggtacacaaatctgccgtcctccagctgggcccgttccgtctccaccttctccaccacctgcttgccaaaagagcagaccttggaggaacaggtgagggtcatgtgttccaggctctcatactggctgctcactccgtagaagccaccactgctgatgctgccaccggcccctgcctcctcaccacttgggccccagttcaggtccgcccagaacttgaccaggaagaaggcatgggggggggccacgatcatatagctctcggaggccaccctttttctcagggaatttgtcgtagatctgccggacgtccacactctcgagcggcggcgctccggggctggggcagtgctggctgatgtgcacgaacaggtgcctctggtaagaatcaactgcatctggcggttccacgaaggctgagaactctaccagctgcaaccgggcggtgcccaggccccgagcctgccaggctgggggcgatggggtaggtgggggcaggggtgagagggcttgggggggctcgtaccctgggaggtcagtagatgggggagtcagtgacaaggtgaacggtgtctgtgagaatggcttcacatctggaacattccaggggggcccagatcctccagaccaaaactggaaaagctcagaggcctggaccacctgaggaccagtgggacccagtttggcctgcagagaaggcgcggagatgagctgggcagaggacatggttgccattgtctggaaagccttgtccttggaaacctggtccacgttcagagccttcaacttggactggatttcccttgatttccttcgggccaaaacctggatgtgactagaaacctgttttcgagttcgggtcttccccgttctcagcttgatgtagcgggcgatcagttcattccgaccatacatcttgccttcatcagacaaaattattttccggcggccgcagggtggatagatggccagggcctcctggaagctctgctcaatgtctgggctccacaccccctctgcatccgggcccccgtcacccccagccccctcactgccgccggtaccctcctcactgccttcctcactgcccgtccagccgctgccatcgtccagggcggccccagcccggggtttcccccatctgggcctggaggaacacagaactcagcaagcttcccccaaaccccaccctcaagggacttgaagctgagagggctgggactctggaccactgggtctgagggaggaggggctggggacctggactcctgggtctgagggaagaggagctggggggtattcctgggtctgagggaggaggatctggggcctgaactcctgagtctgagggaggaggggctggggcccggactcctaggactgagggaggaggatctggggcctggactcctgngtctgagggagcgggggctggaggcctggactcctgngtgtgagggag

SEQ ID NO: 1780 - DNA, 480 bp, Homo sapiens
  SIMILAR (171)..(260): 501254mologous to Mus musculus SPR2I protein,accession number AJ005567,Smith-Waterman Score=73.
atggcagcaccaggctatgagctcaaggatctgtccaatctcaaaccctatgtgggatctgggaaccatccagttacagcatttggttggaattcaattcagtcagaacttaagcacctgctacaagctcgtcacaattctgatggccagcagaagcaaggggagcctgaccagagccatcgccacctgccaagtgcaaggaccccaggccctgtccaggaggctgtgggtcagctccgggagccagctggaattcaaagtagtcgggctgcttggagaaacgtgcaagatgcaaatcagacaccatgttctgcacatcccagtgctaaaaataactgtggcgccccctctgacccttcctccaacaatgcagagcctcagagaaaacagtgtgcaattggagggagactgcttgtcttccaggccggctccagcaatgccatgctgtacatctctgagccagtccctcgacttctctga

SEQ ID NO: 1781 - DNA, 240 bp, Homo sapiens
  SIMILAR (50)..(115): 541254mologous to Bos taurus SCO-spondin,accession number AJ132106,Smith-Waterman Score=58.
atggcagaaggcaaaaggctgcagcttgcacatcaggagacctgcttgccagaggtggacctgtttggaccctcagtgtacaccaatggcttggtctcccacaggggaatggacccagggaagaggactatgcaggccctaaaaattccccccagagctatgaccatcaaggggcagccaggggagatgtcactcacggtgttgctcaacctgatgggaatctccagctttgcagcctaa

SEQ ID NO: 1782 - DNA, 904 bp, Homo sapiens
  SIMILAR (182)..(57): 471254mologous to Homo sapiens Fragment of human pre-pro- artemin polypeptide,accession number Y84598,Smith-Waterman Score= 81.
atggctgcagcccaggagatcaaggccgcagtctggtgccccggcgccgacagcttgcgccagccggcgggagctagcgggcagcaagggggccggacaggctccactgggcggagcggccctggcggcggttggaacctgaaggttccatcgcacttacttcctgttttgggtccgggcactttggaagaaccaggatggaagctccaaaaaataccaggatggaggaagcagccacgggcgagagtggctgcagctggagtgagcgagcgcgacgagccaccggaaacggagctgcggccgcgccccgcccccagctccccgcacgctgcccctcccgctcgtctgtcccgctggcggcccagcgtgctggctgtacgcgtcacttccggctgtgtcggcgcgcgaaaaaaggtcctgggttggaatgtttgtactggtctgtggcggtggttgtcggctgtcctgccaggaaaactcggcactgactatcccactgctgatgctgtaaaagaggtccttctgctatgacgcaactgtggttcctctggttctggggacacttaggcctcgcgtgccgattttcatagttccctgtggctccgagctgagggagccgcggtgtggaacggagggaaccagtgatctcagtgctgaagaaaacagggagaaccaaagagaagtgaaggaatgtgtccaagggctcccaagttggcggtggaattagaattgaagcctcagctccaaagcctgtgttctgaactacccggttgcagttcacaaaatacactttggcagtactttcataacgaaaacaaatgattacaaccagtttacaaatgctttgctttactggaggatcgacatgtttgactaattttcaaaaataaatctcagaagcagc

SEQ ID NO: 1783 - DNA, 366 bp, Homo sapiens
  SIMILAR (15)..(116): 381254mologous to Homo sapiens Fragment of human secreted protein encoded by gene 29,accession number Y41453,Smith-Waterman Score=63.
atgtaccacaataaacaatgtgggatgaaagcacttggcgagcccaccaaatttgttattggttttgaacttcgtggtgggagaaatcttcatcggcctcatctctcggtccacgtccaacaagcagaagggacacctcactttcagggtcaaaatttaataggaattgccaaattgccccacattggtcttatcaattcacagtccatctatggagtgagaccatgccgtgctgacttctcagcaaagtggcagctggatctcttggcatacatttacctcagccgcactcttcagtgctctgcatccaggctacgcggaggctgcatgttacaggagccgtgcatccctgaagacttggaataa

SEQ ID NO: 1784 - DNA, 776 bp, Homo sapiens
  SIMILAR (602)..(546): 421254mologous to Homo sapiens super cysteine rich protein; SCRP,accession number U63332,Smith-Waterman Score=44.
ttttttttttttttttactttaaggctttatttgttaagttactgcatagagttgcaaaagcatcgacaacatatttcctcaaaatgtagagtttacaagttttctgagctccctgaagtttgcaatctattccagtctcagtgtcctctaattttacatcaatcttctaatgatctaaattgcccattgcatgcagctatcttttcatgtttgatttggttaaaggaaaaatcgcctttcctttgggaaaatgcatattgttagcgaattgtgaaattgtgaggaattgggctgtaattactgaatattggctctccatgaacatgttgctaaaacgtgggaagatgtgccagagaaattgtctctctcctcagtagtccatcgttacagcaacaattgtggaaatcagatgagatgtggaaccatttttgattgccttaaatggcgcatttgtatatgccagcaagaatctatgcttctatgtaaattgaaaaagggaaatgaaacagtctgtggatgtggactctctcaggttgaacaaggaacatctacaggaacacctgacgaggctgcacccttggcaggaagaacacctgacacggctgaaagcttggtggaaaaaacacctgatgaggctgcacccttagtggagggaacatctgacaaaattcaatgtctggggaaagcaacatctggaaagtttgaacagtcagcagaagaatatgttaggccatgtgtctctataacagctattgaactctgcattgtacagtga

SEQ ID NO: 1785 - DNA, 876 bp, Homo sapiens
  SIMILAR (870)..(793): 571254mologous to Homo sapiens PRO0889,accession number AF119839,Smith-Waterman Score=68.
atgccagcatcagagcagccaggcatcagagagccagccttgactactcgccgggcctcaggggctgagccttcgtcccaggacaagggagtggccagagcttggctggccccgttccagatgaggactgtgataccagtcaggtcaacgagcaccgatagaggtagggcccaatataggaccgtgtctcacaatggtgcagacccgcagtccaacacacaggaaggatgcttgttgctaagtcttagacacgggaactggaggagggttgagggcccccagcagtgggaaggcaggcatggcatgcagacggtggacgcggactcaagacaccaactctcatcactacaggtccgtggtttggaaagtcccagcaccattccagagaaggaaacaggcccagggccagggccaaagccatcaagtcctgggcagagggcgggagcgttcagtgagagcagcacagaggttaaagagctgctcttttttgagatcttcgctctcacttcctttccaggcagccagttcagcaagcagtgtgagaacggactgatatgtctaggaaggacagcaacaacagaatccacttttgctatcggctttaaaccaaactatcctctgctgaacaggaaaattgaaacagaaatagagaatggaaaaaaagaggtgactaaaacacacttaagatcactggctctgaggaaatcagctgctatgttgcaagaggtcctagggcacagctcttgtggcaaggaactgaagccgtctgttaacaacacatgcatgagtttggaagcagatctttcagccccagccaagcctttagacgactgcagctccaaagtgtgtcttaacagcgaccttatgagaccctga

SEQ ID NO: 1786 - DNA, 939 bp, Homo sapiens
  SIMILAR (352)..(936): 621254mologous to Cloning vector pZC320 SopB,accession number U26464,Smith-Waterman Score=564.
atgtcattaccaagcctccgctgcacaccacggaaaaacagccttcagaaagagctgctctgggcaaacagcggcaaattatccattgttaaccttgggctgcctttaaaagaaaacattttaagaggaaagaaaagcaaagacaaaacaaacaatggtcattttttcgatatgcttcgtgatctgctcaagaacgttgatcttaaagggttcgagcctgatgtacgtattttgcttaccaaatacagcaatagtaatggctctcagtccccgtggatggaggagcaaattcgggatgcctggggaagcatggttctaaaaaatgttgtacgtgaaacggatgaagttggtaaagatacttcgttatcgacaccagctgccccgatggtggattcgttaattgcgcgcgtaggagtaatggctcgcggtaatgccattactttgcctgtatgtggtcgggatgtgaagtttactcttgaagtgctccggggtgatagtgttgagaagacctctcgggtatggtcaggtaatgaacgtgaccaggagctgcttactgaggacgcactggatgatctcatcccttcttttctactgactggtcaacagacaccggcgttcggtcgaagagtatctggtgtcatagaaattgccgatgggagtcgccgtcgtaaagctgctgcacttaccgaaagtggggtgctcctaccccaagcccagatatcagagaagccccagggcaggaagggagaggtagaaagcctagtccaaggagcgactccctctggctgcacctacacaaagctgactgaagcctgctcagaacaagtcgcagcaatagcagctgaagcaaaatatggggcccagaagatttgtagtgtccaacatagtacaacatccaagagggttattgtgaagatgaaaggaaaagggcaaatgtaa

SEQ ID NO: 1787 - DNA, 1173 bp, Homo sapiens
  SIMILAR (183)..(67): 921254mologous to Homo sapiens Human secreted protein, SEQ ID NO: 7681,accession number G03600,Smith-Waterman Score=193.
atgatgtggggaaaggttcttccaggggaagaggacccaagagatgagaaaaaagtacggcccattggaagtgaggagcgcctctgcctggctgctgtgcaatcttccaagtgtgaagtgacagcctttctgcaggtgtacccaacagctccgaagagacagcgaccatggagaatgggccatgatgacgatggcggttttgttgaaaagaaaagggggaaatgtggggaaaagaaagagagatcagattgttactgtgtctgtgtagaaagaaggagaaggaatatggaaatcatgagttgtttcttaaagcttccaccagaagtgacagttcttacttttgctcatgttctgctgaccaacgttaaggtctgtgccggagcagggacttttcccaacaccagggctggttccactcacacaatccagaaatacaaggatgataatgccactgcagcaacattcaacagctggaagatatctcagctagagctcagactgttcccaatgtgcatgaggaagcagaatcccacaccagccctgactgcagctgttcgcctgtccccactgcccagtgtgttgacttctcattgccatcacagcttccccgaccctgactcagctcgcaagacgtttcagctacaatacccatatccaattggcagctttcttttgtgtttcttcatttctattcacccaagcaagaccctgattggctcagcttatctctgtgctggtacgggggtaaggaaaaagacaataggtgctgatctgggtgaggatgaattttttgggaacccagagatggagaatggccataaaggaaataggcatggtggggtgtggggtgtgggggagtatgcacaaagtatgtacacaaccagacctgcagcaacaaataagcaaggttacatcattcacccacaaaaagtcaatgtcccagccagtaattttgaaaaggagaattcattacgagaatcaaagaagaagcaaggccaaaaagcacttgatctggggaggcagaatcgtgccctaagaagtgcagtagacttcaaccttagtgaaaatcccacttcttttattaacagggcacctcatttttctaagcctgcagtatgggggataaagcctgtatcccaagtagagagaatggataagacaatgtgtctgtga

SEQ ID NO: 1788 - DNA, 717 bp, Homo sapiens
atggatgatcttcgacttacaatgggcttacctcccaggaagcccatcaatagtggaaaatatcaagttggaaatgcatttaatatatttaacttactgaacatcacaggtatctatgcaggacctaattcttacccttgtgggaactggggttcagggggaaaagcacaaattctgatactctggctactgcttttgcttgtgttgacttctcattgccatcacagcttccccgaccctgactcagctcgcaagacgtttcagctacaatacccatatccaattggcagctttcttttgtgtttcttcatttctattcacccaagcaagaccctgattggctcagcttatctctgtgctggtacgaggagagctgtcatagctcaatgtatgctaagtgtaaagtggatgctacgaggaaagctggaaaattcagataaaaagctttctggaaggagattggccttggaggacgtgctcctaccccaagcccagatatcagagaagccccagggcaggaagggagaggtagaaagcttagtccaaggagcgactccctctggctgcacctacacaaagctgactgaagcctgctcagaacaagtcgcagcaatagcagctgaagcaaaatatggggcccagaagatttgtagtgtccaacatagtacaacatccaagagggttattgtgaagatgaaaggaaaagggcaaatgtaa

SEQ ID NO: 1789 - DNA, 420 bp, Homo sapiens
  SIMILAR (9)..(191): 511254mologous to Homo sapiens Human secreted protein sequence SEQ ID NO:195,accession number Y87156,Smith-Waterman Score =136.
tcagcattttttgcactggtttttcctcatcttcgtggatttatctgcctttgatctttgaggctgatgacctttgggtggggcttttgtgtgaaggtcctttttattgatgacgttgttttttcttctaacaggcccatcttctgcagtgttctggagattcactccagaccctttttgcctgggtatcaggtgcaggctgaggaggcagtttgtcctatagcagtgcttaagccttgtgctgagagaatcctttttatcaggatcaactgctctcttcagagctgtcagacacaaaagtttaagcccgttgaagctgtgcccacagccaccccttcccccaggtgttctgtcccagggagatgagagttttatctgaaagcccctgagtggggcagctgcctctctttcagagatgcc

SEQ ID NO: 1790 - DNA, 847 bp, Homo sapiens
  SIMILAR (385)..(594): 301254mologous to Homo sapiens TRAIL-R4-B,accession number AF021233,Smith-Waterman Score=87.
gtgggaaaagtccccaaagaggcaactgagacagcaagaacctttaagctgtgcagcagacactaatgctgagctattttcagtagcagtcagcatcctggccagattacagagtaaattcacaagagagaatattaaagccaaaattatgtcaactgtgtctcaagaaggtgcttttaacaggatgaagtggattgggggagaaaggcaggaagctgaaataatgtcagagcccgatttgctgatggatgtgccgctccttacgaaagatgaaaaccagaagattcgactagccagcttatcccaccttcttttacctgctgccattcgattggaaggtgcccaccgacatcgagggctctgcaggaatcatggtgccagcatctgcttctggaagcttacagtcatggtggaaggcgaaggggagcagacacatcacagggcaagagctggagcaagagattcagggagatggaccgaaaatgctgacgccaatgccaaggaaaaaagtgtcttgaaaaagcagccgtggacgtggagttaccaaatcatccgaagtggctcctggaccgggtggaggagccaggctgcagaaatgcagttcatcgcaggagttttcctgaacagagaaaagtctccacagaatagcaaaaatagcaaaaactcgaagtcaaggacatctgagtttctggttcttgagcctttagactccaggacttacacaggtggctgctccctaccctgccaacccatgacccctctggccctgggttctcagacctttggccttggactggaaattacactattgatttccctggttctcaggccttcagacccaggctga

SEQ ID NO: 1791 - DNA, 315 bp, Homo sapiens
  SIMILAR (167)..(39): 441254mologous to Borrelia hermsii BdrA2-,accession number AF143458,Smith-Waterman Score=68.
atggagcagagtagatgcctgtgggacatatcggggggcaaatttgattgtgcttgggctagagtggaaaagttcagtgttttattcgagacaattgactcagagaaaagaacaactcacacagagaccagaaagagattcgtgctcagtaacaaagagagagtaatacagacttgtggagtcatggtcttaggtctgtgtgacgtgtttgatgctctgcaaggtgatgaggttttccgagttctgctgctttcccctttgccagcatatactgcttttgttgaggaatcaaggtctccggtggtcgccaagtga

SEQ ID NO: 1792 - DNA, 374 bp, Homo sapiens
  SIMILAR (87)..(374): 881254mologous to Homo sapiens membrane interacting protein of RGS16,accession number AF212862,Smith-Waterman Score=442.
ggggaccctccccctcgcttctcgttctactgccccaggagcccggcgggaccgggactcccgtccgtgccggagcgggcgccggcatgtggctgtgggaggaccagggcggcctcctgggccctttctccttcctgatgctaatgctgctgctggagacgcggaacccggtcaatgcctgcctcctaaccggcagcctgtttgttttactgggcgtattcagctttgagccggtgccctcttgcagggccctgcaggagctcaagccccgggaccgaatttctgccatcgcccaccgtggcgggaggcacgacccgcccgagaacacgctgggggccattcggaaggcagctaataatggagcaacaggcgtg

SEQ ID NO: 1793 - DNA, 1190 bp, Homo sapiens
  SIMILAR (436)..(888): 981254mologous to Homo sapiens membrane interacting protein of RGS16,accession number AF212862,Smith-Waterman Score=783.
  misc_feature (1)...(1190): n = a,t,c or g
atgtggctgtgggaggaccagggcggcctcctgggccctttctccttcctgctgctagtgctgctgctggtgacgcggagcccggtcaatgcctgcctcctcaccggcagcctcttcgttctactgcgcgtcttcagctttgagccggtgccctcttgcagggccctgcaggtgctcaagccccgggaccgcatttctgccatcgcccaccgtggcggcagccacgacgcgcccgagaacacgctggcggccattcggcagggttccccgatcttctcaggacggccttcccacttcctcattcgtccacaaggcacactcccggcccttgatcgctcccagtgtctagggatctccggacttgaggttttatatttacagaagacagcagatatgtatatagtttctgtgcgcctgacgctaaggttacatacagccaggaacaaggcagctaagaatggagcaacaggcgtggagttggacattgagtttacttctgacgggattcctgtcttaatgcacgataacacagtagataggacgactgatgggactgggcgattgtgtgatttgacatttgaacaaattaggaagctgaatcctgcagcaaaccacagactcaggaatgatttccctgatgaaaagatccctaccctaagggaagctgttgcagagtgcctaaaccataacctcacaatcttctttgatgtcaaaggccatgcacacaaggctactgaggctctaaagaaaatgtatatggaatttcctcaactgtataataatagtgtggtctgttctttcttgccagaagttatctacaagatgagacaaacagatcgggatgtaataacagcattaactcacagaccttggagcctaagccataccaggagatgggaaaccacggctatgatactttcctnggaaacatttttaatatttggttatgattggacattttgctcgattggagcatgcataatatcttgtggtacctgtgtggaatttcagctttcctcatgcaaaaggattttgtatccccggcctacttgaagaagtggtcagctaaaggaatccaggttgttggttggactgttaatacctttgatgaaaagagttactacgaatcccatcttgggtccagctatatcactgacagcatggtagaagactgcgaacctcacttctag

SEQ ID NO: 1794 - DNA, 870 bp, Homo sapiens
  SIMILAR (181)..(462): 1001254mologous to Homo sapiens membrane interacting protein of RGS16,accession number AF212862,Smith-Waterman Score=482.
  misc_feature (1)...(870): n = a,t,c or g
atggagcggctccgcccactggcgctgcgaatcccgatccctgattggctgggcggccgactccctctctggatgtgtctgctgccgccattgtgcggcgctggtcccctcagagggttcctgctgctgccggagcccggcgggtccgggactcccgtccgtgccggtgcgggcgccggcatgtggctgtgggaggaccagggcggcctcctgggccctttctccttcctgctgctagtgctgctgctggtgacgcggagcccggtcaatgcctgcctcctcaccggcagcctcttcgttctactgcgcgtcttcagctttgagccggtgccctcttgcagggccctgcaggtgctcaagccccgggaccgcatttctgccatcgcccaccgtggcggcagccacgacgcgcccgagaacacgctggcggccattcggcaggcagctaagaatggagcaaccaggcgtggagttggacattgagtttacttctgacgggattcctgtcttaatgcacgataacacagtagataggacgactgatgggactgggcgattgttgtgatttgacatttgaacaaattaggaagctgaatcctgcagcaaaccacagactcaggaatgatttccctgatgaaaagatccctaccctaagggaagctgttgcagagtgcctaaaccataacctcacaatcttctttgatgtcaaaggccatgcacacaaggctactgaggctctaaagaaaatgtatatggaatttcctcaacttgtataataatagtgtggtctgttctttcttgccagaagttatctacaagatgagacaaacagatcgggatgtaattaacagcattanctcccagaccttg

SEQ ID NO: 1795 - DNA, 1824 bp, Homo sapiens
  SIMILAR (991)..(1170): 1001254mologous to Homo sapiens dJ79C4.1.1 (Homeobox protein PMX-1 (PHOX1) isoform 1),accession number Z97200,Smith-Waterman Score=303.
ggactacaggcctgtgccataccaggaggagaggctaagtcggctggtctgtagagactgaagccacccctccttctaggggctcaggcccagggagatccaaattctgtccctgaggctctggctggagttattggagatcctgcaggaaagccccgcctttcaatgagagcctcctaatgctgttgcttcttgtcagccatcttggcccttcccccagcccccgtccccgtcccccatccccgtcgtccccagtccccacccccgtaccccggacccccacccccgtccctgtgagacaattaatgtctgttgtttaagccactcagttcctggtactttgttatggcagccctagcaaatgactacactgatcctcacctgacactaccttctgttaattgttctttggcttcaagcactgaagccaaaggcaggatgccgctaccctatggaaacacagcagaccaagcccagagaactttggtccttcaatttcccccttgctccacccctcttgtgagcaggacctggagcctggaggtcaaggagaggctaggagcagcgacctatggcgctctgggaaggagctcccggcttgcctatgggtgccctggggagagcatcacttctctccgaggactcaaagacagtctccgttcctcactcttcaaagaccacctccttttctagaggtgggctccccgaccttgattatccgtagacttagatgggggttcctccgcccctctctgtcctcctgccaccacagccaggctggacgcagaaccgcacggaagcctccccaactcctgcctctgggagtgctcctgcctgcttcaaggaatctgggcagcgggaccctctgggttttctctccactacccccctctttcttccccactcggctcctctcccccctcgcgcccacagcgtttggtgttgattcgagcgggaagaggggggtgggtgggatcggtgggggagaccatgacctccagctacgggcacgttctggagcggcaaccggcgctgggcggccgcttggacagcccgggcaacctcgacaccctgcaggcgaaaaagaacttctccgtcagtcacctgctagacctggaggaagccggggacatggtggcggcacaggcggatgagaacgtgggcgaggctgtcccgcacgcggggcggcggggctgggctgggaaaaggtcttagcggggtgcaaactcagagagccagcgctgtttgggaaagcagcaggttaaagatgctgagtcgggttggaagggcttctctcgggcagcgtatgacggcttgagggaggctgcaattgtatccccatgcccccaagtctgtaacagaccggtcaccctgttcatcccaggtgacatgttcgtggaaccggggggccctccagcattctatgattttcacaaaacgttgcctatttcagactctcaaagaatagacatacaaatcaaactgcacatagaaacaattggaaacaggagggccaaggccagcggcctcggccagcctagggaacaagccagccgtggtggccctcagatactgcaggggaagagggatgaaaattgtaccggttgtttgtggtgatttcggtttattttacatgcagaagtaggggcccgggttacctccttctcttagaattttggggaaattgatagtccagtgactcctacccacttttgggtgaaggacgatttggaatttgaagtgtggggagacaggcctgtgaagtccgaaggactcactgggtctccagatcccccaactctggaatgcagtgaatacccaccc

SEQ ID NO: 1796 - DNA, 477 bp, Homo sapiens
  SIMILAR (37)..(222): 411254mologous to Homo sapiens immunoglobulin lambda light chain variable region,accession number AF103678,Smith-Waterman Score=73.
atggtgagacacccaagctggcagagtgaagaatgcaggaaccggaacagtcaaggactggagttgagtccagtcacttggcccctgcaacttcaaaattcagtctcctccactgcatttaggcttcccaattcagtgactgcagttcccactataatttctgacccacagcgatttatcacagagtatcacagagcccctcaaggatgctggggctccccacacaaatttgtttctcacagtcataatgcaagggctcaggcccagggagatccaaattctgtccctgagcctctggctggagttattggagatcctgcaaggaagcctgactcactgaagaaggataggtcagagttatacctgaagagactctctggccacaaccagtgtgttgggctgtggagacaagttttgggaccaagccatccagcctccctggctccagcaggggaagagcacagcctggagctgtag

SEQ ID NO: 1797 - DNA, 424 bp, Homo sapiens
  SIMILAR (164)..(193): 701254mologous to Sorangium cellulosum unknown,accession number AF210843,Smith-Waterman Score=44.
  misc_feature (1)...(424): n = a,t,c or g
tatatatgaagggtaatgtattaacgagtatcgactcatatgatcacaaggtgaagcnnnnnnnnnnnnnnnnnnnnnnnnnnnnnnnnnnnnnnnnnnnnnnnnnnnnnnnnnctcaaaagtagggaagctgacagtgcatacttcagtctgtggcaaaaggcctgagagcccctggcaaaccactggtgtaagttcaannnnnnnnnnnnnnnnnnnnnnnnnnnnnnnnnnnnnnnnnnnnnnnnnnnnnnnnnnnnnnnnnnnnnnnnnnnnnnnnnnnnnnnnnnnnnnnnnnnnnnnnnnnnnnnnnnnnnnnnnnnnnnnnnnnnnnnnnnnnnnnnnnnnnnnnnnnnnnnnnnnnnnnnnnnnnnnnnnnnnnnnnnnnnnnnnnnnnnnnnnnnnnnnnnnnnnnnnnnnnnnn

SEQ ID NO: 1798 - DNA, 793 bp, Homo sapiens
  SIMILAR (793)..(743): 1001254mologous to Homo sapiens Human secreted protein fragment encoded from gene 25,accession number Y07768,Smith- Waterman Score=93.
atggctagaataaagcaggcagaagttggaaggactaggcttgatgagtcttccggcttccatctttctcccctgctggatgcttactgccctggaacatcacactccaagttgttcagcttttggactcttggacttacaccagtgatttgccagggtctctcaggccttcagccacagactgaagggtgcactgtcggcttccctacttttgaggttttagggcttggactggcttctctgttcctcagcttgcagatggcctactgtgggacttcaccttgtgattgtaggaaggaggaaactactgcccttccccctaccctctattcaggtcacttttcaagaggcactgatatcactggacaaatgtcagaaaatcagatcagaagtggcctcattgatgagtataaatgtaccgctagtggctccattgtctatggagataagtgtttcaaggtcctttattttgaggatttaacagaaaagctggttcactgttttggtgaaggaccttgggagaaagcttccatgaggtaccagaacctagagcttagagacaggcagacctggcttggcctcctggttccaccacttacattctcaggactctggatcaatgctggccagcctaactgaagggagagcagacaagccctggatgggagaaccaacagctcagagacggaattctaacatgaacaaagatcattcacagattgatgaagcttttgttgttcttggcattgagcataaagaaaagaagaggcctatagttgtaaaagtttcctaa

SEQ ID NO: 1799 - DNA, 324 bp, Homo sapiens
  SIMILAR (74)..(256): 361254mologous to Homo sapiens Human glial fibrillary acidic protein GFAP mutant fragment 10,accession number Y21001,Smith- Waterman Score=90.
gtaaccggacgcgagcgtaaggattatcgcatccaacacgtatatcaggcggttggcaaacaaaatttggatatcatcaccgtggtcgaaacgtcaccgtgcatagcgcaatcaggtggcctcacctccctcaggctcagtgtcctcatgggaaggatggagacgctgaaggataagaccctgcaggagctggaggagttgcagaatgactcggaggcgattgaccagctggccctggagtcccctgagtcttcccatccgtacagcgcatgttctcagaggatggcggtggaaccttctagcaccaggcaagttacagcttaa

SEQ ID NO: 1800 - DNA, 669 bp, Homo sapiens
tactctgccacaaggcacctgggctcttaaatgaccaatacacatgtgctatactggtgccaagaaagaagggtgttttgtaggaaagtcaaggtgagaggaggtgcccaggacttggctcctttctttgaagggtgacggtgtaaattctccatggctgggatcctactgatggatggaggcatgtcgatctcatcatttcacagagtggggagctatgggccacaacgtgcctatcacacaagtccttcctcacgttagctggacaccagctgttctgacacttgtcagcacatggggcacccggaagttcatggtgttctgcaaagaacgccacaaaacagtgagctcaacttcttgaaagtcataatgtgttgctaagatccgatcccagatcctaaaaataatatgaggtagcggccattgaacagaaaaaatttacatcttaaacttgaagataagtacaagtgaacctttttctaccactgttgttcagttttattatattgacaagcacctctgcccaccctgtggggtaaaactgtttgaaagtgtttatgaaagttttatataaatattggttgatcaaatgtacaaaatatgcatgatggcaccatattgtgtataatagtgacaaatacagtctatgtgggtggagaaacctcgtgc

SEQ ID NO: 1801 - DNA, 312 bp, Homo sapiens
atgactgagactggagattggttaaaagtttgtattcttaggccgggcttggtggctcaagcctgtaatcctagcactttgggaggccgaggtgggcggatcacgagactaacacggtgaaaccccgtctctactaaaaacacaaaaaattagccgggcgtggtggtgggcgcctgtagtcccagctactcgggaggctgaggcaggagaatggcgtgaacccgggaggcggagcttgcagtgagtcgagatcgcgccactgcactccagcctgggcgacacagtgagactccgtctcaaaaaaaaaaaaaa

SEQ ID NO: 1802 - DNA, 418 bp, Homo sapiens
  misc_feature (1)...(418): n = a,t,c or g
actttttttttttttntagtagagatggggttttgccaagctgaccaggctggtctcgaactcctgacctcaggtgatccacccgcctcagtgtcccaaagtactgggattacagtattatcactttcttttttttttgagacggagtctcgctctgtcgcccaggctggagtgcagtggcgcgatctcggctcactgcaacgtccgcctcccgggttcacgccattctcctgcctcagcctcccgagtagctgggactacaggcgcccgccgccacgcctggctaatttttttgtattttcagtagagacggggtttcaccgtgtcagccaggatggtctcgatctcctgacctcgtgatccgcccgcctcagcctcccaaagtgctggggatacaggcgtgagccaagcgcccgtc

SEQ ID NO: 1803 - DNA, 447 bp, Homo sapiens
gagacagagtcttgctccatcacccagactggagcacagtggcatacttcatggctcattgcagcctcgacctcccaggctcaagcaatcctcccacctcagcctccctagtggctggcttatttttgtattttttgtagagacagggtttctccatgttgcccaggctggtcttgaactcctgggctcaagtgatctgcccacctcggcctcacaaagtgttgggattacaggggtgagccaccatgtccagccttaaatctgtgtgggttttttttttttttttttttttgaggcagtctcactctgttgcccaggctggagtgcagtggcacaatcttggctcactgcaacctctgcctcccaggttcaagtgatctcctgcctcagcctcccatgtagctgggacaacaggcacctgccaccacacccagctaattctgtatt

SEQ ID NO: 1804 - DNA, 5397 bp, Homo sapiens
tgtttttctcacaatttcatggattatgggtttgggacaggaagaccacaaagataaagggccattttcattatatcatattaaaggtacatgtgatcaacatgacatcactgtttatgttaaccttgatgatgaccttgttttcatctggtttctccactataagttactcctctcctcacttcccatttccagactctgctctctggaaggaagtcactgtgtgtagcccatatttaagtgatagaaagtaatgttctacctccttgaaccaggggtattatccacataaattatttggaattcttctgcacaaaaaacttacctcttctcctctacatattaatttattcaatcacttacatatatcagtgtagactcatagatacttattttgtactttagcttataatttggcttttctttctttctttttttttttttttttgctctatttgttacaactttagctgtgggagctctttcaggtggctcttgtgtcccttttactccctcagtgtgtgtgtgtctgtgtgtgtgtgtgtgttgagcattttcttactttctggcactgaaagatatatctggtataaaagacaaacgatacacctatctacatggggcacttactgtgaatagaacttgcaggactggaagttgctttcggtgagtcattgagtgagtggtgggtgaatgtgaaggctcagttcattactgtacactactgtagactttataaatactaaggatacacacgaaatttattttaaaaaactatcttcaataattaaccttggcttattgtaacttttcattttataaactttttaattttttgaaactttttactcttttgtaatcacacttagcttaatcacaaacatgtatagctgtacaaatttttttctttttttctttttttttttttttgagacagggtcttgctctgtcatccaggctggagtacagtgacgcgatcatgggtcactgcagccttgacctctctagctccagtgatcctcccacctcagcctcttgagtagctgggaccacaggtgcacgccaccacacccagctaatttttgtattttttgtagagacaagttcttcctgcgctggccaggccagtttcacacgcctgggctcaaacagtcctcctgcctcaatctccccaagtgctaggattgcaggtgtgagctgccacatctggctttttactttgtatccttattctataagctcttttcttttcttttttcttttttttttttgagacggagtctcgctctgttgcccaggctggagtgcagtggcgcgatctcggctcactgcaagctccgccttccgggttcacgccgttctcctgcctcagcatcccgagtagctgggactacaggtgcccgtcaccgaattttttttgtatttttagtagagatggggtttcaccgtgatctcgatttcccgacttcatgatctgcccgagggattacaggcgtgagccactgcacccggcccttttctttttttttttttttttttttttttgagacggagtctcactctattgcccaggctggagtgcaatggcgctatcttggctcgctgcaacctctacctcctgggttcaagcaattcgcctgcctcagcctctcgagtagctgggattgcaggcatgcaccaccacgcccggctaattttttgtattttagtggagatggggtttcaccatctctaacttgaactcctgatctcaagtgatccacccgcctcggccttcaaaagtgctaggattacaggtgtgagccaccgcgcctggcctatacgcttttttctgttaaaaaatatttttaagtttttaaacttttgttaaaaattgagacagaagcaaacacattacttactaggcctacacagagccaggattatcagtatcaatcccttccgcctccacatcatgtcccactggaaggtcttcggggcagtaacggacatggagctgttatctcctaacatgccttcttctggaatacctcctgaaagacctgcctgaggctatttaacagttaactttttttttatatgtaagtaggagtactctaaaataacaatataaaatgtagtacaataaaataaataagccagtaacgtagttgtttattatcaagtatgtactgtacataattgtatatgctagacttttatacagctggcagcacagtaggtttatttataccagcacctccacaaacatgtgagtaatgctttgcacttgaccttctgtcagctatgacatccctaggttgcaggatttttcagcttcattataatcttatgggaccatcttcatatgtgagtggtctcttgacccaaacattgttatgtagcacatgactgtaaattttggaatcaccttgtcagtatttacaaaatagctttctgagatttagtggcaggatctcagctcactcctacctgcacctcccaggttcaagcgattcttatgcctcagcctcccaagtaactgggattatagacgtgcaccaccaagcatggctaatttttgtatttttagtagagacagggttttgccacattggccaggctggtctcaaactcctggcctcatgtgatctgcccgcctcagcctcccccagagtgctgggattacaggtatgagccactgcgcctggccaaaattgcctaaatttttaaaatcctaaattggtgttgaattttgtcaaatgctttcctgcattgattttgatgatcacttgatttttctccattcttttgttaatgtgctaaattatgttgcttaatttttgaatgaaaaaataatcttacattcctgaaataatttcggtttggttgtgatgttttattcattctatttcgtgctgaattcagtttgctaatattttgtttaggaattttgcatctatgttcatgagacagatcggcctgtaattttacttttttgtaatgtccttgtcaggtttaggcctcaaagttatgttgactttataaaatgaactgtgaagtatttcctcttttttatgctttagtttgagtaagattgattttttttaaaacttatgtcgtccttaaatatttattagaattcactagggaagttatcttggcctgttactttctttcttgagtaaattttgttttcattctttttttatagttaagtatattgagttagaatgcatacacaaacaaatgcacacaacttaaagtccagttctatgaattttgactaatgtataaacctgtttaacttccactgtaagcaaaatatagtgaattttcgtcaactaaaaagtccccttgtacccatttaccttcagtacctatccctaccccagccacaggcaacaaatgattttcatgtgcttatttgccatctgtatacctctttggttagttttctgtttatatcttttgcccatttatttttttttttttttgagacagagtcttgctatgttgcccaggcaggtcttgagctcctgggcttaggggatcctcccgcctcagcctcccaagtagttgggactacaggcacacactactactcttggtttgcctatttttaaatcaggttgtttgttttcttattattgtgttctctacactgtaggatattctacctttcctagaatttcatgtaaatggactcagacatactgttgtgtctggcctcttttgttcagtgtaatgtttttgagcttcatccttgcatgttatgtgtatcagtgattgattcaatttttattgctgcatagtattggattgtatagctataccacaatttgtttattcattctcctgttgatggaatattggttgtttccagtatttagctattattattattattttttttttttgagacggagtcttgctctgtcaccaggctggagtgcagtggtgcaatctcggctcactgcaacctccgcttcccaggttcaaacgattctcctgcctcagcctcctgagtagctgggactacaggtttgtgccaccacgcccagctaatttttatatttttagtagagacgggatttcaccatgttagccaggatggtcttgatctcttgacctcgtgatctgcccaccttggcctcccaaagtgctgggattacaggcgtgagccaccgcgcctggtcttttttgtttgttttgttctttttttagacagagtctcactctgtagcccaggctggagtgcagtggcatgatctcggctcactacaagcctgcgcccctcaggttcaagagattcttgtgccccagcctcctgagtagctggggttacaggcgtgtgccaccatgcctggctaatttttgtacttgtagtagagactgggttttgccatgttggccaggctggtcttgaactcttgacctcaagtgatcttcctgccttggcctcccaaagtgttgggattacaagcgtgagccaccacacccggccagggatgtcattttttataactagccataaactttagctttgaagtaaaactatttctagcaagtgattcttacctgatattttttgttgttcttgcccatattttaattgggttgtgttattatggttctctatgtattctagatttaagtttttgtatatggtgtgaggcaagtgtcaagtttaattttttttctacaaacatcctgttgttccagtaccttttgatgataagactgtcttttcccccattgaattatcttaacgccctcatgaaaagcaattggccatatgtatgtggatctacttttggactctcaattctgttccagtgatttatatgtccacccttatgtcaataccacattattttgattattgctgctttatagtaagtgacatcatgttgcctgaaatcacgttttccacctttattcttctgttgatggttgctttggcaattaggggtcctttgcattttcgtagacattttagaatcaacttatctattgctactaaaaatgcttgattgggattgtggtaaatctagaaactaatttaggaagaatggtcatattaacagtttcaagtttcagatccatgagcatattttcactctccattaggtcttttaaaatttatcctagcagtgttttatggtttttactgtagaggtcttacacattttgttacatttgttgctatgtgtttgaccttttttgatactagtgtaaatggaaattttttcttttatgttctagttgttcattattacactaaatcatctttgggtgactactaaacattctattgaaaatttgtgaatggcgtgaacccgggaggtggagcttgcagtgagccaagatcgcgccactgcactccagcctgggcgacagagcaagctccgtctc

SEQ ID NO: 1805 - DNA, 3085 bp, Homo sapiens
  SIMILAR (1741)..(2124): 751254mologous to Homo sapiens HERC2,accession number AF071172,Smith-Waterman Score=443.
  misc_feature (1)...(3085): n = a,t,c or g
cctgacagcatgtgtgaaatccctctttaagatgggcctcctccgaggagctgtgaggggtgagggtgaaatccctccttaagacgagcctcctntgaggggctgtgaggggtgagggtgaaatccctccttaagacgggccctccggccgggcgcggtggctcacgccctgtaatcctagcactttgggaggccgaggtgggcggatcacgaggtcaggagatcgaaaccatcctgactaacacggtgaaaccacgttctctactaaaaaatacaaaaaaaaattagctacccgtggcggcgggcacctgtagtctcaactatttgggaggctgaggcaggagaatggcctgaacccgggaggcagagcttgcagtggagccgagatcgcgccactgcactccagcctgggcaacatagtgagactccgtctcaaaaaaaaaaaaagaaaaaagaaaaaaaagaaaacactgcccaactggctggccgcagtggctcaggcgggtaatcccaacacctttgcgagggccgaggaagctggatcacttgagctcaggagtttgagaccatcctggggaacacggtgaaaccccgtctctactaaaaaaaaaaaaaaaaaaaaaaaaaaaaaaaaaattagccgggcgtggtggcacacgcctggtaatcccagctaaccctggatgctgaggcagggagaattgcttgaacctgggaagcggaggttgccagtgagctggagattgcgccactgcactccagcctgggcaacaagagtgagactccgtcaacaaaaaaaaaaaaaaaagaaaagaaaaaagaaaaaccgactttcattaaagcctcctgcagaaattcgcataagtaacgaggagccaaatgttaatcaccaagacaatggggaaaatgtctccaggacatgaaagaccttcacatcttcacagcagctctttccaccacaggctcaaaagcctagtatggaaaaatcatttcctggagcagggccagggccacctgctgtgtgcagcctagagacgtgatgccctgcattccagccactccagccatggcttgggtgggagacaccatggtacagctcaggccatgtcttcggaggttgcaagtcgcaagccttggcagcttccacaagctgtggagcctgcagatgcacagaagtcgagaattcaggccaggccgtggttgtctttccaaggcggctcagcttgtgctttgcttggagagagcggagggcagcagcacagtgacagcgtctgggacctcagaccagtttccacagccacttatgaaagcagacggctccatgggctggaggaggtgggacgctctggaaagaactcgggtgcaagtgggaaagaaaatcgagctgagcagcgggaagtcgaagtcgccccagcagtttcgccctgcggagaggagccttgctgtttccaaatctctcctgctgaagagacattggagctagggcggctagtttcacctggtaattgtgacaccctgtctcctcgagctgcaggcttttatgcttgtcatgttcgaagtttgataccttgcagatcaacatcctattctaaagatgatagtgtcaaaccaagtggaacaaagaaagaagatctggatgacaaagagaaaaaagatgaaactcctgcacctgtatatagggccaagtcaattctggagagctggggatgttcacggaacgccagacaccaaaaggccagaagcatgcccctgcaggaccagcacttggctctggccatcctgctggagctggctgtgcagagaggcacgctgagccaaatgttgtctgccatcctgttgttgcttcagctgtgggacagcagggcacaggaaactgacaatgagcgttctgcccagggcaccagcaccttgcttttgtccttgctgcaaacgttccagagcatcatttgcagtaaggatacgcccccctcttacggtcaacatgcaccttttgtctggccctctgagccccagtgagagtttcctgaggtacctcaccctccacaagacaacgagcttgccattgatctgcaacaaacggcggttgttgtcatggcccatttagaagatctggctacaccctgtagatgcctctgccgtgtagctgtccgacgtctcataagcctctcccacaaccactctcgcaagcagcaggaaagccctgctcctctcagcattgcccttgacactcctgtgttttctgcccagaatgctccctcatgcaatttcaggactgctgccggtgtgaagcctttcttctcccagaaccacaccatcaccagtgagaacccattgggaccgagcctggggagcatcccgcaagcccgcttcctcctgatgatgctcagcatgctcaccctgcagcacagcgcaaacaacctcgacctcctgctcaattccggcacgctggccctcactcagacggcactgcgcctgattgttcctaagaagccagaatctacggctgatgaagaaaaaattggaaacgaagagagtgatttagaagaagcctgcattttgcctcatagtccaataaatgtggacaagagacccattgcaattaaatcacccaaggatgttgatttgatcccaccttttaatcggatgctgctggaagtcacctttggcaagctgtatgcttggactgttcagaacattctaaatgttctgatggatgccagtgccaaatttaaagagcttgtgcagtcatgttctagtaaagccctcagagaccctctccttcacctgtgctgcctctggatttctgatcataaccagtacttcctcctggagctggatctgccagcccctagggaaggagctgaagtgggtcagctgggctacatgtgcaatgagtacaccaccatggatttttatacaaaagacacagagggggaagtcattgtgaggccagacacaaacctccctgcagggaagctcaggacaccagggggtgctcaggtcaccaaggggcgctcaggacacattaaggcaggtgcaagaggggaaaaaagtgctggagatggttatgcagacatacacgtag

SEQ ID NO: 1806 - DNA, 1077 bp, Homo sapiens
  SIMILAR (358)..(444): 451254mologous to Mytilus galloprovincialis metallothionein isoform,accession number AF199020,Smith-Waterman Score=74.
tcacccagtcatctcagacccgtcttggctttttctctctatctttccattcaagcccacgttgtggtctagacatcctttccattctctctgcttggaatggtcatccctctgatagcccttagtcactccacacccagatctctgcccaaatgtcacgttgtccaacaggctttccctgacactcacatcactgcatttttgttctttatagcacttgttctgctctagaattgtcttgtttgcctgctggtttattttctgcctcctccattaggaggagctccataaggacaagaacttgtctcattttttgatttctttgctcccataatttaacacagggcctgaaacataaaatgcactcagtgctcttgccttggctgttccctctgccggaactctttttctccccgatgttcttgtgactgcttccttccggtcatcaagtctcagctgagagatttcccaagcagagagaaaggcactccagggatatggaaagcttgttggcaaggcctggtgtgggaaagagccccaagtcttcctccaaccctgcactacgccggaagcgcctcgcggaagtgcctcctgcgctggctgaggatgggtggccctgagactcgggctctgagctctggggctgctttgctctaggcgtgccccctctatgctgttgccctgcgcctcttgctcggggcaaggaaacagaatgctaatgatgatgagtccaggtttcctgggtgtggaaccagccagatagatggattccagcgccacatcctggtccagcctccagacctgccactgcgccaagatggccgcctcccctgactcaggaggcttgagcttgggggagccagccttggtggaggtaaatctctcctgtgagtggggggtgcgtctctggttccctgtcccatcagcaccctggggtggggcctgccgccagctgaccccaggacctgggttgcaagaacccttgccagccactagcctggcatcttcaagcccagctgatgctgaggcccagaatgagtcctcagagatcccctggcgaacactcagtgaatacat

SEQ ID NO: 1807 - DNA, 444 bp, Homo sapiens
  SIMILAR (250)..(155): 501254mologous to Nicotiana tabacum NTM19,accession number X88847,Smith-Waterman Score=77.
atgatttcctttaatggaaggaaaaacaggcatatggaggttaaatacttaggataccgagctgtcaagctgagtttgctgaatgaggacagggtgcttgatgtacttgcaaccaaaagagtcacaccgaggacaaatgccgacacactgtggttggccaatttgcatgatgaaaagaacctgaatccatgcccgctgaatatggactccaacggtgccctaggggatggtggagccaccagatggaaggagcctggtgatcccgagaaggagagatgcctcgctgacctgaacatctttccagaactgttaaatgcaatggcaggtctttcggggtgggggtggggcactgatcagaactgcctggaagctcaagtacccactatacctaggctcaggcaggccagagattcccagagaacgagagagaagaacaaggcttga

SEQ ID NO: 1808 - DNA, 831 bp, Homo sapiens
  SIMILAR (664)..(530): 841254mologous to Homo sapiens Human secreted protein sequence SEQ ID NO:103,accession number Y87064,Smith-Waterman Score =190.
ctacacttttcccacggatttctgcaatctgcagatcagaagattcctttgtgtgcttataccaccagggccttgggtcccaaacacaaaactgggcagacctacggcagctgcaccagtcagtagcagttggggcaggcactgagctgcaggagtttttacatactctggtggctcccagaactccagggtggcagaagagccgtccactcccatggaaagggggctgaagtcagagagccaagtagccttgctcagtaggtcccacaaccacagaatcccacaagctaagacccactggcttggaatccctgctggacagcacaacagcctggagtctgcggaagatgaccaagttctctttcctgcctgctgacaagggggagtccccaagcacagcacgccagctccactaagcggaagccagacagcttcctcctgatcccatgcctcctgactgggtgagacctcccaacaggggtagccagacacctcatacaggagagttctggctggcatcaggtcggtatccctctgggacaaagcttccagaggaaggaacaggcagcaatctttgctgttctgcaggctccactggtgatacccaggtgaacaacgtctggagtggacccccagcaaactgcagcagacctgcagaagagggacctgattgcatggggctgctacctcctccaatagcaacagctgcttctcttcacgaacgcctagggcaggtagagtctctgcttcttgagctcctggacaaaagacagaccgtctaagaccgctagcggttggctgagggatagtttcctctaccaagaaatgcat

SEQ ID NO: 1809 - DNA, 264 bp, Homo sapiens
  SIMILAR (61)..(228): 391254mologous to Drosophila melanogaster nucleolar protein, putative,accession number AJ131564,Smith-Waterman Score=81.
atgccgaaaaatagcttcgacgaatgctcacttcacggcatctcatacggcacgagaagggagcgagccaaagagcgaagaggattttgtggctatttttgtcgcagttgttctagtgtggtggttcgtcagctggggctgatcctgctcccaggggacaccgggagatgtctggtgacgtttgtggttgtcatgactgggggacgggtgatgtctggggacatctgtggttggcccgatggggatgctcttggcatggagtga

SEQ ID NO: 1810 - DNA, 422 bp, Homo sapiens
  SIMILAR (309)..(422): 1001254mologous to Homo sapiens aryl sulfotransferase,accession number L19955,Smith-Waterman Score=195.
ctgggcctgctggagcgcgcgctcccgggccgagcgccgcgcgccatgctggccaagttgctgtgcgaccaggtggtcggtgcgcccatcgcggtctcggccttctacgccggtatgagcattctccagggaaaggatgacatatttttggacctgaaacagaaattctggaacacctatatgcaaactcagtcgtggctttggagatcactttaagcttgtctccagctggcacactaaggaggcacccacaatcagccactgcgggcgaggagggcacgaggccaggttcccaagagctcaggaacatggagctgatccaggacacctcccgcccgccactggagtacgtgaagggggtcccgctcatcaagtactttgcagaggcactggggcccctgcagagcttccaggcccggcct

SEQ ID NO: 1811 - DNA, 360 bp, Homo sapiens
  SIMILAR (95)..(343): 321254mologous to Homo sapiens Intestinal mucin deduced from clone SMUC 53,accession number R07673,Smith-Waterman Score=80.
atgctgtctctgttcccagtgctggggaatgcagagaactggggactgaaggaagagcaggcgttcagctccagcaaactatatctacaggaatccatcaccacttatgacaggctctgccacatactgaagccctattcatttgcacccaacatcatcattgcgtccagtgcctcaccacttggtgagacccttgaatattcaaaccagcgtctcactttctccatgaatatcatcgccattcacccagttacccaaaccaagagcccgaacaacatctttgagtccttctccatcacaccctacattcaaccaattgccaccttctcttttatatacctccttaagtcacggccttaa

SEQ ID NO: 1812 - DNA, 831 bp, Homo sapiens; identical to SEQ ID NO: 1808
  SIMILAR (664)..(530): 841254mologous to Homo sapiens Human secreted protein sequence SEQ ID NO:103,accession number Y87064,Smith-Waterman Score =190.

SEQ ID NO: 1813 - DNA, 675 bp, Homo sapiens
  SIMILAR (298)..(621): 331254mologous to Gallus gallus alpha-2 type I collagen,accession number M25984,Smith-Waterman Score=99.
atggagggagaggaggaggacttccaggggtggcgaattgtgcttttcttgaaggatgaacagttcatcaagggagcacaggctagttggaacaagccagaggcgggcaatgctggtgctagggacatgagcaggggtgaagaagcccagcagggcccagcacaggcacctgagccagactcggcggcctcggagagacttcccagaggagaacgggctacacgtgggcctggagttccatgccctctgtgcagggaaatcaacctgctcctgtcacttcggatgtgggaacagggtccgccacccagacctcaccccaaccctgccacccctgccacccctgccacggctgtagccctgaccacaggccggttgtccccagcccgaggagactccggggtgcgtctgcctcccaagaaagccaggttctctgggaaccagactgggcagggtccagttggccacacctctccacagttgccaccccttgctggagctctgggcttggaggcaagcacgcagtccccaagaaatgggcgcagctggtaccagcatcctgcagcttcactcgctgcagcctgcaaggctggccttgcccgcggccccagccaccctgcaggacatgcagccacgggtccttgtcctcatattcactctcctgtgatgatctcatga

SEQ ID NO: 1814 - DNA, 1194 bp, Homo sapiens
  SIMILAR (640)..(894): 891254mologous to Homo sapiens HSPC263,accession number AF161381,Smith-Waterman Score=384.
atgagcaggggtgaagaagcccagcagggcccagcacaggcacctgagccagactcggcggcctcggagagacttcccagaggagaacgggctacacgtgggcctggagcccacttccctgcaccgggaacattcagggctggggagggtttctgcggactctccttcatcactaatagctctcggtccacccagggctaccgcccccgtcataaacaagcccacatttgtctcacagcccatcagatgctggggcaacctgtctacgcagggctgcaggaatccagcaaacaacctccacaaagcaaggagaggcccccaaaccctgacatcatctgcagagccgctggccctggggagcggcagtgctctgggggcctcgagcgatgggtgaatgtcccatggcagaggacagaatgcagctgcctcgtgggccagccagagcctgaactttgtctccggcagaacaacacaggttctgaggagggacccccggctaccacccgacctcaaacacacttggaaggcagtacaccgggggcagcagccagggcctggggcctgggcctcccagaggctggcgctctcctctgccattgttttgttaattgtaaaatgggcaccattaacaatatccacgaccgcaagaggatgaaggcgattgctgtgcagaaccctctggtgtcagagcggctggagctctcggtcctatacaaggagtatgctgaagatgacaacatctatcaacagaagatcaaggacctccacaaaaagtactcgtacatccgcaagaccaggcctgacggcaactgtttctatcgggctttcggattctcccacttggaggcactgctggatgacagcaaggagttgcagcgggcaccatctgtggccttagctttattggcatctgttgggggacagagacaacccaaggggaagggcgaggagctgcttgagttcccagtgagggtggcctctctgctgcccgcgttgttctctgaagtttccactcatatggagactaaactagaacgactgtcaccaggcatggtgcttttgctcaagttatatctcactgaatccctcacagctcggaagatgggccgggagccctgtccccttgcagctgtgttgtcccagccccaggccatgctggagcacggaggtggctcagcactcaccgccttctga

SEQ ID NO: 1815 - DNA, 1259 bp, Homo sapiens
  SIMILAR (588)..(1061): 681254mologous to Homo sapiens HSPC263,accession number AF161381,Smith-Waterman Score=464.
gcggaaccggaccggaattcctggcacgacccacgcgttcgatggtgggggaggaacctcagcagcatatgcaggagccgctgggcagcgactccgaaggtgttaactgtctggcctatgatgaagcgcatcatggctcagcaggaccgaattcagcaagagattgctgtgcagaaccctctggtgtcagagcggctggagctctcggtcctatacaaggagtatgctgaagatgacaacatctatcaacagaagatcaaggacctccacaaaaagtactcgtacatccgcaagaccaggcctgacggcaactgtttctatcgggctttcggattctcccacttggaggcactgctggatgacagcaaggagtttgcagcggtgagaagggtgggcactgggcaccgaggcaggtgggtgtctacctcctccccgggcgagtaggatgtgtctcgagtagggtgtctccctccttcccgggcgatgggctggactctggccttgccaggcggggcagtgctgtctcggccctggcgtctgggctggtcgaggagcccatgctgggcccgcctttccatcccacccccaggttcaaggctgtgtctgccaagagcaaggaagacctggtgtcccagggcttcactgaattcacaattgaggatttccacaacacgttcatggacctgattgagcaggtggagaagcagacctctgtcgccgacatgctggcctccttcaatgaccagagcacctccgactaccttgtggtctacctgcggctgctcacctcggggctacctgcagcgcgagagcaagttcttcgaggcacttcatcgaagggtggacgggactgtccaaaggagttctgccaagcagggaggtggagcccatgttgcaagggagagcgaccaccattcacatcattgcgctggcccagggccttcagcgtgtccatccagggtgggagtacatgggaccgcggcgagggcggcaaccaccaatccgcacatctttccctgaggggttccgagcccaaggtctaccttctctaccggcctgggacactacgatatcctctacaaactagggctgggttccagcccgcttggttgccctggttgcccccttcttgccagggcgttaggacattgttacagaggtttttctgtggttgtaaatggtcctatttcacccccttcttcctgtcacatgaccccccccccatgttttattaaagggggtgctggtggtgaaaaaaa

SEQ ID NO: 1816 - DNA, 853 bp, Homo sapiens
  SIMILAR (23)..(838): 611254mologous to Homo sapiens HSPC263,accession number AF161381,Smith-Waterman Score=697.
tgtattccgttctaggcaccagggctgtttaaagatggcggcggaggaacctcagcagcagaatcagtatccgctgggcagcgactccgaaggtgttaactgtctggcctatgatgaagccatcatggctcagcaggaccgaattcagcaagagattgctgtgcagaaccctctggtgtcagagcggctggagctctcggtcctatacaaggagtatgctgaagatgacaacatctatcaacagaagattcaaggacctccacaaaaagtacttcgtacatccgcaagaccagggcctgaccggaacttgtttctattcgggctttcgggattctcccacttgggagggcacttgctggattgacagcaaggagttgcagcggtttcaagggctggtgtctgccaaagaagcaaaggaaagaccttggtgtcccaggggctttcacttgaatttcacaattttgagggattttccacaacaacgttcattgggacctgattgagcaggtggagaaagcagacctctgtcgccgaacctgctggcctccttcaatgaccagagcacctccgactgaccttgtggtctacctgcggctgcttcacctcgggctacctgcagcgcgagagcaagttcttcgagcacttcatcgagggtggacggactgtcaaggagttctgccagcaggaggttggagcccatgtggcaaggagagcgaccacattcacatcattggcgttggcccagggcctcaacggggccatccagggggaggacatggaccgcggcgagggcggcaccaccaatccgcacatcttccctgagggctccgagcccaagaagtcagctttgtga

SEQ ID NO: 1817 - DNA, 426 bp, Homo sapiens
  SIMILAR (166)..(62): 371254mologous to Homo sapiens Human breast tumour-associated protein 27,accession number Y48482,Smith-Waterman Score=74.
atggcgctggttttggtgggttttagccagcttctttacggcagactgttttatcagcaagtatctgtgaccaacgggaccagcccctttgcctatgactacgacctcacccatattgttgctgcctaccaggagaggaacggtgggtcacaggtagagcccattcagccgctgctcaggactttcaaggttagtgggggcaacagagacaagcagaactggaacccttgtgatgaaaatgtcaaaacccgtgaatgctcaacgatgggagcaaatgtgctgcccaggatttgtctttttcgtcctgatcttcagacccgggaccacccgcacccctccagcatcccgtggtccagcaggctagtgatggttaaatgccatcattatcccaccactggcttggcacccaagtccaagatgccatag

SEQ ID NO: 1818 - DNA, 252 bp, Homo sapiens
  SIMILAR (226)..(179): 501254mologous to Mus musculus GalNAc alpha-2,6- sialyltransferase,accession number Y19054,Smith-Waterman Score=46.
atggctgttttcagggaggagagaatggtagagcttggacgtgcagtagggatgtccatactcatgtgtgagaagcccctcaaagtgctgaatggagccaagggtgagaaagacaaggaggactggcttggatgccaattggaagaaattgcaaaattactggacaaggaagtcagattaagcacagaaggggataaagaggcaaacaacaacaaaaaacaaggcaaaacaccctcatttaaagaaaactag

SEQ ID NO: 1819 - DNA, 357 bp, Homo sapiens
  SIMILAR (317)..(177): 341254mologous to Human immunodeficiency virus type 2 envelope glycoprotein,accession number AF023892,Smith-Waterman Score=60.
atgggttttggaacagttggacaaactgtgaaaagcccagataaacttcgtaaagtgatctatcgcagaaagaaagttcatcatccctttccaaatccttgttacagaaaaaaacagtcccctggaagtgggggctgtgacatggcaaataaagaaaatgaactggcttgtgcaggccacctgcctgaaaaattacaccatgatagtcgaacatatttggttaactccagtgattctggttcttcacagacagaaagcccatcatcaaaatatagtgggtttttttctgaggccttctctgcctataaagccaaattcttctggtcagctcatcagaacatttatttcacaaaatga

SEQ ID NO: 1820 - DNA, 789 bp, Homo sapiens
  SIMILAR (40)..(603): 201254mologous to Helicobacter pylori Cag7,accession number AF300828,Smith-Waterman Score=103.
atggtgagagacaaaactttactccattctaatgtcatccaaactcaagaatgcattcactacattagcctggaaagtggggatctgccaacctcaacagagtcaactaagactgaagaccctattgaaaaacaacaagaaagtcctttagacagcaatgctagcaacgatggatctaaaaactcctacttcatcatgatgaaaaggttaataaaggatcatggcttagcaatgagcagcagtctcctaaaaaatcatctctctccaagggccagggatcataatgacaacaatcagttgaagaaaaaccaggaccaagcaaaccaaagacgcaccagtaaactgcacaggggacagcatgtgatcacaatcaaggtcaagagaaagaaaacaagaaagaaaacgaaggacgaaaacacaaagcgcatgctgatgggcaaagaggctgaactgaagacattgcagactcaggtgccctggagcaatatgggccaagttgggtgggtggaaccgctacggcctcctgagggctcagaagaagagaaattccaggaatgcagccacctgagggaccgctcaggtgacagaacccccgagcaccaccagcccgtcctcagccctcttttactggcagtctgccttatgccggtgccgggcacactcaggagggagcagactccatgcgggggagcctgccgccagtccccctcccaggggagagaggcaagggggctgctgcaggtccagggaaaggctgatgcattgatggtgggagaggaggcagcgtga

SEQ ID NO: 1821 - DNA, 1521 bp, Homo sapiens
  SIMILAR (1354)..(1473): 361254mologous to Homo sapiens AML1 {alternatively spliced, exons 5 and a},accession number S76345,Smith-Waterman Score=67.
cacacaaggtggaatggctacattgtgctaatttatagatagtatttaaagcttcagaactgaatgagatcacttagggagaaaatacagaggggaaaaaaaaagaagagggtcccacgctcaactaagatctagagacttccaaaatgttgaagttgacataaaagctaacagaggagaataagaaggaatagccaatgaagcagggaaaaaatgaatagagttcattaaatttaagagagagaattttaaaggagaaaggaatgataaactgtattaaatgcaggtaaggtcaagtaaagttaggctagagaagcaacgactaaattgagcaagatgaaactgctgatgacctttacaagatgggtttcaatggcatggataaaacaaatgctccatggaagtgaagaggagacaaccaagagacagaaagtccaactgacctacagaagtagatttactgaactcacccatgccatagagaataatgatcgatgtgctaatattattggaagaggttcttgccatttgcaaattatgaagctcaacttagaaaagcaaagtagaaagaaaaaaagggatggatgggggaagagcgttcctcctaggcttttctgcatctctgaagaaaaagtttcagattttgctcagtgtcctttattctcttttcaaactaggggcttcagaggcagcaaagaccttagagtcaactccaccattacacagatgggaaccaagatccagagagggaatgcttttttccaggcagggtcacagtcagcagagcttgggagggttcttgtgaccctgtatgttgctgggcccaaggatccatatcttatccagaaacgtctgcagtgtggatgtcttttcagttctgtgggcacaggcaaacaatcagtggagtgctggcctgtgaatgcaaggggagccagcactaattgtcctcaagacgtggtgagagcggctttctggggtggagactggagggcaggggaatggaaagcgaaggaccctagacctaggaccgggtcaaatccgaagcggaaggaagaggaaacgcaaggtctgcctgccgctcgtccacaaaccactcaaagccgaacaggagaaatgcctttaatgtcgactttgtttccaaccccaccaaagtgccatccttcaggaagtacaaggaggggcttgagagcactcactaaaggggtgatgagtaaaatcaactgggaccttttctggtacttgtcccctgtgtcccctggaggattcaaggaagccttcccaagttcctcccgacaggatagaacatcccacctcagttttccaacggcacactcctccagaaccacactgtcacattgctctatgactgccacttaccaatctccccggaatgagaaggagctacagtgtcacttactggtgcatgcccctgaatgggttaatcttttcttttccttatttcgacagcatgtttaccttttgaaaaggcgagcagaggcacagtatggcactggaggctaa

SEQ ID NO: 1822 - DNA, 345 bp, Homo sapiens
  SIMILAR (2)..(82): 511254mologous to Rattus sp. reverse transcriptase homolog,accession number S80119,Smith-Waterman Score=78.
atggagcagaatagaaaatccagaaataaagctaaatacttacagccaactgatcttcaacaaagcaaacaaaaacataaggctgctgggcacactgccattgacctctgcttgacatctccttcctccccctgtcagcagccttgctcagacatcaaccaccagtgtttgcatgtccccatggcaagaacaagggggaagggagtaggagggaaaattaaaatctcctcttactttggcactggagatgcccatacgcagaaagcaaaaaggcacagcatatttaaggaagctcataagaaacagtgcatccagaagtggcgagaattggaggaatggacatga

SEQ ID NO: 1823 - DNA, 3400 bp, Homo sapiens
  SIMILAR (697)..(2484): 961254mologous to Homo sapiens putative p150,accession number U93572,Smith-Waterman Score=3012.
gttgcttcacagtcttcccttctatctgattcagtggaccaagtaaatgactctctggtaactgcagaggctatttcctggaatgaatcaacgagtgaaacgaataactctatggtgactgaattcatttttctgggtctctctgattctcagggactccagaccttcctatttatgttgttttttgtattctatggaggaatcgtgtttggaaaccttcttattgtcataacagtggtatctgactcccaccttcactctcccatgtacttcctgctagccaacctctcactcattgatctgtctctgtcttcagtcacagcccccaagatgattactgactttttcagccagcgcaaagtcatctctttcaagggctgccttgttcagatatttctccttcacttctttggtgggagtgagatggtgatcctcatagccatgggctttgacagatatatagcaatatgcaaacccctacactacactacaattatgtgtggcaacgcatgtgtcggcattatggctgtcgcatggggaattggctttctccattcggtgagccagttggcctttgccgtgcacttacccttctgtggtcccaatgaggtcgatagtttttattgtgaccttcctagggtaatcaaacttgcctgtacagatacctacaggctagatattatggtcattgctaacagtgaaatacaaactaccatcagagaatactacaaacacctctacgcaaataaactagaaaatctagaagaaatggataaattcctggacacatacactctcccaagactaaaccaggaagaagttgaatctctgaatagaccaataacagaagctgaaattgtggcaataatcaatagcttaccaaccaaaaagagtccaggaccagatggattcacagccgaattctaccagaggtacaaggaggaactggtaccattccttctgaaactattccaatcaatagaaaaagagggagtcctccctaactcattttatgaggccagcatcattctgataccaaagccaggcagagacacaacaaaaaaagagaattttagaccaatatccttgatgaacattgatgcaaaaatcctcaataaaatactggcaaaacgaatccagcagcacatcaaaaagcttatccaccaagatcaagtgggcttcatccctgggatgcaaggctggttcaatatacgcaaatcaataaatgtaatccagcatataaacagagccaaagacaaaaaccacatgattatctcaatagatgcagaaaaggcctttgacaaaattcaacaacccttcatgctaaaaactctcaataaattaggtattgatgggacgtatttcaaaataataagagctatctatgacaaacccacagccaatatcatactgaatgggcaaaaactggaagcattccctttgaaaactggcacaagacagggatgccctctctcaccactcctattcaacatagtgttggaagttctggccagggcaattaggcaggagaaggaaataaagggtattcaattaggaaaagaggaagtcaaattgtccctgtttgcagacgacatgattgtatatctagaaaaccccattgtctcagcccaaaatcttcctaagctgataagcaacttcagcaaagtctcaggatacaaaatcaatgtacaaaaatcacaagcattcttatacaccaacaacagacaaacagagagccaaaccatgagtgaactcccattcacaattgcttcaaagagaataaaatacctaggaatccaacttacaagggacgtgaaggacctcttcaaggagaactacaaatcactgctcaaggaaataaaagaggatacaaagaaatggaagaacatgccatgctcatgggtaggaagaatcaatatcgtgaaaatggccatactgcccaaggtaatttacagattcaatgccatccccatcaagctaccaatgactttcttcacagaattggaaaaaactactttaaagttcatatggaaccaaaaaagagcccgcattgccaagtcaatcctaagccaaaagaacaaagctggaggcatcacgctacctgacttcaaactatacgacaaggctacagtaaccaaaacagcatggtactggtaccaaaacagagatatagatcaatggaacagaacagagccctcagaaataatgccgcatatctacaactatctgatctttgacaaacctgagaaaaacaagcaatggggaaaggattccctatttaataaatggtgctgggaaaactggctagccatatgtagaaagctgaaactggatcccttccttataccttatacaaaaatcaattcaagatggattaaagacttaaacgttagacctcaaaccataaaaaccctagaagaaaacctaggctttaccattcaggacataggcatgggcaaggacttcatgtctaaaacaccgagagaggcactcttatgcattgttggtgagaatacaaaatggagcaaagaccccagtgctttatccacacctccaacaagctgcagtcgaccacaaagaagaaacaagtctgtctcccatgggtcctacccacaccccctgctgttcaccatgaatgatagagtcaacagtgtgaaaacgaccatactgccaaaagcaacctacaaattcaatgcaattcccatcaaaataccaccatcattcttcacagaactagaaaaaacaaggctaaaattcacatggaaccaaaaaagagcccacatagccaaagcaagactaagcaaaaagaataaatctagaggcatcacattactcgacttcaaactatactataaggccatagtcaccaaaacagcatggtactggtataaaaataggcatatagaccaatggaatagaatagagaacccagaaataaagccaaatactttcagccaactgatctttgacaaagcaagcaaaaacataaagtggggaaaggacaccctattcaacaaatggtgctggtataattggcaagccacatgtagaagaatgcaactggatcctcatctctcaccttataaacaaatcaactcaagatggttcacagacttaaatctaagacctgaaaccataaaaattctagaagataagattggaaaaacccttctagacattggcttaggcaaagacttcacaatcaagaacccaaaagcaaatgcaataaaaacagtgataaacagctgggacttaattaaactaaagagccttctgcacggcaaaaggaacagtcggcacagtaaacagacaacccacagagtgggagaaaatcttcacagtctatacatctgacaaaggattaatatctagaatctacaacaaacaaacaaatcagtga

SEQ ID NO: 1824 - DNA, 1584 bp, Homo sapiens
  SIMILAR (1264)..(1464): 281254mologous to Mus sp. alpha 1 (XII) collagen {triple- helical domain COL2},accession number S48406,Smith-Waterman Score= 79.
atggtgaatgagacaactttcaccttcacaagcccatggctggagggggcaggtgtttatggggaactctgttgctggagattctctggagttgttgagctgcaggagaaaggagaagtgggaagagactcagtgctcatggaggaccgatcacgtgccagttcctgggtccgcaactgcagagtaattctcaggtgcttcactgtgacccacctttgtcactggccaccacttgcaaagaggcctggaagatttgacaaacagatagagcctccactgggctacaaatctgcacaagtaaaccaagctctggctccgagtgacttctccctgaaagtgaaatggcttggaaaatggaagcaaatcctgtcaccttctgcttctttcaaaacacttattccaactctcaacaggcaatctttcctcatgcccttccctgcaataaattactattgcttcacaagtgctccagctgttgatgtgttagcaaatatctgcgaagggcaggataccttgtgggaaaatgttttcttagacaggatcttactggctggagccctaaaacactgttgtatccgacagcattaccagattttcctacaaatgtctctggcattcgagaggagagtaagccccacagagcctgcttgttcacagagggccttatcagttgttgatgagaccctgtctaggctcacagacaggcagtttcctccagccccagagcccgagcccgctgtggagccagaagaagagctggcagagtcattaggtacttcggtgtctgtagaaagtgccaagcccttggcaaatctgggttcatttaccagggtgggtggaagcagacctcaggcagtaatgctccttcacctgctgctcatctcctgctgtgtggcccggttcctaacaggccacagaccagtttgtggctttggggttggggacccctaccctagagccttcagacagtcatggctaatcagtcaaggagctctttcccatagagccctgacagcatccttctcagcacagggctctgggcagcctctgacagtctgtcagtacatgggaagacctacatctgctcaacccaatctgggcaatggatggcagggaaggcagggcgatgccagaccagaggatggagccctgggtctcttcactttgcgccacattatcacagaaaggtggattagaagttatctccgctctgctttctctcagagctccttggcaacacagccacctcgatataaatatacaccagcaacgtgcgcaacctcatactccacggtgaggcctccagaggccccagggcagataccgccggggagcaaggacatcaggagatccccaggacacaaaggagtgccagcctcaacgcttcaagatgcttcaactccgccactgaagccaatgctgcctgcttcctccggtgacagcagcaaagcaggcagcagtggccttggaggctctggctggacccactgtcatgcattgtcttccacggttactcaggcacctttcctttacctggaaaatatctctgagctcaaacattcaactcacatcttggagccataa

SEQ ID NO: 1825 - DNA, 957 bp, Homo sapiens
  SIMILAR (436)..(498): 761254mologous to Homo sapiens Human secreted protein encoded by gene 20,accession number Y36243,Smith-Waterman Score=94.
atggatacagagattggaaaaatgcagcccaaactgaggaactgctggagccaccggaagctggaagagcagtcatggctaatcagtcaaggagctctttcccatagagccctgacagcatccttctcagcacagggctctgggcagcctctgacagtctgtcagtacatgggaagacctacatctgctcaacccaatctgggcaatggatggcagggaaggcagccccacaggcagcagctgcagtgctccagtccagctgcccctgtggacaagtctgggaatgacccaggcactgcatgctttggctcctataaagtgaaggggttgggccatattctctcaaaagtcccttttaagtgtccagagattcctcagaaaagtcaaatcaagaggtgtaagaaccggagtcaatgccatgattgtgagtcctccccaaccacgtggaactgtgagtccattaaacccctctcctttataaattacccagtctcgggcgatgccagaccagaggatggagccctgggtctcttcactttgcgccacattatcacagaaaggtggattagaagttatctccgctctgctttctctcagagctccttggcaacacagccacctcgatataaatatacaccagcaacgtgcgcaacctcatactccacggtgaggcctccagaggccccagggcagataccgccggggagcaaggacatcaggagatccccaggacacaaaggagtgccagcctcaacgcttcaagatgcttcaactccgccactgaagccaatgctgcctgcttcctccggtgacagcagcaaagcaggcagcagtggccttggaggctctggctggacccactgtcatgcattgtcttccacggttactcaggcacctttcctttacctggaaaatatctctgagctcaaacattcaactcacatcttggagccataa

SEQ ID NO: 1826 - DNA, 1794 bp, Homo sapiens
  SIMILAR (934)..(521): 391254mologous to Plasmodium lophurae histidine-rich protein,accession number X01469,Smith-Waterman Score=355.
atgaggccacatggttggaccctaattcatatgactggtgtcctattgaagagaagagtgggacacagacagtttgtagcgcaaatccctattttttcattaaattcttctcagcagctcttggtgtttttcttccttctgagaggagttggcactgataattactcaacatggcagttacctggtttttgtctgttaaaatctaactgtctccatgatgttcaggtttcagtagaacgatgtgtcaccaagaatcttaagcccttgtggctcgattcttcctgccagggtgatcattgggatggtgccaagagctgtggacacagccacccagatgaaagaaatttgggtcctatttctagaatccagagcaaggatgctggtggaatctttcctctcctctcaatggccagtctctggcagacttcttcttcatttgcccaggaaagccagctttcaacagcacaggatttcaagaggtttcatcctgctctggtagtggtagcagagacgcctggcggtagtgatgatggtggagatagtagtgatgatggaggtagtgataatggaggtggtggtagatatggcagtagtgatggcaaaggtggtgttaacagtagtgatgtgaatgttcaaggtggtggtagtggtggtagtaatggtgagagtggtgataattatgaggaatgtgagggggcttgtgatagttatgaggaaggtggtgatggtgatgacggtggtgacggagatgaccttggtagtagtgataatggtgatggtagcagagatagttggatggcggtagtgatgatgatcgaggtggtggtggtaattgtgttggtaggggatggtgttggtaggggtagtggtggcgatgttagaggtgtggatgatttcagaaatggaggaagtggtattagtggtgagacttgtggagtcagaacttcagtcatcaccatggcaatggaatggtgcatagagtcagggttaagaaatagctcacaagccatgagtaatgagaaaaggccaatgtgccaagagaaacagcagaggaagcagaccacgagttccacggagtatgaattctgtgccctaacaccagaatacctgtctccatcaaaattgggtaaccaccaagaatatgatctacatctaaatactaagaaaggtaccacccagaacccccgtgctgtgcagctgcagagagttcggtcagtaaagtgtctccagctgattttcctacaaatgtctctggcattcgagaggagagtaagccccacagagcctgcttgttcacagagggccttatcagttgttgatgagaccctgtctaggctcacagacaggcagtttcctccagccccagagcccgagcccgctgtggagccagaagaagagctggcagagtcattaggtacttcggtgtctgtagaaagtgccaagcccttggcaaatctgggttcatttaccagggtgggtggaagcagacctcaggcagtaatgctccttcacctgctgctcatctcctgctgtgtggcccggttcctaacaggccacagaccagtttgtggctttggggttggggacccctaccctagagccttcagaaccagggctaccaacaggagatgtgaatacgaaactgagctcctgagagcaatggggatggctggatcccaaaatcgtagagggcaggtggcagcgcttaactatcagaagcaatgtgggcacaattattacaataagcagcaaaggcagagtggtggccttgaggacagaccaacggagagatga

SEQ ID NO: 1827 - DNA, 594 bp, Homo sapiens
  SIMILAR (389)..(312): 501254mologous to Homo sapiens Human secreted protein, SEQ ID NO: 7709,accession number G03628,Smith-Waterman Score=69.
atggcaatggaatggtgcatagagtcagggttaagaaatagctcacaagccatgagtaatgagaaaaggccaatgtgccaagagaaacagcagaggaagcagaccacgagttccacggagtatgaattctgtgccctaacaccagaatacctgtctccatcaaaattgggtaaccaccaagaatatgatctacatctaaatactaagaaaggtaccacccagaacccccgtgctgtgcagctgcagagagttcggtcagtaaagtgtctccagctgagtcagcccatctatatctacaaaaatcccccagagattttgattgcaatggagctaaacttacagatcaatttggagagaatgggcaccttgactgtgttgagtgttccaattcatgaatatgatgcttcaactccgccactgaagccaatgctgcctgcttcctccggtgacagcagcaaagcaggcagcagtggccttggaggctctggctggacccactgtcatgcattgtcttccacggttactcaggcacctttcctttacctggaaaatatctctgagctcaaacattcaactcacatcttggagccataa

SEQ ID NO: 1828 - DNA, 615 bp, Homo sapiens
  SIMILAR (223)..(333): 351254mologous to Homo sapiens Human secreted protein (clone na316-1),accession number Y17223,Smith-Waterman Score=65.
atgagaaagaggaggggctttgagtctcgtgaactaaaaaggatggtgctttatcagcaggaacctggacccagactagtgagtgggttttggaagtggggagaggaagatgggtttagttttggacatgttgagaaacaagtgttgaaaatgttaaaggctgtgctgaagaagagccgagagggaggaaagggaggcaagaaggaagcagccaaagatgtcaaagttcctcctctacccagatgtgctggaagcctgactcctgttcttgagctgccggcgaacagctcggttcattatcggcctttgcttctggaacaaagaaagaaaacaatgaagatgcccctctggggaatttcagtatcgcatctggatgagttcacactacagctgctttgtctgaaccacaggggccagtcttatagcactgtgcatgagtctggaatctttgagaaaccacctcgaggctttcggccaggtcacgagttttcccagctgctttcccttcaactgtctggcgaggaaacagatcttaaggcagagctaggctgcaccatgatgccagcgcgcagtggagccggatgccctctgacccgacaaacttgtaaaagctga

SEQ ID NO: 1829 - DNA, 318 bp, Homo sapiens
  SIMILAR (256)..(158): 331254mologous to Lactococcus lactis subsp. lactis UNKNOWN PROTEIN,accession number AE006350,Smith-Waterman Score=50.
atgggtggcgaaaacccacaacagaacaagcacagagatgagtaccccacaactgggcagcagggagagaacaagaaggtgaacatttatgacctactgtatttccgttataaagatgagcaatgcaggattccttccctcttggagcgtacagtggaggagatgaaaaattccactgtgacaagcaagggaggactgagatctggcaaagaaggctcagcagcaacagctagtatagagggtggaaaaccagaagaatatggtgtcccggaagccacaagaaggaagtgcctcaaagaagcaaaaaatggtcaataa

SEQ ID NO: 1830 - DNA, 465 bp, Homo sapiens
  SIMILAR (395)..(174): 431254mologous to Homo sapiens Human secreted protein encoded by cDNA clone 2820635,accession number B14300,Smith-Waterman Score =72.
atggtcacagcagtaagccttcttcaatttcaggagtccttagagtatgttttccatgtacccaaggacagattcactccagttcgccccacaccaccctgccaagcagcacaggtgctcctgtcaggtctgacttacaagcgttcaggtgctgccctgtcaagcgctatgggtgcaggacccagacgcgtctgggaaactggaacaagagagactgagttgcaatcagtgggctgctgtcagcatcccgacccttctctgcagccactcgtccctgactctctctttcctctcaggagtccaggagacttggggaactgcggctttcacagaacccaggaggcggtccctggtctatctgcaggagccctttgctcttggcattgcagacgtcctctgcacaggtacaaagggctctatgccctttggcatgaagaacgagaacttcaggtgaacacagtgtga

SEQ ID NO: 1831 - DNA, 404 bp, Homo sapiens
  SIMILAR (170)..(370): 281254mologous to Hypocrea jecorina beta-mannase,accession number L25310,Smith-Waterman Score=80.
ctcttactatatgccaggcactttacacacatcatgtcagtccttcattacagcaggcctatgaggttagaactgtcatcatcaacatgttacagcccaggaatctgaagctaagggaacttaaggctttttaccccaaggacaagatttggccaccaaccaagatggatgggacagttgaagggagtggcaatgttctttctggagaaaccaagatttgcctggtggggcaggtagcagcggagtctcccctgcaagtagcagtgactcagagccccagaatcaagcaccacttaagcctccagggcactcctgctgccctttcagatcagatgcttctgcacagatgtttagcgggccctgagtatgtcgcttcgaggcaaacgagtttcagaaagaattag

SEQ ID NO: 1832 - DNA, 171 bp, Homo sapiens
  SIMILAR (77)..(15): 471254mologous to Arabidopsis thaliana F27F5.13,accession number AC007915,Smith-Waterman Score=42.
atgtgtatggagaagttagaaaatgactatgtatggcccgggaaagggaagtcaaaagaagacaaaagaagggaacaaaatgggggcatcagacccctctccgtcctgagcctcctacaagcactgatgaggcagctgctccttgaggtcgctgtaggcttggtcgcctga

SEQ ID NO: 1833 - DNA, 171 bp, Homo sapiens; identical to SEQ ID NO: 1832
  SIMILAR (77)..(15): 471254mologous to Arabidopsis thaliana F27F5.13,accession number AC007915,Smith-Waterman Score=42.

SEQ ID NO: 1834 - DNA, 831 bp, Homo sapiens
  SIMILAR (445)..(828): 991254mologous to Cloning vector pZC320 SopA,accession number U26464,Smith-Waterman Score=671.
atggcagaaacattggccatatggatttctaacatggcagcctttgagaagcaactaccttcttccagcacgttgacatacttcccaaggctaaagatgctcatgattgtgaagaattatagctttctctctgcattcatggagaaaagcagagttctaaatcagatagagtgttcagggacactgaacactaggctttgggggggcaatcgtcagcagaggtcccccaccttactcacgtttggcaccaaaacagtgaagcacgtttgcacaggagacgatgagggctcagacattatcagtggtgaccagcacggatggaaaaccacagggtggaccacagaagaccacactgtcctcagtgttcaggacttcaaagattgtataatggaagctgcttttaaccattctctgtttcgacaaggttcggctctaaagaatccccttgttcccacgcctgctgagttgtttgactacacctccgcactgcagtttttcgatatgcttcgtgatctgctcaagaacgttgatcttaaagggttcgagcctgatgtacgtattttgcttaccaaatacagcaatagtaatggctctcagtccccgtggatggaggagcaaattcgggatgcctggggaagcatggttctaaaaaatgttgtacgtgaaacggatgaagttggtaaaggtcagatccggatgagaactgtttttgaacaggccattgatcaacgctcttcaactggtgcctggagaaatgctctttctatttgggaacctgtctgcaatgaaattttcgatcgtctgattaaaccacgctgggagattagataa

SEQ ID NO: 1835 - DNA, 1461 bp, Homo sapiens
  SIMILAR (443)..(502): 801254mologous to Homo sapiens Human secreted protein, SEQ ID NO: 7083,accession number G03002,Smith-Waterman Score=86.
atgtgggtgggaaccgcagctacgtgcctcctggtgggtgtgagctcggcgtgccctgcactcggggcagccagctggcgccaccggctcgggcagaaggaagaagcgttgtctgcagatcagttgatccgcgggctttcctgtgtcggaatgccgccgttttccggggacggctgccacccccgtgattcccagccggggctgccggccgtgcacagcaaagtatgtcgctgtgcttccttgtcttcctgtgatgacccatgtgccatcttacacaaatggacaatcaatggagagccttccggacgagcaccaccccctgctccatggtgcctggtcccataccacccaaaggctgaggagtgcgggcacacggtgctggactggcaggcagctccacctgcggcctgtgcaaaggtctgcagcttcactcttgaagccagcgagaccatgaacccaccagaaggaaaaaacgccgaacatgtccgaacatcagaagaagcaaactccggacacatcacctttaagaactgtaacagtcactggacactgaacactaggctttgggggggcaatcgtcagcagaggtcccccaccttactcacgtttggcaccaaaacagtgaagcacgtttgcacaggagacgatgagggctcagacattatcagtggtgaccagcacggatggaaaaccacagggtggaccacagaagaccacactgtcctcagtgttcaggacttcaaagattgtataatggaagctgcttttaagacaattgctaaactggcaagcccgtcaccatacctgttgatctggtttatgattcatgccttaaaaaaccctagagttgtgatagttcctcttactgtttttcatacccagaaagctatacaaaatggagatgcaatgaatggttttatgctgaacagtcttcctaattgggtgttacagctgtgcccttggacgtgttacctgtctggacatcagcctcagaataataatagccctgagcttcaggttaagatatggacacgtgatcaagattccaccaatcagatggtctttgaatctgctagtgacaaaaagaaaggaacatgccaaaatccattctggcagatttaagacacaatgacagctacatccagttcccagaggcagcagggccagtggttctagcatcggcatccaagaacacttgctgatggtgcagatggtgtgagctgcagtgtccaggtgcagtatggctgctatggtgtcctcaatgaatgaatcctgcagtggaatttacagtgttgttcctggctgcacagtcttcaagcctttttctctggatactctaggaattctttgagtttcccagtgtcctttcaataaattcttcttcctaaattaagtagagcctatttctgtggcttgcaacaaagcatcccaaaagatacaatattaaattactaattaaga

SEQ ID NO: 1836 - DNA, 546 bp, Homo sapiens
  SIMILAR (212)..(325): 521254mologous to Homo sapiens Human secreted protein, SEQ ID NO: 6812,accession number G02731,Smith-Waterman Score=99.
atggaagacagtagcacagacacagaaaaagaagaggaagaggagaaagatgaaaaggatcaagagcccatttatgccatagtgcccacaattaacattcaagatgagcggtttgttgatttatctgaaactccagctttcatttttctgcatgagagggcaagagttgaggttttggagcctctgcctagctttcaagggatgtacggaaatgcccggatgtccaggcagaagtctgatgccagggtggagccctcatggagaacctctactatggcagttcagggcaaaaatgtagggttggaacctccacacagagtccccactggagcactgcctagtggagctgtgagaagagggccatcgtcctccaggccccagaatgatagatccaccaacagcttgcaccgtgcacctggaaacgccacaggcaatcaatgccagcccatgaaagcaggtgcaggggctgtactctgcagagccacaggggtggagctgcccaaggccttgagagcccacccctgtgtcagcgtagcttggatgtga

SEQ ID NO: 1837 - DNA, 244 bp, Homo sapiens
  SIMILAR (75)..(158): 391254mologous to Pseudomonas pseudoalcaligenes 2- aminomuconic acid semialdehyde dehydrogenase,accession number U93363,Smith-Waterman Score=61.
attagcccgtggtacatttgttcttgggcagttcgatgtggatgaatcttgtgagacagggaagccatgtgacaggggcgaaatcagatactgggctcgaggatcacaccaacttcaagccaccaaggtcaaggaggcaacatcaggcaccttggaagcagatcaatccttggcaaaactgaatttcgttttagctagagcacctttttatcttttacctcatactacaccagggggttcatag

SEQ ID NO: 1838 - DNA, 1043 bp, Homo sapiens
tttttttttttttttttaaggctggggtaaatttcaggaaagccaaagttacaggcaaaattgtaaatcaatagatgggaggttacactttggttctggcctaaaaaggcaggatatcttgaaataagggcttatagtcataggtagattcaaagatttttctcatttgcaatgggttaagagaagcttcgtttaaattttggggacagcagaagagaatattagctcaggattgtagatgtgatccctccaagcccctgagaaagaaattttcaacaaagaacagtggtcagacttcagtcttcagttcccccttctctgaggtctaggtgccagcagatccattcagtaggggtccaggtttcccagtggcaactttctggccggacaggtcaggagcccagctaaaaaggtgagtgggccatcagcctatacaggcaacgagagtgtcaaccgccagattactactgccagttacgaaaaaacggtcctctggaagcgacgttctctgtgcgccacgtaacacgctgcaggaaaggtacactggggggtatcacgtgaccgtcaaccgctggggcgagcaggcgcctagaacccagcgatcgtccatggccagggagcttccagtcacgttcctctctctaataccatcctccgcgcctcacctaagcaagcgccaccttctcgcagcttcctgccccctaaagcctcggaagtcctggccctcccaaggtggagcctttaaatgggaacacctggacgaggctctgatgggaaacggggggggatctcctagagccgaacagcagggtatgcaagcacaagatacccagggacttcacgtgaccccgaggtcctcacgtgaccccccagcagccagcaagcggggtgtcagcgcctccgcaacgcatgtcaggagcccagctaaaaaggtgagtgggccatcagcctatacaggcaacgagagtgtcaaccgccagattactactgccagttacgaaaaaacggtcctctggaagcgacgttctctgtgcgccacgtaa

SEQ ID NO: 1839 - DNA, 1393 bp, Homo sapiens
  SIMILAR (1218)..(1003): 541254mologous to Homo sapiens Human secreted protein, SEQ ID NO: 7678,accession number G03597,Smith-Waterman Score=137.
atggggactccagacagtggaatggaggagaaaacaacagctaaatataagggagaaattccctacgagtggagctgcctaataacagaattgccaaggtccagtctcctgaccatgaagatgtatgggaagagggtattaaataatcatctacctgcagacactggggagctcagtgctccctgtcaggctgtgggccaacacctacctgctgtttggagccccccaccccctccgtacccactcccctgctcctccacacccctgcagctcaactgtgcaagggcagccactgctgccactgtgaggaaattaggggaattatattcatctctggaggagcctgaatgcaaacaatcatcctctgagtgtacccagaagccagggagcagacgccagtcagtgggcaggttcgtgctgaacgctgacaggcaaccagccctgggctccggtgttttgagcaatttgagggttcagtctacggcgccctttactggctatgtgtggatgagtaattcggatgaacagcggggaatggtgggaaaaagggagctgaaaaggacttttctccctttcactaaaacatcaattcataggtcaaagggccagtaccacaagcaaaggagagggcaggcactggtctggaaggcaccaggaactgccaacctgtttcctttcacattccctcagatcttcccaagtgcaggcagccaatgtgtgcccttcctggtcctttctgcagaaggtttcactgggcatgcagacaaccaccacaacttggtagattggccaccatcattcttgctcttcacccagaggcctcctaagcaatggctgcagacccgaaaaccccatgggttcaatagctcagggcctcttagggacaaggttcaggcattattaaccatttccaaactggagtttcagaatgcaactattggaaggaaccccatgggtccccagttcagcatcttcactgccttgtccctcaggcttacacaagctgtcagcatggccctgggggagtgggttcatggtctcgctgacttcaagaatgaagctgtggaccttcacagtgagcgttacagctcttaaggtggcgcgtctggagtctgtcccttctgatgttcggatgtgttcggagttttttccttctggtgggttcgtggtctcgctgacttcaagaatggagctgcggaccttcgcagtgagtgttacagctcttaaagatgacacggacccaaagagggactcctggaaatacttttgccgtcatgaaaaaagcagacttttgttactgctcttctcccttcttcctgccttgaaggcagtcatgattcctgaaactaatgcagccaagggccaggaactattactgttttttgtgactttg

SEQ ID NO: 1840 - DNA, 1572 bp, Homo sapiens
  SIMILAR (1143)..(994): 431254mologous to Homo sapiens Human secreted protein encoded by gene 20,accession number Y36243,Smith-Waterman Score=96.
ccgaggaccagctcggtctagggagaccctaacctagcggtgctagaggaattaaagacatagacacagaaatatagaggtgtgaagtgggaaatcaggggtctcacagccttcagagctgagaggccgaacagagatttacccacgtatttattaacagcaagccagtcattagcattgtttctatagatattaaattaactaaaagtatcccctatgggaaacgaagggatgggcccgaattaaaggaataggttgggcctagttaactgcagcaggagcatgtcccttaaggcacagatcactcatgcctattgtttgtggtttaagaatgcctttaagcggttttccacccccaggcaggcccaggtgttctttgccctcattcccagtaaacccacaaccttccaacttggggcgttatgggccattatgaacatgttacagtgctgcagagattttatttatggccagtttatggccagattttggggggcctgctcccaacactctacatatgctccatcttgcagaggcttcattcttggttctctagctaaaaacagtagaaattttgcacacctgggttagaaaaaaaaaatagccattaaacccacccctgttacaggtcactattggtattttgattttgccttcaatccatctgttattgtttacttttaagagtccttgatagttgctttttatgtccagagttttaatttcagtcagaaagagaaataggccttggtgagcatgctttgtcttggctggtgccagaagtctgtactcaaatatttttaaaataatttttagttgaattaacaagttagacctgtgtttagctttctcattgttttcctaaaaatagaagaaaaggttttaaatactttaaccacgaaatactttaaagcaggtttaaaataaactccttcattttgcctgttctattactctgttctcacactgctaataaagacatacccaagactggtaatttataaagtaaagaggtttaattgactcacagttccacatggctgggggaggcctcccaatcatgggcagaaggtgaatgaggagcaaagtcacatcttacatgggtggccagggcaagagagagagcatgtgtgccaggggaattccccctttataaaaccgtcccaatctcatgagacttatgcagtctcatgggagcagcatgagaaagacctcacctccgtgattcagttacctcccactgtgtccctgccacaacatgtgggaattgtgggagctaaaaatcaagatgagatttgggtaggaacacagtcaaaccatatctcctgtatacattcacactagcattttagttttagaactagttctatgttactatctgaattaatttttccacaattttgtaaggaaaaataatgcgttctttgaatttcatgtgtaaatgatatttttagttttgtgtccttttaaccaaccccattctgaaaatctttgtattgacagtgtgttatctctgcataaccatatatgtataagagtgctcaataaaaagaataaagaggaaacaaaaaa

SEQ ID NO: 1841 - DNA, 225 bp, Homo sapiens
  SIMILAR (23)..(169): 381254mologous to Arabidopsis thaliana sucrose trasporter,accession number AJ252133,Smith-Waterman Score=77.
agacaaaggagacacgttttatctgtggacccaaaactccggcgctggtcacggactgggaaggcagccttcccttggtgtttaatccttgcagggatgcctccctgattattcaaccacgtttcaaagcggcaagtcccgctattctgggggaggggcaagtacccctcaaccccttctccttcacccttagcggcaagtcccgcttttctggggaaggggcaa

SEQ ID NO: 1842 - DNA, 250 bp, Homo sapiens
  SIMILAR (25)..(198): 361254mologous to Homo sapiens PRO0806,accession number AF113013,Smith-Waterman Score=62.
agacaaaagagacatgttttatccatgaacccaaaactctggcgccggtcacggactgggaaggcagccttcccttggtgtttaatcattgcagggacggcctctctgatcattcagccacatttcaagggtgtcagaccatgcagggatgcctgccttggtccttcacccttagcggcaagtcccgcttttctggggaaggagcaaaccatcacggacaccgagcttcgggtaactctcacagtggaag

SEQ ID NO: 1843 - DNA, 448 bp, Homo sapiens
  SIMILAR (235)..(438): 331254mologous to Lycopersicon esculentum cell wall hydroxyproline-rich glycoprotein,accession number M11759,Smith- Waterman Score=72.
ggtaaagacaaaggagacacgttttatccatggacacaaaactccggcgccggtcacggactagggaaggcagccttcccttggtgtttagtcattgcagggacacctctctgattatttacacacgtttcagaggtgtcaatgcaggagggacgcctgcattggtccttcacccttagcggcaagtcccgcttttctggggaaggggcaagtaccccaaccatttctctccgtgtctctaccccttctccacctttctggggggcaagaaaccccccaaccccttctccttcactcttagtggcaagtcccgcttttgtagaggaggggcaagtaccccaaccttgtatctctgcgccccaatcccttatttccgtggcccaacctcttatatctctgcgccccaatcccttatttccgtgccccgacctctcctcgtgccgaattc

SEQ ID NO: 1844 - DNA, 576 bp, Homo sapiens
  SIMILAR (259)..(570): 551254mologous to Sus scrofa domestica polyprotein,accession number U77600,Smith-Waterman Score=300.
atggacatgaaaaggggagattctgatgagggatcagaaagaaaagagaagagctatagagaaagcatccatcttcttagagaatacacaaataattgtaaacagaatgttggcaaaaatatggattacaaaggccattctgagacaaaggagacatgttttatccatggacccaaaactccggcgccggtcacggactgggaagacagccttcccttggtgtttaatcattgcagggacgcctctctattcacccacgtttcaaagcatgctttaaaaagattaaagcctcttatcactcgcctgctacagcatggccttttaaagcctataaactctccttacaattccccgattttacctgtcctaaaaccagataagccttacaagttagttcaggatctgcgccttagcaaccaaattgttttgcctatccaccctgtggtgcccaacccgtacactcttttgtcctcaataccttcctccacaactcactattccgtgcttgatcttaaagatgcttttttcactattcccctgcaccccttgtcccagcctctctttgctttcacttag

SEQ ID NO: 1845 - DNA, 396 bp, Homo sapiens
  SIMILAR (231)..(338): 511254mologous to Simian T-cell leukemia virus gag,accession number Y07616,Smith-Waterman Score=126.
atgcaggatgaaaaccatgagacaaaggagacacgttttgtccgtggacccaaaactccggtgccagttacggactgggaaggcagccttcccttggtgtttaatcattgcagggatgcctctctgataattcacccacatttcaaaggtgtcagaccacgcagggacgcctgccttggtccttcacccttagcggcaagtcccacttttctgggggagtggcaagagcttgctacacatgccagaaatctggccattgggccaaggaatgccagcagcccaggattcctcctaagccgcgtcccatctgtgtcggaccccactgaaaatcggactgttcaactcacctggcagccactcccagagcccctggaactctggcccaaggctctctga

SEQ ID NO: 1846 - DNA, 1222 bp, Homo sapiens
  SIMILAR (1)..(477): 721254mologous to Homo sapiens Sequence encoded by human reg cDNA,accession number P81514,Smith-Waterman Score=580.
atggctcagaccagctcatacttcatgctgatctcctgcctgatgtttctgtctcagagccaaggccaagaggcccagacagagttgccccaggcccggatcagctgcccagaaggcaccaatgcctatcgctcctactgctactactttaatgaagaccgtgagacctgggttgatgcagatctctattgccagaacatgaattcgggcaacctggtgtctgtgctcacccaggccgagggtgcctttgtggcctcactgattaaggagagtggcactgatgacttcaatgtctggattggcctccatgaccccaaaaaggatcacaactcctcatcagcaaggaaacaaaactggatagacaatgagtttgatgaattgacagaagtaggcttcagaaggtgggtaataacaaacccctctgagctgaaagagcatgttctaacccaatgcaagaaagctaagaatcttgataaaaggttacaggaactgtttcacgtgactcagaaagagagagactctgtttgcttgggcgaaagtaaggaaaaagaacaagagctgctacctggtaatacagagaattcttccagatcctgtccaagaacatcaaggcagtacctctatgagtatgcaagaaccacagtattactgggcttggagacaaaggagacacgttttatccgtggacccaaaactccggcgccggtcacagactgggaaggcagccttcccttggtgtttaatcattgcagggacggcctctctgatcattcagccacatttcaagggtgtcagaccatgcagggatgcctgccttggtccttcacccttagcggcaagtcccgcttttctggggaaggagcaagctgctccttgccaggctgagctaggtcccaattcttcctcagcctctgctcctccaccctataatccttttatcacctcccctcctcacacccggtccggcttacagtttcgttccgtgactagccctccccctcctgcccagcaatttactctgaaaaaggtggctggagctaaagacatagtcaaggagcttgctacaagtgccagaaatctggcagccaggccaaggaatgcctgcagcccagaattcctcctaagctgcgtcccatctggggaccccactggaaatcagactgttcaactcatctggcagccactccaagagcccctggaactctggcccaaggctctctga

SEQ ID NO: 1847 - DNA, 848 bp, Homo sapiens
  SIMILAR (168)..(293): 331254mologous to Kalanchoe latent virus hypothetical protein, 7K,accession number AJ293570,Smith-Waterman Score=67.
gaactaaggggctccttccccagttaagggagacaaagaagagagtgaccattcagtgctcaatctcctcccatcgagctggggacccaggaaagaacaaggttggaagcaaagaagtcacaggatgctcgcacattaagatcagctcagttttgcaagattacccatgggttctagaaggcaaagccagtgagtgttgcacttgcatctctgggtctgagacaggcagatacaaagggtgtgagctggaagatggacactgtttcctgtactcacatgtaatagggattgaagaacagaagcagagaggtgtccctgcaatgattaaacaccaagggaaagctgccttcccagtccgtgaccggcgccagagttttgtgtccacggataaaacgtgtctcctttgtctgtctcagaaaatgaaaggaattgaaattaagagaagggagagattgaagagtggaaaggagaaagtgtggttgagggacagagagaggctggagaagagaacgattttgagggcttcagtatttaaaggagaaaagccggctgcaggagaaagagggaaggtatggtcatgtgactcaatccacgtgttgcaagagaaagggagcaggcctcagatatcagtcctctgcatcctcaatcacaggaaatacagtcccaggttctccgtgtggtccttaaagcctccatccatgaagcttgagggaagcaaggttcacaaggtagaaagctacacgaagacagaagaggagttcaaaagatactgggcagtcaccaagtgtgacaaatgcccaccaaatcatcaaaggcccttgttacctctccctaaagacacttcttga

SEQ ID NO: 1848 - DNA, 1161 bp, Homo sapiens
  SIMILAR (130)..(381): 631254mologous to Homo sapiens calbindin D28K,accession number S46006,Smith-Waterman Score=258.
taaaacggccccacccttatctccctttgctgactctcttttcggactcagcccacctgcacccaggtgaaataaacaaccatgttgctcacacaaggcctgtttggtggtctcttcacacggacgtgcatgaaatttggtgccgtgactcggatcggggacctcccttgggagatcaatcccctgtcctcctgttctttgctccgtgagaaagatccacctacgacctcaggtcctcagaccgaccagcccaagaaacatctcaccaatttcaaatccggtaagcggctctttttactctcttctccaacctccytcactatccttcaacctctttctcctttcaatcttggcgccacaattcaatctctcccttctcttaatttcaattcctttcattttctggtagagacaaaggagacacgttttatccgtggacccaaaactccagcgccggtcacggactgggaaggcagccttcccttggtgtttaatcattgcagggacgcctctctgattatacactcacgtttcaagggtgtcagaccacgcagggacgcctgccttggtccttcagccttagcgacaagtcccgctttcctggggcaggggcaagctgctcctcgccaggccgagctaggtcccaattcttcctcagcctctgctcctccaccctacaatccttttatcacctcccctcctcacacctggtcaggcttacagtttcattccatgactagccctccccctcctgcccagcaatttcctcttaaaaaggtggctggagctaaaggcatagtcaagcggctgaagactgacactgcccgattgccttggaagcccccagaccatcatagacgccgagcttcgggtaactctcacagtggaagggtacagcctccctcccggctgccttcgtgggctcatgttgagtgtctcaggcttttccaggagcacggtgcaagctgtcagtggatctaccgttctgggatctggaggacagtggttttcatgtgcgtccgtgtgaagagaccaccaaacaggctttgtgtgagcaacatggctgtttatttcacctgggtgcagttacttcaggccatctgggcgtatacgtgcaagtcacaggggatgcgatggcttggcttgggctcagaggcctga

SEQ ID NO: 1849 - DNA, 723 bp, Homo sapiens
  SIMILAR (412)..(717): 531254mologous to Sus scrofa domestica polyprotein,accession number U77600,Smith-Waterman Score=292.
atggaagttcataaacacccgttcaatacattggccctacggcatgagagtggctgtgaattagtttgggcagaaaaacacaggaatcagattttcccatttccgaagtcaacagcttccccaaagcaatgggacacaggacgtcataactcagacgccaaacagcaggagccaggagggagggaagaaaggaacacaatggaaatggagacaaaggagacacattttatccgtggacccaaaactctggcgtcggtcacggactgggaaggcagccttcccttggtgtttaatcattgcaggggcacctctctgattattcacccacgtttcaaaggtgtcagaccacgcagggatgcttgccttggtccttcacccttagcggcaagtcccgcttttctggggaaggggcaacacgctttaaaaggattaaagcctgttatcactcgcctgctacagcatgggcttctaaaacctataaactctcctttcccttcccccattttacctgtcctaaaaccagacaaggcttacaagttagttcagaatctgcgccttatcaaccaaattgttttgcctatccaccctgtggtgccaaacccatacactctcctatcctcaatacctccttctactacccattattctgttctggatctcaaacatgctttctttactattcctttgcacccttcatcccagcctctctttgccttcacttag

SEQ ID NO: 1850 - DNA, 426 bp, Homo sapiens
  SIMILAR (324)..(295): 801254mologous to Homo sapiens Human secreted protein, SEQ ID NO: 4611,accession number G00530,Smith-Waterman Score=50.
atgaacactttagcaattggcaaatcaggcaggaatgggtttaacaacggagctggaaatgtagctgaaaatctactccacgatgaaagatcggaatgtggcacaagttcttttcaccgaatagctattttgctcgttaaaaggaaattgtggaatttgtcaggagcccaaacactgacacacacttctgacagcaagtgcctattccaaactatgggtacgtttgccaagcttattcaacaacaacgattagctgcaaagccaggaacttaccgagcacaaaattattggaacaaagcagggaggaggcaggaggcaccaaaggcagcttctccgtctccttggtgccaggttctcctgtctgctgtccggttcacacttgcctttataactaagactctgacagaactcactagcggaacctga

SEQ ID NO: 1851 - DNA, 964 bp, Homo sapiens
tcacaggctgcctgtgccaaaggcagaagctgcagtatcagcttctgtgagtgaggaatccgaggcacacggtaacctcccgagtgttggtacagtgggtggcctatccagatcctcagtcacccagtgctggcttcttagggaatgtgtcattgctgctgttgcagcaggcatacatctgatggtaaccgttctccgtttggagaagggttttggttctgtaagtgggagggaagcgaaacctgtaaacacttgtgatgaagcggtccagggaaggaacactctcaagggctgccagtggggattgttagtttcagcatggaaacttaacttttgacttttgacataggcaaagtttggggaacccagtttttaaatttttgagggcagttaaagtggtttagggctgatgtttttcacactgtccgggggccacatttgtggtaactgagtgacttaggacaagtcactttgtatctcttctgtcccaatttcatcctcggtaaaaatggcgatgctaattgtctgccccaagggtgggtgtgaggattacatgaggtaatgcattgtaaagcatctagcaccaagtgttaactgctattaaataataggtattaggatgtatgcagcttgacagcctgtgtagtaaattaacccacactggctgttttgtgaggggcatcatcctatgcctacagaaaggaataatcattagactaaatattcctagaaatcccaaacggcaggctcttcaaactcaagtggaaatgagacctcatcagagtattctcctgatccagtagagtgtggtgtgtggagtcaaagcctaggtttttgtccatccactcctagttggatgttacctaacttctttgagtatggttttttcgctggtgatatgaaatcagtatgtattttgctgcgttattgtggagcttgaataaaatagtaatgcatataaaaa

SEQ ID NO: 1852 - DNA, 588 bp, Homo sapiens
  SIMILAR (175)..(249): 561254mologous to Homo sapiens Human secreted protein sequence encoded by gene 22 SEQ ID NO:88,accession number Y91367,Smith-Waterman Score=72.
atgaggttgagggtgcctggggaagtaaaggagctggagggtgaccagagaggatggcgactggttagtagtatggatatcacatacctccaagagtgtggaaatcagttgtacgagtggttacccagatggccatgttcttctggtaaacgtgctaccttcacacaccctttgtgtatctgtgtcctgatctcctcttcttataaggataccagtcatactggattagggcccacaccaaagacctcatttaaccttaattacctctttaaagaccttatctccaaatacagtccacatgttgagccgagactcaagattccactcgcctcctctaaacacgcaggacgacctgaaatcatagcccttaatagagcaagtcaaccaacggtacagatggtcaagctcttgctcatgtgccctccgagcataggctacagaatggcgggcgccgtggacatggttattccgggtggactacatttcccagaagtcaccgcgctagggtcaccctcgagctctagatctttttccggtgtccgagctgctgtagcccctacgtggtttgaacccaagccaaggccttga

SEQ ID NO: 1853 - DNA, 981 bp, Homo sapiens
  SIMILAR (795)..(79): 501254mologous to Homo sapiens hypothetical protein,accession number AL136793,Smith-Waterman Score=513.
ggcaggtgcaaaaaggaaaacaaatttgcttgttttgtttctcagatgtcttttctgtcagagtgcatgttctaaaattagctgtggttgcttcttttcacttctttcacgcctttgttgctcttcctctgaagccactggtaaggctttttctgctctcaatgtctgtacattctttctttgtactgctcctttcacagcaggatcttccatttcagtgctaggcttcaaggaaggatgttttgcaggaggtccttctccttttccattgactattctgtttccttttccatgggaaggtccacgtaaaggctctgacactttcttggggacacacttagtagcaacactcaagacttcatcatccaatgcaggcaatgaatccacacacagttcatgcaaaatgctgactgcagattcatcagaaatttcaacatttcttattttcttatcaagagtaggaccaccaagagaattaagaaattcactctcagaagccttacctcgtttctcctttttaagtatcttctttttacgttccaaaatttgttgttgaatttttgtcaaatgatgagaaatagtgtaatcttctgcatctcgtccacacgtctttagtgaagacatcaatattttgcttaagaaggatattgacaataccttgtccagtgcttcaatatttgcaccatggaaatgcagtttttctgccagtgaggtgctctcactatacacagcataatggagagcagtgttgcggtagatatccttaaggtttggattggtgccatgttccagcagaataacagtgcaagcctcttccctgggctgagcccccgctatctgtgctgcttgttcagggcgtctaggtctccactcctgcgcgccaggcagcgctccacccccgcggcgtcgcccttgacagctgccctgtggatcttctgcagttcggagtcccggattcggtatccgaacccgtgtagacat

SEQ ID NO: 1854 - DNA, 1011 bp, Homo sapiens
  SIMILAR (156)..(872): 321254mologous to Homo sapiens alpha-2 type VIII collagen,accession number M60832,Smith-Waterman Score=125.
atgcctgggcggcagcggctaagtctggcagttggccaggcggccaaaggacgggaactggccgttcaccccatcccagtttccacggagaactcaaccaccatggcccctgagaggaccctcaggcctgtcaggcagtccgcacagcagcggcaccagggtgaaaacctgctgctcgataccatcccggttaccatgaagagccagccccggcggcccctgcgttcttggaaggccaagtcattgcaacccctcaagtgggcgggcgatgcacttgaccctgaggacatcaggtaccaggcccgccagctcaggccggcatcggagctgcagctgcagtctagatgtggtgcaccggcagcaatagcgcggatactgaggccagacccccaggcggcaaaatcaggcgacgggccccgccagcagccgctcagtttcatccgtgtggatacagagtgcccagtgccagggcccaggatccagagagatgtacaagaggagcggaccttgagcccagggagcggcttccgggagccgggcagcaaccgccgtgcaggcgcgcgcccaacggcttttcaagtctcactcggtctgagaggtcggaggctgcgagtgtcgctgctgaaggctgtggtggaccgggctggatcgcggattgtggagggccagacggcccagggctctatagaacatgtctacacgggttccggataccgaatccgggactccgaactgcagaagatccacagggcagctgtcaagggcgacgccgcgggggtggagcgctgcctggcgcgcaggagcggagacctggacgccctggacaagcagcacagcccctgggatggggccttgcagggcaccgggcaccctcggagcggcggagccaaaaggactctcagctgttttccatccctcataattccctggctggagcagttggagaatttgagtgatttaactcacaaagttaagcatacacagtgttgtttttccaacgagcacgtttaa

SEQ ID NO: 1855 - DNA, 654 bp, Homo sapiens
  SIMILAR (526)..(633): 411254mologous to Rattus norvegicus H+,K+-ATPase alpha subunit,accession number X61934,Smith-Waterman Score=64.
atgaatgactttgaagctaggccaatagaaacttttcaaactaaaattcaaagagtgggaaaaacccagaatattcaagactatggaataattgaagaagaagaaagaatggagcaaaagaatgttagaagtaataacgtctgggaacttgccaaaattagtgatagacaccaactcagacatcagagctccaggcctttggactatgggacctacaccattggctttcctggttctcaggccttcagacttggactgtgtctcacttctggctcttttgggtctccagcttgcagatggcagatcatggaacttcctggcctccataataaggtctctccttctgccttatgcccctcagtagaattctttcttctgaagagacaaggactgaggttgctgtggacccatatggattcgctgccggtaacttgcgtaactcggatatctgccactgctaacatatttggtccacatgactcagataccttcctagtggccattgagctccagacaatcctcaccaactcagccctgacgggtagcaaggagccaagatccacccgaccacgaccacccctctgtcagcaggaagcagttacagaaaacagaagtcatccattttggatgacagaccttcatccaaagatttga

SEQ ID NO: 1856 - DNA, 549 bp, Homo sapiens
  SIMILAR (285)..(548): 371254mologous to rat cytomegalovirus Maastricht pr121.2,accession number AF232689,Smith-Waterman Score=86.
atggaagaagctacaacaaaatcttgccaagtacgggaactgtttctgacttatcaaagtgtgaacaagaggcacctctttccctcctcatccttttctgagggcgtcctcggaggcgggacagctggggactcacggagtcccgagtccgtgcaggggtggccaggtgagccgccgagtttaggggaggtgaccttgcagaccggccgggagccggaaggagaccatcccggcgagctgcgtgcagggcgcaagggacagggaacggcaacaaggacacagtcggaccaagtcaactcacgcctaccgcctcaccccaaccgccgcccccccaccacttacgcagacatctctttcatcgcttcctgcgtctcccctctccagcgagtgtttatcgctctggagtcctgttcttgctgttcccttctccccctgttcactttcctccggtcgctagtagctcgcttgctcgctcactttcccacttactatggctgaggcatccaaccgagtagtgaaaacaccacaaaaccggctctatttatacgc

SEQ ID NO: 1857 - DNA, 249 bp, Homo sapiens
  SIMILAR (40)..(159): 351254mologous to Homo sapiens TWIST RELATED PROTEIN (H- TWIST),accession number AC003986,Smith-Waterman Score=60.
atggcagaaggcgaaggggaagcaggcacatcctacatggctggagcaggaggaagagaaagcaaagggggaggtgccccacatacttttaaacaaccagatctcgtgaagactcactcactatcgcttctgagccaggagagaacactaagcaatgaaacacaggaggaaaaattaaaaacaccacctttaaattttggaaagtattttggagatacctgtgccctgctctctaaggagttcctgtag

SEQ ID NO: 1858 - DNA, 785 bp, Homo sapiens
  SIMILAR (769)..(644): 521254mologous to Arabidopsis thaliana blue-copper binging protein III,accession number U65650,Smith-Waterman Score=85.
tcaggatgtgatcatgtagaatagagtgggtattaattcctaagttactctaataacacgaatgagagtataactggccactttaggatctttaattcattggatcatcactgacacatggcagggtaattattagtatttattcccattttccagaggaagagactgaagcaagctgaccagattgagatcatactcagggggggggacctttagtcaaaccctggtgggcaggtggctttagagctgctagagtagaagttcttcctgtgggctctgtagcatcctgggggaatgagagtatcagaggtacttcacatcctacagtgtgtgggacagctccgcacagagaactgccctatccaaaatgcaagtggtacccagtgaacagaaacagggctgaaggacattggcagaggaggttgtggagtgagtctagtggctttgagagtggaggactgagagtaagagacatacaattaggtgacttgattgacagatatgaaatgcagattcttgagccccattccagtcttcctgaatctgaaactctgggggctattcacccctccataatctgtgctttaacaagccctccaggtgacccagattcacccaagggtggaaagccacctgcagagggagtgggaggggaagctgaaggagacagtgaagaagaaagaaaaggagatgactttgtggttactaggaaaccagaagaggatgtggctcttgtagctggtggtggaggagttgtagggagaaagggctgtggaagacgctga

SEQ ID NO: 1859 - DNA, 404 bp, Homo sapiens
  SIMILAR (166)..(222): 551254mologous to Hepatitis GB virus C putative second envelope polyprotein,accession number AF008009,Smith-Waterman Score =57.
actgctttatcataagaaaagatgcaggatttgtatggtcttggcctgacttaacagtaaacaacctggtgtcacagtaaacaacttggccaactcacgtcagcctcagtcattgcctgggatgggggagttttcatcatcagcctgaacactcaggctccctgtccagttcccatgcttcctcctgggccttttcactctggcctctggagcagttgttctatgatgaacactccagtgttgatctctttcttcgggctttgaaacccagtcctctctttctcctatagccttccccagtggagtctgatgtttcctctgtaccctacatactacagggctgagaaaaggggctacttccagacaattagcctgaagtgttcacatggaaatatctatgctta

SEQ ID NO: 1860 - DNA, 657 bp, Homo sapiens
  SIMILAR (8)..(322): 311254mologous to Leishmania tarentolae A 'c' was inserted after nt 369 (=nt 10459 in genomic sequence (M10126)) to correct -1 frameshift probably due to gel compression,accession number L07545,Smith-Waterman Score=98.
tttttttttttttttttccttttcattaaaattttttagtcgtttttatgagataaattattttctaaaattattttttagtacagttttgctatatacccagagctcctgatatatatataccatttttattgtttttgagatattttacaattttagttttgactttggctttggagtgggttgctgagaacatagcagttgtttcactaatccccagtaaaaaccctactaggctattggttttccttcctactcttcaatgcagttagttaacatatttggacttctgaatctattttcaataatttccagttctttcaggcatcaaggttaacactcataggagctgccatgatcctctggagccaggcgctggaggatttcttgaggtgaggtccaattagctgggcatggccacactgggtctcaaccctttttctgtagggtgtctgaagccttggcagtcatctggtgaactcaagcagagctgctctgaagagatgggctggagtctagaggaaaatctggcccaggggctccccagagacacccagaaacctcaaagatttatcggtattggaatatgaaaatactcctgacaccagcggcaaaaaagccttggaagaccacttccacttccggtccgacttctag

SEQ ID NO: 1861 - DNA, 492 bp, Homo sapiens
  SIMILAR (235)..(387): 941254mologous to Homo sapiens dJ629F1.1 (novel protein),accession number AL121754,Smith-Waterman Score=241.
atggagaaggggatgagttctggagaagggctgccttccagatcatctcaggtttcggctggtaaaataacagccaaagagttggaaacaaagcagtcctataaagagaaacgaggaggctttgtgttggtgcatgcagactggacaacccgagaagccttatgtgaatctaatccagagtatctaaacaaatccaaaaaaccagaaaccaggtttaatcccattttctcacaggtgcttttacaaggaggtgcaggttatcattctgaatccaaagccaaggagtataaacatgtatgcaaacgagcttgtcagaaggcaattgaaaagctgcaggccggtgctcttgcaactgacgcagtcactgcagcactggtggaacttgagagtgaggttctctcagttctcttgatttggaaccttgatgaatttgtgcaggggatattgaggtcttcagaagatcgacttgctgctcaaacttggagaagatag

SEQ ID NO: 1862 - DNA, 414 bp, Homo sapiens
  SIMILAR (204)..(398): 511254mologous to Mus musculus MEK Kinase,accession number L13103,Smith-Waterman Score=149.
atgggagagggtagggtaacatttacccttcagctcctgcttcagtggacaagctctgggccaggaggtgttacccttccacgtttcagctttgtgcctgtgcagaaggcaatcggcttaccactggcaccttcaccggggcagaaggggatcgtggctcatttgctgagtaaatatggagccttcaaagaatcagtagttataactacactgaacagttactccgtggcctttcgtatctccatgaaaaccaatcattcacagagatgtcaaaggtgccaatttgcaattgacagcactggtcagagactaagaattgcagattttggagctgcaccaggttggcatcaaaaggaactggtgcaggagagtttcagggacaattctggggacaattgcatttatggcacctga

SEQ ID NO: 1863 - DNA, 4492 bp, Homo sapiens
  SIMILAR (1)..(4395): 1001254mologous to Homo sapiens MEK kinase 1,accession number AF042838,Smith-Waterman Score=7602.
  misc_feature (1)...(4492): n = a,t,c or g
ccgagccctgaggcaggcggcggcggaggagccctcaaggcgagcagcgcgcgcgcggctgccgcgggactgctgcgggaggcgggcagcgggggccgcgagcgggcggactggcggcggcggcagctgcgcaaagtgcggagtgtggagctggaccagctgcctgagcagccgctcttccttgccgcctcaccgccggcctcctcgacttccccgtcgccggagcccgcggacgcagcggggagtgggaccggcttccagcctgtggcggtgccgccgccccacggagccgccagccggcgcggcgcccaccttaccgagtcggtggcggcgccggacagcggcgcctcgagtcccgcagcggccgagcccggggagaagcgggcgcccgccgccgagccgtctcctgcagcggcccccgccggtcgtgagatggagaataaagaaactctcaaagggttgcacaagatggatgatcgtccagaggaacgaatgatcagggagaaactgaaggcaacctgtatgccagcctggaagcacgaatggttggaaaggagaaataggcgagggcctgtggtggtaaaaccaatcccagttaaaggagatggatctgaaatgaatcacttagcagctgagtctccaggagaggtccaggcaagtgcggcttcaccagcttccaaaggccgacgcagtccttctcctggcaactccccatcaggtcgcacagtgaaatcagaatctccaggagtaaggagaaaaagagtttccccagtgccttttcagagtggcagaatcacaccaccccgaagagccccttcaccagatggcttctcaccatatagccctgaggaaacaaaccgccgtgttaacaaagtgatgcgggccagactgtacttactgcagcagatagggcctaactctttcctgattggaggagacagcccagacaataaataccgggtgtttattgggcctcagaactgcagctgtgcacatggaacattctgtattcatctgctatttgtgatgctccgggtgtttcaactagaaccttcagacccaatgttatggagaaaaactttaaagaattttgaggttgagagtttgttccagaaatatcacagtaggcgtagctcaaggatcaaagctccatctcgtaacaccatccagaagtttgtttcacgcatgtcaaattctcatacattgtcatcatctagtacttctacatctagttcagaaaacagcataaaggatgaagaggaacagatgtgtcctatttgcttgttgggcatgcttgatgaagaaagtcttacagtgtgtgaagacggctgcaggaacaagctgcaccaccactgcatgtcaatttgggcagaagagtgtagaagaaatagagaacctttaatatgtcccctttgtagatctaagtggagatctcatgatttctacagccacgagttgtcaagtcctgtggattccccttcttccctcagagctgcacagcagcaaaccgtacagcagcagcctttggctggatcacgaaggaatcaagagagcaattttaaccttactcattatggaactcagcaaatccctcctgcttacaaagatttagctgagccatggattcaggtgtttggaatggaactcgttggctgcttattttctagaaactggaatgtgagagagatggccctcaggcgtctttcccatgatgtcagtggggccctgctgttggcaaatggggagagcactggaaattctgggggcagcagtggaagcagcccgagtgggggagccaccagtgggtcttcccagaccagtatctcaggagatgtggtggaggcatgctgcagcgttctgtcaatggtctgtgctgaccctgtctacaaagtgtacgttgctgctttaaaaacattgagagccatgctggtatatactccttgccacagtttagcggaaagaatcaaacttcagagacttctccagccagttgtagacaccatcctagtcaaatgtgcagatgccaatagccgcacaagtcagctgtccatatcaacactgttggaactgtgcaaaggccaagcaggagagttggcagttggcagagaaatactaaaagctggatccattggtattggtggtgttgattatgtcttaaattgtattcttggaaaccaaactgaatcaaacaattggcaagaacttcttggccgcctttgtcttatagatagactgttgttggaatttcctgctgaattttatcctcatattgtcagtactgatgtttcacaagctgagcctgttgaaatcaggtataagaagctgctgtccctcttaacctttgctttgcagtccattgataattcccactcaatggttggcaaactttccagaaggatctacttgagttctgcaagaatggttactacagtaccccatgtgttttcaaaactgttagaaatgctgagtgtttccagtgtttccactcacttcaccaggatgcgtcgccgtttgatggcttatgcagatgaggtggaaattgccgaagccatccagttgggcgtagaagacactttacaacgacaacaacacaacagcttttgcaggcatctgttcccaacaactatctggaaaccacagagaacagttccccttgagtgcacagtccatttagagaaaactggaaaaggattatgtgctacaaaattgagtgccagttcagaggacatttctgagagactggccaggatttcagtaggaccttctagttcaacaacaacaacaacaacaacaacagagcaaccaaagccaatggttcaaacaaaaggcagaccccacagtcagtgtttgaactcctctcctttatctcatcattcccaattaatgtttccagccttgtcaaccccttcttcttctaccccatctgtaccagctggcactgcaacagatgtctctaagcatagacttcagggattcattccctgcagaataccttctgcatctcctcaaacacagcgcaagttttctctacaattccacagaaactgtcctgaaaacaaagactcagataaactttccccagtctttactcagtcaagacccttgccctccagtaacatacacaggccaaagccatctcgacctaccccaggtaatacaagtaaacagggagatccctcaaaaaatagcatgacacttgatctgaacagtagttccaaatgtgatgacagctttggcttgagcagcaatagtagtaattgctgttataccagtgacgagacagtgttcaccccagtagaggagaaatgcagattagatgtcaatacagagctcaactccagtattgaggaccttcttgaagcatctatgccttcaagtgatacaacagtaacttttaagtcagaagttgctgtcctgtctcctgaaaaggctgaaaatgatgatacctacaaagatgatgtgaatcataatcaaaagtgcaaagagaagatggaagctgaagaagaagaagctttagcaattgccatggcaatgtcagcgtctcaggtagccctccccatagttcctcagctgcaggttgaaaatggagaagatatcatcattattcaacaggatacaccagagactctaccaggacataccaaagcaaaacaaccgtatagagaagacactgaatggctgaaaggtcaacagataggccttggagcattttcttcttgttatcaggctcaagatgtgggaactggaactttaatggctgttaaacaggtgacttatgtcagaaacacatcttctgagcaagaagaagtagtagaagcactaagagaagagataagaatgatgagccatctgaatcatccaaacatcattaggatgttgggagccacgtgtgagaagagcaattacaatctcttcattgaatggatggcagggggatcggtggctcatttgctgagtaaatatggagccttcaaagaatcagtagttattaactacactgaacagttactccgtggactttcgtatctccatgaaaaccaaatcattcacagagatgtcaaaggtgccaatttgctaattgacagcactggtcagagactaagaattgcagattttggagctgcagccaggttggcatcaaaaggaactggtgcaggagagtttcagggacaattactggggacaattgcatttatggcacctgaggtactaagaggtcaacagtatggaaggagctgtgatgtatggagtgttggctgtgctattatagaaatggcttgtgcaaaaccaccatggaatgcagaaaaacactccaatcatcttgctttgatatttaagattgctagtgcaactactgctccatcgatcccttcacatttgtctcctggtttacgaagatgtggctcttcgttgtttaagaacttcaaccttcanggacagacctccatcaagagagctactgaagcatccagtctttcgtactacatggtag

SEQ ID NO: 1864 - DNA, 240 bp, Homo sapiens
  SIMILAR (50)..(160): 351254mologous to Oryza sativa QM protein,accession number AF106846,Smith-Waterman Score=61.
atgagtagtattgatctcatttcaattgaaatgggctcattaaggccatgctggctgtggacggccttgcacgacaagacgctggccggcgtccgaggtctgcaggcgggcgcccgagcctgcggtaagcacgtgggcatcacttcaaagcaaaaggagcccttgtccatcactgttgaggtgaggaggaccatcaccaaagccccaggacaggaacgctacatcctctgcctgaagtga

SEQ ID NO: 1865 - DNA, 324 bp, Homo sapiens
  SIMILAR (75)..(311): 441254mologous to Bos taurus alpha1H T-type calcium channel subunit,accession number AF236638,Smith-Waterman Score=78.
atgagtagtattgatctcatttcaattgaaatgggctcattaaggccatgctggctgtggacggccttgcacgacaagacgctggccggcgtccgaggtctgcaggcgggcgcccgagcctgcggtaagcacgtgggcatcacttcaaagcaaaaggagcccttgtccatcactgttgaggtgaggaggaccatcaccaaagccccaggacaggccgttgccctgttcttggtgaactgcttgttaggaccaaaagtggcccacccctttctctgggacagtgcagagcaccggggccagaggctcaaagcacctccaagctga

SEQ ID NO: 1866 - DNA, 447 bp, Homo sapiens
  SIMILAR (234)..(410): 301254mologous to Arabidopsis thaliana hypothetical protein (fragment at BAC end),accession number AL357612,Smith-Waterman Score=89.
  misc_feature (1)...(447): n = a,t,c or g
tgttgggcaattccgcatgagaataagactgcccttaccgcgtgagagtgcgtggctttttctccaccaggggttaattatgtacagtatatcataagtatgagccgatctttttccagtccattggaaatccgtttatttttagatgcctggatggggtactcattgatgggaatgacaaagggatatcaaaagttgtgtacagatcttgcaatgggagggatcgactcggccctttacaaatgagtgatagtacatggctaacgtcagaaattcataaccctctggctgtgggacagtatgtcaacaattgttccaatgacagagcagctaatgtctgttatcaggaatttgatgtgcctgcagttttccctatagaactgaagcagtatcttccaaacattgcctacagctatgacaaacaaagcccacttcgatgtgttgttn

SEQ ID NO: 1867 - DNA, 389 bp, Homo sapiens
tttttcaagatttctgattgtttattgaaatcatttaagaatagagcctggaaaactttcagtaatgttcctaggacatcttcatctgagataactttgtctttggattcctctggaacatatcggagggtcctgaaaatgggaaaagtttctattcactacccttcaactgataaaagccaaacttacctgcataacttctgggttcctggccttaaggaactataagcttattctcatgtgtgtggagggctggaaactaagttcagaaaagaattgtttgagggagttctagttagctaactcccaacacttcccacccaagtagtcagtacttatgaaaggcccattctataccacatgctgtggggtccttacattattccatt

SEQ ID NO: 1868 - DNA, 387 bp, Homo sapiens
  SIMILAR (90)..(173): 1001254mologous to Homo sapiens Human secreted protein, SEQ ID NO: 6025,accession number G01944,Smith-Waterman Score=152.
tttttttttttttggcagaagaacacaaatttttattttcttttgttaatagccttgtaaatgtgtaaagggattcagtttgttttattccagttgggtctttgtcttctgaggatcatgattttgaccccactgctgagatgttggtccatgactatgatgatgaaagaactcaaactttggccacttggcttagcagggaaccaccttcaggcctcacatatgtcttttttttttgcctggaatactcttcatgggactggccttctcagacttcaggcctccgctgaagattgctgactgtctttccctgctaccctctggaagtgggccccgagtgttactctgtatctcagggctctatttgtttgttacactcatcaaact

SEQ ID NO: 1869 - DNA, 429 bp, Homo sapiens
  SIMILAR (38)..(136): 361254mologous to Homo sapiens Human secreted protein sequence encoded by gene 33 SEQ ID NO:156,accession number Y91483,Smith-Waterman Score=61.
ttgcgttcggcactgactggggagcttgtatctgggcaaaaatggaaactttttaaaaagactgcccttaccgcgtgagagtgcgtggctttttctccaccaggggttaattaggtgcttgaacttcctcagaaaagccaatccagggtttattttcatagttcatacaagtacttcacgtggttaaagaagcccatcccggctgtgagaatagcgtgcagtagctcgcgcgttaagaacgggcagaacgccactcaaaagcacgtcgggatggtgggtttcggattggggaccctccgatatgttccagaggaatccaaagacaaagttatctcagatgaagatgtcctaggaacattactgaaagttttccaggctctattcttaaatgatttcaataaacaatcagaaatcttgaaaaaaaaaaaa

SEQ ID NO: 1870 - DNA, 1076 bp, Homo sapiens
  misc_feature (1)...(1076): n = a,t,c or g
tgcaggaattcggcacgagcgaggccgagctcgccagccggatgtgtcgcctgttcttccctgttgcgttcggcactgactggggagcttgtatctgggcaaaaatggaaactttttaaaaagactgcccttaccgcgtgagagtgcgtggctttttctccaccaggggttaattaggtgcttgaacttcctcagaaaagccaatccagggtttattttcatagttcatacaagtacttcacgtggttaaagaagcccatcccggctgtgagaatagcgtgcagtagctcgcgcgttaagaacgggcagaacgccactcaaaagcacgtcgggatggtgggtttcggattggggtacagtatatcagaagtatgagccgatctttttccagtccattggaaatccgtttatttttagatgcctggatggggtactcattgatgggaatgacaaagggatatcaaaagttgtgtacagatcttgcaatggggagggatcgaactcggccctttagaaatgagtgatngtacatggctaacgtcagaaattcataaccctctggctgtggggacagtatgtcaacaattgttcccaatggaccggagcagctaatgtctgttatcaggaatttgatgtgcctgcagttttccctatagaactgaagcagtatcttccaaacattgcctacagctatgacaaacaaagcccacttcgatgtgttgttcttgtcgcacttagggacatcaatcaaggagaagagcttttttcaaactactacacaattgtcagctaactctgtgaatcagaaattattaggttttctactcagctattaattctaagtgttttttgttaatcacttctctgagttctacctgtaaaacaaatattttgagacttaattggaataggaatttcttatgtttttgttgatattatatttatgttccaatttcatgataaaagctacttgcttcattacaatttcaaatttgtaatgcaattccaagtttaattggttttcacctaaatacacaatagcttattaaattaaaacctactctttgaacttataa

SEQ ID NO: 1871 - DNA, 1014 bp, Homo sapiens
  SIMILAR (42)..(617): 341254mologous to Homo sapiens collagen alpha 1(V) chain precursor,accession number D90279,Smith-Waterman Score=123.
atgacacttgtttttttacgtgtaaatattcgcaaaacgcccaaactggtaactttggaacacgggttcacgcagaagaagggctgctgtctggggaggactgaaaccgggttcccgaagtcgggctgctctggggccacggagagaaggggagagacgtcgaggaagaggcagagctcaagtggacggaggatggaacacagaggcggccgggacaaaggggcaggccagacagccgtgacagagaaactaggggtccgctcctgggacgcggtctcgggggcgggttcgcccctgaggcccgtgacccttcgcccgcaaccagggctagcgcttgtgtgcgcccacggaacacccgagcgaccggagaaagaaaaagtggtcaaggggacctccttccactctacgcgcctctcattcagagaggtgaggtcaggaaaggggaaggacaagccccagagcaacagaagtcaggcggtgccaggaacactgagagcgggccaggggaaggcggccgagcgcggccccctctcctcccgggccggggcggcccgaggcctcgatccgccttccccgcgccgtcctggtcacggccccgcggggctgccatgcctggccgtctgctgcggggcctgtggcagcgatggcgccgttacaagtaccgcttcgttccctggatcgcactgaacctaagccacaacccgaggtacagtatatcagaagtatgagccgatctttttccagtccattggaaatccgtttatttttagatgcctggatggggtactcattgatgggaatgacaaagggatatcaaaagttgtgtacagatcttgcaatgggagggatcgactcggccctttaaaaatgagtgatagtacatggctaacgtcagaaattcataaccctctggctgtgggacagtatgtcaacaattgttccaatgacagagcagctaatgtctgttatcaggaatttgatgtgcctgcagttttccctatagaactgaagcag

SEQ ID NO: 1872 - DNA, 2521 bp, Homo sapiens
  SIMILAR (166)..(330): 921254mologous to Homo sapiens Human secreted protein, SEQ ID NO: 6025,accession number G01944,Smith-Waterman Score=267.
atggggggctcgcgctttggtttgggggcgagtgtccgattcgagctggcctacgctgcaggggaagagatcggcttcggagttggggctcccgggccccaggggcgaactaggtgctcagaacgcgagttcgttccagaaaagggtgttacgtttcgagttgtttggggcttcggagagccggttgggtctttgtcttctgaggatcatgattttgaccccactgctgagatgttggtccatgactatgatgatgaaagaactcttgaagaagaggaaatgatggatgagggtaaaaacttcagttcagaaattgaagacttagaaaaggttcaacaaaatacccaagaagaggaagagaaaaatccttatacccgggataaggacagtacagtttacctgcagttcagtattgtgacatctgctgagtccgtgtttatgccctggcttgaacaggaaggaaccatgcctctagaagatttactggcattctatggctatgaacctacaattccagcagttgcaaattccagtgcaaatagttccccaagtgaactggcagatgaactaccagacatgacactagacaaacgatggcgccgttacaagtaccgcttcgttccctggatcgcactgaacctaagccacaacccgaggaccctccgatatgttccagaggaatccaaagacaaagttatctcagatgaagatgtcctaggaacattactgaaagttttccaggctctattcttaaatgatttcaataaacaatcagaaatcttgactatgcttccagaatctgttaaatcaaaatatcaagacctactggcagttggaacatcaaggggtggaactgcttgaaaacagacatcaacagcaaagtacctttaaaccagaagaaattctttacaagactttgggtttcagtgttgcccaagcaactagctcattgatttctgctggaaaaggtgtcttcgttactaaaggattggtaccaaaaggcgcagtcgtatctatgtatcctggtacagtatatcagaagtatgagccgatctttttccagtccattggaaatccgtttatttttagatgcctggatggggtactcattgatgggaatgacaaagggatatcaaaagttgtgtacagatcttgcaatgggagggatcgactcggccctttagaaatgagtgatagtacatggctaacgtcagaaattcataaccctctggctgtgggacagtatgtcaacaattgttccaatgacagagcagctaatgtctgttatcaggaatttgatgtgcctgcagttttccctatagaactgaagcagtatcttccaaacattgcctacagctatgacaaacaaagggcgaacgagcagcgccgagcccagtccccggatggggcgcctgagccaatcgcagccgccgccgccaccgccgcggccacaaaacctccttgcaagttcctttcacctggttcattcctccacgtttatcgggacttggcttggtgctccacctcacatttcccaaaaaagcctcctgatgcctccccgactcacagtggacgggggcctgcactgtctgtcatcagatgcagaaatggaggttcagaaagtcaaaatgggggtcacgtagcagaagaggaaattcaggcacgcaaagagacacaaaagatgcagacacagaggaaaagaccatgtgaagaggcagtaagagggcagctgcctgcaagccaaggagagaggcctcagaggaatccagccctgctgacaccttcatcttggacttctaccctccaaagctacacaacacaagaggagcgaccaaaaaggaaaagacaaaaggaacacacgaaaaaacgaagaccaccacccacgcacccaacaaccacaacacatgagaacacacaaggacaacagcaaccacaagacaaggaacaaaaaaaaacagaacacagaaacagagagaagagcaatgcgagacaggcgcgacaaacgagacacaacacaagtaacaaacgagacacgacaaaaaagagcatagaaagaacacaacagaacacacaccaaagcagagaaaacaaaacagcaacaaacacacaaaaaaaaaagaaaacaaaaagaggaaaaaaaaaagagggaacaagaaacgcggaaacaacgaagacgaaccaagcggacgcaggaagcgacgagcacgcagaacagaccacagagagaggacgcaacgaaagacgagagcaagagagggaggaccgatccacaaagagcgagagagcgcacaaagagccaaagggaaagcacgccaagaagaacaacacgaaggaccagacaaaggaaagcaaaccagagcaaatcagagacaacaagaagaaagaaagaagtgaaagcaggagccagaatagacacgacacaggcaccagagaacaagcgaagccaggaaaagaaaacaggaagaaagcaaagagaaaaacggacacgcgaagcaacacgagagacagagcgaacaactga

SEQ ID NO: 1873 - DNA, 517 bp, Homo sapiens
caaacactcacgctttctagtaaaataatagattacatcatttatggtccttgctattttggtcagctacatagggtatattttgcacgccctttcagaacacagtgagggacacattataaataataggacaaaacgtggcatcatctaaatgttctctttcatattgcgaccatatgctgcgaaaagaagcatcgtatgcgtatcattattcctttttccagaggtttgtctttggaaaattttcaaagataggggcagtgattaccatgcagacttactttcttatttacaagatggaagggaagtacatgactttgaactgattcaccttagggacatgattagctttccaaaatgggctgccttctcagagcatcaacagaggagtatcagagaaaacatggagagtacaagagaggagactgcaaaggactcagtgcaaaacttacagggaaaatggaatatatgtgaccaatttattccagagctgacagatttggatgaagtggcttga

SEQ ID NO: 1874 - DNA, 402 bp, Homo sapiens
  SIMILAR (269)..(93): 351254mologous to Macropus eugenii oct-1,accession number M97955,Smith-Waterman Score=68.
atgagaatattcaaaggaaaaacatgtcagaggcagagagaagagcagatgcaaaggcctgacacaggaacatgtttggagtgttgcagaagcaaagcagccggtatggttggagcaccttatgccatacaacagtgcccaccactgcgttgtggaggtggaaaacttcttgttcgtgttgggtggagaggaccagtggaatccgaatggtgggggatgagggaaggcaatgaggtggcctgttcagcaggaggagccgccgtgaccatgagcagccagcattcagcagccagggaatgggtgcaccggtctggtaaaggaatctgggctaatgaacaagagcacccaccacaatcccgtgaatggtttctatactccatccatctggtcaaccatagttga

SEQ ID NO: 1875 - DNA, 399 bp, Homo sapiens
  misc_feature (1)...(399): n = a,t,c or g
tccctcnnnnnnnnnnnnnnnnnnnnnnnntnnnnagcanaacacatttcttctgtctttattgtattgcttcaattggcaaatcatgcttgtattcattcatggggtacaatgtggaatgaggaaatcccactacttagcatctccactacctcagagagaccaattccacgtgaggtcccagaagtgttgatctaaacaagttgaccccatagaagtagcaagtagatcgatggtgaccaggggtcagagagtggcagagggagggaatgggaggggggttgtcagttaaaggaccaaagtctcagggaggaggaagaggttttgacatgtagtgcacagcagagtgaccagagtcaatgagaatgtgttgcattttgcaaaacacctgagagagtc

SEQ ID NO: 1876 - DNA, 412 bp, Homo sapiens
  SIMILAR (171)..(305): 351254mologous to avian infectious bronchitis virus 3a protein,accession number X59820,Smith-Waterman Score=61.
ccaatctaaatgcagggagacatttgatatggactctctcaggtgttttgcaaaacgcaacacattctcattgatctggtcaccctgctgtgcactagatgtcaaaagctcttcctccagtccagactttggtcctttaaccgacaaccccccattccctccctctgtcactctccagccccagttcaacatcgatctacttgctacttctatggggtcaactttttcagatcaacacttccaggacatcatgtggaattggtctctctgagatggtggagatgctgagtagcgggatttcctcattccacggtgcacacatctatcgaatcctcacattgtaccccataagtgtacaagcatgatttgccaattaaaataatactaataaagacataataaataccataaa

SEQ ID NO: 1877 - DNA, 522 bp, Homo sapiens
  SIMILAR (343)..(290): 471254mologous to Chironomus tentans secretory protein sp140,accession number M24276,Smith-Waterman Score=47.
atggtcacgggcagcacaggtgggaaattgcaccagtcacaggcggcctgcaggccagccctgagctgcagggtcctcaaagcgctggcccagacgcggggtcactctcctgagcctcccgaccttcccatgggtcctttggagccctgggttttggagtttgtctttcctaagtgccgctcgcccggacgcggctgctgcaggacctcagccgaccgagtgcggccgcgtcccctgcaggccacccgtcaagggcacaggggagaggcgccccaagccacagagtcgcagagctgccaggagctgacccttcggggagtctgcccttctcaggcctgctccccaccctctatggctctcaattcctcccaagaagaatgttcctctaaaaggaggccgctggccacaaagggagatgaacaagccaagccccagttcaacatcgatctacttgctacttctatggggtcaactttttcagatcaacacttccaggacatcatgtggaattggtctctctga

SEQ ID NO: 1878 - DNA, 415 bp, Homo sapiens
  SIMILAR (189)..(76): 421254mologous to Homo sapiens Human normal bladder tissue EST encoded protein 172,accession number Y60500,Smith-Waterman Score=61.
catctccatttggtgttgtgaggattatgtgagctcatgcattcaatgctcttagctcagtggctgtcccatggtaagggttcagcgatgactccatggcagctttctaggggaagacaagagggaaggttggcggagaggaaagaaaggtctgtcctggccagtgttgctcatgggccgaatcagagaatactgaaattcatggtggcatttccaagagggtagagatgattttgaagtacgtaatatatgttgcctttattatttcaccgttcaaaaactttaattctatttctcattgaatttcaagttcctgtaaagcggagacagttcaacccccagtgaattaatgggtctcagctataagtatcaatggaacagctactaacatcacaaaaagagaggcagccagctg

SEQ ID NO: 1879 - DNA, 454 bp, Homo sapiens
  SIMILAR (435)..(394): 571254mologous to Lycopersicon esculentum extensin (class I),accession number X55684,Smith-Waterman Score=50.
  misc_feature (1)...(454): n = a,t,c or g
atgacttccggtcgaccacgcgtccgaggcagatgagcttacaagtattgaaataattactaattaatcacaaatgtgaagttatgcatgatgtaaaaaatacaaacattctaattaaaggctttgcaacacnnnnnnnnnnnnnnnnnnnnnnnnnnnnnnnnnnnnnnnnnnnnnnnnnnnnnnnnnnnnnnnnnnnnnnnnnnnnnnnnnnnnntttnnnnnnnnnnnnnnnnnnnntgcnnnnnnnnnnnagannnnnnnnnnnnnnatgggggcaaaaaaattttttttgggggggggtttaaaaaaannnnnnnnnnnaaaaaaannnntttnnnnnnnnnnnnnggtggtctgtggttgattatatttttttttgttggagagaatggattgttttggtgggggtggataaaaaaaatggagtggggggatgtaaaatatagtgggg

SEQ ID NO: 1880 - DNA, 1798 bp, Homo sapiens
  SIMILAR (36)..(383): 941254mologous to Homo sapiens lysozyme precursor (EC 3.2.1.17),accession number J03801,Smith-Waterman Score=589.
cttcgcgtgcgcccacgcgttcgctagcagtcaacatgaaggctcttattgttctggggcttgtcctcctttctgttacggtccagggcaaggtctttgaaaggtgtgagttggccagaactctgaaaagattgggaatggatggctacaggggaatcagcctagcaaactggatgtgtttggccaaatgggagagtggttacaacacacgagctacaaactacaatgctggagacagaagcactgattatgggatatttcagatcaatagccgctactggtgtaatgatggcaaaaccccaggagcagttaatgcctgtcatttatcctgcagtgctttgctgcaagataacatcgctgattgctgtagcttgtgcaaaaaaggtttgtccgtgatccacaaggcattagagcatgggtggcatggagaaatcgttgtcaaaacagagatgtccgtcagtatgttcaaggttgtggagtgtaactccagaattttccttcttcagctcattttgtctctctcacaattaagggagtaggaattaagtgaaaggtcacactaccattatttccccttcaaacaaataatatttttacagaagcaggagcaaaatatggcctttcttctaagagatataatgttcactaaatgtggttatttttatattaagcctacaacattttttagtttgcaaatagaactaatactggtgaaaatttacctaaaaccttggttattaaatacatctccagtacattccgttcttttttttttttttttttttttttgagacagagtcttgctctatcgcccaggccggactgcggactgcagtggcgcaatctcggctcactgcacactccgccccccggggatcacgccattctcctgcctcagcctctccgagtagctgggactacaggcgcccgccaccacgcccggctaatttttttgtattttttagtagagacagggtttcaccgtgttagccaggatggtctcgatctcctgacctcaagtgatccacccaccttggcctcccaaagtgctgggattacaggcgtgagccacgtgcgcccggccacattcaggttctaatcaaagaaaataacccagactaaatcctgaaatgatacgatttatgccccaatatttaagtaaaaaaatataagaaaaggttatcttaaatagatcttaggcaaaatacccagctgatgaaaggcatctgatgccttcatctgttcagtcatctccaaaaaccagtagaaataaccacttttggttgggccattatgaaatttttaaagggagtagaataccaaatgatagaaacagactgcctgaattgagaattttgatttcttaaaagtgtgtttctttctaaattgctgttcccttaatttgattaatttaattcatgtattatgattaaatctgaggcagatgagcttacaacgtattgaaataattactaattaatcacaaatgtgaagttatgcatgatgtaaaaaatacaaacattctaattaaaggctttgcaacacaaaaaaaaaaaaacaaaaaataaacataaagaaaaaacaccaaaaaaaaaccgggggggcctttgtttagaaaacaacaattctttttgggggggggtgaagcgaaaaatttgtgggggggggacctgaaataaattgaaacactcggctatacaaaaagagggtggggaaaaaaatagttgggatcatctattttattctggcggggaatatctctttttgagggggggagagaatttaacaacaccctata

SEQ ID NO: 1881 - DNA, 522 bp, Homo sapiens
  SIMILAR (343)..(290): 471254mologous to Chironomus tentans secretory protein sp140,accession number M24276,Smith-Waterman Score=47.
atggtcacgggcagcacaggtgggaaattgcaccagtcacaggcggcctgcaggccagccctgagctgcagggtcctcaaagcgctggcccagacgcggggtcactctcctgagcctcccgaccttcccatgggtcctttggagccctgggttttggagtttgtctttcctaagtgccgctcgcccggacgcggctgctgcaggaccacagccgaccgagtgcggccgcgtcccctgcaggccacccgtcaagggcacaggggagaggcgccccaagccacagagtcgcagagctgccaggagctgacccttcggggagtctgcccttctcaggcctgctccccaccctctatggctctcaattcctcccaagaagaatgttcctctaaaaggaggccgctggccacaaagggagatgaacaagccaagccccagttcaacatcgatctacttgctacttctatggggtcaactttttcagatcaacacttccaggacatcatgtggaattggtctctctga

SEQ ID NO: 1882 - DNA, 510 bp, Homo sapiens
atgcccaggttgattgaatccatggaatgcggagggcccactgtaattctaaaactacttgatatgcattctggggttgagcaagcctgctctaatatgaggttgctaaaaggtgtgcaaaggaagagtcatctttgcaataaaccaaagatgcagcatataagcaacaggccttctttgagagcccaaacccaaattaaggcacgaaattttagcactgtttggagactggagaaagggtacactcgccagcagcttagccacgagagtacactgaacaaacgagacagggtcatttataacctgacatgtccaccctactgccgtgtccagtttcaattggctggaacaggacctcacattttgtatttgtcccgattggctagcaacttagaactttttaaaagaggcaaaggcagaggagaacaaaggaagaaggaagtaacttgtggaatgctgagaaaggtaaaaacaccttcaaataaggaagaggaacaggctatgacctaa

SEQ ID NO: 1883 - DNA, 936 bp, Homo sapiens
  SIMILAR (447)..(358): 541254mologous to Homo sapiens Fragment of human secreted protein encoded by gene 75,accession number Y76381,Smith-Waterman Score=81.
atggttgggcccagagaaaagcaccatgagttccccctccagcccacaggactggcatcccagcccccaggcttcaggcctgccctgggcctgaagctttcccggatttgttatgatcagagccactccataccttctgtttactctgtgtggtttcacgggggagtggacgcttattcagccagcgagggcagtatcttcaggtcttcagaacaatctccagatgtaccacctctgttgcttcaggtcctgtggggttacagctttggatctggtcctctgtgctctggtagcactgcttattgccttagtccctccagccttgtggttccagcagcttcctgtgatagtgagatcttcaggaagcttacaatcatggcagaaggcgaaggggaagcaggcatgccacatggccagagtgggagtaagagagatgcggggaggtgccagcacacttttaaactggatcttgaccatcaaaccactcaacatgtcctggtagtagagacagaaggcagattggcgagcaacttagaaccttttaaaacaggcaaaggcaaaggagaacaaaggaaggagggagtaacctgtggaatgctgagaaagttaaaaacaccttcaaataaggaagaggaacaggatatagatatgctttcctgttttgaaatgcatcccgagtgtatctctgagtgcggaatcttgctcgggtaccgagctcgaattcgtaatcatcggggggaggaaggggaggaggagaaaagaaaacccacccaccgaaaaggaagagaattcaccataccaaaaaagttcacactcataaataatgacaggctatataatattaggctctaccattgcacaaatgagacaatggctggaggagtcaccggcattcatgcagaggaggaaattcaagaggtgggtattgaagaatga

SEQ ID NO: 1884 - DNA, 162 bp, Homo sapiens
  SIMILAR (105)..(131): 771254mologous to Nicotiana tabacum PR-1c protein,accession number X05454,Smith-Waterman Score=37.
atggagttagatgatgaatcaagccctggtcttgatgaaaaacttctttttactatggactttggctgtaagagggccacatcatcaaagaaagctgccatggagtcttcgttgaacccttaccatgggacagacactgagctaagagcattgcatgcatga

SEQ ID NO: 1885 - DNA, 427 bp, Homo sapiens
  SIMILAR (155)..(319): 981254mologous to Homo sapiens Human secreted protein, SEQ ID NO: 6783,accession number G02702,Smith-Waterman Score=278.
aaggttggctgcagttccggctacctgtgtagtccgagtttccacagccaggtactactccgccagtgaccctggacagtaacaaaacatataaagcccgagcccaaaccccgccaccatcataggtctgtagttactgtggaatcaataagccatggcatctaagaaatttgctgttaaatgtgggaattttgctgtcctcgtggatcttcatatcttgccacaaggttcaaacaaagatacaagctggttttctgaacagaagaaagaggaagtctgtttactgttaaaagaaaccattgattcaagagttcaggagtacttggaagttcgcaaacagcacaggccatcaaatgcagaattcacaagatccaatcccttgtccttaaaaggttatggctttcaaatcacagcctatttcctcaag

SEQ ID NO: 1886 - DNA, 1407 bp, Homo sapiens
  SIMILAR (451)..(591): 971254mologous to Homo sapiens Human secreted protein, SEQ ID NO: 6783,accession number G02702,Smith-Waterman Score=241.
atggggccctacagtggcatggggccctacagtgagctctccgtatctgtgttggaatggaatcagacatggaatcaggctgcccagggaaaggagctgtgggaccctgttgagaatccctggcagagctgtcactccgctccctctggtacttggcaggtgtttcagatgatcaatgagtgcatgagagaatgtggggacctttctacatctcttaagagttctgagtctgctccagagatggctttgtggtgtaccgtcctagccaatccttttgtccgtctaaaaatgcagtatcttatatctgttatttgctgcttagaagaaagaattcccctggctgtgcatggaatcattcttttgtggagcctacctagtactgacctatttaacttctctcgatgcttcacgtcttccaactgctgccgggatgcttggacatcccctttcaagtgtgggaattttgctgtcctcgtggatcttcatatcttgccacaaggttcaaacaaagatacaagctggttttctgaacagaagaaagaggaagtctgtttactgttaaaagaaaccattgattcaagagttcaggagtacttggaagttcgcaaacagcacaggccatcaaatgcagaattcacaagatccaatcccttgtccttaaaaggccctctgccttatctcaaggacagagggctttctgtatcccgggttcttgccttggtgtaccggaaatactggatcacacgtgggcttggagaatgggtgcaaggttttactgagtggaggtggctctccgcgagaatttcacgttatcccgctgtccatggcctgccggaatctgctggtgcctgtcagaacaacttcttccgttcctctgctcctcttgttgtccagccgcctggcttgatggaggcctttttgcccttcctccttctgccgtgtgaggatacagcattccttccctctggaggactcagtgttcaaggcaccatcttggaaacagagatcagactctcgccagacctgctggtgcctggtgccttgatcttggacttctcatcctccacaactcagctaactcttactccctgggggacatccctcacccacaaggtggctatccactcaggagtggccttggtagcatgtctttctcatgttgagccacataccattttgcagatagttctggggaatgcagggggatcaccgggcacaggctggtattgtcacacagatcggcatgcagacagatcatgtactctgggcatcgtgtaccaaggtaccttaccgagcgtccacccctcggatgctggctctgggttagatcttccacctacccatggcagatccctgagacagtcctttctagccaggcttcttagcccttcttttaaccattcctaa

SEQ ID NO: 1887 - DNA, 332 bp, Homo sapiens
  SIMILAR (289)..(20): 251254mologous to Cryptosporidium parvum gp15 antigen,accession number AF178694,Smith-Waterman Score=76.
ctgccagcgcctttaagcccgggctcgcgctctcggaccgtgctttcgccgcctgggagccgtccggcgcagcagtttctaggtccccactgtccccgccgtcccgccccttcgcgtcccgggaaccggttggcttccgagccgcactcgccgatcctccaggcatgccccgctacgagctggctttaatcctgaaagccatgcagcgggtgctggtctctgcatgtgttttgttggaagttggaaaatgtagacacgacccacagagtggtatggtatccagtgagaagggaactgtccgcagtggctttgaaggatatgaggaagcctag

SEQ ID NO: 1888 - DNA, 9486 bp, Homo sapiens
  SIMILAR (513)..(2666): 1001254mologous to Homo sapiens sodium/myo-inositol cotransporter,accession number AF027153,Smith-Waterman Score=3694.
cggaccgtgctttcgccgcctgggagccgtccggcgcagcagtttctaggtccccactgtccccgccgtcccgccccttcgcgtcccgggaaccggttggcttccgagccgcactcgccgatcctccaggcatgccccgctacgagctggctttaatcctgaaagccatgcagcggggttggtacagtaggcttcactagacttagctgcaactcagaatttctcctccagcacctgagtaaatgctgatggtcttgtggagagtggattaagagtacgagctaagttctcaatcccaattaagaagcggaaaatttaaactgtcttcttcaaagtttatcacaaccaccaccatcaagacagcaaaccaaaggacaaagactttgaccctgctgtgttgctctgtgtagtccagttcacgtatggtttacagacttggctggggttactaaaaataaataaaaagttggacacttctgtcattggagcgctattattcacaagttaccagaatgagagctgtactggacacagcagacattgccatagtggccctgtattttatcctggtcatgtgcattggtttttttgccatgtggaaatctaatagaagcaccgtgagtggatacttcctggcggggcgctctatgacctgggtaacaattggtgcctctctgtttgtgagcaatattgggagtgagcacttcattgggctggcaggatctggagctgcaagtggatttgcagtgggcgcatgggaattcaatgccttactgcttttacaacttctgggatgggttttcatcccaatttacatccggtcaggggtatataccatgcctgaatacttgtccaagcgatttggtggccataggattcaggtctattttgcagccttgtctctgattctctatattttcaccaagctctcggtggatctgtattcgggtgccctttttatccaggagtctttgggttggaatctttatgtgtctgtcatcctgctcattggcatgactgctttgctgactgtcaccggaggccttgttgcagtgatctacacagacactctgcaggctctgctcatgatcattggggcacttacacttatgattattagcataatggagattggcgggtttgaggaagttaagagaaggtacatgttggcctcacccgatgtcacttccatcttattgacatacaacctttccaacacaaattcttgtaatgtctcccctaagaaagaagccctgaaaatgctgcggaatccaacagatgaagatgttccttggcctggattcattcttgggcagaccccagcttcagtatggtactggtgtgctgaccaagtcatcgtgcagagggtccttgcagccaaaaacattgctcatgccaaaggctctactcttatggctggcttcttaaagctcctgccaatgtttatcatagttgtcccaggaatgatttccaggatactgtttactgatgatatagcttgcatcaacccagagcactgcatgctggtgtgtggaagcagagctggttgctccaatattgcttacccacgcctggtgatgaagctggttcctgtgggccttcggggtttaatgatggcagtgatgattgcagctctgatgagtgacttagactctatctttaacagtgccagtaccatattcaccctcgatgtgtacaaacttatccgcaagagcgcaagctcccgggagttaatgattgtggggaggatatttgtggcatttatggtggtgatcagcatagcatgggtgccaatcatcgtggagatgcaaggaggccagatgtacctttacattcaggaggtagcagattacctgacacccccagtggcagccttgttcctgctggcaattttctggaagcgctgcaatgaacaaggggctttctatggtggaatggctggctttgttcttggagcagtccgtttgatactggcctttgcctaccgtgccccagaatgtgaccaacctgataataggccgggcttcatcaaagacatccattatatgtatgtggccacaggattgttttgggtcacgggactcattactgtaattgtgagccttctcacaccacctcccacaaaggaacagattcgaaccaccaccttttggtctaagaagaacctggtggtgaaggagaactgctccccaaaagaggaaccataccaaatgcaagaaaagagcattctgagatgcagtgagaataatgagaccatcaaccacatcattcccaacgggaaatctgaagacagcattaagggccttcagcctgaagatgttaatctgttggtaacctgcagagaggagggcaacccagtggcatccttaggtcattcagaggcagaaacaccagttgacgcttactccaatgggcaagcagctctcatgggtgagaaagagagaaagaaagaaacggatgatggaggtcggtactggaagttcatagactggttttgtggctttaaaagtaagagcctcagcaagaggagtctcagagacctgatggaagaggaggctgtttgtttacagatgctagaagagactcggcaagttaaagtaatactaaatattggactttttgctgtgtgttcacttggaattttcatgtttgtttatttctccttatgaacttaaggatatggtgagacactaacttaagacaatactgactggtctttggggaaaaaagttatgtaactgtgcatctctcaggcattgtttacgctgtaggttttagccaaattttacttagcagaaaatcatctaattacaagactttattttcccagagatggattaaagtaaatcttcaacttaagtgaagccaaacctaacagactgaattgtgcaaatgtggttttaaattttgcataccaaagtaagaagagaccaattattctcacagagcacttagagcagaatatatgttaagttaccatgaattaaggtatactgtctgcactgccaagtcttggcagaccttaccctgaagtagaagatttgctcatttctaaagttttttttctgtctctgtaatccctcctaccattaagaaaaacttatttcttagacattgtacaatcagttatgtactgaaaatcgaatgtgcttgtgtgatacttgtttcaggacaagttcatttgccaggttcattttgttagcatgagcctacggattctgatttcccaaagaaagaatgttttcctgtaggtatttttgtaccaccagtatatggaatgttagggaaaaactttgttccagttcctttttttttttctttctactttcaagtttaagtgaaccatactgaaatgaccaacaagtctgcctgtaaagttacatgtcatgattgtgttgttaaatgattatgggggagaaaatgaagtaaatgttgctgatgatccccatatttattgatcatattaaggttgtttatatagtttggaaatgaccagccccctaagcagtgtttgattaacttatgctaatcagatgattactcatatattctgctaattttctagctttattcttgttatttggaaaaattattagccaaatgccttcctaggtggatccagttggaagatatgtccagaaacctgaagaaaaattgacgctgcctttgtgtgctggattgctctacttgattagatcatgatatatcaaggttgaatttttagagggaaaatttaattctgatatcttattgcatccttgataagtttttccctgatttttttttcctccaaagactttccatctggacacagcctccacatttttgttgtagtgacttagagcataaggatgtttcagtgccaattccggccgtcggtaacagaaaactcagtgcatactttgctgttgttaggttgtcaatatagtctttctgtaggatggatagcatgtttgagaggtgccaaacaagaacttttggggttagtagtgtgtcttgtggagggtattacaggactgtgtaattataggactctaacttgacatggcttggcacccacttgcagctagtgggtacagggtacaaaagatgttagagaaaagctctacagattacgtacttctgtgtcttcgtatgctcaacactgtcctttgtcctccatgaaagatgaaggaagcaaattatgtatgtactttctttgaccttctttaatctctgatactttttagattgcatgattttactaggcttgtatttagggaaattactttcataaatacttttgtagattttgaatcaaaactcagtctttttaatttttttgtagtctataaactagtttcattatgatggacttgattagtccaaagttaattttagaaattgtcaggtagcatagtgtcttcccatgatcaggaggctttctgaaggactgagtctgtaaatgaaaaaataatttatgtatgaatagcatgtatttctgaagagcttagagtgcctcgtagaatttttctcaattttattcttgaggtttataatttgggggccaaatagatagagctcatcattttcttgtttggaagttgaggctgcgacatgtccaaggttatgaagtctcttttgggaagaacagaaaccaggtctccaaatctggactcatggtttgttcagatgtgtctggacaaatggttgtcaatgttttgtcctgttttttcaaaggaactgttcttcctttgggacaaccttttggtgtttgggaaagtaataagatcttggatttttcaaattaacattaagttgtaagaactaaaattttctttgaaccacactactgtgtaattcactgataattgacatattggctgggcagcctatctcttccatatccagcgtaaatgaataggaggtgtctgtgattttttttttctccctttatttaacattgagtcctagtagtttggagaattagggtccctctaccttctttctgctcttgtcttagtaagatacataaggtacatcatcttgtgtctgtgtgtatatagcagtaggtcaagtttagagtactaaagtctgtaaataaggaatgactattagcatattcattagaattgtttattcttgccagtataaacatcattttatttagactaaagtccctgaagcttgtctttcttattgctttccagtaaatagataatgtgctcgagtaagtttgtgaattgctgattgcaacttaattcagggaccagtcttcaatctatatttcattagaatgattgtccctggaatgatcatacatggactgtcttaagctagcaaaatgttcatactttacactgactaaatgggtcctaaatgatgacattggtctttagacattaacatgtgtatatttttatattagctcaagctaaggttcagaattgaagcttgatattgactagaatagctaaaagtcaaaatgaggtgaggacactggtcttggaaggtagagaaaaataaatgtcttaccaggtgttaatggtatccccagttcttagacttttgtcttctcaggcaattttcatctcaagatctgatgagaagggcatattacattggtatgcaggatgattattgcatattttgtgggacctctaatttccctggtcatctttcagaatattctgttctgccacccccagagagtaaacacttgagccgatttcttcttccccagctattctttcctgggggtaattatgctttgtctttagattagagaagcatcaagcaatagcaatggtgctgtgtccttcggcctaaattcaatagatctcatctcctagggcttccttttcacttggctcaaaggatccattgtattttggcacaaagagcctggccagggtcatgtagccatagctcttagggatgatacctcaagaaattagctgggacccatcactctgtgaaacttcacattttaagaactgagttgagggggttgttatgcacttctgtaacttgaggctaagcaaggggttaactcttgtgagagccaatagagtgtgtctgtattcgcagtccatggctcattttctttatagtaggcatatggatcttcccctctgactttgaatatcatttggtgtggcctgtgggttattttcattctttaccaccaaataaagcggcttattagctactcagttacttgctactcaaaggttaggtcttccctgttcctgcttggcagtgttaaagcttacagggttaacttatgatgattctcctggctcattttcatcagaggcatgatgactggaaagggatcacatgggtcgttggtggtgacacctcactgtttcctaggtttggatagagagatgtatacaagacctttcctgttaaattacgtgactacagagacttgccaggacaaaatttcctaagaaatcagaaaaatgattaagtgagataagtacctgggtgacacagatattagcccgttggtaaaagacaacaaatattagcttaaaatctgcatatgtagaatcattttcattagatttagagcttgaagcaccttggctctcagctactttaaactcctccccatataaatcagggcaccaataaataagtttcagctttttaaaccctggtttgatgttaagcattataaagtacgaagtttgttaccacagtagagataatttagtagaaaaatgctttgaggcttcagtatttgtaagattttgcattagccagatgctaggttgttgaaggcatttcagtgttgataatagcctgagcagacttctttacaaatgggatctgtttctatatgtgtatatgcccacttaccattcagagagactggtctttctctttgtctcccttcacattgctgtgtcagtcctacacctagtcttttcagcacttagcaaattcaaatttggattttttggtcagcttagttcactttaaggcatattggcatggtgtgtgaaagtgatgtttggccccagtattgaggacttttagatccaaataatgactcattaaatataattatgttttaagtatactgaatttctgttagcttaaaatgttaatcctcaggaatgatttcctcacactttgtgttggctaataataaaagcactgttttatcctcaaaactcctttttcaaaaattagggagagagcagtagtgatcatttatgtgagcccctttgaaatgatggtgtcagagtgcagagaaacaatggagttttgatgccaaaaaggtttttttgcagtaaaagtaaaaatttggaattagttggcatataaaggaacccttttgtactggaacgtatgaggctggattgtgaaaaggtaatctttcgattgctagacttggttaacttagggctgcaaatctttttcttctatcaaggtcacttaatatggaatgtttttgtcagactgtcctttgttggaatactttagctgttcagctactttgactcctaggagagaatttagttaaggttcaaagtaattaactggctttgccagtggtgagtcccacaccattattcacttagtagtcatataaatgtttttatttactctcttcaatgctgagaataaggctttaaattactgattcacctttaaaggaatgttgtgagaattgatgtaatttctgtttctgtttccatctaaacttctttataaaaagagggattagtttttttgttttggggtaagcacctaatttatccagtaaccaacaaccctaaccattggcatatatagtctttcactcagaaataaacaaaaactgtttggtatatctgtatcattgctaatcttgtgcactttactttttgggcagtaccatacatagtctgaggctattgacttaaaccaataactgtactttatgtaatgactcttaaatttggttacctgggttcacagcttgcttgaagagaaaggatgctagaataaagtaagcagctgaagagcgagcaaatcaagacaaaacacagtggtctcagatttttcgtagtgtgggaacagtggttttgctctataccactgaaaagcactataacataattgttgtccatgatactgaagcttttcccctcacttctaggttgtttacattcagagctctatcaataagaggaatacatattacagtgaattcgacaaccgcacaagttggcagtaggtatccccaacctaatttatcttggtaaattcaccctgtttcctagtgctgctggataaaagagtgtttactttttattgctcttagacagagtagtctagataagttttcaatttatcaacatagcctagacttctgtaagtggaatgttcattagtaactcatctttttgttgttataattggaaacagaaacgaggcttattgctattgcagaaatcccaaactggcaaaggccagtatatatggtattccataatataaccagcttttgaaatttatgtgtttggattagtgccttctggttaccagtattgactctgctagtttgcacctttccgttcttaacagaaaatttgtatttgttattcctcttaaattttgtcgtaactagtgaaggaagtaaaaaaaaaaaaaaaaacatgcattacattgacatactttatgtgcagcctttatttaggttcagtgaaaccaggtagttctgtatttgtgttgtagcctaaatgttgtttcttttatatccattaaaaacttaaagttacttatgttctgtgatcttaattttgttgtgtttccattgtaggttgataggtatatcgagaacaggtacgtgacaacagtttatattccatgatagaaagctaaagtccatagaaagcacaaaatcgtgttcacacattagtgtacccacacatagaaagcacaagactaatagtattctctgtatcccacaagtgccagtcataaaggccaccaggtatttgtctcagagttgctatgagcactacagtattgataagcccaagacaatgcggtatctaaactggtcctaatggtaagggacccaaaggaataatctcaataagtttgtaccacattgatggagggagagaatacaaatgtcaagaatgccaaaattatatttgggggttactagctaaaatggggtttgagggctttttactgcaacttgaaactggagaaatagggacagatgtctaggtttttggtgggtggaacaggtgacatatttctgttttaagctgtagtgtgattggggttttttgtaaaaaatcttaaatcttttaggaaatattacctcttaacagtgcccccccaaacatgcagaaagtcatactttaacagggcaaatactacttgtctttgattttttttgtgtacgtttgtatgtgagagatgaagttacctttatttttttcctatacttgactgtgcttcattttaataaaggataatttgatctga

SEQ ID NO: 1889 - DNA, 1440 bp, Homo sapiens
  SIMILAR (1091)..(888): 391254mologous to Homo sapiens Polyproline-rich domain from dynamin,accession number Y56033,Smith-Waterman Score=76.
  misc_feature (1)...(1440): n = a,t,c or g
tttttttttttttttttcctacaatcaagtttattactcaaagcaaaagttgtcccatataattaccttggtccgtccatttttatttncccacatggttaccacaggctgaatgactagctcacaatcccaggaggtattataagttttgcctncttccaaaaaatggtgttactcgttgtaaaggggaaaagtcctccaatgacaaagaaattgacactaatgaaaacaaaatcaaggaacgatccactgggtactgcaaggttacagagaagctgtcagtgagcagttccccaccttttcgaaggcaaagggggatccaaggggcttaaaataccttagaaaaatcaaacaggcaccctgccaacacatggcttattttaaagggccaaactttgccaaattcttcccttctcgtccatgctgccccaaaatgtgaaggaatttacatataagggcctaaaatctgggcgaatcttctcacttcttcctcttctttggtggggatataattttttcctgcgagtggggactggggacaatccctttcaacattcttttaagttcctgggtccaagagggtgtttgaacaaaaatcccctcctaaatcaacatctaatatctcggagacaagtgctcccacccatgcctttcaaacagctgcggtgggttgccaataaaaatcccaccaagaaatacccgccctctgttgtgcttgctgacttgtgggcagagatcctattaaggaagcgctcgttcacccccaggttttcccaagtccctcactattgcttctctgtcccatcagggccctctatcgtacgtttcaaagtagcagcagtcctctggccgctgcatggctttttaggattaaagccagctcgtagcggggcatgcctggaggatcggcgagtgcggctcggaagcccaagcggttcccgggacgcgaagggacagtgacggcggggacagtggggacctagaaactgctgcgccggacggctcccaggcggcgaaagcacggtccgagagcgcgagcccgggcttaaaggcgctggcagctctctgcagtcctgagggtctcttcttggccatccatgatcctgtactcttggggttttcctttgtctccttggtccctgtgtctggctcctttttccccttctgtccctgaatgcgctgttcaaaggtggctagttggcagcagtacagcttggtggtcaagagcatggagccaaagccagaccgcctgtgtccaatgactgtgtacccttgaacaagtaactgaactctgtggttcagtttcctcatctgcctcactgacccgggtcttccctcttctactctcgggctcccagagtggtccttctcaaacagcatgttgatcagatcacatttctgtttacgtaaaactctaactgcctcctggaacgaggggta

SEQ ID NO: 1890 - DNA, 690 bp, Homo sapiens
  SIMILAR (439)..(621): 281254mologous to Homo sapiens sulfated glycoprotein 2,accession number M26639,Smith-Waterman Score=68.
atggggcagacagtctgcaaggagcaagaacttggctgggcaaagctttctagtcatgacatttttctctacaaagcttctgcagatgttgatcccttgtcttctggctttagtattgtggaagcaaaaagcatggccaaaggttccctgtcaccgctgtacccagttgaccaagccaaccctgccgtcactctcaatgccgcgttttccctcaccttccatacagaagcactgggccttgtaaattctttgctcttctacctgcctggaaataaacagggcataggccttgtgtaccccttcagtgaccctctttctgactcatgcaataagaaaaacctacacggcatggtcagtgagacagcccaccgatggctgtggctgcacccggcgaaattccaggtctttaacctcctggaaggcattgttggcagtgccaaaaccatgccaaacatctggtgcttgccctgcatgatcctggatggtttacatttgggaagcattgagtgccgtcgtgggatggggaaagaatggaggcaacgacctttctgtgctgacaaatacaatcccgtcgttacctggaaacctggtgattttccagaacacgtggaggagaatgaagaacttaatagccatttgcctgcaaaatatgccatcatggagcctggtgcttgtgaatctctgggttga

SEQ ID NO: 1891 - DNA, 283 bp, Homo sapiens
  SIMILAR (175)..(41): 331254mologous to Cicer arietinum 25.7 kDa protein,accession number AJ276422,Smith-Waterman Score=82.
  misc_feature (1)...(283): n = a,t,c or g
cnnnnnnnnnnnnnnnncagaaagaaatttattttaaacattggcccaattagttgtttttatcaaaatttagtattatgggatcatgtcctgtcatcttcacaaatgtgagaaagtcttcagggctcaatcccatggttgcagcattggtcattggatgaaagtacaccttttcatgtccacctcggggtgctccacgacctcagtgtggatggccagggcaccgagccgctgctcgagcgccgctcccaactccgcgcccgccgtgtagccgctatcgtgg

SEQ ID NO: 1892 - DNA, 700 bp, Homo sapiens
  SIMILAR (423)..(677): 321254mologous to Cicer arietinum 25.7 kDa protein,accession number AJ276422,Smith-Waterman Score=128.
atggcagcttcctccagggctgcaggcaccagcactacgctgccggcgtcggccgagatccctctgggcagttccgcctcaggcttcggtctgcgcagccgcgggaagccgtgccgtttttccgcccatcgccacgatagcggctccacggcgggcgcggagttgggagcggcgctcgagcagcggctcggtgccctggccatccacactgaggtcgtggagccccccgagctatttacagttgaagaaatgatgcctcatattcaacatctgaaaggagcacatagtaagaacttatttcttaaagacaaaaagaaaaagaattattggctggtgacagttcttcatgatagacaaatttaatttaaatgagcttgccaagcagttaggtgttgggagtggaaatctgcgatttgctgatgaaacagcccatgctagaaaaactaaaagttggtcaaggctgtgccacacccttggcacttttctgtgatggtggagatgtgaagtttgttctggattctgcttttctcgaaggtggacatgaaaaggtgtactttcatccaatgaccaatgctgcaaccatgggattgagccctgaagactttctcacatttgtgaagatgacaggacatgatcccataatactaaattttgataaaaacaactaattgggccaatgtttagaataaatttctttctg

SEQ ID NO: 1893 - DNA, 407 bp, Homo sapiens
  SIMILAR (120)..(64): 421254mologous to Mus sp. orf1 5' of EpoR,accession number S52010,Smith-Waterman Score=64.
ggatcaccttgagatgacaaagccaacctggctcatgataattcatttcagcacattattgacgcaaactagagagcagagaggcaggcaaaccttgctaaccaaacaaatatgctgccacccccaggacatcataagtcacctggggacaggatgtgctcctgaatcccttcagagactggatgtcctcaaaacagcccagttagaaggattgatgggtcgagctagtcacacaaatgaaaatatccatgtggacctcaaccggctgctgttgcttcctaagtcccttagtaattcataaacccaaatccaatgaatgctaaaatgacttgcagctgaagtctcgatcacactgtgctgaaacaacttggatgcataagtaaataaatcctctttcaaagctcaaa

SEQ ID NO: 1894 - DNA, 936 bp, Homo sapiens
  SIMILAR (11)..(88): 501254mologous to Homo sapiens Fragment of human secreted protein encoded by gene 27,accession number Y36495,Smith-Waterman Score=82.
atgccggatcggctgggcgcagtggctcactcctgtaatcccagcattttgggagccgaggtgctgtatgagaccacagaaggcctcatgttggaacacagatgggggaatgccaatatacaggctcacacatatagccaggtattggcaatggaccctaggtgtcccagagccctgaatttatctttacccaataatggaccccttgttcacgaactgtggaaaaggaatgcagagcagacaagtggcctgtacccaacaactgacaatggaacactgattagagcccgagagagggactgcattgggcccaagccgcctctgcccagcgctgctctgcacaatgctgatatagcaaatctagaaccatcctccccactcccccctcatctccaaccccgtgagaaagcctctgaagaaagatggcagcgaggtcatcctcaggaaggccctccccaagaaagtaatgtgagtattcaagatgggaaagacaagtcttggggagtgcaaatcaatcgagagaaacaagaacatctgggaaaaaaagttcccaaatccactatgagcaaggttcatgctgtcacatatactgtggctcttgagggtccagatgagaggtctctgacacggcccatgctctacattcaaccctcaggacaaccagtggttggtggtgaaccccttctactccacttagaaggatccaatggctgggagcatctgttgccagcccccagagaccatgcagggaccattctgtcggtccttcccaatgcctgtcaatgtgggacccctgtttgcatgaagccgagcacaaaccttgccacacagtattgcgagcccaacatctgggtgtccctctcactctcccacactcaagcatgcatccgtgtcacacactcaatccatgtcactcctccccacctgaggggatag

SEQ ID NO: 1895 - DNA, 1989 bp, Homo sapiens
  SIMILAR (655)..(1803): 331254mologous to Homo sapiens a disintegrin-like and metalloprotease (reprolysin type) with thrombospondin type 1 motif, 12,accession number AJ250725,Smith-Waterman Score=507.
atgggcattaaccatgacaatgaccacccatcgtgtgctgatggtcttcatatcatgtctggtgaatggattaaaggacagaatcttggtgacgtttcatggtctcgatgtagcaaggaagatttggaaagatttctcaggtcaaaggccagtaactgcttgctacaaacaaatccgcagagtgtcaattctgtgatggttccctccaagctgccagggatgacatacactgctgatgaacaatgccagatcctttttgggccattggcttctttttgtcaggagatgcagcatgttatttgcacaggattatggtgcaaggtagaaggtgagaaagaatgcagaaccaagctagacccaccaatggatggaactgactgtgaccttggtaagattctgaagcaagggattgtaatggtcccagaaaacaatacagaatatgtgagaatccaccttgtcctgcaggtttgcctggattcagagactggcaatgtcaggcttatagtgttagaacttcctccccaaagcatatacttcagtggcaagctgtcctggatgaagttgactcttaaatacattaaggtggctgcccacccccatggttcttggaacactcgtgtgccctgcttggttgctgtgttgttaacacctacctggctttcctactacatctctgaaaaaccatgtgccttgttttgctctcctgttggaaaagaacagcctattcttctatcagaaaaagtgatggatggaacttcttgtggctatcagggattagatatctgtgcaaatggcaggtgccagaaagttggctgtgatggtttattagggtctcttgcaagagaagatcattgtggtgtatgcaatggcaatggaaaatcatgcaagatcattaaaggggattttaatcacaccagaggagcaggttatgtagaagtgctggtgatacctgctggagcaagaagaatcaaagttgtggaggaaaagccggcacatagctatttagctctccgagatgctggcaaacagtctattaatagtgactggaagattgaacactctggagccttcaatttggctggaactaccgttcattatgtaagacgaggcctctgggagaagatctctgccaaaggtcctactacagcacctttacatcttctggtgctcctgtttcaggatcagaattatggtcttcactatgaatacactatcccatcagaccctcttccagaaaaccagagctctaaagcacctgagcccctcttcatgtggacacacacaagctgggaagattgcgatgccacttgtggaggaggagaaaggaagacaacagtgtcctgcacaaaaatcatgagcaaaaatatcagcattgtggacaatgagaaatgcaaatacttaaccaagccagagccacagattcgaaagtgcaatgagcaaccatgtcaaacaagggaatatctaataagtcgtgtgagtgctacaagccaggcaatagagagcaaagaaaaggccagtccccattggttgaatggagaagcccttctaggaggaatgggcgtggggctggctgtcaaggatccaggcacaggattctacaaatatcatgaggtgaaaatagaaagtgtttggtggatgatgacagaatggaccccttgttcacgaacttgtggaaaaggaatgcagagcagacaagtggcctgtacccaacaactgagcaatggaacactgattagagcccgagagagggactgcattgggcccaagcccgcctctgcccagcgctgtgagggccaggactgcatgaccgtgtgggaggcgggagtgtggtctgagtgttcagtcaagtgtggcaaaggcatacgtcatcggaccgttagatgtaccaacccaagaaagaagtgtgtcctctctaccagacccagggaggctgaagactgtgaggattattcaaaatgctatgtgtggcgaatgggtgactggtctaag

SEQ ID NO: 1896 - DNA, 513 bp, Homo sapiens
  SIMILAR (513)..(295): 561254mologous to Arabidopsis thaliana putative protein,accession number AL161576,Smith-Waterman Score=209.
ttttttttttttttgcacatgtttgttttctttattgaaagacaatacagaaatgatgaaacaatacctcaagggtcttgaacatggatcaaatgacaagtctttaatgcaatggcacagaagcttctggcatcagcacctgcaagccctgttcagtcatcattcatgatcgccaaatactccttctggtgttcaaccagcttcaggaatacttggtatttcttatcatagtattttttatcctgtagtctcgggaacacaactttcccaactttgctcatttttgccattgcttccagtaatgtccgcatgcatttgcacaaaaaggggattcttgctgaggcctccacataggaaaagagtactgattgagtgccctgctgcctccatggcttctataatgaagcgagtccccaaagcaatggcttgaactgtggccaggtagagaatggcaagatcatcaaggtcctgagacagtttcaatccggtgaccatgccctttagtgtcagatc

SEQ ID NO: 1897 - DNA, 738 bp, Homo sapiens
  SIMILAR (613)..(530): 461254mologous to Myoxus glis ATPase8,accession number AJ001562,Smith-Waterman Score=70.
atgtttgaagagaacctaaatcatatggaaaaagccagacagtcaaagatcctggagaagaccattcctgagagattcagaaaggccttaggcaggaggaaggttggcatgttcagccagcagcaagatggccagtgtgttcccagcatggccagcccaggtaggggagaaggtactagatcttctgctcccaaaattgccaacatcagtaagtctaccactcatggaatccacatcttttccaagggtactgaagaacccatggcttcctttaacctcatttccctggtaactcactccaacatggcctacagccctttggtagctcccaggccaggtcattacagtgagaattgggtgtttcccctggccacatgcaggcctggctgttgccagtgctgccacaagagaagtggtggccatgttggacaggatctgagaacccctggcagctctctcatacatgggccacttggggtctatgggaaacctttgtcttttggatctggacagactctggcagtgctggttgatcccagggattatgatgccagagcagcttcagctgttctgctgtctgattcatggccaataccagttctaacaggtctaacccaaagagtcagccagataggacagggagagcaacggccactatactatgataagaaataccaagtattcctgaagctggttgaacaccagaaggagtatttggcgatcatgaatgatgactga

SEQ ID NO: 1898 - DNA, 611 bp, Homo sapiens
  SIMILAR (2)..(349): 351254mologous to Arabidopsis thaliana putative protein,accession number AL161576,Smith-Waterman Score=139.
gggcatggtcaccggattgaaactgtctcaggaccttgatgatctgcccattctctacctggccacagtcaaagccattgctttggggactcgtttcattatagaagccatggaggcagcagggccactcaatcaagtactcttttcctatgtggaggcctcagccaagaatccccctttttgtgcaaatgcatgcggacattactggcatgcctgtggtccctgtcgcaagaggtggagtccgttcttgtgtggtgctgctgttctgggtgcctgtgcctcaggggatttcgcttctgtacaggaagcaatggcaaaaatgagcaaagttgggaaagttgtgttcccgagactaccagaataaaaaatactatgatagagaaatacccaagtattccctgaagctggttgaaccccagaaggagtatttggcgatcatgaatgatgactgaacagggcttgcaggtgctgatgccagaagcttctgtgccattgcattaaagacttctgtcatttgatcccatgttcaagacccttgaggtattgtttcatcaattctgtattgtctttcaataaagaaaacaaacatgtgcaaccagaaaaaaaaaaaa

SEQ ID NO: 1899 - DNA, 494 bp, Homo sapiens
  SIMILAR (376)..(444): 431254mologous to Leishmania major possible hypothetical 34.2 Kd protein,accession number AL160493,Smith-Waterman Score=57.
  misc_feature (1)...(494): n = a,t,c or g
nggctctgcccaaaggtaagatttagcaaagtggaagaatagatgatatgcttggatgccannnnnnnnnnnnnnnnnnnnnnnnnnnnnnnnnnnnnnnnnnnnnnnnnnnnnnnnnnnnnnnnnnnnnnnnnnnnnnnnnnnnnnnnnnnnnnnnnnnnnnnnnnnnnnnnnnnnnnnnnnnnnnnnnnnnnnnnnnnnnnnntgaagctgacttcttgtgttcttcatgctgacattagaaataggaaaagtcagtcgagtnnnnnnnnnnnnnnnnnnnnnnnnnnnnnnnnnnnnnnnnnnnnnnnnnnnnnnnnnnnnnnnnnnnnnnnnnnnnnnnnnnnnnnnnnnnnnnnnnnnnnnnnnnnnnngtccactccgtgctgcaagagggtgaaatggaacctcggatgttgtacacctttaaatgtccatgttcctntttnnttncgcgcnctactggcncntcagtnnnntncnaggtcatcagt

SEQ ID NO: 1900 - DNA, 596 bp, Homo sapiens
  SIMILAR (162)..(245): 601254mologous to Homo sapiens Human secreted protein, SEQ ID NO: 6619,accession number G02538,Smith-Waterman Score=92.
gcggggaattcaagcacagcagtcctgctctggttcttagaactataaactgactacacagctccctggcccgggaaggctatgaaacaggcaacatggacaatttaaaggtgtacaacatccgaggttccatttcaccctcaggcagcacggagtggacaagagatggggtctcactttgtcacccaggctgggctcaaactcttggcttcaagcgatcttctcgccttggtctcccaaagtgcatgggattacaggcttgaactactgtactcgactgacttttcctatttctaatggtcagcatgaagaacacaagaagtcagcttcaaaggcatccagcaatatcatctattctccactttgctaaatcttacctttggcagagccttcattgaacaagattggtacccatataaaagaaggcccgagagaggctagtcttgaccctcctaccatgtgaagacacaacaagggtaccggtctatgaaccaggaaattgggccccttcaccagacacctaatctgctggtgccttgatcttggacttcccagcttctagaacttgggaattaaatttctattgtttataagct

SEQ ID NO: 1901 - DNA, 303 bp, Homo sapiens
  SIMILAR (1)..(57): 1001254mologous to Homo sapiens Misshapen/NIK-related kinase MINK-1,accession number AB035698,Smith-Waterman Score=95.
atgggcgacccagcccccgcccgcagcctggacgacatcgacctgtccgccctgcggacaggtattgagggcagccctgacctccaagaacttagtctagcagaggagacagataagagaatcaatcacaaaaatgtaattggtgtcacgaaagagtcagtacagggtattgtgggaggagaggattgtgaggggcacttcctggaggtgacattgtctcagtggaggtcgggaggcacaggcacgaggcatccaggtaaagaggaggagagtgatgaacagcatgtggagacccaggagtga

SEQ ID NO: 1902 - DNA, 489 bp, Homo sapiens
  SIMILAR (134)..(283): 441254mologous to Mycobacterium bovis fatty acid synthase,accession number U25719,Smith-Waterman Score=78.
atgttgcgcaaatatggtggctcctactatagctatgtggatgcagaaagtaaaggacagtctccagaggacagctggaaacaccattctcatgcagcccacagcggccagcttcagagccaggtgaagttgaacgtggcccccgtggccgtcttccagatgctcaagtcgatgtgtgccgggcagaggatggcgagcgagccccaggactctgcggccgtgtctctgcacacgacgagcgtgcccgaagtcagagccgggcccattgtccctgccccagtggtcgggaggtcgtggttattggcttatctctggtggttggtgctctcccttgtttccatggaaagtgcccggccccaggaggcaggaaaacctcgcccacctcactgccaaccagagctcaggcccaagggaggaagggaccgagtcattactgaggggaagagaggaagctcagatggtgccaagctgaagggaagccagctctga

SEQ ID NO: 1903 - DNA, 629 bp, Homo sapiens
  SIMILAR (3)..(479): 1001254mologous to Homo sapiens Human PRO1760 (UNQ833) amino acid sequence SEQ ID NO:376,accession number Y99449,Smith-Waterman Score=843.
atttgtactttcaagtgctgagtcctggggacattcgatacatcttcacagccacacctgccaaggactttggtggtatctttcacacaaggtatgagcagattcaccttgtccccgctgaacctccagaggcctgcggggaactcagcaacggtttcttcatccaggaccagattgctctggtggagagggggggctgctccttcctctccaagactcgggtggtccaggagcacggcgggcgggcggtgatcatctctgacaacgcagttgacaatgacagcttctacgtggagatgatccaggacagtacccagcgcacagctgacatccccgccctcttcctgctcggccgagacggctacatgatccgccgctctctggaacagcatgggctgccatgggccatcatttccatcccagtcaatgtcaccagcatccccacctttgagctgctgcaaccgccctggaccttctggtagaagagattgacccacattccagccataagtgactctgagctgggaaggggaaacccaggaattttgctacttggaatttggagatagcatctggggacaaggggagctaggtaaaggaaaaggagttgggcgttgctaggctgaaag

SEQ ID NO: 1904 - DNA, 543 bp, Homo sapiens
  SIMILAR (265)..(384): 901254mologous to Homo sapiens Human PRO1760 (UNQ833) amino acid sequence SEQ ID NO:376,accession number Y99449,Smith-Waterman Score=195.
atggggtttcaccatgttgactgggctggtctcgaacttctgacctcagacagagccgatttatcaagacaggataactgcaatggagaaagagtaattcacacagagctggctgtgcaggaaaccggagttttattattactcaaatcagtctccccaagcattcggggatcagggtttttaaagataatttggcaggccccagtgtgtgaaaaaacgatagttagatgccacgaactaggtggcaatgccttaaccccgagaggctacatgatccgccgctccctggaacagcctgggctgccatgggccatcatttccatcccagtcaatgtcaccagtatccccacctttgagctgcagcaaccgtcctggtccttctgggcccccaagggtgtcccagaagaggtaagagacaggccccagggcttctggatagaacctgaaacaaaaggtgctgaaggtatatgtcagacctcaggaaagacaccaccgaagactggatcacatgtccccactcaggaatacagaattggcacatga

SEQ ID NO: 1905 - DNA, 396 bp, Homo sapiens
  SIMILAR (3)..(395): 891254mologous to Mus musculus C2PA protein,accession number AJ250999,Smith-Waterman Score=619.
gccacgggaactaccaaaactgcccggttgtgaggtcgcatgccacgcactcaagctatggcacctacgtcaccctggcccccaaagtcctggagttccctgtctttgttcagcctctagatctctgtaatcctgcccggaccctcctgctgtcagaggagctgctgctgtatgaagggaggaacaaggctgccgaggtgacactgtttgcctattcggacctgctgctcttcaccaaggaggacgagcctggccgctgcgacgtcctgaagaaccccctctacctccagagtgtgaagctgcaggaaggttcttcagaagacctgaaattctgcgtgctctatctagcagagaaggcagagtgcttattcactttggaagcgcactcgcaggagc

SEQ ID NO: 1906 - DNA, 398 bp, Homo sapiens
  SIMILAR (390)..(331): 351254mologous to Homo sapiens phosducin-like protein,accession number AF083325,Smith-Waterman Score=42.
tttcccggtgattatagctctcaagtgcaattccatagcttgttcatcatcctggacagctaggatggactgggatgctggacagcagtggccatcaggtcatgtttcatcttctcgagcctgtggagccaaattaattgttcgatcgatttgagaggcagagcagcaatggtgctgtggctcaccacagtcactgcccagggcccaccaggaactgatgtccacttccctaacagccggacctggggaccctgatgtgagcatctgctcgactcagcagcttgtcaggacaggctgggtgaaaagtcctgtccccagggctgtgtgcttgcatttcagactgtccatttctttgtggacagagctcctgtcctctgcacctgtctggtatacagagg

SEQ ID NO: 1907 - DNA, 1011 bp, Homo sapiens
  SIMILAR (40)..(288): 911254mologous to Mus musculus C2PA protein,accession number AJ250999,Smith-Waterman Score=399.
atgggtggaccagggacctgtagccctgggaatgcagccctcgagcctctagatctctgtaatcctgcccggaccctcctgctgtcagaggagctgctgctgtatgaagggaggaacaaggctgccgaggtgacactgtttgcctattcggacctgctgctcttcaccaaggaggacgagcctggccgctgcgacgtcctgaggaaccccctctacctccagagtgtgaagctgcaggaaggttcttcagaagacctgaaattctgcgtgctctatctagcagaggaagtaccaccaacgaccccttgtacagggtcttgtcagtgtttcaaaaggcctgaaggtgtgtttctcagttcctgcaaatacactggacagatgcagcccacaattggcttcagaacacagaaggctctgaagtcagttgggtccatgggcacattgaaggcagagtgcttattcactttggaagcgcactcgcaggagcagaagaagagagtgtgctggtgcctgtcggagaacatcgccaagcagcaacagctggcagcatcacccccggacagcaagacaggtgcagaggacaggagctctggccacaaagaaatggacagtctgaatgcagcacacagccctggggacaggacttttcacccagcctgtcctgacaagctgctgagtcgagcagatgctcacatcagggtcccaggtccggctgttagggaagtggacatcagttcctggtgggccctgggcagtgactgtgcccctgaagaagacagtgcaaccttaccctctatcctgtcttcgccttctcttcctcgaagactttctctgaatagggccatccatcctccaaactgttcccagatccttggttttaaagttagggtgtttgatctgcctgacgttgactgccctccttggctgtccctgctggatgcaatcctcaaccttcaaggcttagtggctcctctgagaacacctttctcaggcatgcatcaggagtcctga

SEQ ID NO: 1908 - DNA, 702 bp, Homo sapiens
  SIMILAR (131)..(6): 381254mologous to Homo sapiens Protein encoded by a novel gene associated with colon disease,accession number B08525,Smith- Waterman Score=72.
atgagagaaggtggactgcagaccaatggcccgctttctggtttaggtggcagagtggctgatgatgccacatttgaaggtaggatacaggagaaagactggggccttgggggtgcacgaggacttctccagttctccaacaatgtttccaggctacaaactgctgctgcttcacacagagaagacagccggctgttagcgagagacttcttattcagaaccttgtatgatgaggctcgtttatccctaatgagaggccagctctccaagggcaagctccatgaaggcagacagtgcgtctccattttgatgaaggcttgcagtcaaggtcctcagtgtgtgttagagaggcatagagctctgcaaggaccacgatactctctggctactgatatggcccatggtcttggaggtgacaacgtgggtagtggactcgtccagggcatgtatccttgtgcaaaatccctttccttgggcgcgttccccccagggccctatccaatgtcaacatatcgtccgtggcactacaggccttccgtgagttcggcccaaggacgtgcgtccttggacatctccgtggaccctcagtgtattccaatcgcggccttcaagaccttcccccaagatgtttctcggggaatttacaagggccgtataggcccaatccggtggccccggaggccttatacaagattcgtttag

SEQ ID NO: 1909 - DNA, 1305 bp, Homo sapiens
  SIMILAR (1034)..(873): 401254mologous to Mus musculus open reading frame (196 AA),accession number D00570,Smith-Waterman Score=74.
atgcatattgaaaaccagccgcatacccagcaggtcaccaatccagaaaaatccatagcccaaggggatatcattgatgaattacagacaagttgcctatcagcaggaatcctggattggattagagaatcctcataccatgctggcttttctaaagaagatctggctctcagagaggaacaaagatgcctgaacacatgcactctccggggcctgctcctgaagctggtcacagagaaggaagacacaaagattaacactaaagaggtagatgaagaaactaaaaagggaaaaagcaatagtaaatttgaaagaaatagcagctgcaacagcaggcatatcaatctctggctggaggagggtttgcaagaggtaaaaatgcagacaaaggctcacgcagaaaaggactgccacactctggatgggaaaagagtgtactctattgtgagggctgtttcttcagttacagaggttggcgaccagttacccagcggtcaccataatgaaaacacacagatgtttccacctgtacagcaagagacacaagacgcaatggcaagacctacaatcttcttaggaaccacacggcacctactgagccagtcatctagctcacaaataatgacatcactcctctgtccacaatgtaagggctggctaagctccttcaacaatccattagccacacattctggacagtgccttttccaagcaaagatggtccataagatggtccatttggaaacacaaaacagagtcttctcaggcatcagattgtccaagcagccttgggaaatgaatgcagtaggacggggccagagggcatgggatcctgacgtaggaaagccacaggaccaagacctggaggaagcagtaagacatagcagtacgattgaaagaaagaaagaaagaaagaaagaaagaaagaaagaggaaatgggagtaattgagattcaaacttttatacagagagagtgtgtgtttgtggacagagagaaagacaggcagagagagagaatacgactcagagccatgcttcttaaaacaggaagaatcattaaaattagcaactcagcactaaacagtgagcagaaccacaaggattccatagccattgagattataccacaggttccctgtgccagcattttcttccacctgctcccctggatgtcagtctacatcatctcaccagtcggcctatgtcatctcactagtcagcctgggcagctgcttcgtgtaaaaatcacatcaccaaagcatttggagcacaagtattattcttcaccaagaagagcaatttga

SEQ ID NO: 1910 - DNA, 461 bp, Homo sapiens
  SIMILAR (117)..(371): 871254mologous to Homo sapiens hematopoietic cell derived zinc finger protein,accession number AF054180,Smith-Waterman Score= 393.
gaattgaccggctgtacgaattcggcacgagctccggatctcgtttttactgctctttgtccttagcctctgtggccctgtgacctgtaggtatttggagatccacagctaggacgccaggaccccctggaagcttagaaatgggatcgttgacatttcgggatgtgaccatagaattcgctctggaggagtggcaatgcctggacatggctcagcagaatttatataggaatgttatgttagagaactacagaaacctggtcttcctgggtatcgctgtctctaagctagacttgataacttgtctgaagcaagggaaagagccttggaatatgaagagacatgagatggtaactaaacccccaggtatgtgagagtgaatacaagaaacaacacaaataagaggtccagaggtccaggagaaagccagttctcaaaatgtgacctgagaagctgtgctc

SEQ ID NO: 1911 - DNA, 834 bp, Homo sapiens
  SIMILAR (595)..(783): 391254mologous to Homo sapiens alpha-B-crystallin,accession number M24906,Smith-Waterman Score=71.
atgcaactctccccgctgagcagattccaggcaggagaggaaagtgacatcatctgcttctgggctcagcaatatgttaccattcatcctgtggatggggtccagctgagtccaggtaaagagtcatcctcatccctgttagctgggagcagggataaggctggatctcacatcccgtgggtgcgggaccagggctcggcaaatgtatacataaaatcacacctgcaagaaggtccagcggttagatttacaattctgcacgtgtccagctttaggtatgagagtcaacacctcctatccaggtatgcagctaatcacgtgcctctgagctgggtccagaaatcagtcactgttcaacttgtttccagtgtacacatgacagtcagacttttcactgtggactgcatctgcgtgtgggttcagaagctcaccagtgtgcttctttcatgtttggaagtgacaatccaattgttggcttggtatgcctcaatggatgaaaaaactgatgaagagaagacacatttggttcttacttaccttcacttccactcactatttgtcagtgtggatagagctgagaacagcatttcctggcaggacagccacttgtcagcaataaacaacacactgaaagaaagatatcggacccggcctctcaccatttctaagcttccagggggtcctggcgtcctagctgtggactccaaatacctacaggtcacagggccacagaggctaaggacacagagcgtaaaaacgagatccggagctccagctggaaccagaaacaacggccccgcacatcccacaagccgccctttccgctccagctga

SEQ ID NO: 1912 - DNA, 417 bp, Homo sapiens
  SIMILAR (28)..(417): 991254mologous to Homo sapiens ubiquitin,accession number X63237,Smith-Waterman Score=686.
ccgccaccaaaatgcagattttcgtgaaaaccctcggatacgatagaaaatgtaaaggccaagatccaggataaggaaggaattcctcctgatcagcagagactgatctttgctggcaagcagctggaagatggacgtactttgtctgactacaatattcaaaaggagtctactcttcatcttgtgttgagacttcgtggtggtgctaagaaaaggaagaagaagtcttacaccactcccaagaagaataagcacaagagaaagaaggttaagctggctgtcctgaaatattataaggtggatgagaatggcaaaattagtcgccttcgtcgagagtgcccttctgatgaatgtggtgctggggtgtttatggcaagtcactttgacagacattattgtggcaaatgttgtctgact

SEQ ID NO: 1913 - DNA, 723 bp, Homo sapiens
  SIMILAR (613)..(104): 411254mologous to Gallus gallus ubiquitin/ribosomal protein,accession number U67931,Smith-Waterman Score=131.
caattgtaatcgactccctatagggcaaaacttttttttttcttcttctttttttaggttcatgtcttttattacctcatacaggtaacttggtctttctggtttgttgaaaacagtaaagtcaggacaaccatttgccacaataaatgtctgtcaaaagtgacttggccataaaaacccccagcacccaacattccatcagaaagggcactctcggacggaaggcggacttaattttgcccattcttcaatccaccttaataatatttccagggcaagcccagctttaaccttcttttctctttgtgcttaattcttccttggggaagtggtgtaaagacttccttcttccttttccttagcaccacccacgaaagtctcaacacaaggatgaaggagtagacttcctttttgaataattgtagtcaggacaaagtacggtccatcttcccagcctgcttgcccagcaaaagatcagtctctgctgatcaggaggaaattccttgccttatcctgggatcttgggccttttacattttctatcgtatccgaggggttcaacctcgagggtgatgggtcttcccccgtaaaggttttgccaaaaagtctgcattgtggtggcggctccacctgaggttgaggaaaaggaagagacaggttaggtcagggatcacaagagaagcgaccatagggtgctaacccgagagcagccgaaggtcgagc

SEQ ID NO: 1914 - DNA, 864 bp, Homo sapiens
  SIMILAR (289)..(825): 721254mologous to Homo sapiens BC273239_1,accession number AC007204,Smith-Waterman Score=680.
tttccgggtcgacccacgcgtccggcttccgggttttgcggggcctttgtctctgcagccgtagctccaggtcttgtcttcactgctgtgtgtcctctgctcctagaggcccagcctctgtggccctgtgtcctgcaggtattgggagatccacagctaagacgcccgggagcccctggaagcctagaaatggccagaaaaactgggaaaaacaggctcttccacttactggatgtttgacaaaatatccttcttgggccaaaaacattgacatcattggggccattgcaatttagagacgtggccatagaattctctctggaggagtggcattgcctggacactgcacagcggaatttatataggaatgtgatgttagagaactacagaaacctgggctttcttggtattgttgtctctaagccagacctgatcgcccatctggagcaaggaaaaaaacctttgactatgaagagacatgagatggtagccaacccctcagttatatgttctcattttgcccaagatctttggccagagcagaacataaaagattctttccaaaaagtgatactgagaagatatgaaaactatggacatgacaatttacagtttaaaaagggctgtgaaagtgtagatgagtgtaagataattcacactggagagaaaccctacagatgtagagaacgtggcaaagcttttaaccacccctcaccccttttttcacataagaaaattcttattggagagaaaccatacaagtgtgttaaatgtggcaaagccttcatttcatcctcaacccttattaaacatgagataattcatagaaactctacaaatgtgaagaatgtggcaaaattttaa

SEQ ID NO: 1915 - DNA, 820 bp, Homo sapiens
  SIMILAR (8)..(409): 891254mologous to Homo sapiens Human plasminogen,accession number W34285,Smith-Waterman Score=652.
ggcacgagtggcccacccacattcctggccctggcaagtcagtctcagaacaaggtttggaaagcacttctgtggaggcaccttaatatccccagagtgggtgctgactgctgctcactgcttgaagaagtcctcaaggccttcatcctacaaggtcatcctgggtgcacaccaagaagtgaacctcgaatctcatgttcaggaaatagaagtgtctaggctgttcttggagcccacacaagcagatattgccttgctaaagctaagcaggcctgccgtcatcactgacaaagtaatgccagcttgtctgccatccccagactacatggtcaccgccaggactgaatgttacatcactggctggggagaaacccaaggtacctttgggactggccttctcaaggaagccccagcttcttgtgattgagaataaagtgtgcaatcgctatgagtatctgaatggaagaatcaaatccactgagctctgtgctaggcatttggctggaggcactgacagttgcaaggtaagaaaaggtcaagagaccaaagttagtcttgtgctctcccttcttggtctcagccccttagacttcagtcccaaagaggcaaattctagaaggatttgtcaacgttagaccccagtctaagtgttgtttagaaactgcctagatctgtccctgaatgcgtattcagatcatctaaggggatgtcttggggcttgagttccagatcggtagcaagggagtattaagtgccgtaactacctcaggccactcaccctcctggggtgtgctggtggccagggactaaagtggtgacc

SEQ ID NO: 1916 - DNA, 2756 bp, Homo sapiens
  SIMILAR (55)..(2298): 991254mologous to Homo sapiens precursor polypeptide (AA -19 to 791),accession number X05199,Smith-Waterman Score=4177.
aacaacatcctgggattgggacccactttctgggcactgctggccagtcccaaaatggaacataaggaagtggttcttctacttcttttatttctgaaatcaggtcaaggagagcctctggatgactatgtgaatacccagggggcttcactgttcagtgtcactaagaagcagctgggagcaggaagtatagaagaatgtgcagcaaaatgtgaggaggacgaagaattcacctgcagggcattccaatatcacagtaaagagcaacaatgtgtgataatggctgaaaacaggaagtcctccataatcattaggatgagagatgtagttttatttgaaaagaaagtgtatctctcagagtgcaagactgggaatggaaagaactacagagggacgatgtccaaaacaaaaaatggcatcacctgtcaaaaatggagttccacttctccccacagacctagattctcacctgctacacacccctcagagggactggaggagaactactgcaggaatccagacaacgatccgcaggggccctggtgctatactactgatccagaaaagagatatgactactgcgacattcttgagtgtgaagaggaatgtatgcattgcagtggagaaaactatgacggcaaaatttccaagaccatgtctggactggaatgccaggcctgggactctcagagcccacacgctcatggatacattccttccaaatttccaaacaagaacctgaagaagaattactgtcgtaaccccgatagggagctgcggccttggtgtttcaccaccgaccccaacaagcgctgggaactttgcgacatcccccgctgcacaacacctccaccatcttctggtcccacctaccagtgtctgaagggaacaggtgaaaactatcgcgggaatgtggctgttaccgtttccgggcacacctgtcagcactggagtgcacagacccctcacacacataacaggacaccagaaaacttcccctgcaaaaatttggatgaaaactactgccgcaatcctgacggaaaaagggccccatggtgccatacaaccaacagccaagtgcggtgggagtactgtaagataccgtcctgtgactcctccccagtatccacggaacaattggctcccacagcaccacctgagctaacccctgtggtccaggactgctaccatggtgatggacagagctaccgaggcacatcctccaccaccaccacaggaaagaagtgtcagtcttggtcatctatgacaccacaccggcaccagaagaccccagaaaactacccaaatgctggcctgacaatgaactactgcaggaatccagatgccgataaaggcccctggtgttttaccacagaccccagcgtcaggtgggagtactgcaacctgaaaaaatgctcaggaacagaagcgagtgttgtagcacctccgcctgttgtcctgcttccagatgtagagactccttccgaagaagactgtatgtttgggaatgggaaaggataccgaggcaagagggcgaccactgttactgggacgccatgccaggactgggctgcccaggagccccatagacacagcattttcactccagagacaaatccacgggcgggtctggaaaaaaattactgccgtaaccctgatggtgatgtaggtggtccctggtgctacacgacaaatccaagaaaactttacgactactgtgatgtccctcagtgtgcggccccttcatttgattgtgggaagcctcaagtggagccgaagaaatgtcctggaagggttgtgggggggtgtgtggcccacccacattcctggccctggcaagtcagtcttagaacaaggtttggaatgcacttctgtggaggcaccttgatatccccagagtgggtgttgactgctgcccactgcttggagaagtccccaaggccttcatcctacaaggtcatcctgggtgcacaccaagaagtgaatctcgaaccgcatgttcaggaaatagaagtgtctaggctgttcttggagcccacacgaaaagatattgccttgctaaagctaagcagtcctgccgtcatcactgacaaagtaatcccagcttgtctgccatccccaaattatgtggtcgctgaccggaccgaatgtttcatcactggctggggagaaacccaaggtacttttggagctggccttctcaaggaagcccagctccctgtgattgagaataaagtgtgcaatcgctatgagtttctgaatgggaagagtccaatccaccgaactctgtgctggggcatttggccggaggcactgacagttgccagggtgacagtggaggtcctctggtttgcttcgagaaggacaaatacattttacaaggagtcacttcttggggtcttggctgtgcacgccccaataagcctgggtgttcttatgttcgtgtttccaaggtttgtttacttgggattgaggggagttgatggagaaattaattaattgggacgggagacagagtgacgcactgactcacctaggaggctgggaacgtggggtaggggatttagcatgctggaaataactggcagtaatcaaacgaagacactgtccccagctaccacgtacgccaaacctcggcattttttgtgttattttctgactgctggattctgtagtaaggtgacatagctatgacatttgttaaaaataaactctgtacttaactttgatttgagtaaattttggttttggtcttc

SEQ ID NO: 1917 - DNA, 1374 bp, Homo sapiens
  SIMILAR (118)..(426): 731254mologous to Homo sapiens putative dienoyl-CoA isomerase,accession number AF030249,Smith-Waterman Score=331.
tttcgtcatcggtgccctcgctcaacatggcggccttctgtgcccgccccctccgctaacgggcacgttactccgtccgaacgcagtagacgaaggcggcggcgatggcggcgggvgatagtggcttctcgcagactccgcgacctactgacccggcgactgacaggctccaactacccgggactcagtattagccttcgcctcactggctcctctgcacaagaggcggcttccggagtagccctcggtgaagccccagaccacagctatgagtcccttcgtgtgacgtctgcgcagaaacatgttctgcatgtccaagctcaaccggcccaacaagaggaatgccatgaacaaggtcttctgggagagagatggtagagtgctttcaacaagatttccgagagacgcttgactgttcgggcggtgggtgatctcttggtgcaggaaaaatgtttcaattgcaagtattgacctgatggacatggcttcggacatcctgcagcccaaaggagatgatgttggcccggatcagctgggaccttccgtgacatcatcactcgataccagggagacctttcaacgtcatctgagaggtgccccaagcccgataattgctgcccgtccatgggggctgcatttggcgggaggtgtgggaccttgtcaccgcctgtgacatccgggtactgtgcccagggatgcttttcttccagggtgaaggaggtgggacgtggggtttggcttgccgatgtagggaacacttgcagcgccttgccccaaggtcatcggggaaccagagcctggtcaaacgagctggccttcaccgcccgcaaagatgatggctgacgaggccctgggcaagtgggctgtcaaaccgggttttccccagacaaagaggtcatgctggatgctgtccttagcgctggcggccagagatttcccagccaaagagccccggtgggccgtgcagagcaacccaaggtcaaacctggctggtaattccccgcggaaccatttgggtggccgaagagccttaaactacgtggtaaggcgtccctggaacaatgagcatgctgcaagacccaagaccatcgtgaaagtcgggtccaggccacgacttagaaacagggaactgaaaacccgtcaccttcttccaagctctgagagccctcgcgtcccccagccccagccagggggcctggccttgtcccgcctcatccacgagaaagggaggatgggcgatgacagttgtttcctatggcttctgaccccagttttcccagtttataactttatgacaatgagtttctgcaagcccaaggccttatcttcaccccacaaacacataaagcaaagtaaagaaaaaaaaaaaaaaaa

SEQ ID NO: 1918 - DNA, 1101 bp, Homo sapiens
  SIMILAR (491)..(811): 351254mologous to Helicoverpa armigera nuclear polyhedrosis virus basic DNA-binding protein BDBP,accession number AF197913,Smith-Waterman Score=100.
  misc_feature (1)...(1101): n = a,t,c or g
atggaggatgaaaatctttccccccggaaattccctaagaaaagaggtgggacagtggccctttcttccctaagttccctgaacacaaacctcgctgaacctttcctgagtgcggagcctgagaatccagtggctgtgggaagtgttgtgaaaggaaaacacaccggacgatgtgggtctccaggggtccggggcggaattccctgcggaacttcccagtcagatctggacctgaatcctagcgctccactcgcgaggcggctcttggatacggccgatggcttcgaaatattggcggctgatttccaggttatccttgccttaaaagccgccgtgtctctcaacgacatgggttcaaatttcacccaccatgggactggcgactctctgagactcagcgtttccaacaagcggggctttgtcagaagaactgtgggctccgagggaggccctggtcatggggtcactgcatttgtgcgaacagcaggggcgaaggctcntgaattccgaagaccgttactcggcgcggaagcggcaccgccgacgtcaaaacaccgggcctgggaggcgcggcctacgcgtctcccgggcttcgcgccctcgcccgatttgattggatggtggcgggaagaagcggggagacccccgaagaaggggcgcgaaggccggccgggggttccaacggaggcgtcaagggggcaaaggggcggaaccgggcttcgaaccgtcgcgcgtccgcatattgggaaaaagccggttggggattgctggaagggccggaccctgcaaaaacgggtgggcttttgcccgttgggcccggaaggggcccgggctgaacaaccgcgcttccggtcggaattgaagccgcggaagaagccggaactgagaagccgccgaagggggcgggtctcttcgggcgcaacgtccgaagccaaaggcttccgcttcaacaaccgcggcaacagtcttcaagttcaacatcctgagaaggacgcctctggagccgcgactgcccggggttgtgccggccgcagctgccgctcaggccgcctcagctctcctctgcgacggcccgctcactccgcccggccccagccctag

SEQ ID NO: 1919 - DNA, 1116 bp, Homo sapiens
  SIMILAR (567)..(701): 311254mologous to Gallus gallus histone H2B (AA 35 - 126),accession number X05100,Smith-Waterman Score=68.
  misc_feature (1)...(1116): n = a,t,c or g
tttcatccagcatgttttagcccgtcccttttgagctatgttgtcagtagttacccttcagttcccccctcctgaatattttgcaggtgattaacccctttgggaannnnnnnnnnnnngctttctgtgtatgtttttgactcgcgtgtttttgcttcgctaatcagattgcgaaaggaaacatctcacgtttgcataggacttcacagttcataaagacctttcccacccaccacaaaaaaagtatgacaagtttcccgtcatcttcattttataggtgtggaaagggagtcaaagaaaagttaatcgataccatttatctagttaagcaggctttgagcagttcatctcctcccgtcctcaaaacgaccttctgaggtgtctcctgcaaccctgctctgaagctcagagcgagacggcctcacatcccagggggctcagctctggcggggccgccacgcgcctccccgtgcctttggacgggtgaggagagctgctgccccggcggggaccacgtggaaaggcctggtcagcaagtggcaaggacgcggcgcaaagccaggctttctaatgtacaatccgcggctctttcgatactgaacacccacctcttcaacaaattcgagcgcctggcaggccctgcaccaagcctagggtgatggcgacccaggcgggtttttactctcaaggagctcaattctagggcagggagaagtaaaattnnnnnnnnnnnnntcataccaaactgaaaaacacataaataagccacgtctctcctcacccctagcacttaatcacaaaggcctgtagagagtcccgacgagaacttctgagcaggccccgctgtcagtccctgaggacagcatgcaagggaggttgacgtccctggacgaagaaagtgctggagaaactggcgaccgtcccaccttccctaaggcgaaggctctgaattccgaccaccgttactcggcgcggaacgcgggcagccgccgacgtcaaaacaccgggcctgggggccgcggcctacgcgtctcccgggcttcgcgcccctcgcccgatttgattggatggtggcggggaattccnccgcnctggacgaatgctatcaggtcgtcg

SEQ ID NO: 1920 - DNA, 285 bp, Homo sapiens
  SIMILAR (205)..(86): 401254mologous to Homo sapiens huTR1 fragment (residues 54- 104) huTR1a, SEQ ID NO:343,accession number Y76088,Smith-Waterman Score=64.
atgcattattccggtaacaaggaacctgctcaagcagacataatgacggctttttggcaagcagcccttcctgctgtggctggaggacgtgtgcagccctctggtgaccagttggtccagagaaggccacccgtcctctggctccggctttgtgatgaaaagcacatgagcccgcgggatatccatcatgattactttttaaacattctcacacaaacgcaacactacttaagggccttcgcattttccatcaggcactcactgaatgaattcttcacactctga

SEQ ID NO: 1921 - DNA, 642 bp, Homo sapiens
  SIMILAR (196)..(309): 1001254mologous to Homo sapiens phosphotidylethanolamine N- methyltransferase,accession number AF113126,Smith-Waterman Score= 198.
atggggaaggcccctgcaggctgctgggcacggggatggctcagggtcctgggctgggctgggctaggcttgggggagcccgggcagcagcagccccacattcaggacagagccatctgtgtcccacggggccaatggaccatttcagtggatgcagggagcacagagcatgagtcgcacctggtggacgggcaggttgcacgatgggaacacaagacccgcaagctgagcagggccttcggatccccctacctggcctgctactctctaagcgtcaccatcctgctcctgaacttcctgcgctcgcactggattctggagccttgctcctcagctgggcagctgctgaaggcagtggggtggcagatggatgagagcagggtctgcatcttgctgtccacaggccggggcacctccaggattcagaagatgactccagcagacttctgcgttatgacccggctgctgggctacgtggaccccctggatcccagctttgtggctgccgtcatcaccatcaccttcaatccgctctactggaatgtgagccctgagcgtcctgtgatcacccccgaggctaatctgcagagtaaggccaagatcagcgtcagcagcacattgttccagacagttttcatttaa

SEQ ID NO: 1922 - DNA, 1039 bp, Homo sapiens
  SIMILAR (355)..(810): 961254mologous to Homo sapiens phosphatidylethanolamine N- methyltransferase,accession number BC000557,Smith-Waterman Score= 739.
ggcacgagacccactgcagatcattccctgaccacagagcgctgctcccgaaaaccctgcacccctcaatggagtaaattaccataaagcctcttccttacccatgctttggggtgttaacagctgaggctattcctcggtgacctgtgggactcgagctattcctgcagctcaacaaacctcctggccgaggcagacttctgcgttatgacccggctgctgggctacgtggaccccctgggatcccagctttgtggctgccgtcatcaccatcaccttcaatccgctctactggaatgtggttgcacgatgggaacacaagacccgcaagctgagcagggcctttcggatccccctacctgggcctgctacttctctgaaggcgtcaccatcctgctcctgaacttcctgcgctcgcactgcttcacgcaggccatgctgagccagcccaggatggagagcctggacacccccgcggcctacagcctgggcctcgcgctcctgggactgggcgtcgtgctcgtgctctccagcttctttgcactggggttcgctggaactttcctaggtgattacttcgggatcctcaaggaggcgagagtgaccgtgttccccttcaacatcctggacaaccccatgtactggggaagcacagccaactacctgggctgggccatcatgcacgccagccccacggggctgctcctgacggtgctggtggccctcacctacataatggctctcctatacgaagagcccttcaccgctgagatctaccggcagaaagcctccgggtcccacaagaggagctgattgagctgcaacagctttgctgaaggcctggccagcctcctggcctgccccaagtggcaggccctgcgcagggcgagaatggtgcctgctgctcagggctcgcccccggcgtgggctgccccagtgccttggaacctgctgccttggggaccctggacgtgccgacatatggccattgagctccaacccacacattcccattcaccaataagaacaccctgacccc

SEQ ID NO: 1923 - DNA, 654 bp, Homo sapiens
  SIMILAR (592)..(47): 331254mologous to Bovine herpesvirus 1 UL36,accession number Z78205,Smith-Waterman Score=139.
atgaagcctcggaccctcgtggtgagtgttacagctcataaaagcagcgtggacccaaagaactcaggagcccagctggcttcacctagcggatcccacactggggctgcaggtggagctgcctgccagtcctgcaccgtgcgctcgcattcctcagcccttgggtggtcgatgggactgggcgccgtggagcaaggggtggtgctcgtcggggaggctcgggccgcacaggagcccatggagtgggggggaggctcaggcatggcgggctgcaggtcccgagccctgccccgcgggaaggcagctaaggcccggcgagaaatcgagcacagcgccgcactccggcgccaagtttttgccgggaagcccagggcgctcccgggacagggacgcactttggcggactcggcgtcaggccggggctttccagtgcaccgggacccggcgatcgcgctcggggtcccggtctcctctagtccccggctcttgcacgccttaccttccctagggctgaaacgcggggctctgggcgcgccacacaccgggtcgcccacgccttcccagccggcagcctggaggatccctgccgcccccttcgctgctcccgccgccgccgctctcctcctccagccgccgccgccgccgctcaaataa

SEQ ID NO: 1924 - DNA, 551 bp, Homo sapiens
  SIMILAR (348)..(539): 621254mologous to Homo sapiens Human secreted protein, SEQ ID NO: 6259,accession number G02178,Smith-Waterman Score=206.
tttcgtggctggaggaggagagcgtcggcggcggaagcaccaaaaggggcggcagggatcctccatgctgccggctgggaaggcgtgggcgacccggtgtgtggcgcgcccagagccccgcgtttcagccctagggaaggaagccagttgagggaagttctccatgaatgtacgtcacaatgatgatgaccgaccaaatccctctggaactgccaccattgctgaacggagaggtagccatgatgccccacttggtgaatggagatgcagctcagcaggttattctcgttcaagttaatccaggtgagactttcacaataagagcagaggatggaacacttcagtgcattcaaggacctgctgaagttcccatgatgtcacccaatggatccattcctcccattcatgtgcctccaggttatatctcacaggtgattgaagatagtactggagtccgccgggtggtggtcacaccccagtctcctgagtgttatcccccaagctacccctcagccatgtctccaacccatcatctcccctccctatgtatt

SEQ ID NO: 1925 - DNA, 273 bp, Homo sapiens
  SIMILAR (89)..(226): 761254mologous to Homo sapiens SURF-2,accession number Z35094,Smith-Waterman Score=171.
tagcctcgagggtgatgacacctgcacagacctgtacccccctgagttattcacctgaacggaccttggacgcacggagggtgtggattccaatgatgagggcaggagagagacgaccgtgtaccgagggatgtcctagaagcgcgggaagaagccgttgggctcgttgaaaatgaagttcaagattcttctccgcaaacccaagagcttcagctcctgtaaacagcgcaggttaataaaagcactattccgtgacaaaaaaaaaaaaaaaaa

SEQ ID NO: 1926 - DNA, 833 bp, Homo sapiens
  SIMILAR (414)..(644): 761254mologous to Mus musculus surfeit 2 protein,accession number M14689,Smith-Waterman Score=305.
tttttccactgaaagcatttataataaggaacttgtcactcccagggagcctccgctcagccggcagttggttcatttcaatccccacgacaacccttcaaagtgcagggcagacagcaggtggctctgcccaggcgcctggatcacagcccggcctgcagccctcacctgggcgcggggagaccctgaggacgctcctccaggcggcgctggccggggcccgtcccagccccgccgcccgcagccccagctgcaacgcagccaccgccgccatcgcacccggccccgcgggcgcttccgggacgcaggaggcatctgcatccggggcgccgctgagtcccgcccagagccccgcccccggctccaggttctgcgagcggcttccgccgggctgctccgcgggcgcgtcggccatgagcgagttgccgggcgacgtgcgggcgtttctgcgggagcacccgagcctgcggctccagacggacgcccgcaaggtgaggtgcatcctgacaggtcacgagctgccctgccgcctgccggagctccaggtctacacccgcggcaaaaagtaccagcggctggtccgcgcctccccggccttcgactatgcagagttcgagccgcacatcgtgcccagcaccaagaacccgtaggtggtccgcggcggcgcggggaggcccagggcaattaggacagcccctccgctggactccgccagtgctgcagcccctactctttcaaagttgggagccctgggacccaggcaccagttgttctgcaaactcaccctgcggcacatcaacaagtgcccagaacacgtgctgaggcacacccag

SEQ ID NO: 1927 - DNA, 851 bp, Homo sapiens
  SIMILAR (405)..(785): 821254mologous to Homo sapiens SURF-2,accession number Z35094,Smith-Waterman Score=539.
ccttccgccgggctgctccgcgggcgcgtcggccatgagcgagttgccgggcgacgtgcgggcgtttctgcgggagcacccgagacctgcggctcccagacggacgcccgcaagggtgaggtgcatcctaccaggtcacgagctgccctgccgccctgccggagctccaggtctacacccgcgggcaaaaagtaccaacggctggtccgcgcctccccggccttcgactatgcagagttcgagccgcacatcgtgcccagcaccaagaacttcgcaccagttgttctgcaaagggcaaccttgcggcacatcaacaagtgcccagaacacgtgctgaggcacacccagggccggcggtaccagcgagctctgtgtaaatatgaagaatgtcagaagcaaggggtggaagtacgtgcctgccttcctggtgcaccgggaggaggaggtagggaggacccagatggatcggttgtaggcctcgcccgcgtgaagccttctgggagcccacatccagtgatgaggggggagctgcaagtgatgacagcatgacagacctgtacccacctgagctattcaccagaaaggaccttggaagcacggaggatggggatggcactgatgactttttgacagacaaagaggatgagaatgcaaagcccccaagagagaaggccactgatgagagcaggagagagacgaccgtgtaccgagggctggtccagaagcgcgggaagaagcagttgggctcgttgaaaaagaagttcaagagtcatcaccgcaaacccaatgagcttcagctcctgtaaacagccagagttaataaaaagcccatgccgtgaaaaaaaaaaaaa

SEQ ID NO: 1928 - DNA, 436 bp, Homo sapiens
  SIMILAR (214)..(107): 321254mologous to Vibrio alginolyticus f219,accession number D86411,Smith-Waterman Score=60.
agataacaataaaaacaccgaaagccaaggtgaccatgtcaatctagaaccatgggttgcacgggacagagaagactgagagagaggatgcatctgagagggctgggacgtgtgcaaaagcacaagtttggatgggaagtctccagcaggcagtcctactcccccaagacagcatcttttgccagttgctgtttatggattttctccacactccaaatcacatacttatacctccgttcctcagttaccatctttagacaacagctattcactccccaatacctaaggatgaggcatttagcttcactactccccaatgtctggaacttttcatggactattttttgactcctggcatgaggcattttcctctttctggacaggcagtcgttggattccccagctctgttaaggttgagggacatcagtggcccct

SEQ ID NO: 1929 - DNA, 678 bp, Homo sapiens
  SIMILAR (148)..(32): 351254mologous to Homo sapiens small proline-rich protein,accession number M21539,Smith-Waterman Score=55.
atggaaggtaaaaaatgggaggccacaagagtggtggggtccttggtggtctttgacacccggaatagaaaaggacagaatccagttgccaacgaggcagctggggagggtttggaggaggggctgtgggtgctgggtggtgctggggatcctggctcgctgaccgcacagggccccaccgctggctccagaggactcagtgtagctgtctcaggcctgccagggcgcctgcattggagccacatcaagttttcagccatttatggaggtcatttgttttccagtactgctgtgacaaaccaccacaaaccgtgtggccaacaacacagaaattcatcctctcatggctctgggggccagaagtccaatgtcaaggtgtcaggtacctggcaatgtcctcagatgctcagtgaggacgcacctgaggttccagtcctgacagcaaaggtgaccgccctggacctcagtcagctcatctgcagaatggctagctcaaagacagtccgtgctgtcagccagctgcctcccacgggccaccagtgccaccacactgaaggaaccatggagccgcctggaaaagtcaaccgagaattagacataacaatttggttctgcaaggagaggaaacccttggtcctgggattcagccttcaggctgttattagcatttatggatga

SEQ ID NO: 1930 - DNA, 954 bp, Homo sapiens
  SIMILAR (748)..(575): 431254mologous to unidentified bacterium amoa48 ammonia monooxygenase,accession number AF272517,Smith-Waterman Score=89.
atgcatctgagagggctgggacgtgtgcagaagcacaagtttggatgggaagtctccagcaggcagtccgtggaggtgtggctggtggcagaattgttggagcaatgggagcatcctgtggagtattttccctctgccatgaagcattcctgtttctgccactgctatcattcagagattgaatctaattccctgctcttggacctgagtttatgcttggcattcaccagaccctgccttgtttccatctttggaacaagcacgcatcagcttgcaagagccagttttgggaatctcttctcaactctgggttcatcgaagtcattttggcagtttgaaatcagtcctggtttacttatgccagggaaatcagcaaatgttacaagtcggggtcctcccatcccccagaaagctggctaccagcacagcactgcttatcttcctattccctgggctggatgcgagcttcatgagggagggcggggcatctctgaaagcccatgtgtctcccaccaacagctcttgacaggcaccgcactcaacaggaactttaagctgaagtttaactcgtgtgatgcaagggtccctgaaactggacgtgagatgggtaaggtgtgtccccccaaaagtgacctgagactagagcagttttcagccatttatggaggtcatttgttttccagtactgctgtgacaaaccaccacaaaccgtgtggccaacaacacagaaattcatcctctcatggctctgggggccagaagtccaatgtcaaggtgtcaggtacctggcaatgtcctcagatgctcagtgaggacgcacctgaggttccagtcctgacagcaaaggtgaccgccctggacctcagtcagctcatctgcagaatggctagaccagaagttcttaaagcctggtccctggaccagcaacatcagtacctcctgggagcttgttag

SEQ ID NO: 1931 - DNA, 1135 bp, Homo sapiens
  SIMILAR (857)..(747): 371254mologous to Homo sapiens Human presenilin I mutant protein fragment 2,accession number Y20856,Smith-Waterman Score=70.
atgaccttctgcttacaaggatcagtttggtacagagtggacaagctgaagtgggacagcgacccttctacccctccttaccccttttatggtcacaggattgaagatctgaagaaactacctactgtcttctcccacttgggctatctccatagccttctcggttatctaagattattgaaggtacacggtgataacaatgatgacagtgatgaagactccctggaatatgctccaaagtctcccacctgccccccaattcctcatttgggcagcggcacaagcacccgtgtgtttggattgaatgaccagcagcagggcctccaccagaagtgttgccacaagaaaacagtgtggacccagtttcctgatgacattcccatcacggggcccaacttcttcagagtgacatcacaagtatgctcccatagtctggtgccatccctgtaccggccttatgagaaatacctggcgtggcagcttccagccctgttgtatggggcacactccaccctgccaggcagcaagttaagacgtgcctcaatcacggtgataagtggccatttgggcaaagatgcccagacatctcagtgccctttaattctccgcgatggtcccttcccgtctggggcactgccccagtgcttgcctgctccctggtgccggggcccatagaaggttttgctcccctggtgcggtcgctcacaaccaaaacaaggactaggggagcccagaagaggacatcgccaagtccagcagggagcaaaagggtcaggagacaccaaaaggaagtgtgagatgctctgtctccacctcaaagctggagagcaacggggagaccttcccaggtagtgggaacggccacgggcaaaggcgcagaggtaggaatcctgcgtggaacaaatcttgaatcaaaacgaaaaggttactttagcccacagcagggacactgcgtcacgatagcagcactgagaaggctatagaacttgtcagatgcaaagatctcaaggacagaggtcacaaaagtatagcccttaatggccaagaggctgccatagcaaagttacatttttatgatgatgaatgagtggaagggcttggcagtctctactcctcgttgaggagctttgggggg

SEQ ID NO: 1932 - DNA, 436 bp, Homo sapiens; identical to SEQ ID NO: 1928
  SIMILAR (214)..(107): 321254mologous to Vibrio alginolyticus f219,accession number D86411,Smith-Waterman Score=60.

SEQ ID NO: 1933 - DNA, 251 bp, Homo sapiens
  SIMILAR (114)..(19): 531254mologous to Bradyrhizobium sp. WM9 nodulation N- acetylglucosaminyltransferase NodC,accession number AF222753,Smith- Waterman Score=64.
ctaccgcgacatctcatcagatgaaaaagttaataacagaatggcgactccgatgttgagcaagatcaccatgaccaccaggatggcgctgagccctggaaggagatgtagaccccactgtggtaaggagctgttcagagcccccggagccctccacttcctaccacgcagacatcctgctgctgtgcgacacagatggaccagggcttgtcctgaaggctgtgctcctgatgaagcagcatcgtagctga

SEQ ID NO: 1934 - DNA, 816 bp, Homo sapiens
  SIMILAR (801)..(508): 791254mologous to Homo sapiens junctophilin type3,accession number AB042640,Smith-Waterman Score=388.
gggctgccctccatccacacccaagacgggaacttgtgaccaacgaggacaacgtccgctgttacccactgatgtgccgggatcccttctgtctcccacgtggagctgaaggggatgcgtgctggcctccttctgccatgccacacagcagagtgttatacaagcaaagaattttggctaaaatccaaaaaacattacccagaaaaaaaggcaaactgtgagtgatacccaatcgtgtggttcttctgtgagaggacttggaagtcgctgggctgtccgagttgcggtctttcccttcttgtggtttggcttttaattttaatgtcccttttttctaccctttctctatttttgctaccgcgacatctcatcagatgaaaaagttaataaacagaatggcgactccgatgttgaggcaagatcaccatgaccaccaggataggcgctgagcccgtactggacttgagctcatccccattctcctcgtcggactctagagcgacaggcaaggatttctggggcggggagaaggtcaagtcccaacgcagccaaccggggctcggccccgcccagccgcaggctcgccagtttctgcacggcgggctccgcggaggaggccggcctgaagttctccttgttctgggccttggaccgcagtctctgcaccccgaagccccggtcctcggggcggtggtcgtcccccaagccccggcaggcgccgccctagctgtagcgtcttttctgggggtgcgtctccatcctcagcaagggcctcgtgccaagcttggcgtagtcatctaaaacagctctcaatcg

SEQ ID NO: 1935 - DNA, 453 bp, Homo sapiens
  SIMILAR (91)..(240): 391254mologous to Bacteriophage RB15 Ip8,accession number Z35082,Smith-Waterman Score=60.
atgggggaaggagtggaaggaaaaaatcctaggctttctcagaaacaaaagaacagtgcaactggaatacagtctgtgaggaggaaggcctttcatgtggaggcaagagagattagtcaaagtccagagatcactcgtatggcaggccttttgaaagattttgctctttttcctaatgacaaagccttgaaggatttagagggccatcattcagatctggggtccgttgggagctttaccaagcctaagatctccctccaatggaaagacaactatgttgtcttgctaatgacccagcaaccatcagattccatctgctggaagggtgtaaggacgacccggtttctccataaactgcagaaaataagaaaagaacgaaatgcttgggagctgaatgaggcaaagcccaacgactggcttctaaagggcttaatgaaatcagccagtgaataa

SEQ ID NO: 1936 - DNA, 375 bp, Homo sapiens
  SIMILAR (241)..(351): 411254mologous to Homo sapiens MACH-beta-2,accession number X98175,Smith-Waterman Score=67.
atgagcaaagttgacattgtagagacccgtgggactcacaacctgccctcttcagcagataaaccacaaggaaacgagaggcctggcatgcaggggactcggcacagttccaaagcagcgtcccggggcatgtgggagaaacgcctagctccaggcccaccccgcctgcttgcgggcccagcatcgctttcacagggcttccaggggatccccaaccgctcagcattgagaaccggtcgctgctctagattaagaggctcaaaggacatatcggatagtatggactttggatccgaattaccaaatcggaacaaaacacacaactttaaatcagacaagcagaaatctcaacactggatattccttgatacttag

SEQ ID NO: 1937 - DNA, 1161 bp, Homo sapiens
  SIMILAR (653)..(817): 341254mologous to Homo sapiens small proline-rich protein 1,accession number L05187,Smith-Waterman Score=70.
accctgagtttccttagcagactaacctcccagcatgccttattggctccatgcaccaggtgaaccacactgtcaaaatgtgaaccccattttcatattctgctcttttgcttcagaaaacagcagataaaaatctgctggcagagctgtaccagtattccaacttcaacagctccaagccaaacaagcttccgaatggcgtggacttctgtgacatggtgggcaacgtggtccgggctgagagagactgccttattggcaagcatttctgttcaggtagagaattagagaagtttctctcttcttcttctccaagagccatctggctggatagcttttggtggatatttcatgagagggaccagaggctgccatcacttctcagcaaagccgtgtacaccagcttctgttgctgctttccacagtcctgggtcgacacgcacgaattcaagtctgacatctgtaacacaatgagcctgtggatttcaggcacctattctagcccacagagctatgacagctgggactactcggaactagacccagagcgattccgcagagaagaattaatgttgtacagaagaagactgacaaaggggagagagttttctttgtttgctggtaagagagccttctcccagaagccagcccagagcaggaaattctaccaccctcagcaccacccagggaaggtcttcactgagaaatcacaagcagtcagcaggaaggcccgtgccttcccaccaccaagacagcctgcccccctctgcaccctcgccatctgccatctctgtgcctatggagaggtcctgctcccctcccagtccttacaacagccctgcaaggtgggtcattattacttcttatctttatttgacaaagcagagcatcattgtcagaccctggtcttgaagaaacctacgcaagaagtcaagaggatatcagaagcaagagaatgtgagaatatgtttcctaaaaagtcgtgtgctgcctgcaaaagccctgagctgacttcaaacctcttcaacatttatgggaagagccctctgattgtgtactttctccagaactatgccagtctgcagcagcacggcaagaatgtgttgatagtcagaagggaaaagaccacgagcaccccatatccttgtcactgtgggcagg

SEQ ID NO: 1938 - DNA, 419 bp, Homo sapiens
  SIMILAR (88)..(261): 311254mologous to Homo sapiens orphan G protein-coupled receptor,accession number U67784,Smith-Waterman Score=82.
aatccgataaatcagaccctgacatctatccactgagtcacgtgtcatgagtggcaaaagctattgttccacagtcacaaaaatcaagtcctattttacctttctttcagctgctgcactcaggcacagctagcactttttccttgctttcacatctggggctgctatgcttcgactatctgcttcccaaaccctgtgctggaggcacttctgggcaagaccctgagagtggttttcatgggacggtgtgtgctcttcaaaggaggtacacactcctctgtggctttcaaattctaatttagaatgggaggtcagaggatgcccttcagccttagatctaggtagtgttctctaaactcccttttagcagggaaccaagcgttatagttacagggaaattttactgactaatgtaattg

SEQ ID NO: 1939 - DNA, 1188 bp, Homo sapiens
  SIMILAR (898)..(1140): 301254mologous to Homo sapiens HTRM clone 1850120 protein sequence,accession number Y73335,Smith-Waterman Score=94.
ctattactgcatggactgagaatagtgaagagatggtttccaaagaattcagggggctgttaccagaagacggtacgaatgaatgctcgaaaggcaagaacaacaaatgtccactacacttcatccccaagttctaacaaccaactactggaggccaatgggctttctcccaccatatcttgccaatgtggttcaggatatgatgggagagggaattttactggtggaaatatccctaggctactagttggaggacatcagacactggctgacactacagaaatgagacacatcgctgcccctgaagggctcctgaggagctgcatgcatgatgaggctgaggtctttacctttagcaaggcaatgagctgggaattcaggagcagcttagctggtcggttttggataagaatagctcatgatgttgaagtcaacctgttggttaagactgttgtcaaacaaggcttgactggaagctggacaattgcttccaaaatggtttgctcatatggctgttggcaggagacctcagttccttaccaggatcaagtcctaaggcagcagttgggcctggctcctggtccccgtgaggaagccctcagctggtgggccagctccagattggacggtacattcccacccaatcaaggtttttctggaggtgatgtgtgggaaaaatgtggcccaaggtcacccagctcattagtagcagagccaagacttaaactcaggccttctgacaccttcttatccaaaattatttttactaccccagaagaagcactctgtgtacagaccacacatctcacagctgctctcagtcaaaggcaaatagatgaagtctggcgtgaaatgagatggatcatggatgctctacagtatgcaagatacaaacaaccagtttctggcttgcccatcactaagctgatagacccctcagatgagcagagcctaaagaagatcaattctacatcatcatcacatatagactgtcttccatccccacccccatccccagagatgcacagaagaaagacagtgagtgattcacagccctgctctgatgaagaagcctgctcagaagtcttcctccccaccaacagtgactacgactccagcgatgccctgagccccagagacctggacctggtctacctatcatctcacgacattgcgcagcagaccctt

SEQ ID NO: 1940 - DNA, 693 bp, Homo sapiens
  SIMILAR (85)..(252): 321254mologous to Caenorhabditis elegans B0353.1,accession number U23413,Smith-Waterman Score=63.
atggatgctctacagtatgcaagatacaaacaaccagtttctggcttgcccatcactaagctgatagacccctcagatgagcagagcctaaagaagatcaattctacatcatcatcacatatagactgtcttccatccccacccccatccccagagatgcacagaagaaagacagtgagtgttcatttttgcagctacagagagaaatttattagtctgtattgccgcctttctgctgttgtggagctggattctctgaacacccaacagtccctcagggaagcaatctcagacagcgaggttgcagctgccaaacaaagacaccagcaagttttagatttcattcaggcaaggaacttccgcctctacacacaggaggtgttggaaatgggtcacaatgtgtcctttcttctcctgctccctgcctcagacgacgtctgtacagccccaggacagaataatccttacaccccacactcagggtttcttaacctccctcttcagatgtttgaacttgaagtaaggaaatcagaggggaaaaaatggtttgctgaaggaagtgatgcttttagctttgaatatgttgagactgaaggtgctaagtcaacatccaagtggacatgtttcactggcagtagaaacgcaggagagaaattggatactaaacacagagatctgtccagtgtctattaa

SEQ ID NO: 1941 - DNA, 1179 bp, Homo sapiens
  SIMILAR (458)..(565): 521254mologous to Homo sapiens putative cytoplasmatic protein,accession number AJ245876,Smith-Waterman Score=90.
atgatcaagagggctttgtccctgggatgcaaggcccagcttccacaaaaggagcagttttttggtgcagaggtagagaagcctctccctgtggccactaccaccaccaacccacagcaggttttgccaggccaccaccaatgttcacttaaagccgaaaagctcttcggtcatctgaagaggtcaggtctagaaatgctttccaagagcctaggcctggacctggggaccctaagaacccacttgttgctctacccaactgtggccaagctcgtacctaaggtacaagacaaagtcccctttactttaccatctgtgtttctcaaacagagaggatctttcaccatagccgccacagttgggaatgtgctgggttacatctgtattcagcatgtaacccaaggcctgggtattgctgctggttattcagggcccaagggtgcacagactcctcgcaatgcaaggccactgccagggaatgctggaggggtgatgctagcaattgaagattgtctctcctaccctcttcaatgcctctttcagcaatatgaagttaaaaccagagccagcaaagaggaatcagcaccttcagctcagggccaggttgcagcaatggtagtaaacagccataatggagaagacaatggctggaagaggcgactcccgcagtggcagcagggagatctccaagatcaggaagaggtctctaggaagaatgacttctccccatttcccagcttccagcttttacaacaacggctccacactggcaactgtaacccggaaccatatgagaaagtggactcttggaatgctcttcctgccttcccctctcccaatgcagaggaagctgtagagggatccagtggcaactttagatttaacagtcttttaattaaagataaaattagcatctactatgttgcagtttgcaaaaagaagacatggactaaaaagtgccttggagatattttatacctcaaagcaatgcacagatttagtagagagagccatgagactggagaaggccatttcaaaggcattagggaagatccacaggaagatgacagagacttgaaacagaagcctcagcagacactgcctggtcagatgactcaagaacctgatgggccgtcctcagtgtccagataccctacatacctctgggaacttcaataa

SEQ ID NO: 1942 - DNA, 639 bp, Homo sapiens
  SIMILAR (382)..(242): 341254mologous to Mus musculus defensin-like gene 4C- 2,accession number U12564,Smith-Waterman Score=71.
atggtcctcataactacaccaccagcaaggaagtctgatgcatcaaacagtacacgaacagtaacattaagattcagatgcgaagtgtttggcggtgtagctgtcccgtccccggcgctttccacagcaacagcgcgttctcttcgcctcccgcagtctctcaggacaggccaggctagcgcaaagtaccgtgttcctggaacaccacgagggcgagctcgggaatctcgagccggcctgcaggacacctgccgcaccaagtggctagagcccggggagggcgaggcgagtcacgccagcccgttagattgcaagttgcaggaccgctgtaggaaatgttattcgccgcggtcaggacaggcctgtccgcccgccctcgccgcagcctggcttcgtcgttgcgagcgccggggaggccgtccccggggagggcggaggaaggagctgactttgggtttgcgtcccgctcgctgctctgccccggggccagccaaggacgacgcttggaggcctcaggccgggggctcaagtgctgtatctgaggaggcccatacctttaaacaagtagttaaaatcaagaccatctgtactgtgatggcagtaggtataaagcacgcaagcccccctgtatttgcatag

SEQ ID NO: 1943 - DNA, 1486 bp, Homo sapiens
  SIMILAR (1384)..(1443): 601254mologous to Homo sapiens Human bladder tumour EST encoded protein 11,accession number Y66153,Smith-Waterman Score=61.
tttttttttttttttttgtagaaaattcctttattatagtgcaaattacttgtcagcagtgacggaatgtaacgacacagtgagcgaacattttacaccacacaagtaaaataagaaagtgtttctttgaaaatatgtcatcatagggacattatttctacattaatgccagaaaatgccaaggcccgtttatctcaaggcaaacagggctccctccttcctttggggttttttcttttttaacacaaatgaaatgacttgccattttaacaaatcctcaattctaaaagtgatctctcagggggctttgaactaaggtcggcaagatttggaaaatgggggcttcaaaattttaaataataattttaaaatacttccgggaatagcccaaaaagtagaagtcacttctattaagttttaagtagatattacacactcactccaattttactggtaagaaatgggacagattgtcctaaagcctgctttctattcccccagagcctgattgttatttatactccttggttttggttattgcagaactagggctctggtcagaaataacaccttacatacccgaatactttcctgtggaagctttacattgcattttccatcctgaaattcctcaccttagaccttaccaggcccaggagagggtgtgaatattgttttcagtttaccagctaaaagccccttactaatttgggctatacctgaatcaaatcatcacatcatttagattaatcccaataggcttatccaagaggttcccactaacctcacagagaaacaaacagttaacattgtattttcacactaagctgcctaagggcttggctgctaatgagttagctgataggtagacagaataagcgtgtcaattccaatcagtacgacgccctgctcctctagtttctgctgaattatgcagtggggtggggaatggttggccacttcaaaacaagtctttccctatggggctctttccaccataagttggatcaaaactccacaaaatgtatttcaaggtgccctttaagtctctcaaatttagggacttttaagtgccaagccatgagaagttaatcacaggcttgaaaatacctggaaccacagaacagcccccacggaacaggctgaatatggttaaataagttggctggtacataaagcttttcaatgtacagccagtcttgttggataccagtgbcbycttatataatacaatggaactgtgctaaacagtktcaaagttgagaagaatccaaatgtatcaccctttaaaaaattcataattttagtttattttagactttggtactgaaacactgtctacattcttgacacttgaaaatgacatggtcacttcagtgcctctgcatgttgtgtaaaaaaaaaaaaaaaactcaaaaaaggaaagcaggacaaggatgtgtcattacaagacacagtatgctgtacaaacaaaacctaaattata

SEQ ID NO: 1944 - DNA, 1185 bp, Homo sapiens
  SIMILAR (910)..(1137): 281254mologous to Sus scrofa small proline-rich protein,accession number M88166,Smith-Waterman Score=76.
cgcttcaacatgtaaattttggatgaaacacaatccagtccgtagcactttctcttcactagtgggcattcattccatttacaaatcttaaaaaaaaatgtgggggattttattgctgatgaaagtggctctcagtggaaaggggagctgaaaagtgggcagagtaggaagataatccctggcgggactcctctctgaaactacaccatcaagacatccctctgaagtcaagctgcttctctccaacatccaaccatagtctcccatgtcccactgcctctccttttctccctcttctgcctgcagagcctggggtttttaagggcacaggatttggcatgggggtgggccatgagtggttttggaaaaggcaacagtcaaccaggaaaacaggaatgtatgttctctttttgggccgtggttccaggcttgtggctagaagtacttttggaaaatattgttctattttgggagctatgtttcctggatttcagtttgtagctattcatggttatcatatggtttctgagagattttatgtttctgtgatgcaacaactttttattacttctcaggcttcttcaggatttggctgggaaaagtgctgcttgtgtgaatggtactacgcactaccgctgtgtggagtgagtgggtcctatctgcggttccatggtcacctcatacggcttaggacagatcctgccatgggcctcaaaggtggcatgccaaaaccaagaggggcctagacacccaaaagggaagcggccagagtggatgaagcaaaagaagggtgcaaggatcctccagcagtttgggtcgaatgaagatgtaatgtgtcagcttttcattcaatatgtaaatgataaaagcctcgtttctcaagaggaactagactatgctctttgttggaggcagagacctgtccttttccccttaaagacaactagggaagaacccaatgtaacatcacaaaaggaaaaattacataagttagttcccatgcgcaaagactccagcatatgggatcccctagaccatcttcccctgctcagtgaccccaagccctctcctcagacagctgctgctgcccaagatcctgctccagattcttcacctactcacgttattccccctccttacaatcctgactcttggaaattatcatcccaagagtctgtcccctaa

SEQ ID NO: 1945 - DNA, 1044 bp, Homo sapiens
  SIMILAR (604)..(858): 481254mologous to Homo sapiens elongation factor-2 kinase,accession number U93850,Smith-Waterman Score=167.
atgagtggaaatcctgggggtgtggtgcctggtgacttggtgcatgtggtactaagtggcaagtgtccgagcaagtgctgtcatgtggagcgccgtgtgggaaacgaagtgcttgttgtccgcatcaggtcgggtgtaaatgccaagtgcgagcacggggtgtttagtacacaacgctgtgtgcgccgaagcctggaagcacgcaatccagaaggccaagcacatgccgacccctgggctgagttccacctggaagatattgccaccgaacgtgcactcgacacagccagtgagaaacaggaccacgtgtggacgctgtgccccatggtggatgggtctctgcaggtacaacgccgtcccggggaatggctggatgatgaagttctgatcaagatggcatctcagcctccaaagtgctgggattataggcacgagcttccacacgtggctctagttactacattattaacccatgcctcagccgtgaccgtgacatccctccaccctggtgaccgtgatggtgccttacctggtctctgtgcattgacttgccatgcatatctggccacagatctattacattacagctctgtgagcttaaggttctcatctaagaccaccttatcagtggtagagaaacttcaattcaaaccaggtatgtgtagagaagtggaattcctcaactcctcccgcctccacctgccgagggcttcggccgtggccctgaagtgcaaaggcttaatgctctggacctcgaaaagaaaatcgggaagtcattttggggaaggtccatctggccatggtgcgctacacgagggtgggcgcttctgcgagaagggcgaggagtgggaccaggagtggctgtcttccacctggagcacgcagccaacctgggcgagctggaggcctcgtgggcctgggactcatgtactcgcagttgcctcatcacatcctagcgatgtctctctgaaggtgatgacacagcaagaaggcccatgcaagacgctgcatactgatattagacttcccagcctccagaactaa

SEQ ID NO: 1946 - DNA, 3645 bp, Homo sapiens
  SIMILAR (1)..(1809): 981254mologous to Homo sapiens elongation factor-2 kinase,accession number U93850,Smith-Waterman Score=3158.
atggcagacgaagacctcatcttccgcctggaaggtgttgatggcggccagtccccccgagctggccatgatggtgattctgatggggacagcgacgatgaggaaggttacttcatctgccccatcacggatgacccaagctcgaaccagaatgtcaattccaaggttaataagtactacagcaacctaacaaaaagtgagcggtatagctccagcgggtccccggcaaactccttccacttcaaggaagcctggaagcacgcaatccagaaggccaagcacatgcccgacccctgggctgagttccacctggaagatattgccaccgaacgtgctactcgacacaggtacaacgccgtcaccggggaatggctggatgatgaagttctgatcaagatggcatctcagcccttcggccgaggagcaatgagggagtgcttccggacgaagaagctctccaacttcttgcatgcccagcagtggaagggcgcctccaactacgtggcgaagcgctacatcgagcccgtagaccgggatgtgtactttgaggacgtgcgtctacagatggaggccaagctctggggggaggagtataatcggcacaagccccccaagcaggtggacatcatgcagatgtgcatcatcgagctgaaggacagaccgggcaagcccctcttccacctggagcactacatcgagggcaagtacatcaagtacaactccaactctggctttgtccgtgatgacaacatccgactgacgccgcaggccttcagccacttcacttttgagcgttccggccatcagctgatagtggtggacatccagggagttggggatctctacactgacccacagatccacacggagacgggcactgactttggagacggcaacctaggtgtccgcgggatggcgctcttcttctactctcatgcctgcaaccggatttgcgagagcatgggccttgctccctttgacctctcgccccgggagagggatgcagtgaatcagaacaccaagctgctgcaatcagccaagaccatcttgagaggaacagaggaaaaatgtgggagcccccgagtaaggaccctctctgggagccggccacccctgctccgtcccctttcagagaactctggagacgagaacatgagcgacgtgaccttcgactctctcccttcttccccatcttcggccacaccacacagccagaagctagaccacctccattggccagtgttcagtgacctcgataacatggcatccagagaccatgatcatctagacaaccaccgggagtctgagaatagtggggacagcggataccccagtgagaagcggggtgagctggatgaccctgagccccgagaacatggccactcatacagtaatcggaagtacgagtctgacgaagacagcctgggcagctctggacgggtatgtgtagagaagtggaatctcctcaactcctcccgcctccacctgccgagggcttcggccgtggccctggaagtgcaaaggcttaatgctctggacctcgaaaagaaaatcgggaagtccattttggggaaggtccatctggccatggtgcgctaccacgagggtgggcgcttctgcgagaagggcgaggagtgggaccaggagtcggctgtcttccacctggagcacgcagccaacctgggcgagctggaggccatcgtgggcctgggactcatgtactcgcagttgcctcatcacatcctagccgatgtctctctgaaggaggtacaatccttccagatcatggaaactgaaagctttctgaaagaacgcaggaaggctgtcaggctcaggggagaggctcacccagaacacaagaaccaaatgcctaaagaaggctctcccaatctccccagtcagaaagcagccacctcccagtctgcgccgcagcagaagactcaagccaaacctacaaaggctgccaggcagaaggttctagtgactggaggaggaggctacctgggcttcagcctgggatcccacctagccaagagcggcacttccgtcattctgcttgaccgccgcagaccccagtgggaactgtccccggaaaccaagttcatccaggctgatgtccgagatgaagaagccctgtaccgtgccttcgaaggggtggactgtgtcttccacgtggcttcctatggaatgtccggggctgagaagctgcagaaagagcagattgagtctataaatgttggaggcaccaaactagtgattgatgtctgtgttcgccggcgggttccaaggctcatctataccagcactgtcaatgttgcatttggagggaagcccatagagcagggcgatgaggactctgtgccatatttcccattggacgagcacgtagaccactactcccgaaccaaagccatcgccgaccaattgaccctcatggccaatgggatgcctctcccagggccttgcccattcatcattcagcacattctgagcacctgctgtgtggctgcaccccaccagggatacagcccagaagaagtgcggttctcccggccggagtcagagcaggcccgccagcgccgtgtgcagtcctatgagttcctgcagaagaagcacgcagaggagccctgggtccacctgcattactatggcctgagggacagtcgctctgagcatgagcgtcagtacctgctgtgccccggctcaagcggggtggagaacacggagctcgtcaagtcacccagtgagtacctgatgatgctgatgccacccagccaggaggaggagaaagacaagcctgtggcccccagcaacgtcctgtcgatggcccagctgcgcacgctgcccctggccgatcagatcaagatcctgatgaagaatgtgaaggtcatgccttttgccaacttgatgagcctcctgggcccctccatcgattccgtggctgttctgcggggcatccagaaggtggcgatgttggtccaagggaactgggtggtgaagagatgggggtctcgttttattgcccaggcagtagatgtgaatgttcccaagacaaagaaatgtattaatagatatgctcattaccctgatttgatcattacacactgtatgcatgtaggaggaggcactcttcggacgtgtgtgctccggcctccagggatctacggccctgaagagcagaggcacctgccccgtgtggcggtacgtcatccccgccttcaggacccaagtcagagaaggatcctggctgaggtgtacactggtcgggccctcccagcccctggtcgctgcatcagtctcgaggctaagtgtcctgagcctggaaccctcagttctacaagatgttcctgcccccactggtccacaggccccttggagctcctggcaggaacagagctctcagagtgtaccagccaagccaaggcacggggccacatcaagaagaggctgttcatgttccgatttggggaccacaaggcacggatgaactgggtccacgtacacaatctggtgcaggcacacgtgctggcggccgaggccctcaccacggccaagggctacgtggctagtgggcaggcgtactacatcaacgatggggagagcgtcaacctctttgagtggatggccccactggtatcaaaatga

SEQ ID NO: 1947 - DNA, 2905 bp, Homo sapiens
  SIMILAR (220)..(1896): 691254mologous to Homo sapiens zinc finger protein,accession number L11672,Smith-Waterman Score=2121.
atgttcagttcattcacccccctgacatcagagctgaacttcaatgtggcagctattggccacgtgtgcctcctgagtgactggaatgtggctggtctgaactgcgatgtgctagaaagatgtcctagcctgctcactctagctgtggaagaagcttttctgctgagagaagctacagagtcctggaaaggtggggacccacaggcagatgcagttaaggttaagatggggccattgacatttagggatgtggccatagaattttctctggaggagtggcaatgcctggacactgctcagcaggatttgtatagaaaagtgatgttagagaactacagaaacctggtcttcttgggtattgctgtttctaagccagacctgatcacctgtctagagcaaggaaaagagccctggaatatgaagagacatgcgatggtagatcaacccccagttacatattctcattttgcccaagacctttggccagagcagggcataaaagattctttccaagaagtcatattgagaagatatggaaaatgtggacatgaagatttacagttaagaacaggctgtaaaagtgtggatgagtgtaatctgcacaaagaatgttatgatgaactaaaccagtgtttgacaactacccagagtgaaatatttcaatatgataaatatgtgaatgtcttttataaattttcaaatccaaatatacaaaagataagacatactggaaagaagcctttcaaatgtaaaaaatgtgacaaatcgttttgcatgcttttacacctaactcaacataaaagaattcatattagggaaaattcttaccaatgtgaagaatgtggtaaagtctttaactggttctcaacccttactagacacagaagaattcatactggagagaaaccctacaaatgtgaacaatgtggcaaagcttttaagcagtcctcaacccttactacacataagataattcatactggagagaaaccctacagatgtgaagaatgtggcaaaacctttaaccggtcctcacaccttactacacataaaagaattcatactggagagaaaccctacagatgtgaagaatgtggcagagcttttaaccggtcctcacaccttactacacataagattattcatactggagagaaaccctacaaatgtgaagaatgtggcaaagcttttaaccaatcctcaacccttactacacataagataattcatgctggagagaaaccttacaaatgtgaagaatgtggcaaagctttttaccgattctcataccttactaaacataagataattcatactggagagaaattctacaaatgtgaagaatgtggcaaaggctttaattggtcctcgacccttactaaacataaaagaattcatactggagagaaaccctacaaatgtgaacaatgtggcaaagcttttaatgagtcctcaaaccttactgcacataagataattcatactggagagaaaccctacaaatgtgaagaatgtggcaaagcctttaaccggtccccaaaacttactgcacataaggtaattcattctggagagaaaccctacaaatgtgaagaatgtggcaaagcttttaaccaattctcaaaccttactaaacataagataactcatattggagatacatcttacaaatacctagaatgtgataaagcctttagccagtcttcaactcttactaaacataaggtaattcatactggagagaaaccctacaactgtgaagaatacggcaaagctttcaaccagtcctcaaaccttattgaacaaaaggaaccctatgagtgtgaagaatatggcaaagccttcaacaagtcctcaattcttaccagacataagataattctggctggggcacgagaaggtggggttttaaaagttatccaatcagcgacgctgggttgggaaccgtccaatcaggcctgcagctggagcggacaggacggcttcggggatgtggcggggcctttgtctctcgctgcagctggagctgcaggtctcgccttcactgccctgtgtcctctgctcgcagaggcccagcctctgtggccctgtgacctgcaggtattgagagatccacagctaagacgccagatgtccagtctgctcaccccagccatggaagaagcctttctgctgacagagccctggaaagctgaggacccacaggcaaatgcagttaaggagacgttgacatttagggatgtggccatagaattctctctggaggagtgggaatgcctgaaccctgctcagcagaatttatatatgaatgtgatgttagagaactacaaaaacctggtcttcttgggtattgctgtctctaagcaagacccgatcaccagtctagagcaagaaaaagagccctggaatatgaagatatgtgagatggtggatgaatccccagctatgtgttcttcttttaccagagacctttggccagagcaagacataaaagattcttttcaacaagtgatactgagaagacatggcaaatgtgaacatgagaatttacagttaagaaaaggctccgcaaatgtggttgagtgtaaggtgtacaaaaaaggttatgaactaaaccagtgtttgacaactacccagagcaaaatatttccatgtgataaatatataaaagtctttcataaaattttcaattcaaatagacacaagacaagacatactggagagaaacctttcaaatgtaaaaaatgtgatgaatcattttgcatgcttttacacctacatcaacataaaagaattcatattagagagaattcttaccaatgtgaagaatgtgacaaagtgtttaagcggttctcaacccttactagacacaagagagttcatactggagagaaacccttcaaat

SEQ ID NO: 1948 - DNA, 1594 bp, Homo sapiens
  SIMILAR (1)..(885): 581254mologous to Homo sapiens envelope protein,accession number M12140,Smith-Waterman Score=935.
atgggaggtcaatggccatgggaagcccaagaattactacctacagacccagttcctgatgaattcttggctcaaaagaatcaccctgataatttctgggtcccaaaagcctcaattattggacaatattgcatagctagagaaggaaaagaattcactcaccccgtaggacgacttagttgtctgggacagaaactgtataatggtaccacagaaacagtcacttggtggagttcaaatcacatagagaggaatccatttagtaaattcccaaagttgcaaaccgtgtggacccacccggagtcccaccaggactggacagcccccactggattatactggatatgtgggcatagagcttacgccaaattacctgaccactgggcaggtagttgtgttattggcactattaaaccatctttcttccaactgcccataaaaacaggtgaactcctgggcttccctgtctatgcttcccgcaaaaagagaagcatagctatagaaaattggaaagatgatgaatggccgccccctgagagaatcatacaatattatgggcctgttacttgggcacaagacggcttgtggggataccagacccccatttacgtgctcaaccgaatcatacggttacaagctgccttagaaataatcactgataaaatcagcagagccttgactattctggcctggcaagaaactcagatgagaaatgctatctctcaaaatagattggctctcgactacttgctagcagctgaaggaggggtctatgggaaatttaaccttactaattgctgtctacacgtagatgatcaaggacaagtagttgaagatatagttagagataggacaaaactggcacatgtgcccgtgcaagtgtggcatgaatttgatcctggggccatgtttggaaaatggttcccagcactaggaggatttaaaactcttataataggagttttaatagtaataggaacctgcttactgctcccttgtttgctacctgtacttcttcaaatgataaaaagcttcatcgctaccttagttcaccaaaatgcttcagcccaagtgtactatgtgaatcactatcgatctgtcttacaggaagacatgagtagtgaggataaaggtgagaacttccactaatgagagaggttctcaaacggggggaaaaagggaggagaccacccctcatattgtcttatgcctagtttctgcctccaaagaaagaagaagtgaaaactgaaaggcagaaatggaatccacaggcagatagcccagcatcatgccctgggcctgctagttaaaaatccacccctgacctaactgcttgtgttatctatagatttcagacattgtatggaaaagcatcatgaaaatactatccctgttctgttctgttctgactagtggtacatgcagcccccagtcacataccctctgcttgctcaatcaatcatgaccttttcaggcggaccccgttatagttgtaagcccttgaaagggacaggaattgctcactcagggagctcagtttttggagatgtgagtcttccaatgctgccagctgaataaagccctttccttctgc

SEQ ID NO: 1949 - DNA, 750 bp, Homo sapiens
atggtacaaagtgaggaaaaagcacaagcacagacagaaaataaaaaatgttcactatttcgttggctctgttctctcctacccactgtgagggatgtctctcggaaaaaccgccacactgtgtacttttctgcattctgcattgtgcatttattaggaatgcacacatctggaattcttgaacaactgaaaatgcacctgcaaaatcttaaaacggaagacaagttaagcctgtttttaaagcttggtactgaaaataaacactctcatcataactggagtcttgaagacaagaagaatctagcagtgatgttgtggaaaacatactatcatgaattacgatttgccccaacttcatttggttcatcaacatctggctttgaaccacaaatcacagggcccagagcagtcatccatcacctgaacccaagactaaaactcccctttgaaaatgttaaccacatgtgcacacccaagtgggatttctgtagcactagccctgagtcagcagatgtgagggctggaagaatgtcagtcaaacccgaaatgcatcttcgccggaggtctcaagaggagtttctcagagcagttgggatcagcagtgtccacgggggcccctcagtagaccggtctctgctcagaaaagggatactcaaaaatgaaaatgtggggctgatgacactctcgaagtatgaacaacagctccgtgctgctaaagaatggtcacctggaatagctgaaaacatctga

SEQ ID NO: 1950 - DNA, 477 bp, Homo sapiens
  SIMILAR (6)..(86): 461254mologous to Homo sapiens immunoglobulin A heavy chain,accession number AJ002663,Smith-Waterman Score=61.
atgaccacgtggctggctggagaagattgggacctggattcccttctctttgggtcagtgggctttcttttgcagacacttcatacttgtggccagtggaggcaagaacctgtgaatagcttacattacacggcaacagggactttgcagatgtggttaagactaaaactcccctttgaaaatgttaaccacatgtgcacacccaagtgggatttctgtagcactagccctgagtcagcagatgtgagggctggaagaatgtcagtcaaacccgaaatgcatcttcgccggaggtctcaagaggagtttctcagagcagttgggatcagcagtgtccacgggggcccctcagctgcctcagatactcactggatagtgatagccaatgatatgccagacttgatattgattgataatgttatggccccaccagggaaggttagaagaatggaagctgcttatttcaaatttgaatga

SEQ ID NO: 1951 - DNA, 512 bp, Homo sapiens
  SIMILAR (348)..(419): 281254mologous to Homo sapiens PDGI subunit c,accession number R22136,Smith-Waterman Score=46.
aggaaatcacaagggtatttattgtgataagtatccatgaaatcttcacaatttatgttcggagactgcagtaaagacaggtgtaagaaattataaaagtattaatttggggaactaataaatgttcatgaaatcttcacaatccacgttcttctgccatggcttcggccggtccctccgttcggggtccctgacttcctgcaacaaaaaccaacctctacttttcctccacctcctcagcctactcaatgtgaaaatgatgaggatgaaggaattttattatgatctacttccatttaatgagtagtaaatttattttctctcccttatgattttcctttttctttcctctaacttactttattgtaagaatacagtatatatctaccagacaaaacatgttaattgattgtttatgttactgataaagcttcttgtcaacaatagactattagtattaatagcaaagtttgggtagagtcaaaagttatactcaaattttcaactgtgta

SEQ ID NO: 1952 - DNA, 415 bp, Homo sapiens
ccatggacggcggtgtggcctgagttgtcagtctttaatcctgagtcatgtggctctcttttcatctttgatgtcagttccaattatttggcatcaaaaaccttcatgtgtgccggaccagtcaaagaatcccacgtcaaaattgagagaacgaacaagccttcatcgcatggcacatttgtataaaaagaaagggagagatgttgcaggaagtcagggaccccaaacagagggaccggctgaagccatggcagaagaacataaattgtgaagatttcatggacatttattagttccccaaattagtacttttataatttcttatgcctgtctttactgcaatctctgaacataaattgtgaagatttaatggacacatcacttccttaatcaatactcttgtgatttcctaaaa

SEQ ID NO: 1953 - DNA, 887 bp, Homo sapiens
  SIMILAR (196)..(80): 571254mologous to Homo sapiens Human secreted protein encoded by gene 20,accession number Y36243,Smith-Waterman Score=89.
  misc_feature (1)...(887): n = a,t,c or g
ttttttttttttaatttataagaaaagagctttaattcggctgtggttctgcaggctgtacaggaagcataatgctcggcatctgcttctggggaggcctcaggaagcttacaatcatggcagaaggtgaagggggagcaagtatctcacatggtgggagcaggagcaagagggcaaagggggaggtgctacacactttttaaaatgaccacatctcataactcacggcaagagggtggtgctacacattcatcagaaacccacctccatgatccagtcacctcccaccaggcccctcctccaacattgcagattacaactgaccatgagatttgggtggggacacagatccaaaccatataatcttctgttgcgggaagtcagggacccccaaacggagggaccggctgaagccatgacagaagaatgtggattgtgaagattttatggacatttattagttcccccaaattaatacttttgtaatttcttatgcctgtctttactacagtctctaaacataaaattgtgaagatttcatggacactttatcacttccccaatcaatacccttgtgattttctatgcctgtctttacttactttaatctctttaatcccatcatctttgtaagctgaggaggatgtatgtcacctcaggaccatgtgataattggcgttaactgcacaaattgtacagcatgtgtgtttgaggcaatatgaaatctggggcaccttggaaaaaagaacagggtaacagcaattgttcaggggaataagagagataaccttaaactctgaccactgggtgaggcgggcgggaacagagcccatatttctcttcctttcaaaagcanatggggagaaaatatcgcctggaaattcctt

SEQ ID NO: 1954 - DNA, 512 bp, Homo sapiens; identical to SEQ ID NO: 1951
  SIMILAR (348)..(419): 281254mologous to Homo sapiens PDGI subunit c,accession number R22136,Smith-Waterman Score=46.

SEQ ID NO: 1955 - DNA, 883 bp, Homo sapiens
  SIMILAR (688)..(804): 571254mologous to Homo sapiens Human secreted protein encoded by gene 20,accession number Y36243,Smith-Waterman Score=89.
  misc_feature (1)...(883): n = a,t,c or g
aaggaatttccaggcgatattttctccccatntgcttttgaaaggaagagaaatatgggctctgttcccgcccgcctcacccagtggtcagagtttaaggttatctctcttattcccctgaacaattgctgttaccctgttcttttttccaaggtgccccagatttcatattgcctcaaacacacatgctgtacaatttgtgcagttaacgccaattatcacatggtcctgaggcgacatacatcctcctcagcttacgagatgacaggattaagagattaaagtaagtaaagacaggcataggaaatcacaagggtattgactggggaagtgataagtgtccatgaaatattcacaacttatgtttagagactgtagtaaagacaggcataagaaattacaaaagtattaatttgggggaactaataaatgtccataaaatcttcacaatccacattcttctgtcatggcttcagccggtccctccgtttgggggtccctgacttcccgcaacagaagattatatggtttggatctgtgtccccacccaaatctcatggtcagttgtaatctgcaatgttggaggaggggcctggtgggaggtgactggatcatggaggtgggtttctgatgaatgtgtagcaccaccctcttgccgtgagttatgagatgtggtcattttaaaaagtgtgtagcacctccccctttgccctcttgctcctgctcccaccatgtgagatacttgctcccccttcaccttctgccatgattgtaagcttcctgaggcctccccagaagcagatgccgagcattatgcttcctgtacagcctgcagaaccacagccgaattaaagctcttttcttataaattaaaaaaaaaaaa

SEQ ID NO: 1956 - DNA, 427 bp, Homo sapiens
  SIMILAR (281)..(75): 301254mologous to Brassica oleracea lipid transfer protein,accession number AF093751,Smith-Waterman Score=73.
gcggtggaattcggctgctggtcatcctgagtggctaacaacacccccagggaaatcaaccctagggtgctggacggactctgcagagatgtcagatcccacttttggactaatggacagcaggcagctggcttctgctccaccatttgctcagcaccaaggcctgggacaacttattggttccttacaaagccacagcagagcacaatcatggaggatccaggattgcatagaaggaagcagccaagcattggaggtcgacatgcctgtgcccaaatcccacgtgttatgtcctgtgtgggttgacactgggatggctggtgacctgctccttgtgttcacaccctgtgtagtgggggtgcctcccaagtgtgggctggcctagcaacttgcttctaaccaaaggtgacagggtgtcacttctaag

SEQ ID NO: 1957 - DNA, 580 bp, Homo sapiens
  SIMILAR (403)..(579): 361254mologous to Styela plicata protein-tyrosine phophatase,accession number M37992,Smith-Waterman Score=82.
  misc_feature (1)...(580): n = a,t,c or g
gcctatttgtggtcctaagaggaaagcacagtgccagctttttcaggatgcatttcttgagtttccaaagggccaagtctgctaaacagagacaggaatgttcattcactctgatttggcagggcacagggcaaaaccaccctgacactcaggtacacggacagcaagtccactttgtccagccccggcgttggcgtccaaatgctgggtggtgggtctggttctgtttattttgttgtccttcaacccaaacctgtacacaaagaactctatgacaatggaggatcccactcggcccaacttcactatggaaacgaggctcatttctaaagggagtgagactgttgattacatccctaagcttgaacaccccaattttactttgttgtagttctgactccttattactttcacgaagggaaggaaggtgtggaaaggcaggagaaaacacgcagggacataagcatttgggctaacacacagncacgatatcaactgggcgtcttcaattctaaaagggatcntaggggaaaggacttcagaatcccaggacagttttgncaatcctggccgncccact

SEQ ID NO: 1958 - DNA, 629 bp, Homo sapiens
aattttatacgttgaagcttaaaatctaaatttatgtatgtttggaaatggaatggacattaacataaaatgtattttatcaaaaaggtgtttagactttgaccaaatacatgttggtattatcatgttaatgttctctgtttataaaaattgagtggagatagatagactcggccattctgtgggctgatgagaattctgggctttgttttgcaccaggggtaggaaacagagaacatgtctgtatgttacttaatctccatagcaaaatcccaaacagcattagcagatcgaacttgtttcttctaagacttcctttttctgaatgtgtacacatcccttctcgtgctcacacacttgcccacacactcacttcttcctgcgctgtggctgctctaagcagggctgtgcatggtgcaaagctgcagtcagtgagcctggcagcctgtggtttctgttatggaaatggttccatggtgaaacacatccctgacccttcacagacttacacatttactcaccaggaggtggcagcggtgtgggaggaggagtgttgaccttggacgcaggagagacacctgggttctagttcaagtcggccaaggactgtgtgaccttgacaagtctaa

SEQ ID NO: 1959 - DNA, 2565 bp, Homo sapiens
  SIMILAR (307)..(495): 531254mologous to Homo sapiens Human secreted protein, SEQ ID NO: 6812,accession number G02731,Smith-Waterman Score=155.
atgggggaaaatatctccagggcatgtcagagaccttcaagacagcccctcccattagaggcctggaatcttaggaagaaaaaatggtttcatgggcagggcccagggccttggggctttgtgcagtcttgggacttgggaccctgcatcccagccgtggctaaaaggggccaaggcacagctcaggctgctgcttcagaggttgcaagcttcaagctttggcagcttacatgtagtgttgggcctgcaggtacacaaaagtcaagaattgaagtttgggaccctccacctagatttcagaggagtatggaaatgtctggatgtctaggcagaagtttgctgcaggggcagagccctcatggagaacctctgctagggcagtgcagaagagaaatgtggggtgggagccccgacacagtccccactgaggcactgcttagtggagctgtgagaagagagccactgtcctccagaccccagaatggtagatccaccaatagcttgccctgtgcacctggaaaggctgcaaacactcaacatcagcccatgaaagcaacagggaagggtgttgtaccctgcaaagccacagcggcagagctgcccaaggccatgggagcctatctcttgtttcagtgtgacctggatgtgagacatggagtcaaaggagatcactgtggaactttaagatttaatgactaccctattggatttcagacttgcatggggcatgtagcccctttgttatggccaatttctcccattgggaacagaaaacatgccagctttattaatttcttcccatatgggctttttcatttggctgccaatgagcgagctcattgccaactcagcatgccaatgggaattggactggactatgagagggaaacaggggaccagaagattttcctgggctgctccccacaaaggatgattaacgccagccctgcattcagatccaaactccacaaacagtctctgggaattgtgctgggcacggtgccttttgtcagacatcatattattcagtccttacaaggaatggctgctggtcatcctgagtggctaacaacacccccagggaaatcaaccctagggtgctggacggactctgcagagatgtcagatcccacttttggactaatggacagcaggcagctggcttctgctccaccatttgctcagcaccaaggcctgggacaacttattggttccttacaaaggcacttggttgatcagggactgggctgtctccactcaaaggacttgggagaaggcaactcacacagaaggctgcatcagaagagaggctgtgcactaaagccagggagaacacccggtgccacagaagatgaacttgggaagcacacgagtcagccccctaggaccacctcccggaatatttgggaggaatacgagaagggctgggaatccccaaagtacgcgttacagtcacagaaatgtgaatttgagctatttgggagctggccagggtcggaaacagagtctttgaaggaaggggatatcaagagagatcaggataactttagctgtaccatgaagcataacccactcctcagccaaaccaccagttttagcctggggatgcgagataggcaggagagtagcagacgatgggagaaagcagatcggatcatggcccttgtgagggttttggtcaactttacatatacaggaccaaaagctgcctgtcgttttggacttgaattccggtggtctatgaagcctgtggccatcactgcacagtgctcttgggtcttgtacttcggggatccacagggcacagggcaaaaccaccctgacactcaggtacacggacagcaagtccactttgtccagccccggcgtggcgtccaaatgctgggtgttctgactccttattactttcacgaagggaaggaaggtgtggaaaggcaggagaaaacacgcagggacataagcatttgggctaacacacagccacgatatcaactggcgtcttcaattctaaaagggatcctaggggaaagagcttcagaatcccaggacagttttgccaatcctggccgccccaccctggttctcctcctcacaaacagcaaccacacagcgagctgccggtcctttactctttgctcttcatttataagccacattaggtgtcctttgggaccaaacattgtggaggcagaaaaaaagaggcaaacaccaccagagtttgaaaggctctttaatagcaagcgaatgaaaccacaggctgccaggctcactgactgcagctttgcaccatgcacagccctgcttagagcagccacagcgcaggaagaacactgtactcttcaaacgcatcgtcatctgcatccggaagccccagtaactacagggagagaacaagagaaaagcagctgtgagcgccaaatggcccacaggcaggaagacaaccaaaggcatcggatccacattaaagagtacttaacccagcagctgcagacttccccgtcaaccacccctacaatgattttcataaacttgttagacggaaatgtcaatctttcaatggattag

SEQ ID NO: 1960 - DNA, 432 bp, Homo sapiens
  SIMILAR (137)..(24): 471254mologous to Homo sapiens Angiogenic factor from human basic fibroblast growth factor,accession number R12112,Smith- Waterman Score=67.
atgttggggtctgtgagaaacggggcgctcccggccgctcccctcgcgccggggccggcccgcgggccagttgccgccgccgtcccgccagcccgggagcgagccgcgcccgcccgtaggacgccgccgccgccgcggggggacgggggccgccggaacaatgaacttagaaagcttggggtttgcatcctggcactggaagtttggaggacacccagctccgatgtgaccacttctgagagccttcccgcgctcgcctcttcaccccttgcctcctccacacccccttccccgcagagccgcattcaaaccctgggacctcaaaatgcagaactgcagcaggaacccgacaatggggtgggagacaaagccagcttcagagatgccagtgtttacgctgaagggacgtgggcagaatccgccgacaaataa

SEQ ID NO: 1961 - DNA, 528 bp, Homo sapiens
  SIMILAR (226)..(50): 391254mologous to Homo sapiens brain my040 protein,accession number AF063598,Smith-Waterman Score=80.
ctccctctgcggggtctgatggctccagtgcgcccatttccccagactgtgggaggcactgtgcagaacctgagcgtcaacggtccccgccacacaaaccccatgggcgcagacagcacaggtgtggatggagaggtgcatggagcctgctggccgcctgtcttggggttgctggtgagcggccgtgcccctgtgccatgtggcataacgcagtcacagcttctggggattgagacatgcagctcttcttgggaagtgagggtgagacattattttgtctaccacacatggccatggccaagatttcggtgcaccacgcattgcaacgacaaagccaaagattcaatagatgctgggagtaaggagcttcagttgaagcagaagctggaaggtggtgtgaccaagtgtgtggatgaccacatgcacctgctcccaactatgaccgagaaggtgaaggaggctctctcatccattgggaaataaaagtctttgccagtggccatcggggctgagggcaataatgtattt

SEQ ID NO: 1962 - DNA, 584 bp, Homo sapiens
  SIMILAR (219)..(386): 751254mologous to Homo sapiens Human 5' EST secreted protein SEQ ID NO:430,accession number Y12399,Smith-Waterman Score=213.
gtcctggtgtctattctcagggaaggtgaaagcagaaggtggagagagaggtgcaaatatccacgtggccttctaactcctgtagtgctccatagtcatctctgtccccagagactttcctacctaacctctctgccctttctccccagggtctcatgttccggtgcagcgccagctgttgtgaggacagccaggccttccatgcagtaggtgcaccagtacatcaaagcactgcaatggcgcctctggctcaagcccgggctttgctcaccagtgagttggagaagttccggcaccacctggcccggtgcgccatgcattgcaacgacaaagccaaagattcaatagatgctgggagtaaggagcttcaggtgaagcagcagctggacagttgtgtgaccaagtgtgtggatgaccacatgcacctcatcccaactatgaccaagaagatgaaggaggctctcttatcaattggaaaataaaagtatttgccagtggccatcagggctgagggcaagaatatattttttataaggaattgggaattttagtcttttaagcaaagtttacgaatgaagaaatga

SEQ ID NO: 1963 - DNA, 324 bp, Homo sapiens
  SIMILAR (1)..(225): 291254mologous to Leishmania major Ubiquitin activating enzyme,accession number AC078892,Smith-Waterman Score=78.
atggacaacatggtgagggagtggaagttcagggagattaaatcattagcctacagtcacaagacattcaaggccacaacaaggaaacgtagcatggaggaggaagcatatgcaggaatccagcagaacagggtcggttcccacatccaccacctctggttacatgacctgggtcagtctagagggctcatccctactgagcaggatctcattgctcagcagttgtgcccggagacatctcagccagctttcagtggaaagctaagtaagccctgggtctgcggcgaggacagccctgcagcacgtctgcaccccctctgctga

SEQ ID NO: 1964 - DNA, 491 bp, Homo sapiens
  SIMILAR (161)..(105): 541254mologous to Homo sapiens chordin,accession number AF136635,Smith-Waterman Score=62.
tttttttttgttatttataaaatatagggcactaaacaaatgttaagacattttaataatatttcactgatagaaaaaaaaaatcctgcaggagaaaggaactggcaacaccttgctttctttggggatccacacaaaaggactgtcacacactcacaatgactcttttgcaagttgagcgtatcagtagaatctcaggataaagaaagatgacctctgtccccgtccttgaaaattcctgaaaataccaacccatataacagcaaaaacaatcctagcaaaatgggccacagttctttcattccagtgtcctgcttgagcggggatagccctgccctcaattagggcagaaggttgggcaccctccctgggaagtgagtgtcagtacctcaaggggacaagcagccgtgagggtcaccaaagtgggtgtgaaggaaggaggcacaggtgccagacacagagctgggcaggagggtgggccctggaggctt

SEQ ID NO: 1965 - DNA, 3639 bp, Homo sapiens
  SIMILAR (1594)..(2169): 261254mologous to Aspergillus nidulans sconB,accession number U21220,Smith-Waterman Score=196.
atgtcacgtgttgctggtggcccatcttctgctggggcctgcattggcaaatccaaccagaagccagaagataagagagctggggtaatgcagtctgtagagaggctagatccctgcggaatgaagaatgaggaaattgatgagacagcagctgccatctctgcagtcctccttccagtcctctgtgtggatgacaggtcacgacttgacgatggcggggtcctcctgctgggtgggagtgggcgcgcctgcgcgtacggcacggccaagcaactcgctagggccctgctttttgtaatttcaaccaagttacaccgtttcaacaagagctttgtgtactcccttacaagccgtcctgatgacagcaattctgtccctaacacggactcctctgtactactcctttgggggtaccccactaaaaatcggctacatgaggataaatcacttagacgctgcagcagcgtggtcattagtggcttcaagatgagcgcacgggtgggggtggtcctgtatgaggagcccaactaccacggccgcatgtacgtggtggagagtggcgacttccgcagcttctcggactgggaggcccacagcgcacgagtgcagtcgctccacaagatctgggggcaatttcccagaggagagtctgtaatctacgacctgcaagagaaaagggaagacaggctggctgaggacatctgcacccacagctctacagtccagactcaacccccagagatggctggctcatccccaccagggggccactttgtgccaaaccggagaaggaggggtgggggaggtggagaagccaagaacaaaaaatctatcaacctggaaagaggaagtaggagtcgggctccccgttccccgcgatggccgcgggccgcagtcgtacggagccgccgcgcggaccccggggcgcccctccctagcggggcgcagctccttcttgttccccgccctgccagcgggatggggggcggcgggtcggccctgagggtctgcgccgaccaccgcgggggcatcaactggctgagcctgagccccgacgggcagcgcctgctgacgggcagcgaggacggcacggcccggctctggagcaccgcggacggccagtgctgcgcgctcctgcaagctcaccggccccagaccgcggaccccagctcctgcgcccgcagacccctttctagaagtccagcccccgctcatcccggcacactagcggaagagcgcttgtctgggcccagcatctggctgttgagcgcacggcagggcagggtgccttgtggcctctttgtggccaattgtgctcttctgctggcatttcctgttgacgactctcacagcaacagtagacgcttgttaagggccagcgatgaaaaacatccaggaaaaaaaattccacaaggctccaaaaagcaaaatttggcttccctgctcaccaagtcctacactgaatccacacaagtgaagcgatgtgtagccatcgcatgtaaggaaaatagcgaacatgtgccattccctctgcggctgcctctgtcctcagtctgcgctacatcccgtgaggcaggcattgtccccatcccaggacatgaaagctatgtgaccttctgccagctggaggatgaggctgccttcacatgcagcgccgactgcaccatcaggaggtgggacgtgctgaccgggcagtgtctgcaggtgtaccgaggacacacgtccatcgtgaacaggatcctggttgccaacaaccagctcttcagcagctcctatgaccggacagctcgggtctggagtgtggacaaggggcagatgtcccgggagttccggggccaccgcaactgcgtgctgaccctagcctactctgccccgtgggacctccccagcactccctgcgcggaggaggccgcggccggggggcttctggtgaccggcagcacagatggcacagccaaggtgtggcaggtggccagcggctgctgccaccagacgctgcggggccacacgggtgcagtgctgtgcctagtgctagacacgcccggccacacggccttcacaggcagcaccgacgccaccatccgtgcctgggacatcctgagtggggagcagctgcgggtgttccgggagcaccggggctccgtcatctgtctggagctgggcagcaccttgccctgccctgagcgtctgaaggggctggcagaaggaaggcagcacacacttttgcagaaagagcagctggcactgaaggcagccaaacgtctgatggtttggggctctgctcaggtagtcactaagctggtgaaccgactcgtgtactctggcagcgcggacaggaccgtcaagtgctggctggcagacacaggggagtgtgtgcgcacgttcacggcccacagacgcaacgtgagcgccctcaagtaccacgcgggcacctggagggaggcccagcgcgcgctgtgtgtccgcagtgttcacgggcagcggggacgttgcgcccgggccttcgacgcgcagtctggagagctgcggagggtgttccggggccacacattcatcatcaactgcatccaggtaggtccctctgcccttctcggggccgccgccgtgggagggaaggtgccccgccccgatccatccacgcgggcagcggtgtcccccccgcctaccgcgtcaccggtgacgcccgcccctgcgcccgcagtgcacggccaggtgctctacaccgcctcgcacgacggcgccctgcgttctgggacgtgcgcgggctccgaggtgccccgcggcccccctccgcccatggcagctctcgcggctcttcagcaacaagcacctgagcggggtgctcttcagtcccttgatggtgccactttctgcatccatgtgccccggttggcccgggtgccaggagagaagctgcaggtgacagtgtctgccgtggagagctcatcatctcgctgcagagagaagcacctgctgcaggagcagccccttcaagtggagcagccccttcaagtggagcagccctttcaggtagagcagcatgcgcttcatagtcttaatgcagaagatacttcatcagagacggccggggccgccagggatcacctgctaggtgatgggcgggtccgccctcgggcgcggatgaacaggaaaatgggcctgttgggaggcaagcagatcggtgcaggagaacccgcagaaacggcaccatgcactgttctccgggtgagacttaagcacacacagacctcgggggtggccaggtcttgctgcgtcccggagccattggggcctgtggctgccacaaggggcatacctaccagagaggacctttccatcgtgctgaagggacggttccggtggcgcaggccagagaaccgccttgagtgctgcctgcgggcagtgctgccggccggccctgagcctgcacagacgttcacactgactcctgcttgccgaagacactgctgcttggtgatgctgcgctctggcctgagcagcccctcactgacacgtcagctccagtccccaccttatctccccacagcagagaatggagcatgcatcaagccatccagagaaacccagtggggcatggacccaaaacacgggcgctgcactcactttgcatttttatag

SEQ ID NO: 1966 - DNA, 568 bp, Homo sapiens
  SIMILAR (376)..(480): 471254mologous to Homo sapiens Human secreted protein, SEQ ID NO: 7719,accession number G03638,Smith-Waterman Score=63.
cggaaatctcccttgacaacaatgttaacaaacaaaaagttgcacctatactccttctaagcaaaccttcccttgtctctaggtgccttgtggcctctttgtggccaattgtgctcttctgctggcatttcctgttgacgactctcacagcaacagtagacgcttgttaagggccagcggtgcggagaagtgtgccgtcgtcacactatgttaccccacatacagacgtggaaacaggctgggagttaagtaattcgcccaggtcgcacagccagtgaggggtagatggcagtctgagccctctcattgctgtaaaccctgcctgcatgcctggtggtttctatttgtgccctgtactcactcaagaggtcagtgtgcctcgggtgcaccttcccctgggcctgtcccatgcactgtgaggtccctttcagctctggccctcctactgcccaggtagcacacgcagtcccctggatgagccgcgaggctttctgctgtgggtagttctttatcaccgcgggcttttccaccatcatcagtgaactctctgtggcctcgcccaggcctt

SEQ ID NO: 1967 - DNA, 1721 bp, Homo sapiens
tttttttttttttttcactttttatggaaaagttttatttgattttgtaaaacgtaatgttttgagtatacttactttactctttcaaagcaatgaaagtacaatgataagcatttgaataaaaagtaccctgttttatgagcttattttttaacatagtgaaggcatactctcactcgaaagtagaaatatgtgatccaattaccaaaccttaacatttacgaataaacacacacaactgaatagtcatgaaaaaatagaggattagtcaaaatattctgtttaaaaatattaaattcaagttacatggaaattttatgcataaaaatcatattgggataatcagaatgaatcttcagtgggtcatttctgaaaaacaaatactaactttagttaaaaagttaaacttttacttctctttttcaaagtattttcaaaacttcactattcaaattaaataggatattttaataatttacttcaaagatattatataattctgatcccaagagatcttcttgtggtgtttataaataaatctactaacagaaaagagtaagaaaagccaatctaggaaagaaaatcgttgaattaagtgagagtcaaagtgctaattcaatctatggggttttttcctccccatcatttcttttcacgttgcctttggagacagagtaatttgtaggcagctcgccttgatctacattttctctctctaatctctcttggctgtgatatagtacagggaaccactaatatcaccccctccattttcccagacaggaatacctaaggccaaacctcatgcccatcctcgggttgcaacaagtaacgtttacttcagcaacaaagtggacctctctagagattatttgttgtactgtcttgttgccttaatacgaattaatcattaaaaaataaattgaaaaccagaaattcaaactgcccatagacaatcatataaaagttgggaaaatgagaaatggagccttaaccattgaaagtctcccctcctccattcctagctcacacaattccaggaacagaatccctcaaacaataaacctaagcttccccctctgctgcatttaagaaagtgtcacttctttgcgtcgaatgggttgaaagctttgggagatgaacgggaaatttcaagtccaccactttcatcaatttcccttggtcttcccgttctcagtccgcactcccaaggcacgggcagcttcgccgggaagcggcttgagggagttggccctgccctcgtggccgtgggggagggcaggcaaggcgcggctggcgcacagcggagtcctcttcagctttatcacccgctggggtgtaggcttcttgtcggagagtagcaccttagctggaggtaagtgcgtgcctccattttcagcgctcgcagccccaggggaagcctgaggatgcccaggtgcccccgtgcccaccagggccgtggctctggaaggtgcagaagcgctgagctgcctttctgcggctaccactttgaaaccggtttgctgtcgccccagccgacgtctggatggcactggctggagacaccgtgactgaggccgagttcttgactttaatttgggtacttgtggaagggcccaaaaatctaactggcttaggaccagtcttatagttcacactttcgtccgcttcattgaacgttatcagtcgcctagaaatacagaagcgtggcattttgcaca

SEQ ID NO: 1968 - DNA, 384 bp, Homo sapiens
  SIMILAR (80)..(301): 411254mologous to Homo sapiens Amino acid sequennce of a human artemin polypeptide,accession number Y84594,Smith-Waterman Score=93.
atgccgagcccgcaagccttctccagatgccatgtactctctcctccagggaggcagcgtccatggagcaaaaggaatgccaggatcctgcacaggcagacgcgggccagcctcagcaccgacagccgacgcgcagatagcagagccatccttggggcgaaggctcagcggggagcagcagctactgcatcttaccaggttaccggagcagcagaggcagctccttctaccagctgctgctcctcagcccctgaggaccctgcagaactcgtaagcactccctacctggtcctgccctgcccccaaggagatgtagaagtgggcatcatgcagaacaggcccttcccacaaggcagctcaagcagcaagtttgtctacatctaa

SEQ ID NO: 1969 - DNA, 413 bp, Homo sapiens
  SIMILAR (135)..(380): 401254mologous to Rattus norvegicus proline-rich proteoglycan,accession number L17318,Smith-Waterman Score=112.
gatatttcggttcacgtttgttgccaaatcttgaaacgtgggtcccactatagcaacactcaatcccagccccaggaaggaggcacacagcatcaaggtggtgaaccaccgcagcttgctcccggtcccaccgctctgccaggagaccaccaccacctccggctccggctcattctccgccggggcctccgcctgcaggagccgctgccccgcagccgggggcccggccccacggagctccacctctaactccagctcggcggctccggagaagtcgtcttgctgccgccgcgcttctcagcagaacttctggagctccgagaagagcactggccccgaccccaggcacgggtgtccctccgggcgccacctcccagcggaccgcccggaaccggggcagagaagaggaactt

SEQ ID NO: 1970 - DNA, 771 bp, Homo sapiens
  SIMILAR (728)..(480): 341254mologous to Arabidopsis thaliana En/Spm-like transposon protein,accession number AF002109,Smith-Waterman Score=90.
atgcgggagggctatgaagtgtgtctgtgtcaccagtgttctaggcctggctgctactcagaactggcttccaggggacaaagagggaagagttgtcacagccccaagaagttgaaagatgaaagcagggagcaggtatgtctgagaaaacacaccaccaatgaatggaaagaagatctcaacatctgctgcaatttgactgttcagtgctctaccaaagtatcggagtcagtcagtcatgcaggtaggctgccaaccatggctgagccctcaggagctgtcttgatgaccagcatagacacggtctgttgtgttcattcaaacttgccaggaaccaaggatctgagaatgtctctcgttccaccttacgagaaacacccacaggttaaaaatggttattgtgttgaaaatattgtgtcaagttactatgatgagaaagtagatgatgtgtgtggaagtcctgacagcacagaacttctcggcgactccggagaagtcgtcttgctgccgccgcgcttctcagcagaacttctggagctccgagaagagcactggccccgaccccaggcacgggtgtccctccgggcgccacctcccagcggaccgcccggaaccggggcagagaagaggaacttcggcacgccgcaggtgttcgtggcaaaagacgctcgctctccagcaagcaggcgcatgcgcgggtcacgtggcggaaatgtggcctctcgccaaccgctatcgtgcctcaagccggaagttgatatggttgcctag

SEQ ID NO: 1971 - DNA, 489 bp, Homo sapiens
  SIMILAR (1)..(135): 1001254mologous to Homo sapiens Alzheimer's disease protein encoded by DNA from plasmid pGCS2232,accession number W21578,Smith- Waterman Score=220.
atggcggccgaaatccactccaggccgcagagcagccgcccggtgctgctgagcaagatcgaggggcaccaggacgccgtcacggccgcgctgctcatccccaaggaggacggcgtgatcacggccagcgaggacagcctgggcaacaagaacaaaactttgtctcaaaaaaaaaaaaaagaaagaaataaggaatttggaccttattttgcaggcagtgtagaaccatcaaagagttcaaaacaagcaaatgatatgatcggaatttgtaatttagaaataacaatagctaacctgttgaaagtcccttttctctacgagtacagaattggaccttatgtgttattggatccaatcctcacacttcctccctataaggaatgctacgggaccacaatggtgcttcggaggacctctatgcagtccaaatcactggatatgccagaaatctgtctcaaagtgttatctcagtgtattgctcaaggctga

SEQ ID NO: 1972 - DNA, 454 bp, Homo sapiens
  SIMILAR (37)..(453): 1001254mologous to Homo sapiens Alzheimer's disease protein encoded by DNA from plasmid pGCS2232,accession number W21578,Smith- Waterman Score=733.
gcctgccgaggaggccgcagcagtcgccgcgcgaacatggcggccgaaatccactccaggccgcagagcagccgcccggtgctgctgagcaagatcgaggggcaccaggacgccgtcacggccgcgctgctcatccccaaggaggacggcgtgatcacggccagcgaggacagaaccatccgggtatggctgaaaagagacagtggtcaatactggcccagcatttaccacacaatggcctctccttgctctgctatggcttaccatcatgacagcagacggatatttgtgggccaggataatggagctgtaatggaatttcacgtttctgaagattttaataaaatgaactttatcaagacctacccagctcatcagaaccgggtgtctgcgattatcttcagcttggccacagagtgggtgatcagtaccggccacgacaagtgtgtgagct

SEQ ID NO: 1973 - DNA, 1272 bp, Homo sapiens
  SIMILAR (925)..(623): 371254mologous to Homo sapiens Fragment of human pre-pro- artemin polypeptide,accession number Y84598,Smith-Waterman Score= 93.
atggtgggaggagcccaaaagaataagatactccacttgcaggttcctaacagggcagagaaaacacacgcagaaccagaacacaagagggctggggtggtgactgccagcaaggcctttttgagcctgagtcttgaaaaaggagaaatcagccagacaatgaacacaggaggagaaagggaattccaggcagaggtacagaaggagcaaaggcagaaaagcactgggcggtaccagtgcagtttacgggaggttcagttttgcaagaaaagaatgtttcaggcaggggacaaggcaaggagatgggaagggagtgaagaaagctttgactctgttgggtcattacaaatggccagcagcctgcaaggcaaggccagcgtgactagagcggacctttgtggaatttcacagcatgaagaagcaacaggatctggtgacagcctgcatgtgggcagtgcgggagcctggcatcaccaatttctgagtaccgtactttcattttacctgcagtcactcatccgcctcgcaactcccgtttctacagatgatgaaaatagcaaagacctgctcgctcgggttaaatcggctgccagaggccaagttaaaggctttccccacaccgcgcgtcacctccctctgcccaggcagagggggcggccgcggagggcggtgcggccgcaaccggagcgggagcctggtctcggcggcgcggggagtcggaggacgcagccaagcggcggcggcgaggagggacgccccctctccgcctgcgacttctcggatgccgccccgccaggggtccgtgtcgtggggctgcgcccggaacgcgccggggagacgcgcagaccccgaggtgcggcgccagcccgggcccagctgcacttaggtttctggggacccaaggacccaactttaatgacagtaatttatgtagccgttagtgtagaatcgtcgctagcaggcagacggccccaacagcgaggaagaaatgtaaatctccctatacacagccctggattaagggtacagctactgatgagagccacttggaagatcagcctgcagtcaccccttggcatgcaggtggccgtgccagagtgtgcacgtacatgcgatgaggccaacgatgaggtctcccaaaggaaagtgattgaagacaaagacccattctgccagtgggatatgctgggaataccaactatacttgttactgagtgtgcatggctggtgttggccagccttcctgatgccagcaagaggagacagaagtaa

SEQ ID NO: 1974 - DNA, 2559 bp, Homo sapiens
  SIMILAR (993)..(1412): 381254mologous to murid herpesvirus 4 unknown,accession number U97553,Smith-Waterman Score=157.
atgtataaaggcgccccgtggcatcctctcccagccacagactttcagcttgcgcggcatccccaggcaatacgggcggtgcggcggcagcactcgggggcttacggcggcgcggcgcccaagaggccccagcagccgaagggaaaccggcgcgtcccccgcccgcccaggcgtcagctgatgggctgcctgccgaggaggccgcagcagtcgccgcgcgaacatggcggccgaaatccactccaggccgcagagcagccgcccggtgctgctgagcaagatcgaggggcaccaggacgccgtcacggcgcgctgctcatccccaaggaggacggcgtgatcacggccagcgaggacagggccagagtcacctctcccatgcttgagtgggcagtgtcagccaacagctctccgccttgtttccgagttattttgatttgggtttgttctcttagggctggggtggtgactgccagcaaggcctttttgagcctgagtcttgaaaaaggagaaatcagccagacaatgaacacaggaggagaaagggaattccaggcagaggtacagaaggagcaaaggcagaaaagcactgggcggtaccagtgcagtttacgggaggttcagttttgcaagaaaagaatgtttcaggcaggggacaaggcaaggagatgggaagggagtgaagaaagctttgactctgttgggtcattacaaatggccagcagcctgcaaggcaaggccagcgtgactagagcggacctttgtggaatttcacagcatgaagaagcaacaggatctggtgacagcctgcatgtgggcagtgcgggagcctggcatcaccaatttctgagtaccgtactttcattttacctgcagtcactcatccgcctcgcaactcccgtttctacagatgatgaaaatagcaaagacctgctcgctcgggttaaatcggctgccagaggccaagttaaaggctttccccacaccgcgcgtcacctccctctgcccaggcagagggggcggccgcggagggcggtgcggccgcaaccggagcgggagcctggtctcggcggcgcggggagtcggaggacgcagccaagcggcggcggcgaggagggacgccccctctccgcctgcgacttctcggatgccgccccgccaggggtccgtgtcgtggggctgcgcccggaacgcgccggggagacgcgcagaccccgaggtgcggcgccagcccgggcccagctgcacgtgggtctcccggatgggggtgtggcatgtcgtcttggctgccccctggaagagacagagggcgccctgagacagcgctcagtcctccgggtgatggggaaacggtgccaggacgcggccgggaaggggcagataacccctcgaggcgttttgcagggtgtcctagagctgacttctccctgcctaggggacagaggaacggcggcaagtcgccttaggcaaatacagacgagggaaccagaaaactggattcccggctatggtgatagcatgaggtacccgcagcgtcctggaacccagcccttctcagccggtaaccactgctgctgggacccgttaggtttctggggacccaaggacccaactttaatgacagtaatttatgtagccgttagtgtagaatcgtcgctagcaggcagacggccccaacagcgaggaagaaatgtaaatctccctatacacagccctggattaagggtacagctactgatgagagccacttggaagatcagcctgcagtcaccccttggcatgcaggtggccgtgccagagtgtgcacgtacatgcgatgaggccaacgatgaggtctcccaaaggaaagtgattgaagacaaagacccattctgccagtgggatatgctgggaataccaactatacttgttactgagtgtgcatggctggtgttggccagccttcctgatgccagcaagaggagacagaatggaacgaacattgatttatctgtggccaccaacacttgttcccctcctcaccttttgatagtggaaacacctcttctattttatgcagcattttgttgggaaggaaatcaagaagaaatgggaatagtgcgtttagatacatttggtctttctgagactaatgttatatctaatttagattttatggtttgtaagaatgaggaaaaggaagagggcttccagaggaaagtgaacagaaagctgtacagctgtgagattgcagatatttgcttgcctgactctttctggcttggcttgtccatgatgacctgcagaaccaaccaaccactggaggaatgtccaggatatgaacctgtacagcatatcactacactgaatactatagacaattgtaacacaatggcacataagctgaaaatggtacctgagcaatttctgagtatgtcacgaaaaggcactgaaatacagaagtttctctatggaaaagagtgtcccggcttggaaactgtgtctgaagcaaaaaatttcctcaaaattgttcttcagaaagggagttgccgtctagtagggtccttacaaaatcattaa

SEQ ID NO: 1975 - DNA, 589 bp, Homo sapiens
  SIMILAR (562)..(386): 331254mologous to Homo sapiens Human secreted protein, SEQ ID NO: 5899,accession number G01818,Smith-Waterman Score=64.
ggcattccttccatgaaaaatgtttttccggaccactgggtaaatccttagatttggttccaattttgtgacccatatcacttaagttcagactcagcaagaaaccaaatccagtcatgaaaagaaccacaccaacagtgcttggaatgaaatttgatgctattagtttttcaggcagccttgttgaactttactaataaccgtaagtgggttgacatagatgagcctccaaggccgaactctaaaacctgctccattgcccataagagaagtgcatcgggtgggggcagagtcccaagtgcccacagaaagggtaaaaatacaaacaagatgtgtaaaatctgattcatgtgttctagagctggcatatttaccacaaacctcaagtcacccgagggaagagaagacgcgaaggcatcccagggaccgcatttttgcaggtaaactcgggctgggcgctcccgccgggaggttggttagtgcccgaatgcggaggcagaaaagctgcggcggccgaataacgagctcaccgcggccccgcccgggccagctctcggtttccatggctaacgtctactccggcggccgc

SEQ ID NO: 1976 - DNA, 1033 bp, Homo sapiens
  SIMILAR (463)..(567): 481254mologous to Rabbit fibroma virus gp103L,accession number AF170722,Smith-Waterman Score=73.
cggccgccggagtagacgttagccatggaaaccgagagctggcccgggcggggccgcggtgagctcgttattcggccgccgcagcttttctgcctccgcattcgggcactaaccaacctcccggcgggagcgcccagcccgagtttacctgcaaaaaatgcggtcccctgggaatgccttcgcgtcttctcttccctcgggtgacttgagaaacctgctgtgttacagaaaagcatgtgactttccagaataatccccgagtgaggatgagtcccagatgtgcctctactgaatgattacaagcaggacttctttctgaagcgctttccacagactgttcttggaggccctcgattcaaattaggctattgtgcccctccttacatatatgttaatcaaattattctttttctaatgccatgggtttggggtggagtcggaacacttttataccagttaggcatcctgaaagactattatacagcagcactttcaggtggattaatgctttttactgcatttgtcatccagttcacaagtttatacgccaaaaacaaatcaacaacagtagaaagaatactaaccacggatatcttagcagaggaggatgagcatgaatttaccagttgtactggtgctgagactgtcaaatttctcattcctggcaagaaatatgtagccaatacagtttttcattctattcttgctggattagcgtgtggtcttggaacatggttattagtaatgttcatcatgtctgctggaacagctatagcatcatatttcattccaagcactgttggtccttcaggaggtattccagaagaaggcattgttatcataggagatgacaactccatgtatgttattgcccctgaagactttccagtggaacaagatgtgaagttccaaggacctcacacagtgatggccatatcccccatatacacatttaagtcagttctatcagagttgagtttgagcagccttacccggagagcatgcttgctagcacagtatccaatggaaagag

SEQ ID NO: 1977 - DNA, 1690 bp, Homo sapiens
  SIMILAR (840)..(905): 451254mologous to Drosophila hydei testis-specific RNA,accession number X58114,Smith-Waterman Score=51.
tttcgtggctaggcccgacaggggatctgaagaggcttatgaggctgggtgaggcgctgagacggctttggcggtgagtcctgggccaggcgcagctgaaaggcccgcaacccgggaaacgtcaaaacaaacagaaggacttgggattccggagcagtcgcccctatcgctgctcctgcagttgcggacgccaccgaccccgccgccggaggactgggcactgaaaggcctctaggcctaagcgcggcccgcggagccagacgtgttgctgccgtgagtaaaacgagcgccctctccgcactcgtttacaaattaaaatggaggaaatttcgttggccaacctggatactaacaagctagaggccatcgctcaggagatttacgtagacctgatagaggattcttgtttgggattctgctttgaggtgcaccgggcagtcaagtgtggctacttctacctggagttcgcagagactggtagcgtgaaggattttggcattcagccagtggaagacaaaggagcgtgccgcctcccgctttgctcccttcccggagaacctgggaatgggcctgatcagcagctccagcgctcacctccggaattccagtagctgcaaaatgagagtctgaaagtggccaggacaataacatagactggtcctgtggcttcgaggagtaagctaagtagaaaaaagtagaaaaatcagacaaaagttttaattcccccttgaagatcctagcatttaaaaacccaaagtggataatttaggaatcctttttttaaagtgtattacctggagcaagctctgaagccctgggcaaggaggagctgcacagcctgcgggccatgcagtgcctgttgatctcctaaacacaccaggatgtgcgcaagatcctgtagttgcccccaagtgcacaggtgaagcagttgtgtgcccagcatataaaaattttttggttcctcaagcctttctgtctggcctgatgtcaagggctttcctggacagttttggacgtttacaagttcgtcaagggccgtgatcagtggcctgcagtgggactgctcctttgatatctgaacctctgttatgggcttctctgagacaagtaaatgtcaggtgcaagatctggatactaacagtttcagtttgggaaatccaagaaaaagaaatatcaagtttgatagggaagctctgtagccttgactccagcaagaagaaaaggtcaaaaccacgtgtttcccaaaagtccagactacaatgattcagctgacttgaggacaaggcctagcatttggctgagcagagccctcttccttgccctcccaacctggtggcataggcttggcaaatggacaacttggttgtccagaacaggttgaggattcggttatgatcccctggggaggtagcagggacctctgcaactatgcatgatttctcaaacttcaagattcatgtctggatgtattatgctgtggatataagtttagtagggcgggcatttcctactctgagttactggttacctagccagtccatgggtgtgacttggtccttaagtcaggtcactatctgcctcccaccctgggggcaggactgaagtatagaagagcatcatggctgtgcaggaggctgtggtttgaaaacctgacccaagagggactttaacttggcctaataatgggaag

SEQ ID NO: 1978 - DNA, 819 bp, Homo sapiens
  SIMILAR (763)..(311): 301254mologous to Homo sapiens RNA binding protein,accession number AB016091,Smith-Waterman Score=90.
tcctgggcgatcagactggtcctcggaggaatgcagcccaacgacttctacattttaaaatctggttttctgcagctcgttcgcagttctccagggaccagcctctcgagagggggcgctttcccgactttggcaagggggcgaagaagcccgggtgtaagcgcagcaggactgcgtctgaaactcggcatcaggctgctaagtgagcccagggctcgggctggggcagcgggcggccaagcaagcatcccaccccatttatttgtcaaaaaccgaagaaagcaaagccttttagcactggcagctaattttggtgcctctgaacgtgtgaaacgcccctccccgccccactcgcatcctgccaccttgcccgcggtagctaggaggttaatcgttaaaaaggtggactcccccagggaaatagatgaaaggatcgtgcccggagaacttgtgtgtgcccactcacaagtgcagagaattaatctcggcccggactgcggcaggagggcaaactggggaaagaaggctgggaggcggcccggtggtgcagagacgcgcggcgcctgctcccgcggctcccggggctggcgtgccctgcgcttacgctccgcgctcgaatatcttccccggagggctcgggaccagcgcgagcaccttccctggaagcccacatccatcacccagcgatctcctctccatcgagagcagggcttgctgagagtggcggaggaccttgaaggctcccggttctgtatctccgtggccgagacgctttctgctcgaggcccaggggagtccgggagcgaaagcctcttttga

SEQ ID NO: 1979 - DNA, 276 bp, Homo sapiens
  SIMILAR (219)..(34): 371254mologous to Rattus norvegicus G protein-coupled receptor,accession number AB015646,Smith-Waterman Score=69.
atgaagctgtgtcccacacagttagttgtcagtgcggtggtgaaggccacacctggcagtggctacagtgcgtctcctgtgagcaggggctgtagctcaccctctcggagctacgccgtgctacggcggcaggagagggagcccgggcgctctcggtggaggaggctggggatcgcagtgccggtgctgcattcagaaaagactcagccgcagccggcgatgtgtgaagttcccagcacgcactcagcccggctgctcctcaccctcaaatgttga

SEQ ID NO: 1980 - DNA, 369 bp, Homo sapiens
  SIMILAR (1)..(69): 951254mologous to Homo sapiens Human secreted protein, SEQ ID NO: 6699,accession number G02618,Smith-Waterman Score=118.
atgtctgcaactcgagccaagaaagtgaagatggccaccaaatcatgccccgagtgcgaccaacagatcctggggcccgccggcggcggcggggatccggggccggtcgggctgcaccgaggggtttcccgggaaaagcccggggccgtggcccgccagcgtccacctggcggcggccagacggccaagccccttcttgctgtgtcccggccactggaggagcgcgcctttggtttatcctttgaaaaagagaaacaggaaaaggaaattgacatctatgctaacctgtctgatgaaaaggctttcgtgttttcagtcgccttggcagaaataaatagaaaaattatcaatcaaagacttattctctga

SEQ ID NO: 1981 - DNA, 1087 bp, Homo sapiens
  SIMILAR (85)..(261): 931254mologous to Homo sapiens Human secreted protein, SEQ ID NO: 6699,accession number G02618,Smith-Waterman Score=297.
gactgggcgggcggaggccgggctgccgaagtgtgaggggaggagcccgagccgtcgctgctgccgccgctaagggagaggagcatgtctgcaactcgagccaagaaagtgaagatggccaccaaatcatgccccgagtgcgaccaacaggttcctgttgcatgtaaatcatgtccttgtggttacatatttattagcagaaaacttttaaatgcaaaacactcagagaaatcaccaccttctacagagaaacaggaaaaggaaattgacatctatgctaacctgtctgatgaaaaggctttcgtgttttcagtcgccttggcagaaataaatagaaaaattatcaatcaaagacttattctctgatacttgcttgcaaaatctgctgaaacttctgtcaagataacatcagcaaattctcaaacagttatggactctcaggagcattctgactgcatcaataagggccatcgattgtttctttctcgcctgtcgtttagcctgtgccacacttcgggagcaaagctgtgtaggcttggactgttctgggatttccttgtttaccaaggagtattgtcagtgttttgtgtttgggatataagtaagtgtatttgccaacaacaaaaaaaaaccaacaaaaatgctgggtgggtgttaaaggataaaaagtgatgggggtatggggggtagggtatggaaaactagggtaataagatgcttgattgttttcaggtttgccaccagagatgcaatattttaaatactgtcagaaagagtgatttttaaaaatatatatttcagattttcagtgctaacagattgcatatatacagttcatttacttttattaaattggcaatcgatattttattgaatggggaattaagaatataaactgtaaattttgtcttaaattgattttttttcttggcctttatttttattacttaaggtatgagttatattttaggagatactttctagacagtttgaagtttgggtgctatatgaagaaaaacatttaatgatatactcagatataaacaccttgttttcttgaatgtaatttatttattagctaaaaaaa

SEQ ID NO: 1982 - DNA, 728 bp, Homo sapiens
  SIMILAR (113)..(289): 1001254mologous to Homo sapiens Human secreted protein, SEQ ID NO: 6699,accession number G02618,Smith-Waterman Score=319.
acgtgattcctggacacgatgcgtccggttactgggccggctttgccgggctgccgaagtgtgaggggaggagcccgagccgtcgctgctgccgccgctaagggagaggagcatgtctgcaactcgagccaagaaagtgaagatggccaccaaatcatgccccgagtgcgaccaacaggttcctgttgcatgtaaatcatgtccttgtggttacatatttattagcagaaaacttttaaatgcaaaacactcagagaaatcaccaccttctacagaaaacaagcatgaggccaagaagaagccaaccagagagagttaggagagagaagataaattctacagtagataaagatttagaaaacagaaagaggtctcgaagtaacagccattcagatcatatcagacgaggaagaggaagacctataagtgcatctgccaaaaaaccatgaggaagaaagagaggaaacagggaaaaggaaattgacatctatgcttaacctggtctggatggaaaagggcttttcgtgttttcagtcgccttggcagaaataaatagaaaaattatcaatcaaagacttattctctgatacttgtttgcaaaatctgctgaaacttctgtcaggataacatcagcaaattctcaaacagttatggactctcaggagcattctgactgcatcaataagggccatcgattgtttctttctcgcctgtcgtttagcctgtgc

SEQ ID NO: 1983 - DNA, 436 bp, Homo sapiens
  SIMILAR (217)..(435): 791254mologous to Homo sapiens X-like 1 protein,accession number AJ005821,Smith-Waterman Score=316.
tttcgtggcgacccgggcggcggcggcggtcgaggagcttttatggcagggacgaggcggagggaaggcgaaaggggggcgaggagttaagccagagcctccgcggggcgggtttccgagggaggcacagagggaaacggctctcgcagcccgaggagggtcaggcgcggagcttgtcgcccctcccgcgcattctgtccagcccgggctccggagatgcatctgcatcaggtcctcaccggggctgtcaaccctggagacaactgctactccgtgggcagcgtcggggatgtccctttcacggcatacggatcaggctgtgatattgttattttggcaaatgactttgaatgtgtacagatcattcctggtgctaagcatggaaacatccaagtcagctgtgtggagtgttctaaccaacaaggaagaattgcag

SEQ ID NO: 1984 - DNA, 1029 bp, Homo sapiens
  SIMILAR (493)..(768): 501254mologous to Homo sapiens Human secreted protein sequence encoded by gene 2 SEQ ID NO:250,accession number Y91577,Smith-Waterman Score=175.
atggggccgggcaaggtggctcaggcctgtaatcccagcactttcggaggccaagataatagattgttgacagcaactgattctattcagttgtgggctcctccaggagatgatattctggaagaggaggaagaaattgataatacagaaccttcagtatctgtacatttgatggaatggtctcctgatggtgaatattttgctactgctggaaaggcatatggatcaggctgtgatattgttattttggcaaatgactttgaatgtgtacagatcattcctggtgctaagcatggaaacatccaagtcagctgtgtggagtgttctaaccaacaaggaagacggaggctgcggaacaacaaagattgctgcctgttcctacctctgggagctttgtcccagaagggcacccgccagatgccgggcagagctctcctgtatgtggtgtctgtaggcccctactgtgaggtgtctccagtctgggtacacgggggggtcagggacccacttgaggaggcagtctgtcctgtatcagagctcgaatgctgtgctgggagaattgctgctctctttagagctgtcaggcagggacgtttaagtctgctgaagctgtgcctgcagccgccccttcccccacgtgctctgtctcggggagctgtggtgggctccacccagttcaaacttcccagcagctttgtttacactgtgagggtaaaaccatctactcaagcctcagcaatggcggatgcacctcctcccaccaagctcgagtgtcccaggtcaacctcagatgctgtgatagcagtgagaatttcaagccagtggatcttagcttgctgggctccgtgggggtgggacccgctgaaccagacactggagaaaatttcctgttctgctggttgtgaagaccatgggaaaagtgcagtatctgggctagagtgtactgttcttcccggtaccgtctctcacagcttcccttggctagcaaagggaaattccctgaccccttgtgcttcccatgtgaggtga

SEQ ID NO: 1985 - DNA, 742 bp, Homo sapiens
  SIMILAR (3)..(146): 361254mologous to Rattus norvegicus interleukin 12 receptor beta1 subunit,accession number AF083328,Smith-Waterman Score=77.
tttcgtccggggctggcgcgctctcccgggcttacacatagccgccaccaccaccgccggcggcgggggcagccatttcatctccacagaggccagacacaaaaacatggcagaaatggagaaagaagggagacctcccgaaaataaacggagcaggaagccggctcacccagtgaaaagggagatcaatgaggagatgaagaactttgcagaaaacaccatgaatgaactccttggctggtatggctatgataaggttgaattaaaagatggtgaggatattgaattcaggagctaccctacagatggggagagccggcagcacatttctgttctcaaagaaaattctttgccaaaaccaaaattacccgaggacagtgttatttcaccatacaatataagcacaggctattcagggcttgccactggaaatggactcagtgactcacctgcagggtcaaaggatcatggcagtgtgcccattattgtacctttaattccaccacctttcataaagccaccagcagacctagaggcctatgagagaaaaatggtttcctgggccaggtccagccccccctgctgtatgcagcttctggacttggtgccctgcatctcagcagcttcagcaatggctaaaaggggccaaggtacagctcaggctgttgcttcagagggtgcaagccccaagccttggcagcttccatgtggtattgagcttgagatgtgtagaagacaataa

SEQ ID NO: 1986 - DNA, 636 bp, Homo sapiens
  SIMILAR (312)..(527): 971254mologous to Homo sapiens PEST-containing nuclear protein,accession number AB037675,Smith-Waterman Score=341.
cgacccacgcgtgcggccacgcgtccgcccacgcgtccgggggaaaatggcggacgggaaggcgggagacgagaagcctgaaaagtcgcggcgagctggagccgccggagtggattcatgggagcctcttctactgccacacaatctcagttcctgctgtatactctaacaaacagtggaagagactgttgggtcagtaggtgacaactgcagaggtatcttccttataacgatgctttttgaggttgctgctcccatcaatctgctcagtaaaaatagctcatcttggtaagtttgtttcgacttcaccaggacctgatgaagaagcagaaaaacctgcgaaaactaagactgtttcttccagtaatggaggggaaagttccagtcgcagcgctgagaagcgatcagctgaagaagaagctgccgacctcccaacaaagcctacaaagatctccaagtttggatttgccataggtagtcagacgacaaagaaagcatcagccatatccatcaaacttggatcaagtgtgagttgttatttcatatatgatgtttgtaatgggtcttaaggatttgctttggaaacgtggcgtttactaggttatggtaaattaagggtgaaaaggtacattgttt

SEQ ID NO: 1987 - DNA, 567 bp, Homo sapiens
  SIMILAR (32)..(232): 861254mologous to Homo sapiens PEST-containing nuclear protein,accession number AB037675,Smith-Waterman Score=282.
tcccgggtcgacgatttcgtcggcggggaaaatggcggacgggaaggcgggagacgagaagcctgaaaagtcgcagcgagctggagccgccggaggacctgaagaagaagcagaaaaacctgtgaaaactaagactgtttcttccagtaatggaggggaaagttccagtcgcagcgctgagaagcgatcagctgaaagaagaagctgccgacctcccaacaaagcctacaaagatctccaagtttggatttgccataggtagtcagacgacaaagaaagcatcagccatatccatcaaacttggatcaagtaagcctaaagaaacttgttccaactcttgctccaaaaactctttcagtagcagcagcttttaatgaagatgaagatagtttaaccagaggaaatgcctccagaagcaaagatgaggatgaagaatattggaagggatacaccaacattcagctggaccaaactccttcaataaaggaaagcatgggttttctgataaccagaagctgtgggagcgaaatataaaatctcatcttggaatgtccatgaccaagacaa

SEQ ID NO: 1988 - DNA, 345 bp, Homo sapiens
  SIMILAR (314)..(24): 321254mologous to Homo sapiens Human ALP,accession number W89253,Smith-Waterman Score=88.
tccgtggtgaatgagcacccaacgcccgctggaaaacagggggctcggaaatgtggccttggggaaagaccccagggattaccggaaggagggatgtccgcggagaagagtccagtgggtggggacgcctggatccccagcagctctgcattcggggtggacttagctcttcgcgccctgaatcctcagagcccagcgcggcgatcgcgtcggggcaaagccggcgcgtttctggagcaccgagcgggtggggagcccttccagcctcccagcctctgccggcgagcagctttttcgatttcctgccggctctcggccccgcagtgcgttgtggccgcgcgctag

SEQ ID NO: 1989 - DNA, 507 bp, Homo sapiens
  SIMILAR (138)..(13): 471254mologous to Homo sapiens Human secreted protein sequence encoded by gene 26 SEQ ID NO:92,accession number Y91371,Smith-Waterman Score=71.
atgagggaagacgaggaggaggaggaggagtatagaatgaccactaggcttccagcttgggcagctgaggaaaaggtgacatgtcattcaccaagacaggaaaatggaggagctggtttgagacaaaaggaaccacaccaacaaaaacctcccaaccacacaagaaaaacaagtttaggcacaaaagctcttgtggacacacgatgtttagcagcatccctggactctacctactggaagctgccagtaacactctcccaacctccaccaagatgtaaaaatgaccatggagaacaaaattgtccctggttgagagtcactgttagaacatctttggaagagtacacaagaaatcaggtcaaagtagaacagaagcggcagatgagaaccgtggtgagggcaggagtgcggtcctcacagagcctagtcctgagccagccttggtatggtaacaagagtgaggcatttggaggcacattctgccgctttctaatcatggaaccctaa

SEQ ID NO: 1990 - DNA, 1362 bp, Homo sapiens
  SIMILAR (250)..(1296): 821254mologous to Homo sapiens calcium-independent phospholipase A2,accession number AB041261,Smith-Waterman Score= 1424.
ttggaagctcagctgatgcaggccggttggagtggacgtcattgccgggaacgagcgagtcgccgctgcagccctagtgactgcggcctgcatcccgattgtcttctcctccaaggtctacatgattacctgaagtttaataagtaagaccatgaattatggcatttcttaaatgaagcgttcaagaagtgagagaatgtcatagaaaataaatgatttttaagttatgtgctattaatctgactgtagatatatatatttacctccttagtaatgcaaagaaagtgtttgtgggaagcagagaagcaagcaacttgtatttcctggttctcacctaagcattactggaggataagccacatcagtctacaaagaggttttcatacaaacataataagatgtaaatggaccaaaagtgaagcacattcttgcagtaagcactgttactctccaagcaaccatggtttacatattgggattttgaaacttagcacttctgctcccaagggacttacaaaagtgaacatttgtatgtccccgtattaaaagtactttgaactctgtttcaaaggctgttttttggcaatcaaaatgaaaatgaatttcacggtttagctcaatttaagccaagttcccaatttttaaggaaaaagtatcgggatagtggcctggttaaaacagaaaaacatcaaacaagccatcaaatctctgaaaaaatatagtgacaaatcagcagaaaagagtccttttccagaagagaaaagtcacattatagacaaagaagaagatataggtaaacgcagtctttttcattacacaagttctataaccacaaaatttggagactccttctactttttatcaaatcatattaattcatatttcaaacgtaaggaaaaaatgtctcaacaaaagggaaatgaacatttccgggacaaatcagaacttgaagataaaaaggtagaagaggggaaattaagatctccagatcctggcatcctggcttataagccaggctcagaatctgtacatacggtggacaagcctacaagtccttctgcgatacctgatgttcttcaagtttcaactaaacaaagtattgctaactttctttctcgtcccacggaaggtgtacaagctttagtaggtggttatattggtggacttgtccccaaattaaagtatgattcaaagagtcagtcagaagaacaggaagagcctgctaaaactgatcaggctgtcagcaaagacagaaatgcagaggagaaaaagcgtttatctcttcagcgagaaaaggcaagttgttcagtgtgcttttcggttctattactttttgtcaaatttataagttttatttcctaa

SEQ ID NO: 1991 - DNA, 378 bp, Homo sapiens
  SIMILAR (175)..(354): 381254mologous to Mus musculus F-box protein FBX13,accession number AF176529,Smith-Waterman Score=83.
gttagcagagaacaaatgggaaaagttaaacgtattcgtgcagatgaaagcaacatgtacttggattgtcaaacaagggctaagctaactgcagtaaatatgtttggctgcaacattggtgattcctggggaggagtctccagtcgtgcaacaatgcagcattccccaggcagttgtaaagtcaggagtgcattaagaagcccctgtttgagtagcttttctgattcctggatgtgcattgtaagaaccaagagaagaaaacgctgtgtgagacggctttatgaattgggcatgatagccattgggcgatacagcatgacaatagagactgtggatgtcggtggtgtaaagaaatcacagaccaaggagccaccctga

SEQ ID NO: 1992 - DNA, 429 bp, Homo sapiens
  SIMILAR (2)..(379): 961254mologous to Mus musculus F-box protein FBX13,accession number AF176529,Smith-Waterman Score=634.
tcatatcactgaactggataatgaaaccgcgatggaaattgtcaagaggtgcaaaaatcttatctctctcaatctctgtctgaactggatcataaatgacaggtgtgtggaggtcattgcaaaggaaggacaaaacctgaaagagctatatttggtgtcctgtaaaatcacagattatgcactgatagccattgggcgatacagcatgacaatagagactgtggatgtcggatggtgtaaagaaatcacagaccaaggagccaccctgattgcacagagcagcaagtctatgagatatttggggctgatgagatgtgataaagtcaacgaagtgacggtggaacagctggtgcagcaatacccccacatcaccttcagcaccgtcctgcaggactgcaagaggaccttggagagagcctatcagatggg

SEQ ID NO: 1993 - DNA, 425 bp, Homo sapiens
  SIMILAR (18)..(134): 561254mologous to Homo sapiens calbindin D28K,accession number S46006,Smith-Waterman Score=117.
  misc_feature (1)...(425): n = a,t,c or g
cggaatccggcacgaggaaagatccacctacgacctctggtcctcagaccgaccaggccagggaacatctcaccaattttaaatcagccgcttccagatcccctggaactctggcccaaggctctctgagtgactccttcccagatcttctcggcttagcagctgaagactgacactgcccaatcgccttggaagcctacaggacaatcacagatgctctgggtaactctcacagtggaggggacgtgagtaaaaatgnnnnnnnnnnnnnnnnnnnnnnnnnnnnnnnnnnnnnnnnnnnnnnnnnnnnnnnnnnnnnnnnnnnnnnnnnnnnnnnnnnnnnnnnnnnnnnnnnnnnnnnnnnnnnnnnnnnnnnnnnnnnnnnnnnnnnnnnnnnnnnnnnnnnnnnnnnnnnnnnnnnnnnc

SEQ ID NO: 1994 - DNA, 487 bp, Homo sapiens
  SIMILAR (168)..(299): 551254mologous to Homo sapiens calbindin D28K,accession number S46006,Smith-Waterman Score=116.
atcgcccggctgattaattcggcacgagctgacacttaagtcagagcattctgtagctgtattttacagaactgtaattgcacagattgttcctcttacaagagaaatatccagagctctaagaaaacaactgatgaaaacgacatgcgtgacatttggtgctgaagacccaggtcagagagactcctttgggggaccagtccgctgtccttgccctcactctgtgaggagacccacctacgacctcgggtcctcagaccaaccagctcaaggaacatctcaccaatttcaaatcgggaccccactggaaaatggactgtccaactcacccggcagccactcccagagcccctggaactctggcccaaggctctctgactgactccttcccagatcttctcggctcagcagctgaagactgacactgcttgattgcctgggaagcctataggaccatcacagacactttggataactcttacagtgg

SEQ ID NO: 1995 - DNA, 648 bp, Homo sapiens
  SIMILAR (2)..(115): 841254mologous to Homo sapiens Human secreted protein, SEQ ID NO: 5576,accession number G01495,Smith-Waterman Score=166.
tggggattccgaggcgatcgggcagcatcagtcttcagtcgctaagccgagaagatctgggaaggagtcagagagccttgggccagagttccaggggctctgggagtggctgccaggtgagttgctaggaaccctccatgcaggctctgaacctggtggagctcttccttggtaagtgtctgagatgtctgctgttagtctgatgggcttccctttacaggtaacctgtacatgtagaagggagaggtctttggggacctggtcgagaaaaagtggctatgtgatgagtggcagggatgggaagtcagtgaagaagtcaaagctcttggacagaaagaagagtcaggtacgtgggcttatggaaccaagaggatgctcacctggagactgcactgccgcttctagattaccatgggtagcaagtacccaagaacaccctttccaaatggctctaagcccatctccagacctgtgcaggcttttcctaagatatatcttccaaaaaatggaccttgtcattggtgtgcatatacctgaacccaagcattggccaaggggcaacggtttgcaggtacatgttatcaccactctactatctgtttcaacgggtttgactatattagatcccacaaataagtgagatcatgc

SEQ ID NO: 1996 - DNA, 1626 bp, Homo sapiens
  SIMILAR (901)..(1623): 1001254mologous to Homo sapiens DM-20,accession number M17085,Smith-Waterman Score=1273.
atgatctgggaaggagtcagtcagagagcgttgggccagagttccagtggctctgggagtggctgccgggatgagccttttcagattctgagccctttcagaattctcagaaatcttgaggaagacactggacttccctggcacccagtacaggcagcaggctgccaccaagaaggctggcagtgccctcttgaggaatcccttggcagtgccaggagcctagctggactcaagaatattttgccaagggcacccagcagaaccaatggaagcagaatcacagaaataggtgggggcaaaatcacaggaaaagttccaggagaccataccttccttctccggagtcttccaacaggtgcccctcttattatatgccagccagttgttttaaaggccatccatgggaggacaccggcctctagatgtctctgcagcaaagcgaaattccaggcaagccttagggaaaaaaggaaaaacaaagaaaatgaaacaattggcagtgaaaggcagaaagagaagatggagcccttagagaagggagtatccctgagtaggagaagaggacaaagatactcagagagaaaaagtaaaagaccgaagaaggaggctggagagaccaggatccttccagctgaacaaagtcagccacaaagcagactagccagccggctacaattggagtcagagtcccaaagacatggcaaaacattgtctgcaagcctgttgtcgtctgagaacagtggctgttaccctggtaaccagactgtgatgcctccatccaaaagtggctgtttgccaagcagtgtagttttggctggcttgcataccagtcacggctgctctagcatttcggccttgtcaactactgcaggccctgatcaaggaggcctctgttcatggggcttgttagagtgctgtgcaagatgtctggtaggggccccctttgcttccctggtggccactggattgtgtttctttggggtggcactgttctgtggctgtggacatgaagccctcactggcacagaaaagctaattgagacctatttctccaaaaactaccaagactatgagtatctcatcaatgtgatccatgccttccagtatgtcatctatggaactgcctctttcttcttcctttatggggccctcctgctggctgagggcttctacaccaccggcgcagtcaggcagatctttggcgactacaagaccaccatctgcggcaagggcctgagcgcaacgtttgtgggcatcacctatgccctgaccgttgtgtggctcctggtgtttgcctgctctgctgtgcctgtgtacatttacttcaacacctggaccacctgccagtctattgccttccccagcaagacctctgccagtataggcagtctctgtgctgatgccagaatgtatggtgttctcccatggaatgctttccctggcaaggtttgtggctccaaccttctgtccatctgcaaaacagctgagttccaaatgaccttccacctgtttattgctgcatttgtgggggctgcagctacactggtttccctgctcaccttcatgattgctgccacttacaactttgccgtccttaaactcatgggccgaggcaccaagttctga

SEQ ID NO: 1997 - DNA, 882 bp, Homo sapiens
  SIMILAR (71)..(130): 901254mologous to Homo sapiens Human secreted protein, SEQ ID NO: 5576,accession number G01495,Smith-Waterman Score=108.
atggtctatggggcttccgaggcgatcgggctgtgtcagtcttcagccgctaagccaagaagatctgggaaggagtcagtcagagagccttgggccagagttccaggggctctgggagtggctgccagaacagctccctcggtccttcattcaagccttgggcagcctttcttactttcctcgaaccctaatgaatctctcttggcccctctgcctcagaaaatggggctatttgttctgtatttacccttccaagtgggactcccttccacggttccatggcctcttatccttccttcaaaggtccctgaagaagagggccagcttcagagtactcttccttgtggtataaagctacttcctgtgttcacttcccaccatgcgtttttaggcgtgttctgcaatcagtgggtctcagatgtttttctggctcttttcttgatgaagctccttggtgcccaggtgagcctcctttcatcagtagatttcctctgtttcacacccacagctgggaatcagccttgccacttccaaattgtaggtgacttcaaggatcgtggccaagatagtcccctgaaccctacttacccgataaagctgaaagattgcctggagccagggcacggggctgttgtatgtcaggctcaaggtgtgtcacagtgtgtcactgatgtgattggacggctggaagtgaagctgggtctggtcaggggacaggatgagtttggttttgaaactagtgcatttgagatgctgacgggccgtccccatgggaatgtccagctggcagcagagaaaatgagccggatggtaggagcagtggattcgagaacagatcctaaggagctcctgtgtttaaggccaggggaaggagagggatga

SEQ ID NO: 1998 - DNA, 513 bp, Homo sapiens
  SIMILAR (49)..(174): 761254mologous to Homo sapiens Human secreted protein, SEQ ID NO: 5576,accession number G01495,Smith-Waterman Score=162.
atggacttaccctccactgtgagagttacccgaagctcggcgtctgtgatggtccaggggggttccgaggcaatcaggcagcgtcagtcttcagccgctaagccaagaagatctgggaaggagtcaaagagccttgggccagagttccaggggctctgggagtggctgccagaaatttatttctcacagttccggaggctgggaaatccaaaatcaaggcaccagcagattcaatgtctgatgggggcctgctttgtggtaacagaaagactctccttccaggattctctagacctggcagaaccaagacattcctatcctctccaggtgaaaaggctagatctcccaacagttctagaaactgaaacagatctagaaaagctagatccttttacaacaatcccttctccagtggaaactctccaatgcctttttgtctcactcagaataaaatccagagtccctatcatggacttgaaggcccttagtgatctgacccctcttgatccctga

SEQ ID NO: 1999 - DNA, 375 bp, Homo sapiens
  SIMILAR (112)..(171): 901254mologous to Homo sapiens Human secreted protein, SEQ ID NO: 5576,accession number G01495,Smith-Waterman Score=108.
gctgtgatggcttggagaaacagtgtaaaccggcaggggaaacaagagcaggggcttccgaggcgatcgggcagtgtcagtcttcagctgctaagccgagaagatctgggaaggagtcagtcagagagccttgggccagagttccaggggctctggaagtggctgccagatgaatcctctgtctggccggccccaggttgtctgcttctttactgcacacatgttgacaaagaaaagggaagaaggagcctccatgttgaacatgccttgcttccagtgaaaggaagagatgatccaagcaaatttaggaccaatagcagactcttcacactgcctggggatagagggaccaccctgggctcctcttactcctgg

SEQ ID NO: 2000 - DNA, 410 bp, Homo sapiens; identical to SEQ ID NO: 446
  SIMILAR (142)..(234): 671254mologous to Homo sapiens Human secreted protein, SEQ ID NO: 5576,accession number G01495,Smith-Waterman Score=98.

SEQ ID NO: 2001 - DNA, 864 bp, Homo sapiens; identical to SEQ ID NO: 1393
  SIMILAR (151)..(783): 791254mologous to Cloning vector pZC320 SopA,accession number U26464,Smith-Waterman Score=871.

SEQ ID NO: 2002 - DNA, 928 bp, Homo sapiens
  SIMILAR (704)..(925): 901254mologous to Homo sapiens RCK,accession number D17532,Smith-Waterman Score=342.
gcctggtggaaccgccatcaataaatcaagtgtgatcagggtgaggaacaggaaagaaggaaatctggggaaatggggtgaatgtcaggtggatcggagagatacagtcatgggggtcagggggcttctgaggcgatctggtagtgtcagtcttcagccgctaagccgagaagatctgggaaggagtcagtcagagagccttgggccagagttccaggggctctgggagtggctgccagaatgcataattgaaacagatatacttagcagcgtggagaatttccatattggtttcctgatatgtggtatgagggctcttatgatgggaaaggctaactggaagccattagagctgcctctacctaagaaaatagcaaataacgaccaatattgcatacttacatggctggcagagatcagtatcaccatcaaaaactttaaagatttacacaaaaacttcatgaagatagctaaacagacaaacaaactctccctaactgaagtaaaaactaacatacaaattgatgctaaagtcatgaaagaaaaagagatgacctatgcaaaggaaatcgatgctcaagatttctgtaagtctgtcagtgtacagaagttcatgaattcccacttgcagaaaccctatgagattaacctgatggaggaactaactctaaagggagtaacccagtactatgcatgtataactgagcttcaaaaactcgcagagacctatctccatcgtattggaagatcaggtcgctttggtcatcctggcttagccatcaacttgatcacatatgatgatcacttcaacctgaaaagtattgaggagcagctgggaacagaaattaaacctattccaagcaatattgacaagagcctgtgtggggcagaataccacagcgagcctgtagaagatgagaagccttaa

SEQ ID NO: 2003 - DNA, 1026 bp, Homo sapiens
  SIMILAR (851)..(931): 441254mologous to Caenorhabditis elegans Similar to cuticular collagen,accession number AF000198,Smith-Waterman Score=62.
atgacctcaggcaagactgctctccttaactgggcaatctccaacagggactttgctgcaccaccaatagctgggcagtatttactgacagctaactgttacggagcacttctagcactaggtactgctctgcgctcttgtaccgtctcagacaaggccccacaggaactccttgacacaggtattgttatcaccattttgcagaaatttctcctggggaactggctaaatgcagagtcctggttccaccggagagaatcagattctataggtccaggatggggcaggctgctcagtgctggggacccagccatgaacaaggccagcacacgcagcccagagaagcagacagatgctaaacaagtaattacaagtgtgatggatgccacaaaggaaaagcagcaagggccctgggaagagacagtgggggatgccaacatctcccatttgtacaagcgaccaattgtcccagcggcgcccaagttccctgaagacctcccagcagtcactctctcacagagacacccgctctcaaaggggccagcagtctggctgcttccggccacgaccacaaccaaggaggctggaccagcatggtggtcccagcttcacaggaggccccgggacttccgagccctgctgggaacttgcagccgggtgcttggtgaggagcggctggagcctggagctgaaggcctgtttgctgggttacaggaagatctgagctgtacagctggtgctggcgaggaaagcagcagtggcagcatgaaggctggtgtggccaactgctacccagagggcatggtcccaatcggaagctgcagcagcaaagacagtggaaagcagccgggggagtccaacgaggacacctgttccttcaggaaacccaagccaagccaggccctcgggtggcggagcctgagcccctggatccagctgccagtgccctcatggacagagctgcatcctgcttcctgtttcctgcttcctgctccttctttcactctatcagtagtttctgcctga

SEQ ID NO: 2004 - DNA, 1008 bp, Homo sapiens
  SIMILAR (64)..(195): 811254mologous to Homo sapiens Human secreted protein, SEQ ID NO: 5576,accession number G01495,Smith-Waterman Score=176.
atgggggctgtctgtgaagccttgcggcagtacagcctaggtaatttgctgagcctagtgggtgtcaggggggcttccgaggcgattgggcagcgtcagtcttcagccgctaagccaagaagatctgggaaggagtctgagagccttgggccagagttccaggggctctgggagtggctgccggtccatgactggcgccagagttttgggtccacggataaaacgtgtctcctttgtctctaccagaaaatgaaaggaattgaaattaagagaaggaagagattgaagagtggaaaggagaaagtggttgagggacagtgggactgtccagttacagggaacacacttcagagtttctaccaattctacattatgcggctgaagactgacactgcccgatcacctcaaaaggctcctggaccatcacagatgctttgggtaactctcacagtgcaggccactttacttccaaaggaagctggagtcattcactgcaaaggccatcaaaaggcatcagatcccatcactcaggacaacgcttatcctgataaggtagctaaaaaagcagccatcaaaagggctcagatcccatcgctcaggacaatgcttatgctgataagtgagatctcaaccttctcaatcagtccctctgactcccttttcaagctcatggcactgcgattcatcataagaaccaacagggaccaactactgcaggatactgcagatcttcttaaacaggataatggtagtggacagacgccagctcttcagagaatggaatctctaagaaggaaggggcaacaaaggcgatggcctttgttaactaaaaaccagattgacagaaaaatttctaagagaatgtttgacaatgtcaaatttgattccaaccctcatgatgactttgaggggctcaagacatcagtggaggaagcaactgcagatgcagtggaaacagcaagagatctagaattagaagtggaagctgaagatgctgtaatctcatga

SEQ ID NO: 2005 - DNA, 588 bp, Homo sapiens
  SIMILAR (124)..(195): 791254mologous to Homo sapiens Human secreted protein, SEQ ID NO: 5576,accession number G01495,Smith-Waterman Score=86.
atgggggagcagcaaagtcactttgaaaaggagcatgcagaatggaaagataaaacaatcgctacagaaaatggtaacatgatgggaaaactggtgaaacaaggaaagggaaaacaaggacagggggcttccaaggcaatcgggcagtgtcagtcttcagccgctaagccaagaagatctgggaaggagtcagtcagagagccttgggccagagttccaggggctctgggagtggctgccagcattacagctgtggttaactgtcaacaaccctcggactcagtttcatgtctgcagagaagcaccatcgcccatgatcctacccatcctccacacacaaagccacaaaggaaagcagccagagttctgaacagccaacaggcctaccagtccttgtactctatgcagctacttcccctgctggaaatgagcagctgccttcttctccctaagctcatatatttccaacttggagctgaaaaagtcagcaacctggaaatgtcaataaatgcaggggaaaaaaaagccctaagagagtcctgctctctcctgccaaaggaccagaaaagggtagccaagcaagggtaa

SEQ ID NO: 2006 - DNA, 495 bp, Homo sapiens
  SIMILAR (109)..(180): 751254mologous to Homo sapiens Human secreted protein, SEQ ID NO: 5576,accession number G01495,Smith-Waterman Score=79.
atggtatggagagatagtgggcgatgtttctcagggctgcttcgagcgggattaggggcggcgcgggaacctagagtgggagagattaaactgaaggaagattttgtgggggcttctgaggcgatcggcaagcgtcagtcttcagctgctaagctgagaagatctgggaaggagtcagtcagagcgccttgggccagagttccaggggctctgggagtggctgccaggaatccttctgcaggaatctggttcagacaggcgctctacccagggtacacagggctgctgctgtgtggtgcagggccagtgtcaatatcagcagtggtgccacgtggcagtgaggagcaggagcgagctgacccatccagctttctacagatactggatcttctgttgatagcacagatcacaggtattaaaagtatcagatattcgagcagatatagggagcatagcggacgttgtgttcaggtgccagaatttgccgatttttaa

SEQ ID NO: 2007 - DNA, 1851 bp, Homo sapiens
  SIMILAR (274)..(1779): 931254mologous to Homo sapiens putative p150,accession number U93572,Smith-Waterman Score=2471.
atgcagggggcttccgaggcgatcgggcagtgtcagtcttcagccgctaagccgagaagatctgggaaggagttggtcagagagccttgggccagagttccaggggctctgggagtggctgccagactaaaccaggaagaagttgaatctctgaagagaccaataacaggatcggaaattgtggcaataatcaatagcttaccaaccaaaaggagtccaggaccagatggattcacagccgaattctaccagaggtacaaggaggagctgctcaaaataataagagctacctatgacaaacccacagccaatatcatactgaatgggcaaaaactggaagcattccctttgaaaactggcacaagacagggatgccctctctcaccactcctatgcaacatagtgttggaagttctggccagggcaattaggcaggagaaggaaataaagggtattcaattaggaaaagaggaagtcaaattgtccctgtttgcagatgacatgattgtatatctagaaaaccccattgtctcagcccaaaatctccttaagctgacaagcaacttcagcaaagtctcaggatacaaaatcaatgtacaaaaatcacaagcattcttatacaccaataacaggcaaacagagagccaaatcatgagtgaattcccattcacaattgcttcaaagagaataaaatacctaggaatccaacttacaagggatgtgaaggacctcttcaaggaaaactacaaaccactgctcaatgatataaaagaggatacaaagaaatggaagaacattccatgctcatgggtaggaagaatcaatatcgtgaaaatggccatactgcccaaggtaatttatagattcaatgccatccccatcaagctaccaatgactttcttcacagaattggaaaaaactactttaaagttcacatggaaccaaaaaagagcccacattgccaagtcaatcctaagccaaaagaacaaagctggaggcatcacgctacctgacttcaaactatactacaaggctacagtaaccaaaacagcatggtactggtaccaaaacagagatatagaccaatggaacagaacagagacctcagaaataatgccacatatctacaactatctgatctttgacaaacctgacaaaaacaggaaatgggggaaggattccctatttaataaatggtgctgggaaaactggctagccatacgtagaaagctgaaactggatcccttccttacaccttacacaaaaattaattcgagatggattaaagacttacatgttagacctaaaaccataaaaaccctagaagaaaacctaggcaataccattcaggacatagacatgggcaaggacttcatgtctaaaacactaaaagcaacagcaacaaaagccaaaattgacaaatgggatctaattaaactaaagagcttctgcacagcaaaagaaactaccatcagagtgaacaggcaacctacagaatgggagaaaattttcacaacctactcatctgacaaagggctaatatccagaatctacaaggaactcaaacaaatttacaagaagaaaacaaacaaccccatcaaaaagtgggtgaaggatatgaacagacacttctcaaaagaagacatttatgtagccaaaagacacatgaaaaaatgctcatcatcactggccatcagagaaatgcaaatcaaaaccacaatgagataccatctcacaccagttagaatggagatcattaaaaagtcaggaaacaacagacgtgaattgaacaatgagaacacatggacacaggaaggggaacatcacactctggggactgctgtggggtag

SEQ ID NO: 2008 - DNA, 710 bp, Homo sapiens
  SIMILAR (231)..(710): 981254mologous to Homo sapiens Amino acid sequence of a human tissue repair protein,accession number B07448,Smith-Waterman Score =811.
gtctcctgttatggctggaggtctctttgctgtggatcggaaatggttttgggaattgggtggctatgatccaggtttagaaatctggggaggagaacagtatgaaatctcttttaagggggcttctgaggcaatcaggcagcgtcagtcttcagccgctaagctgagaagatctgggaaggagtcagtcagagagccttgggccagagttccaggggctctgggagtggctgccagtggaaagagtggaacgagaaaacctttcagactattgtgttctgggccagcgtccaatgcatttaccaaatatgaaccagctggcatccctggggaaaaccaacgaacagtctcctcacagccaaattcaccacagtactccaatccgaaaccaagtgcccgcattacagcccatcatgagccctggtcttctttctccccagcttagtccacaacttgtaaggcaacaaatagccatggcccatctgataaaccaacagattgccgttagccggctcctggctcaccagcatcctcaagccatcaaccagcagttcctgaaccatccacccatccccagagcagttaagccagagccaaccaactcttccgtggaagtctctccagatatctaccagcaagtcagagatgagctgaagagggccagtgtgtcccaagctgtctttgcaagagtggcattcaaccgcacacag

SEQ ID NO: 2009 - DNA, 525 bp, Homo sapiens
  SIMILAR (316)..(447): 511254mologous to Human T-cell lymphotropic virus type 1 Gag,accession number S74562,Smith-Waterman Score=146.
atgcccatcctagcctcctggccccaccctcctggtcctttcctgctgctgactctcctgctaggactcacagggcctcccatgtggaccatgctaaaaaacaatattgcagaaaagaacgatattcacagcagggactctcacgccagccagtctggaatggcctcgtacatgctccaccaccttgaagcctctgcattttctcttcagcatctgcgctgcagcagcagtggcagcatgaaggctggtgtggccaactgctacccagagggcatggtcccaatcggaagctgcagcagcaaagacagtggatcttgctttaagtgccagaaattctgccactgggccaaggaatgcctgcagcccaggattcctcctaagctgtgccccatctgtgtgggacttcactggaaatcggactgtccaactcaccaggcagccactcccagagcccctggaactctggcccaaggctctctgactgactccttcccagatcttcttggcttagtgactgaagactga

SEQ ID NO: 2010 - DNA, 2214 bp, Homo sapiens
  SIMILAR (1015)..(2184): 1001254mologous to Homo sapiens bG153O3.1 (similar to C.elegans hemicentin precursor),accession number AL133515,Smith- Waterman Score=2035.
atgattccacttacatgtgccccgccccttgcctgcggagagcccgcgcctgcgcgctgtgtcctgcgcgctccttccctcgcgcgcgctctccgtggaagagcaggggcagcgtgggaggcgccaagggagcgcgaacctgaggaggaagaaacggggctagcgcgcaggcccagaacggtccgagccgcggcagtcggcgacgcctcagagcggaagagggaagtgaatcaggcgccgggtagaggcagcgccaagaagaggcctttgccgctggtcgggattgggatgtcgaagaacacagtgtcgtcggcccgcttccggaaggtggacgtggatgaatatgacgagaacaagttcgtggacgaagaagatgggggcgacggccaggccgggcccgacgagggcgagattcctcaggttgcacccgagtgcctgcctgcctcgggaactggtcccgccggccgcgccctcgcggcgctggggaaggcggccccggctggaaacatgacagctgccctacaggcagctctgaagaacccccctatcaacaccaagagtcaggcagtgaaggaccgggcaggcagcattgtcttgaaggtgctcatctcttttaaagctaatgatatagaaaaggcagttcaatctctggacaagaatggtgtggatctcctaatgaagtatatttataaaggatttgagagcccgtctgacaatagcagtgctatgttactgcaatggcatgaaaagggggcttctgaggcgatcgggcagtatcagtcttcagccgctaagccgagaagatctgggaaggagtcagtcagagagccttgggccagagttccaggggctctgggagtggctgccagaaaataccagaaaatgaaaggaattgaaattaagagaagggagagattgaagtgtggcgccaagattgaaaggagaaagaggttgaaggatagggaggttggagaagagagtaaaaagaggccacttactggatttgaaattgaaccacccaaagtcactgtgatgcccaagaatcagtctttcacaggagggtctgaggtctccatcatgtgttctgcaacaggttatcccaaaccaaagattgcctggaccgttaacgatatgtttatcgtgggttcacacaggtataggatgacctcagatggtaccttatttatcaaaaatgcagctcccaaagatgcagggatctatggttgcctagcaaaagcccctaagttgatggtagttcagagtgagctcttggttgcccttggggatataaccgttatggaatgcaaaacctctggtattcctccacctcaagttaaatggttcaaaggagatcttgagttgaggccctcaacattcctcattattgaccctctcttgggacttttgaagattcaagaaacacaagatctggatgctggcgattatacctgtgtagccatcaatgaggctggaagagcaactggcaagataactctggatgttggctcacctccagttttcatacaagaacctgctgatgtgtctatggaaattggctcaaatgtgacattaccttgttatgttcagggttatccagaaccaacaatcaaatggcgaagattagacaacatgccaattttctcaagacctttttcagttagttccatcagccaactaagaacaggagctctctttattttaaacttatgggcaagtgataaaggaacctatatttgtgaagctgaaaaccagtttggaaagatccagtcagagacaacagtaacagtgaccggacttgttgctccacttattggaatcagcccttcagtggccaatgttattgaaggacagcagcttactttgccctgtactctgttagctggaaatcccattccagaacgtcggtggattaagaattcagctatgttgctccaaaatccttacatcactgtgcgcagtgatgggagcctccatattgaaagagttcagcttcaggatggtggtgaatatacttgtgtggccagtaacgttgctgggaccaataacaaaactacctctgtggttgtgcatgttctgccaaccattcagcatgggcagcagatactcagtacaattgaaggcattccagtaactttaccatgcaaagcaagtggaaatcccaaaccgtctgtcatctggtccaaggtaaatgatacatctagttatatttcctga

SEQ ID NO: 2011 - DNA, 544 bp, Homo sapiens
  SIMILAR (118)..(339): 1001254mologous to synthetic construct lac repressor,accession number A14595,Smith-Waterman Score=354.
atgcccgggcaccaaaaagcacctctgagacccgcagtttccaaaaaggtagtcaatgttggagaaaggcaaaatcaagtaattattgaaaccggaggggattttgccgatttcggaaccaccatcaaacaggattttcgcctgctggggcaaaccagcgtggaccgcttgctgcaactctctcagggccaggcggtgaagggcaatcagctgttgcccgtctcactggtgaaaagaaaaaccaccctggcgcccaatacgcaaaccgcctctccccgcgcgttggccgattcattaatgcagctggcacgacaggtttcccgactggaaagcgggcaggggcttccgaggcgatcgggcagtgtcagtcttcagccactaagccgagaagatctgagaaggagtcagtcagagagctttgggccagagttccaggggctctgggagtggctgccagccaatactgtgtggatgttgagaaagtaggaaatatttctgaagaccatattactaaaacagtcatcactgggaacttttgggaagg

SEQ ID NO: 2012 - DNA, 774 bp, Homo sapiens
  SIMILAR (2)..(88): 721254mologous to Homo sapiens putative p150,accession number U93564,Smith-Waterman Score=107.
atggatgtagctggaagccgttatcctcagcaaactaatgcaggaacagaaaaccaaacactgtgtattctcacttataagtgggagcttaatgatgaaaacacatggacccctgagggggaacaacacacaatggggccttttgaggggtgggggcttccgaggcgatcgggcagtgtcagtcttcagccgctaagccgagaagatctgggaaggagtcagtcagagagccttgggccagagttccaggggctctgggagtggctgccagatgcagaaaaggccttcgacaaaattcaacagcccttcacgctgaaaactctcaataaactaggtattgatggatatctcaaaataataagagctatttctgacaaacccacagccaatatcatactgaatggaaaaaaactggacgcattccctttgaaaacaggcacaagacaaggatgccctctctcaccactcctattcaacatagtgttggaagttatggccaggacaatcaggcaagagaaagaaataaagggtattcaaataggaagtgagaaagtcaaattgtctctgtttgtagatgacatgattgtatatttagaaaaccccatcgcctcagcccaaaatctccttaagctgataattaacttcagcaaagtctcaggaaacaaaatcaatgtgcaaaaatcacaagcattcctatacacaaataacagacaaacagagagccaaatcatgggtgaactcccattcacaattgctacaaagagaataaaataa

SEQ ID NO: 2013 - DNA, 753 bp, Homo sapiens
  SIMILAR (351)..(473): 951254mologous to Homo sapiens calbindin D28K,accession number S46006,Smith-Waterman Score=213.
atgggggctgtctgtgaagccttgcagcagtacagcccaggtaatttgctgagcctaactggtgtcaggggggcttccgaggcgatcaggcagtgtcagtcttcagccgctaagctgagaagatctgggaaggagtcagtcagagagccttgggccagagttccaggggctctgggagtggctgccagccttggctgtgatgagaggaaagagcatgagcacatgaatctggccatcagagcctgcctgcaaccaggtgaaataaacagccatgttgctcacacaaagcctgtttggtggtctcttcacatggacgtgcatgaaatttggtgctgtgactcggatcgggggacctcccttgggagatcaatcccctgtcctcctgttctttgctccgtgagaaagatccacctacgacctcaggtcctccgaccgaccagcccaagaaacatctcaccaatttcaaatccggaccccactggaaatcggactgtccaactcacctggcagccactcccagagcccctggaactctggcccaaggctctctgactgactccttcccagattttctcagcttagcagctgaagactgacgctgccggatcgcctcggaagcccctagatctgatgatttaataagagggtatttttccttttgctcagcacgtctcctttctgctgccatgcgtagagggatgtgtttgctttcccttctgtcattactgtaagtttcctgaggcttctccaacc

SEQ ID NO: 2014 - DNA, 565 bp, Homo sapiens
  SIMILAR (359)..(559): 741254mologous to Homo sapiens neutral protease large subunit,accession number M27826,Smith-Waterman Score=233.
tgcctccactgtgagagaaccccagccacatctccagcacacaagaacttcaaaatgcttaaaccgcaggggcaaggcattccttcaggacctcctcccccaggatcttgcttcaagtgctagaaatctggccactgggccaaggaatgcctgcagcccaggattcctcctaggccgtgtcccatctgtgtgggaccccactgaaaggcggactgttcaactcacctggcagccactcccagagcccctggaactctggcccaaggctctctgtctgactccttcccagatcttcttggcttagcggctgaagactgatgctgcccgatcgcctcggaagccccctacaagaccattcacggacgccgagcttcgggtaactctcacagtggaaggtaagcccgtccccttcttaatcaatacagaggctacacactccgcattaccttcttttcaagggcctgtttcccttgcctccataactgttgggggtattgacggccaggcttctaaacctcttaaaaactccccaactctggggctacttagacaaaactctttaaag

SEQ ID NO: 2015 - DNA, 361 bp, Homo sapiens; identical to SEQ ID NO: 1462
  SIMILAR (3)..(170): 891254mologous to Homo sapiens Polypeptide identified by the signal sequence trap method,accession number Y02377,Smith-Waterman Score=255.

SEQ ID NO: 2016 - DNA, 1071 bp, Homo sapiens
  SIMILAR (382)..(798): 951254mologous to Homo sapiens Polypeptide identified by the signal sequence trap method,accession number Y02377,Smith-Waterman Score=695.
atggccatcggcaacaaggggtcgagatcaggaggtcgctcgccgcccagttgcgtcgctcaccaccggccggccaccagaaccctcggcttccgatccagaaaccgtattttgttcttgcacccagaccgcaagaagcctcagccctcggggacagaccgaaggccagggctgtacctggctcacaaccaggcgccaagcggcacgggactctccttctgcactcgcagcgcgtctctgcagttcccagcgactctcttgggggtcggacctggtcactgcggcacttatctaggtggcggggcccgtggacggcggcgacctggatcctgtggcctgcttcctgagctgggccggcgggtggggctggagctgagtcccaagttaaacttgaagtttgaaatcgaggttctctgcaagaaccttgcattagacatcaatgagctaaaacctggaaacctcctaaaggataaagatcgcctgaagaatttagatgagcaactctctgctccaaagaaagatgtcaagcagccagaagaactccctcccatcacaaccacaacaacttctactacaccagctaccaacagcacttgtacagccacggttccaccacagccacagtacagctaccacgacatcaatgtctattcccttgcgggcttggtaccacacattactctaaatccaacagcccatccacagttgaagcagtgtgtgcgtcaggcaattgaacgggctgtccaggagctggtccatcctgtggtggatcgatcaattaagattgccatgactacttattttccccaagaacgctgtcccgtggtgctcgcaccacttttataccctgaaaaacgggacattctaatggacaggatcctgcctgattccggaggggtagctaaaaccatgatggagagctctttggctgatttcatgcaagaagtaggctatggcttttgtgcaagctggtgggtgctggtcagctacggagtcctcttggtcaccctgggagccttcatcttcggccagaccacagccaacgccatctttgtggatctcttggcataa

SEQ ID NO: 2017 - DNA, 1326 bp, Homo sapiens
  SIMILAR (799)..(1323): 921254mologous to Homo sapiens Polypeptide identified by the signal sequence trap method,accession number Y02377,Smith-Waterman Score=832.
atgcagcgagacgacagccatctgcatgcaaggagagaggcctcagagaaactagccctgcctgatgaagttgaattaacagcacaaagaagaggccgaagtgggcacaatcacgacgacaggagaatcgaaaatacagagaaacccaagtataagaagaaaataaaaaaaataaaccagcatatagtggaaagacaccgaagatacacagataaaccagaagacagacgcagacaccggcaacaccgacaagaaaacaagaatagccgaaatgaacccgagagaaaacaagaaacaacagacaacactaaacaacaaaaacaggccaggataaagatcgcctcgaagaatttagcatgcagcaactctctggctccaaacgaaagatgtcaacgcagcccagaacagaactccactcccaatcgacacaccacaacaacttctactacaccagctaccaacaccacttgtacagccacggttccaccacagccacagtacagctaccacgacatcaatgtctattcccttgcgggcttggcaccacacattactctgaatccaacagcccatccacagttgaagcagtgtgtgcgtcaggcaattgaacgggctgtccaggagctggtccatcctgtggtggatcgatcaattaagattgccatgactacttgtgagcaaatagtcaggaaggattttgccctggattcggaggaatctcgaatgcgaatagcagctcatcacatgatgcgtaacttgacagctggaatggctatgattacatgcagggaacctttgctcatgagcatatctaccaacttaaaaaacagttttgcctcagcccttcgtctgatggaagtagtgcgatccaactatgaagcaatgattgatcgtgctcatggaggcccaaactttatgatgcattctgggatctctcaagcctcagagtatgatgaccctccaggcctgagggagaaggcagagtatcttctgagggaatgggtgaatctctaccattcagcagcagctggccgcgacagtaccaaagctttctctgcatttgttggacagatgcaccagcaaggaatactgaagaccgatgatctcataacaaggttctttcgtctgtgtactgaaatgtgtgttgaaatcagttaccgtgctcaggctgagcagcagcacaatcctgctgccaatcccaccatgatccgagccaagtgctatcacaacctggatgcctttgttcgactcattgcactgctcgtgaaacactcaggggaggccaccaacactgtcacaaagattaatctgctgaacaaggtctga

SEQ ID NO: 2018 - DNA, 6291 bp, Homo sapiens
  SIMILAR (904)..(2121): 841254mologous to Homo sapiens Polypeptide identified by the signal sequence trap method,accession number Y02377,Smith-Waterman Score=1716.
  misc_feature (1)...(6291): n = a,t,c or g
atggtcgtactggccaacggccccaagctgaactgttttggcaatttgactgtgctgtccccagtccaagactgcctcagcacagaaagcacccagcagaacactggccctgaggatgcttccagggaggccagaatgagggcggtggtggaaggcctgtggctgcgctaccagggggtgccagtggaggaggacgtggggcgggagcggcggcggcgagtgctgcagacgctggtctggttcctgctcaccctgctgctggcgctcttcatccctgacatcggcaaggtgatctcagtcattggaggcctggccgcctgcttcatcttcgtcttcccagggctgtgcctcattcaagccaaactctctgagatggaagaggtcaaaccagccaggtgcctaattgaatgtcgagatgaatataaatataatgtggaggctgtggagctgctaattcgcaatcatttggttaatatgcagcagtatgatcttcacctagcgcagtcaatggagaatggcttaaactacatggctgtggcatttgctatgcagttagtaaaaatcctgctggtggatgaaaggagtgttgctcatgttactgaggcagatctgttccacaccattgaaaccctcatgaggattaatgctcattccagaggcaatgctccagaaggattgccccagctgatggaagtagtgcgatccaactatgaagcaatgattgatcgtgctcatggaggcccaaactttatgatgcattctgggatctctcaagcctcagagtatgatgaccctccaggcctgagggagaaggcagagtatcttctgagggaatgggtgaatctctaccattcagcagcagctggccgcgacagtaccaaagctttctctgcatttgttggacaggttgaagagctaaaggaaacggtgaaagaagaatttatgccttgggtttcacagtatctggttatgaagagagtcagtattgagccaaactttcatagcctgtattcaaacttccttgacacgctgaagaatcctgaatttaacaagatggttctgaatgagacctacagaaacattaaagtgctcctgacctctgataaagctgcagccaatttctcagatcgttctttgctgaagaacttgggacattggctaggaatgatcacattagctaaaaacaaacccatcttacacactgacttggatgtgaaatcattgctgctagaggcttatgttaaaggacaacaagaattgctctatgtagtgccctttgttgccaaagtcttagaatctagcattcgtagtgtggtttttaggccaccaaacccttggacaatggcaattatgaatgtattagctgagctacatcaggagcatgacttaaagttaaacttgaagtttgaaatcgaggttctctgcaagaaccttgcattagacatcaatgagctaaaacctggaaacctcctaaaggataaagatcgcctgaagaatttagatgagcaactctctgctccaaagaaagatgtcaagcagccagaagaactccctcccatcacaaccacaacaacttctactacaccagctaccaacaccacttgtacagccacggttccaccacagccacagtacagctaccacgacatcaatgtctattcccttgcgggcttggcaccacacattactctaaatccaacaattcccttgtttcaggcccatccacagttgaagcagtgtgtgcgtcaggcaattgaacgggctgtccaggagctggtccatcctgtggtggatcgatcaattaagattgccatgactacttgtgagcaaatagtcaggaaggattttgccctggattcggaggaatctcgaatgcgaatagcaagcttatcacatgatgcgtaacttgacagcttggaatggctatgattacatgccagggaacctttgctcatgagcatatctaccaactttaaaaaaacagtttttgccctcagcccttcgtactgcttccccacaacaaagagaaatgatggatcaggcagctgctcaattagctcaggacaattgtgagttggcttgctgttttattcagaagactgcagtagaaaaagcaggccctgagatggacaagagattagcaactgaatttgagctgagaaaacatgctaggcaagaaggacgcagatactgtgatcctgttgttttaacatatcaagctgaacggatgccagagcaaatcaggctgaaagttggtggtgtggacccaaagcagttggctgtttacgaagagtttgcacgcaatgttcctggcttcttacctacaaatgacttaagtcagcccacgggatttttagcccagcccatgaagcaagcttgggcaacagatgatgtagctcagatttatgataagtgtattacagaactggagcaacatctacatgccatcccaccaactttggccatgaaccctcaagctcaggctcttcgaagtctcttggaggttgtagttttatctcgaaactctcgggatgccatagctgctcttggattgctccaaaaggctgtagagggcttactagatgccacaagtggtgctgatgctgaccttctgctgcgctacagggaatgccacctcttggtcctaaaagctctgcaggatggccgggcatatgggtctccatggtgcaacaaacagatcacaaggtgcctaattgaatgtcgagatgaatataaatataatgtggaggctgtggagctgctaattcgcaatcatttggttaatatgcagcagtatgatcttcacctagcgcagtcaatggagaatggcttaaactacatggctgtggcatttgctatgcagttagtaaaaatcctgctggtggatgaaaggagtgttgctcatgttactgaggcagatctgttccacaccattgaaaccctcatgaggattaatgctcattccagaggcaatgctccagaaggattgccccagcttgattggaagtagtgcggatccaactatgaagcaatgatttgatcgtgctcatggaggcccaaactttatgatgcattctgggatctctcaagcctcagagtatgatgaccctccaggcctgagggagaaggcagagtatcttctgagggaatgggtgaatctctaccattcagcagcagctggccgcgacagtaccaaagctttctctgcatttgttggacagatgcaccagcaaggaatactgaagaccgatgatctcataacaaggttctttccgtctgtgtacttgaaatgtgtgttgaaatcagttaccgtgctcaggctgagcagcaggacaatcctgctggcaatcccaacatgatccgagccaagtgctatcacaacctggatgcctttgttcgactcattgcactgctcgtgaaacactcaggggaggccaccaacactgtcacaaagattaatctgctgaacaaggtccttggtatagtagtgggagttctccttcaggatcatgatgttcgtcagagtgaatttcagcaacttccctaccatcgaatttttatcatgcttctcttggaactcaatgcacctgagcatgtgttggaaaccattaatttccagacacttacagctttctgcaatacacttccacatgttgaggccctaccaaagctccctggctttgtatatgcctggcttgaactgatttcccatccggatatttattgcaagaatgctgggcacataccgccacaagcagaaggtgggtggcctatggtatgcacagctacctgattgatttaattccaaattatttaagcgcctttccttagaaatgtggaactcaccaaaacctatggcaaatcctctacaaggggcactttaagaagtgcctgctggttcttttgcatgatttcccagagttccttttgtgattaccattatggggttctgttgatgtgatcccacctaattgtatccagttaagaaatttgatcctgagtgtcctttccaagaaacatgaggctccccgacccattcactcctaatctaaaggtggacatgttgagtgaaattaacattgctccccggattctcaccaatttcactgggagtaatgccaccttcagttcaaaaaggatttggattcctatcttaaaactcggttcaccagttcactttcctgtctgatctgcggcgaacccttacaggtattccatggaaccgggggattcggttacaacctccagcttcatcaatggcactgggtgcttctaatgtcggggactcaaggccattgcggcacatccacaacaaggggcaggcacacctttcaatggaggcaccattcactcacttcaggcacacatgggattatctttccaggaattttgggctgtgggatttgggacactggaggggtcgctattctcttttttggaatggcaatttggcaaatcagcttccgggtaccccaaatagccacactcactacttccaggttgcacccatgctgttacctttttggcaggagggccaattcgggaaggccattccaaggaacagatcaccaggagttctcttgggaaccggttgattgttaaataggcccacatccttgggggtcttcttaattacccttcattggagctgattaaaaaccccagcgtttaaagttctggaacccatgaaatttgttacacttgtgcccccccagaaatccgaaaaaagttattcccagtcgggtcggcacagttgctggcatggggacaggaaggcagggcccagcaagttaattgggagggggacagggtgccagttaggacggaaacttgcatctctgttgtacgtgttcagtcttggaggtctcacttgcaccgagtttcataaaactgactgaagaatcctttcagctccttcctgaactttccccaggccctttggttttgtgggtaatctggcccaactaactggtggggatcagccctcctggcctaatgtgggcacggttcccaaggtttaaatgccatttttttgacccttggccaaaatttagaagatgctgtgaatatcattttgaaacttgtgtaaatacatgaaagagaaaacctttgtctggaacttcttggctttgtgcaagctgtgtccaaggcaagtacataaactggtaccttgtaatgaagaggcagctgattcccatgcacttgtctgagggcatagctcccatgtccttctgacaatcccctggtgtccccaaaagaatagccaaaaagcccagtttgaatattatggtaacttatttttttaatgtggacaggggaccctgaaaatcacctaagttattaaaaatgtgggatgtgctaggaattgggatatgtccagggaacatggggaagggctcactattgggantcccatgagtttccagtttgtctctacccaaacgtattccaaagctgactgcatttgtacccatcttatttcttttgggggattaatacaccctcagccgccctgagaatgggggtcagctcctttatataaaggggaaaaccagacccaggcctaaaagccccaccccctacccctcaccccccacaatccctctccctgaaacttaaaaacagtgggaatataggaaagggaaccaaatcctcattaattaattgttcctcccccattaaccccactgaatgaatggccatacaggctaagctgaataatgacaaagttgaaaggaccaatacagccccttttataaggattttgaatgttttgcaaatgtattggtccctgtgttgtattttgtagcctttccctggggcttcagctcccctacttcttgtatgtgtatgcatactgtagctaaccattaaagtcatgacacacacatgagtcccactgtgccctttctcagtaggcaggcaggcagtgctgggtgggtgaggagggaaaagtgggacaatccaggccctgtaggaccttgggggccatggggggaaccaacaactaacttcttgctggaatgattgatttgattgattgattgatagggtcattcctactactaagctggcatgtttaaggaaattgtatttttcttcctatttatttcaacactggacaaatgctggagcaggtttatctggttaaggctgagtttaaaatacccaggttttaatatccttttcccccaggtatttttttttttttttaaagaaaatgagtagatacgtatttaaaaacttaacccacttaaaatttgccttacctttcatgactgtcaagttttc

SEQ ID NO: 2019 - DNA, 458 bp, Homo sapiens
  SIMILAR (309)..(214): 811254mologous to Homo sapiens Human secreted protein clone cw1475_2 protein sequence SEQ ID NO:102,accession number Y94948,Smith-Waterman Score=140.
  misc_feature (1)...(458): n = a,t,c or g
aaaacaaataccattttaaagtatattggaattcgtaactaaagtaataaataaatgcttgaaatatacccagtagaaacttatttttattatccaatccttttgataagaaatgcctctagtgttatgtacaaacttgatcttcttggaaacgtgttgtccactgcttttctgtttctgtcacagtagctataaacagctgtttaaggatatccttatctaaatttctgccttcagcctaatgacctccacgcagtgattgtccttgtttctcacattcttttcccacaggagattctgaataaacatattaagatgttcttcctttgcatttcctggtacttcaaatgtgattgtagcaatactctgtaaatcaagggaaataccaataattctttatagtaatcgnacgcgtgggtcgccccagggatatcaaacggtaccgcacggtgatcaan

SEQ ID NO: 2020 - DNA, 1744 bp, Homo sapiens
  SIMILAR (1513)..(1641): 881254mologous to Homo sapiens Human secreted protein clone cw1475_2 protein sequence SEQ ID NO:102,accession number Y94948,Smith-Waterman Score=190.
tatgttaaaattataactcaatcaccagtctttataaatttgcttttttatatttaaaccaaacctaatgctaattgtgatatgttatttattctcacctgatttgaatcattggattcaattaaatgagtttaattatcattaaataattctaagagaaataatgtctattcggatggtgggaattttctttctacatgcagccccattctgaatgaatgaaatcaaatcacgtgaagatcagggtcctagagtaacctaatattttgtacattgggtatttggactcctcatttttatattacatgttatatcaagggagggggtataaaagaaatacaaaaattgcagaggtatctggaatgtacctatttgttaattctatttgtcatttcttttggtttcatcttttgagtaaataagctgcttggaaaagtttctgttctttagctgattttttagctataaaaatgtatttgaaaagctcataaatttcaggattgaaaagataattgaaagtttaaaaaaaacctaattcattgaagtaataaccaaataattttcaatcttgattcaactgtgattcaaatcttacaccatttgcccacttctatggaattttatgtattaaaattttttaagagtcagagttttttttcttggattaattggggtgtatttcacagaatttccaactgctcacgttagcttttcttccttttagagttgatccctctaaggtattagaacttcatgcctttgatagtctctctgcgataatttcgccgaaactaacttcagcatgtgccaggaacacaacctcaccttgatcagagtattgttacaatcacatttgaagtaccaggaaatgcaaaggaagaacatcttaatatgtttattcagaatctcctgtgggaaaagaatgtgagaaacaaggacaatcactgcatggaggtcataaggctgaagtttgaactgaggctgatcaatgttcagtcaattctcctttgagcagggattggtgtcaatcaaagacaaatcacaacaagtgattgtccagggtgtccatgagctctatgatctggaggagactccagtgagctggaaggatgacactgagagaacaaatcgattggtcctcattggtaagtctcaaaggattcacagttttaaaacaaagtgaaaaatatatttgaaaggggtatcatgtgccacttaaacagattaaccattcaggtcctcttttaaaactaaataagcttgtggtcaatgtttcatctttatcatgttacaacgttccgtaaaagcctgttaggacttttgttcttcttcaatgttagaaaagtggttaatcccaaggacccaatgtgacctttgatgtactgaccctggaaagttaaagatggaatcactcaattactattctttttgtaaatttctaaacaccataaagcatttaatgaactggaattgataggtgaactgtgtcattttaataagcataatgtaatcacgtcatattttgttttgtttgcaggcagaaatttagataaggatatccttaaacagctgtttatagctactgtgacagaaacagaaaagcagtggacaacacatttcaaagaagatcaagtttgtacataacactagtggcatttcttatcaaaaggattggataataaaaataagtttctactgggaaaaaaaaaaaaaaaaaaaggcgcctcgggccgaaaaaaaaaaa

SEQ ID NO: 2021 - DNA, 1132 bp, Homo sapiens
  SIMILAR (1132)..(731): 641254mologous to Homo sapiens COBW-like protein,accession number AF257330,Smith-Waterman Score=355.
ttttgtgttaaaaaaatttaataacaatgtaatcattatatctctgcaatcagctgaagttctaagaaaaaatgacaatgttgaaagttgtatcatcattattataaactttcatgttcagtatatgtaaactccaaagccaatttcaaaagacatttttgtgaaataccattctttaaaaaaaaggatattatatataactgtatgaatgttaaatgttttacagtaccggatttgctaccattttaggtatgctgtaaaacaaataccattataaagtatattggaattcggtaactaaagtaataaataaatgcttgaaaatatacccagtagaaaacttaatttttattaacccaatccttttggataaggaaatgcctctagtgttatgtacaaacttgatctgtcttggaaacgtgtatgtccactgcttttcctgtttcctgtcacagtagctataaacagctgtgttaaggatatccccttatcctaaatttctgcccaaggaggaccaatcgatttgttctctcagtgtcatccttccagctcgactggagtctcctccagatcatagaggctcatgggacacccctggacaatcacttgttgtgatttgtctttgattgacaacaatcccttcaggccttatggacctccatggcagtgattgtcccttgtttctcacatttcttttcccacaggaaggattctggaataaacatattaaggatggatcttcctttgcatttccgggggacgggcaaatgtgattggtaacaatactctgatcaaggtgaggttgtggttcctgggcacatgctgaagtttttttctggcaaacttaatccagagagactatcaaaggcatgaaagatctaatacattagagagatcaactcttgatctttgtgtttctaagatttgtcctagtccgatttatggatctaattgtcgttcttaatttctttacatcttcttctggaaccaagtctgttttattaatgagaatgatatctgccaaagcaacttgcctagtagcttcattgataaggccatcaggtttctcttctgttaaatgttttaatccatattttgaatccacaatagttatgataccatcaaggtaaat

SEQ ID NO: 2022 - DNA, 831 bp, Homo sapiens
  SIMILAR (111)..(76): 661254mologous to Rana temporaria United Kingdom iridovirus 1 unknown,accession number AF157644,Smith-Waterman Score=41.
atgaacgtgacagtgctggagggtgggcccagcaatgcacaggcacctgatgtcggtcagcggctggcggctgtgtcggaaggccatggatgggggcagctgggagcctgggaggacctgctggacagcatgcccggggcccctgcacatccagcagcttgctctggggaaggttccccagctgagagcatctacagtggcagcccctcccccagcaccaaaagagacacagcagatgacttcttggcacaaacagaggtctctgactggggaggtatcaaagatgccagaaggcgaaccagcgacagacagcaggtgacatacaaggaccctcaaagaggtctcggctcagatgggatgccctccttccaggctgaactaaacctcttcctcctgtgggaaacagccccagagacgtcagattgcgtgggcagtgagtggcacatgcttgtgggccccagaaacacagcagttggcctgaccgtggcagacatcattaatcaatcctgcacactctccagctcagccccgtccctgatcccagggggctgctccacaggacagcaggagcccccaagccagactggaggtcctgggggtaacctgggtgctcaaggctcgctctgtgtgttgccacctccgtttgcacccagaccctcctgtgacgtggctcagcaaacctcttaaatgggtcattggatgctaaacttgaactttcacagggcggggtttcttcaaacgggacacaccagagtccaggccaggctggaatcctgctgccggtgcctgacccagatcagggattccaaacacccatggggcccctggtcc

SEQ ID NO: 2023 - DNA, 798 bp, Homo sapiens
  SIMILAR (361)..(798): 991254mologous to Homo sapiens sialin,accession number AJ387747,Smith-Waterman Score=755.
atgaagccgcagacacttgcggttcgtggtctcactggctcagaagtgaagctgcagaccttcacggtgagtgttacagctcttaaggtggcgcatctggagttgttcgttcctcctggtgggctcgtgatcttgctggcttcaggagtgaagctgcagaccttcgcgtgcagcgctgggctgaaggactcctcaagtgccgccaaagtgggagcccaggcagaggaggcgccgagagcgagcgagggctgtgaggactgccagcacgctgtcacctctcaagctgacatcggcagctgtgaggacccacctgttagtctgcacttgaaacagagctataattgtccagtgaatgcagaggaagaagctccagtgtgctgctctgctcgttacaacttagcaattttggccttttttggtttcttcattgtgtatgcattacgtgtgaatctgagtgttgcgttagtggatatggtagattcaaatacaactttagaagataatagaacttccaaggcgtgtccagagcattctgctcccataaaagttcatcataatcaaacgggtaagaagtaccaatgggatgcagaaactcaaggatggattctcggttcctttttttatggctacatcatcacacagattcctggaggatatgttgccagcaaaataggggggaaaatgctgctaggatttgggatccttggcactgctgtcctcaccctgttcactcccattgctgcagatttaggagttggaccactcattgtactcagagcactagaaggactaggagag

SEQ ID NO: 2024 - DNA, 999 bp, Homo sapiens
  SIMILAR (167)..(36): 761254mologous to Homo sapiens Human secreted protein, SEQ ID NO: 7131,accession number G03050,Smith-Waterman Score=174.
atgaagccgcggacactcgcgcgtgtccagagttcttccgatgttcggatgtgttcagccttctggtgggttcggggtctcgctggctcagaagtgaagctgcagaccttcctggtgagtgttacagctctgaaggtggtgcgtctggagttgtttgttcctcccggagtgaaggtgcagaccttcacggtgagtattacagcacataaaagcagtgtggacccaaagagggagcagcagcaaggtttatcgcaaagagcgaaagaacaaagctaccacagtgtggaaggggacccgagcaagttgccactgttggctcaggcagcctgcttttattctcttatctggccccacccacatcctgctgattggtccattttacagagagccgagtggcataaacgttcttcaagttcccaccagactcaggagcccagctggcttcaccccgtggatctcgcattggggctgcaggtggagctgcctgccagtcccgagccttcggccgcactcctcagcccttgggtggtcgatgggactgggcgccctggagcagggggcggcgctcgtcggggtggctccggctgcacaggagcccacggaggcgggggtagctcaggcatggagggctgcaggtcccgagccctgccccgcgggaaggcagctaaggcccggggagaaatcgagcgcagcgccgctgagggagccggcttcggccttggccggcccagaaaggggctcccacagtgcagcggcgggctgaagggctcctcaagtgccgccaaagtgggagcccaggcagaggaggcgccgagagcgagcgagggctgtgagggctgccctcatgctgtcacctctcacctgggtctggagctgcagctgtgcccagaagtgtgggctcccgctggccttgtggagcgcacaactctggccacaccccccacttcagccagtttcttctcagcagccactccagagggaccacctctggcatcttaa

SEQ ID NO: 2025 - DNA, 252 bp, Homo sapiens
  SIMILAR (80)..(27): 501254mologous to Pseudorabies virus glycoprotein gX,accession number U27488,Smith-Waterman Score=46.
atggcgagctgcaggtcccgagccctgctccgtgggaaggcagctaaggccgctgagggagccggctctggccttggccatcccagaaaggggctcccacagtgcagcggtgggctgaagggctcctcaagtgccgccaaagtgggagctcaggcagaggaggcgccgagagcgagcgagggctgtgaggactgccagcacgctgtcacctctcaggaggaggaagagttaaaactgaaaagcaaaacctag

SEQ ID NO: 2026 - DNA, 606 bp, Homo sapiens
  SIMILAR (149)..(57): 321254mologous to cercopithicine herpesvirus 15 EBNA2-like protein,accession number AF200187,Smith-Waterman Score=40.
gcataaacgttcttcaagttcccaccagactcaggagcccagctggcttcaccccgtggatctcgcattggggctgcaggtggagctgcctgccagtcccacgccgtgcgcccgcactcctcagcccttgggtggtcgacgggactgggcgccatggagcagagggtggtgttcgtcgaggaggctagggccgcacaggagcccacggagggggtggaaggctcaggcatggcgggctgcaggtcccgagccctgcccgacgggaaggcagctaaggcccggcgagaaatcgagcgcagcgccgctgagggagccggcttcggccttggccggcccagaaaggggctcccacagtgcagcggcgggctgaagggctcctcaagtgccgccaaagtgggagcccaggcagaggaggcgccgagagcgagcgagggctgtgagggctgccctcatgctgtcacctctcacctgggtctggagctgcagctgtgcccagaagtgtgggctcccgctggccttgtggagcgcacaactctggccacaccccccacttcagccagtttcttctcagcagccactccagagggaccacctctggcatcttaa

SEQ ID NO: 2027 - DNA, 846 bp, Homo sapiens
  SIMILAR (376)..(843): 771254mologous to Plasmid F Protein D,accession number M12987,Smith-Waterman Score=578.
atggcctgtgcacttgtgcatgtaaaaggggcccctgggagcggtgggacacactatacctactcatactgtgtccggaattggtgggttcttggtctgactgactttaagaatgaagccgcgaaccctcacggagtgaagctgcggaccttcgcagtgagtgttacagctcatgaaggcaatgtggacccaaagaccgagcagcagcaagatttattgcaaagagcgaaagaacaaagcttccacagtgtggaaggggaccagagcggattgccactgctggcttgggcagcctgcttttattctcttatctggccccacccacatcctgctgattggtccattttacagagagcccagtgtactggtgtattcattaagcattctgccgacatggaagccatcccaaacggcatgatgaacctgaatcgccagcgcattcacaccttgtcgccttgcgtatattatttgcccatggtatttattcgcgataagctcatggagcggcgtaaccgtcgcacaggaaggacagagaaagcgcggatctgggaagtgacggacagaacggtcaggacctggattggggaggcggttgccgccgctgctgctgattgtgtgacgttctctgttccggtcacaccacatacgttccgccattcctatgcgatgcacatgctgtatgccggtataccgctgaaagttctgcaaagcctgatgggacataagtccatcagttcaacggaagtctacacgaaggtttttgcgctggatgtggctgcccggcaccgggtgcagtttgcgatgccggagtctgatgcggttgcgatgctgaaacaattatcctga

SEQ ID NO: 2028 - DNA, 885 bp, Homo sapiens
  SIMILAR (136)..(47): 761254mologous to Homo sapiens Human secreted protein, SEQ ID NO: 7678,accession number G03597,Smith-Waterman Score=104.
ttttttttttcgagatggagtttcactcttgttgcccaggctagagtgcaattgtgtccaaaattggtgggttcttggtctcactgacttcaagaatgaagccacagacgctcgcagcgagtgtcacagttcttaaaggtggtgtgtccagagtttattccttctgatgttcggctgttttcctgagtttcttccttctggtgggttcgtggtcttgctgacttcaggagtgaagctgcagaccttcgcggtgagtgttacagttcataaaggtggcggtccagagttgttcgttcctcccatccggagttgttcgtcccccctggtgggtttatggtctcactggcttcaggagtgaagctgcagaccttcacagtgagtgttacagctcataaaggtggcatggacccaaagagtgagcagcagcaagatttattgcaaagagcgacagaacaaagcttccatagcatggaagggcacccaagcgggttgccactgctggctcaggcagcctgcttttcttctcttatctggccccacccacatcctgctgattggtccattttacagaaagtcagtctgttttacagagagctattggtccatttttacagggttctgattggtgcatttacaatccctgagttagacacaaaagttctccacgtccccactagattagctagatagagtgtcgattggtgtatttacaaacactgagctagacatagagtgctgattggtccatttacaaaccttgagctagatacagagtgccgattggtgcattcacaatcccttagctagacataaagattctccaagtccccaccagattaactagatacagagtgctgattggtgcattcacaaacccctcgtgcc

SEQ ID NO: 2029 - DNA, 6120 bp, Homo sapiens
  SIMILAR (3217)..(4137): 271254mologous to Mycobacterium tuberculosis proline-rich mucin homolog,accession number AF071081,Smith-Waterman Score=164.
tgtcaaaactgcttccaccctgaggaggcccatggagcaagataccaggtgggccagttttccacgtggttggggtggtttgtgatgggggcatgggtgaaggactgggcctgtgggaaccggaggagccaggatggggcccgaggtccatctgaggccagagccagtgctgacccgccagacaggaaatcagagctggggactgaccgtggggcccactcaagtgggtggtgtggggtggtgacgggggctggggtgaaagccaggatgaggtgtcacattaggctaggggggcctgagccggagccccccggggacgagggtgctgacagtcgacagccaccaccaccaccagagcccgcagcccaggtaatccgagaggaggcggggcgcagggtgccatggccgctgtctcccaccaccaggggagggaacgaggacccactcagcgcctcaacctccggctgccagtctgtggtggacccaggcctcaggccagggcccaagaggtgggtagagtcccagggcccaggaagggcttcatggggtggaatgccctcacccttcccatttgcggagcttgaggcagtaccctatctggagggcctgaccacttccttgtgtggcagctgcaacgaggaccccggctctgaccccacctccagccctgactccgccacccctgatgataccagcaactcgtcctctgtggtgagccaggagtgggagtttgggggacaagagtggctcacacctccatctgcagccctgggtcccccgaggaggcctcgggaggggccgagagctgacagctcccaaagggctccgtctctcctcaccaggtcccctgtgggaggagatgctgcaggccagaaaaaggagggtgagtccttctgccaggttggttcccatggtgatggcctggggccccccagatagccatctcactagcagcagcaagatttattgcaaagagcgaaagaacaaagcttccacagcatggaagaggacccgagcgggttgccagagctggctggggcagcctgcttttattctcttgtctggccccacccacatcctgctgatgcacaggagcccacggaggcggggggaagctcaggcatggcgggctgcaggtcccgagccctgcccggtgggaaggcagctaaggcccggcgagaaatccagcgcagcgctggtgggcgggcactgctgggggacccagcacaccctccccagccgctggcccaggtgctaagcccctagcccacgcccacccggaactccagctggcccacaagcgccgcgcgcagcctcggttcccgctcgcgcctctccctccacacctccgtgcaagctgagggagccagctccggcctcggccagcccaggaaggggctcccacagtgcagcggtggcctgaagggctcctcaagtgccgccaaagtgggagcccaggcagaggaggcgccgagagtgagcgagggctgtgagggccgccagcatgctgtcacctctcagtatcacccctcagattctgcatcgattactgagagaaaggcacccttaggctggggagagcgggaagataccactttcaccaagaggctgctcagcatccccagagtggggcaaaccaacataatatgccccctgatatgatgcatggggtcaggggaggggatgctggggactcaacgagagaattccagaacatcctgtgcccagcgggacaatcccaaagcctccagaacctcctctcccaatagagccacacgagacaaccccagaacatcctgcgcccagcgggacaatcccagagcctcctctcccagtagagctacacgagacaaccccacaacatcctgtgcccagcgggacaatcccagagcctccagaacctcctctcccaatagagccacacgagacaaccccagaacatcctgtgcccagcgggacaatcccagagcctcctctcccagtagagctacacgagacaaccccacaacatcctgtgcccagcgggacaatcccagagcctccagaacctcctctcccaatagagccacacgagacaaccccagaacatcctgcgcccagcgggacaatcccagagcctcctctcccaatagagctgcacgagacaaccccacaacatcctgtgcccagcgggacaatcccagagcctccagaacctcctctcccaatagagccacacgagacaaccccagaacatcctgtgcccagcgggacaatcccagagcctcctctcccaatagagctacacgagacaaccccacaacatcctgtgcccagcgggacaatcccagagcctccagaacctcctctcccaatagagccacacgagataaccccagaacatcctgtgcccagcgggacaatcccagagcctcctctcccaacagaaccacccaacaagacagccccagaacatcctgtgcccgacgggacgatcccagagcctcctctcctaacagaaccatccaacaagagaaccccagaacatcctgtgccctacgggacaatcccagagcctcctctcccagcagaaccatccaacaagagaaccccagaacatcctgtgcccaacgggacgatcccagagcctcctctcctaacagaaccacccaacaagagaaccccagaacatcctgtgcccgacgggacaatcccagagcctcctctcgcaacagaaccatccagcgagacaaccccagaacatcctgtgcccagcgggacaatcccagagcctcctctcctaacagaaccatccaacaagagaacctcagaacatcctgtacccgacaggacaatcccaggacctcctctcccaatagagccacacgagacaaccccagaacatcctgtgcccagcgggacaatctcagagcctcctctcccatcagagccacccaacaggacaaccccagaacttgtattcaacagaacatccccagatcatcttctacccaacaagacaaccctaaaacctcttgtaccaaacgagataacctcagacccacttgtacacagcgggaccgcacacagtccttttcctttcaacgagacaaccctggaacctcctcatctcaatgctgcacccaaaaggagaatctgagaccatcatctccccaccgctccactcaatggaacaatcccaggaattcatctccccatcgtactaacaaagacatcccctgggcctcgtttcccctccggccaactcagagtgatggtccccgaacctcttccccatctcgctccaagcaaagcgaggttccctgggcatccatcgccctccggccaacccaaggtgacaggcctcagacatcctctcccagcaggccagcccagcatgacccaccccagtcctcctttggccccacccagtacaacttgccatcccgggccacctcttcctcccataacccaggccaccagagcacctcccgaacttcctcacctgtgtaccccgctgcctatggggctcccctgacctctcctgagccctcccagcctccatgtgctgtgtgcattgggcaccgggatgcccctcgagcctcttcgccccctcgctatttgcagcacgaccccttccccttcttcccagagccccgcgcccctgagagtgaaccgccccaccacgagcctccctatataccacctgctgtgtgcattggacaccgagatgccccccgggcgtcctcgcccccccgccacacccaatttgaccccttccccttcctcccagacacatcagatgccgagcatcagtgtcagtccccccaacacgagccccttcagctccctgcacctgtgtgtattgggtaccgagatgcaccccgggcctcctccccaccacgccaggccccagagccttccctcttattccaggacctccccagggccagcacagagagccttgtcccttccatggactctctgcacgagtgcccccacatccccacccctgtgtgcattgggcaccgggatgcaccctccttctcatccccaccacgccaggctcctgagccatccctcttcttccaggatccccctggaactagtatggagagcctggccccctccactgactctctgcatggctccccagtgctgatcccccaagtgtgcatcgggcaccgggatgcaccccgagcctcctccccaccccgccacccacccagtgacctagcgttcctggcaccctcaccttcaccgggcagctctgggggctcccggggctcagcgcctcccggggagaccaggcacaacttggagcgggaggagtacactgtgctggccgacctgcccccacccaggaggctggcccagagacagccagggccccaggcgcagtgcagcagcgggggccgcacccacagccctggccgtgcagaggtggagcgcctcttcgggcaagagcgcaggtgagcccgggggtggggtcagccaggtgggctggggaggaggctcggcagcaggacaggtgaagggggaaaattcactctaaggccttcagctctcacagagtaaggaaacgcactcacctccaattagattacaaattggctgggtgcagtggctcatgcttgtaaccagagccaacttctccgaagacagtccagccctgcccccagcaggcaggtgagcactgccagctgtctggggccccgcaccccaaggggcggccactgcctcttccctcccgcttggagtcctgagaagagacctgagggagatcggcagctccaggggtccccgctgccccccaggacatcagccaggacccctgagagggagctgcggacacagagacctctggagagtggccaagcaggcccaagacagcctctgggggtgtggcagagtcaggaggaaccgccagggtcccagggccctcatagacacctagaaaggagctggagcagccaggagggaggcctgggccctgggggctggtggggatgtggagagcccagcctgggggcagccaaagccccggagggagcatgggggggcacttccagggagtacaaggagagctgggggcagccagaggcctgggaggagaagcccactcatgagctccccagagaactaggaaagagaagcccactcacgagcccccctgagaactggggaggccccgcagagtcctcacaatcctggcactctgggacacccactgctgtgggctggggggcagagggagcgtgtccatacccgcgtggctctgagaggcgacccgagcttgactggagggatctgcttggccttctccgggcaccaggagagggggtctgggcccgtgtccccagcctggactgggagggcctcttggagctcctgcaggccaggctgccccgcaaggacccagctggacacagggatgacctggccagggctttagggccagagctgggtcccccaggcacaaacgatgtccctgagcaggagtcacacagccagccagaaggctgggccgaggccaccccagtcaatggacacagccccgcactgcagtcccagagcccggtccagctgcccagccctgcctgcacctccacccagtggccaaagatcaaagtgacaagaggaccagcgaccgcaactctggcaggcctggagcagacgggccccctggggagcaggagcactgcgaagggccccagcttgccagagctgcaggtaaggaggtttccaccctcccaagggtagccagaaagtcagccccactcagccaagtctccttggcggatgcccggggaccggcccacgctgttcaatccgttcctgctgtctctgggggtcctcaggtggcgaagggtaggctggctccagtggggactggaggggtgagggtggatagagacggggatgggttggaagatggacagcacatccctgctggtggcagcagccttcctgagggaggtgtcctcctgtgattatagggccttgtcaggtggagatggactagcgaggagacagcagtgtggacagaaacgggtggtcatgtttgagaagtagcaagagcgtagggaaggggtctggggaggagggcctcactgctagggcttggacaggggcaataga

SEQ ID NO: 2030 - DNA, 1472 bp, Homo sapiens
  SIMILAR (36)..(653): 431254mologous to Mus musculus stress protein Herp,accession number AB034991,Smith-Waterman Score=406.
catctggtcaagaaaccttgtctttagctttgggttcttcctcagaaggattgaggcagcgtaccctttcacaagcacaaactgaccaagcacagagtcaccagtttccatatgtaatgcaaggaaatgtagacaaccaatttcctgggcaagctgctccacctggattcccagtgtatcccgcgtttagcccactgcagatgctatggtggcaacagatgtatgctcatcagtattatatgcagtatcaagctgcagtttcagctcaggccacatcaaatgttaacccaacccagcctactacttcacagcctctaaatttggcacatgttcctggagaagaacccccaccagctccaaacctagtggcccaagaaaatcgacccatgaatgagaatgttcaaatgaatgcacagggaggtccagtactaaatgaagaagacttcaatcgagactggctagactggatgtacacgttctcacgagctgcgattctccttagcattgtatacttctattcttcttttagtcggtttatcatggtaatgggagccatgctactggtttatttacaccaagctggatggtttccttttaggcaagaaggaggtcatcagcaggctcccaacaataatgccgaagttaacaatgatggtttttaatgcaaacaacttggaacttgaagaaatggaaccgtcttatggatgatgggcttgaagatgagagtggagaagatggaggtgaagatgccagtgcaattcaaaggcctggattaatggcttcagcttggtctttcatcaccaccttctttacttcactaataccagaggggcctccccagggttgccaatttaacctgaaaaactgtgccagctacaaggagggtctgacttcaggaaagtggtttaaataacagtgcaatttcaaaaaaatttataactttcttttgatcatcatgtacagaggtgttttttttctttaggcttctcatgcatatgaatattttaagcacgaatggactactaaatatctgagtttttttttttttttttttaaagatcctaacagaacatagcgtaacaatattggtcttccagggtgttactcatttcaattatgtgtagtataccagggacagacctattttcatgtcttatttctttaaagagctgcttcattgggccgggcgccatggctccacgtctgtaaatcccagcactttgggaggccgaggcgggtcgggttacttgaggtcaggagttcgagaccagcctggcaaacatggcgaaaccccatcttaactaaaaatacaaaaaaattagccgggtgtggtgtcacgcgcctgtaatcccagctacttgggggggctcaggcaggagaattgccttgaacccaggagggcggaggtttgcagtgagctgagattggggccattgcactccagcctgggaaacagagtgaagacgctgtct

SEQ ID NO: 2031 - DNA, 3654 bp, Homo sapiens
  SIMILAR (1306)..(3504): 621254mologous to Homo sapiens AF-17,accession number U07932,Smith-Waterman Score=2037.
atgaaattgccatcagttgagaaggaagaggctgtggatgaagcggaaaggggacactggacagccacaacttccggcaaatgcccaggacaggtggttcctggtgacctgcggcagagcaattccagcagggcacttgacatcgtcactgctcacatcagccctaagtcccttcgccgcgggacgcgcgagacgggagaaggtgcgggaagcgggaagcaggagcgggagcgcgcggccctggcacgcatagggcggcggagagggcacgagcagggattgagcacctactgtgtgccttcacgctttacaaaaggattttcgttcgatgttcactacagcccctgcccgggggtactgatgccccatttacagagggacaagccggatttcggagaggtgaagtcactcgccgaaagtcgcaccgccaggacctcgcagggaacatttgcggatgggctggtagaggaggctcggacatcccagttccgcacccgcactcgaccaacgcgtgcgaaattcacaaatttgaccaaggaaccggagcgcggccgtcctcgccgggattccggtcatcgcaataatctggctctcggcccctactcccaggcacggaggtcgaagagacgggcttcccctacaccgccctgtgtagatgtagcctcttcgtcccggcagccctccgagattccctgtgtccaccggagcgaggagaggaagcgttcccggccgcgagccccggagggagctcatgggagtatgaaggagatggtaggaggctgctgcgtatgttcggacgagaggggctgggccgagaacccgctggtctactgcgatgggcacgcgtgcagcgtggtcgtccaccaagcttgctatggcatcgttcaggtgccaacgggaccctggttctgccggaaatgtgaatctcaggagcgagcagccagggtgaggtgtgagctgtgcccacacaaagacggggcattgaagaggactgataatggaggctgggcacacgtggtgtgtgccctctacatccccgaggtgcaatttgccaacgtgctcaccatggagcccatcgtgctgcagtacgtgcctcatgatcgcttcaacaagacctgttacatctgcgaggagcagggccgggagagcaaggcggcctcgggagcctgcatgacctgtaaccgccatggatgtcgacaagctttccacgtcacctgtgcccaaatggcaggcttgctgtgtgaggaagaagtgctggaggtggacaacgtcaagtactgcggctactgcaaataccacttcagcaagatgagtcgaaaggacaaagaacgccttaagcagaagcacaagaagcggcctgagtcgccccccagcatcctcaccccgcccgtggtccccactgctgacaaggtctcctcctcggcttcctcttcctcccaccacgaggccagcacgcaggagacctctgagagcagcagggagtcaaaggggaaaaagtcttccagccatagcctgagtcataaagggaagaaactgagcagtgggaaagtctcgtccctgcagagctcccctgacttctctgcattccccaagctggagcagccagaggaggacaagtactccaagcccacagcccccgccccttcagcccctccttctccctcagctcccgagccccccaaggctgacctttttgagcagaaggtggtcttctctggctttgggcccatcatgcgcttctccaccaccacctccagctcaggccgggcccgggcgccctcccctggggactataagtctccccacgtcacggggtctggggcctcggcaggcacccacaaacggatgcccgcactgagtgccacccctgtgcctgctgatgagacccctgagacaggcctgaaggagaagaagcacaaagccagcaagaggagccgccatgggccaggccgtcccaagggcagccggaacaaggagggcactgggggcccagctgccccatccttgcccagtgcccagctggctggctttaccgccactgctgcctcacccttctctggaggttccctggtcagctccggcctgggaggcatctacaccagtaataaggaccccatctcccacagtggcgggatgctgcgggctgtctgcagcacccctctctcctccagcctcctggggcccccagggacctcggccctgccccgcctcagccgctccccgttcaccagcaccctcccctcctcttctgcttctatctccaccactcaggtgttttctctggctggctctacctttagcctcccttctacccacatctttggaacccccatgggtgccgttaatcccctcctctcccaagctgagagcagccacacagtgtgtcttgggatcagcgcttacggaggtctcaacctctccgggtatttacgagttaagggggcgggtcacaagcgccccgccctctccctggagagtcagcccagccccagaaagctaattggtgcagggagaccacctgtcaggctgggaggcggggcctacagccaggctgccgactcagagccagacctggaggactgcagcttccggtgtcgggggacctcccctcaggagagtctgtcttccatgtcccccatcagcagcctccccgcactcttcgaccagacagcctctgcaccctgtgggggcggccagttagacccggcggccccagggacgactaacatggagcagcttctggagaagcagggcgacggggaggccggcgtcaacatcgtggagatgctgaaggcgctgcacgcgctgcagaaggagaaccagcggctgcaagagcagatcctgagcctgacggccaaaaaggagcggctgcagattctcaacgtgcagctctctgtgcccttccctgccctgcctgctgccctgcctgccgccaacggccctgtccctgggccctatggcctgcctccccaagccggcagcagcgactccttgagcaccagcaagagccctccgggaaagagcagcctcggcctggacaactcgctgtccacttcttctgaggacccacactcaggctgcccgagccgcagcagctcgtcgctgtccttccacagcacgcccccaccgctgcccctcctccagcagagccctgccactctgcccctggccctgcctggggcccctgccccactcccgccccagccgcagaacgggttgggccgggcacccggggcagcggggctgggggccatgcccatggctgaggggctgttgggggggctggcaggcagtgggggcctgcccctcaatgggctccttggggggttgaatggggccgctgcccccaaccccgcaagcttgagccaggctggcggggcccccacgctgcagctgccaggctgtctcaacagccttacagagcagcagagacatctccttcagcagcaagagcagcagctccagcaactccagcagctcctggcctccccgcagctgaccccggtaatgcccctggcgcagggtgacctgagacaaaggcttcccggcccctgtctccaagtcgtccatccctggggcgtaggcacgttttagtgagccccggcggctggcggcgggcgggccgggagcgagcgagcggaggcgcgcggccat

SEQ ID NO: 2032 - DNA, 1296 bp, Homo sapiens
  SIMILAR (1206)..(1099): 521254mologous to Rhodobacter sphaeroides thiamine biosynthetic protein,accession number AF107094,Smith-Waterman Score =73.
  misc_feature (1)...(1296): n = a,t,c or g
aaaacccaaattattgcgatgaccggaatcccgggcgaggacggccgcgctcccggttcccttggtccaaatttgtgaatttcgctaacacgaaaagttaaacaagacacagaggagaaactgcacttaagggtttctaacgaattacctttactagcaagaataaaactgcaagaaaattaaacgtaaaaatgtcagtcctaaatcatgcacgagtttcagaatatttgaatatttccttttggggcccaccgctgccaaggtggccgcagtttcgggtttcgccggacagggctcactaaaaacgtgcctacgccccaggggatgggacgacttgggagacaggggccgggaagcctttgtctcagggtcaccctgcgccaggggttttcgcctaagtttatgggggatgggacggggagacaacatttgttaagtttagagttttggggaacgttgtttcgtttaatcctccccacaccgtttttagggtggctgttcatatttcccattttgtggatggagcaactgaggtttcgacgggaaaaagtgactcgctcaaagtcactcaggctgaaatcggcagagtcgggacttgaacccagtctgtgcctcgctacgacaggggttccgctaccacgcgttggtcgagtgcgggtgcggaactgggatgtccgagcctcctctaccagcccatccgcaaaatgttccctgcgaaggtctggagaaacccggtgccccgcgggctgggctggattcgtggcgggtacctagggtcgagctgtcaagttcaatctcaagcttccaacatttattttcctgagcgcccactatgtgtcgatccgcaaaaaacgagcaagagcaggaaccaagccaacaagtggttcaagttcatcgcgctctccccggggtaactgaacactgctttagggtgtcacgcagaccctggcggtgcgactttcggcgagtgacttcacctctccgaaatccggcttgtccctctgtaaatggggcatcagtacccccgggcaggggctgtagtgaacatcgaacgaaaatccttttgtaaagcgtgaaggcacacagtaggtgctcaatccctgctcgtgccctctccgccgccctatgcgtgccagggccgcgcgctcccgctcctgcttcccgcttcccgcaccttctcccgtctcgcgcgtcccgcggcgaagggactggggcagagacgaccaaacanaaaattatttccgcccgctcgccccgccccgcccgtccccggagccagaaggggattgtggggcc

SEQ ID NO: 2033 - DNA, 342 bp, Homo sapiens
  SIMILAR (67)..(234): 731254mologous to Homo sapiens Secreted protein encoded by gene 19 clone HSAVU34,accession number W88552,Smith-Waterman Score= 202.
atggcggctgtagctgctgttcgctggctggggctctgcagcaggcttgaccagccactgacggatctccgagcattggatgtggccaactggctggaagtgattactcaaatttggaaagatagtaaagaatatagtcacactttctgcaacaacctgagagaagagatcctgacactcatggcaatggataagcacccaccagagcttcagagagtaatgactgactttgcaatcaaccaggaacaaaaggaagccctaggcaacttcactgcattgaccagtaacagtgatactgacagcagcagtgacagcgacagtgacaccagtgaaggcaaatga

SEQ ID NO: 2034 - DNA, 1551 bp, Homo sapiens
  SIMILAR (1001)..(1042): 851254mologous to Homo sapiens Secreted protein encoded by gene 19 clone HSAVU34,accession number W88552,Smith-Waterman Score= 53.
atgggggataccacagctgtgccttatgtgtttcaagatgatccttaccttatgccagcatcatctttggaatctcgttcatttttactggcaaagaaatccggggagaatgtggccaagtttattattaattcataccccaaatattttcagaaggacatagctgaacctcatataccgtgtttaatgcctgagtactttgaacctcagatcaaagacataagtgaagccgccctgaaggaacgaattgagctcagaaaagtcaaagcctctgtggacatgtttgatcagcttttgcaagcagccccagctcttgaggcagcaggctacagagccaacactgacctctgcaatgccaaccaagcctgtattgctctacgtcagcctcatcccagaccttggtttataaataaagacaagatttattcttgtaagaagtcttgccagcaccgagcttatgagcaggcattaaacttgtacactgagttactaaacaacagactccatgctgatgtatacacatttaatgcattgattgaagcaacagtatgtgcgataaatgagaaatttgaggaaaaatggagtaaaatactgtgctcatctctcagagatctagaacttgcctaccaagtacatggccttttaaaaaccggagacaactggaaattcattggacctgatcaacatcgtaatttctattattccaagttcttcgatttgatttgtctaatggaacaaattgatgttaccttgaagtggtatgaggacctgataccttcagcctactttccccactcccaaacaatgatacatcttctccaagcattggatgtggccaatcggctagaagtgattcctaaaatttggaaagatagtaaagaatatggtcatactttccgcagtgacctgagagaagagatcctgatgctcatggcaagggacaagcacccaccagaggtaggcctgaaactcaccagccaaagtgagttgctgaatgagcttatggaccagtgcaaaagtgtctaacagcccttcccaggcccattgaagtagtagagctggcaagtgccttcagcttacctatttgtgagggcctcacccagagagtaatgagtgattttgcaatcaaccaggaacaaaaggaagccctaagtaatctaactgcattgaccagtgacagtgatactgacagcagcagtgacagcgacagtgacaccagtgaaggcaaatgaaagtggagattcaggagcagcaatgggtctcaccatagctgctggaatcacacctgagaactgagatataccaatatttaacattgttacaaagaagaaaagatacagatttggtgaatttgttactgtgaggtacagtcagtacacagctgacttatgtagatttaagctgctaatatgctacttaaccatctattaatgcaccattaaaggcttagcatttaagtagcaacattgcggttttcagacacatggagaggtccatggctcttgtcatcaggataagcctgcacacctagagtgtcggtgagctgacctt

SEQ ID NO: 2035 - DNA, 102 bp, Homo sapiens
  SIMILAR (97)..(77): 711254mologous to Mycobacterium leprae B2126_F3_115,accession number U00017,Smith-Waterman Score=30.
tcaggacacggcgtaggagtgcgggggccagcaggaccttgccgagctagtgatgtttgaggaacgaccaaaaggaagatgcaggaggagctgtgaggggat

SEQ ID NO: 2036 - DNA, 1856 bp, Homo sapiens
  SIMILAR (1802)..(1509): 721254mologous to Homo sapiens dJ102H19.2 (novel protein),accession number AL096817,Smith-Waterman Score=346.
ggggctcagtagtaaagattttatttagttccatgtaaattcaattagctaagttctttaatacctaccaatcacacataattacattttcatgtaccttacaaaaccataataaagtatgacaaattaaaaataacattatgataaactctgcctgtgctgttattattacttggtaatattaatagcgactgaagcaagacttcagaggtgagatttactactgaggcccaatgacaatgatttggagaattaggtatatatctagaaatgaaacgggtccagaaaccttgtaagaaagatttgaattctataaggcagaatctggccagccacaggggccaagccttggcctctggccttaggccctgggccaggtgccaggccaaccaaggccattcggcttctcacctccagtgggtgctgaccgtaggggctaggctttggttaccactcatttttacccccatttctgtccccacttcccataaaagacacttccaaaatgctgatgcttccagagaataagaaacattctgaaaaggaaaaaaacaaaaaggcctgctggcatataaacttcaaaagaaaaaaaaggtacaataaggagaccttatctattccttatccattgagtagttgtagtttttaaataactataagaacacttggtcttatgtttataacattacagtaacattaattaacacaaattaacataaacaaaattaattaacatcaattaacataaacactaaaatagataacatttagttgtagtcaaaaatcatcatacctcagtaaaaacatactttttttttttttttaaagaaaaactccaattactcctgggatattccttaatcccttattttagtagctgagtggaaggatcttttccattaaaataaaattctgtcccaaaaatagctaaaatggaaactgaaatatatgaaccatttgtgacactataaaaactacttgtcagagccaactcagtttctcatatctcatatttttaatattgacttcaggccttaaaatttctatttatctttctttaaaaatataggttctatgccagggagaacatgaacatttcctttgcaagtagcaaaacacaagtaaactttcacgacagctgcaccggcataattcatcttaaaatatttaaaacatcatgcaaatttaacagcatgtgtacttttattatacagaatttaataattaacaaaaacaacttccattctcatggcacttttataagagggtaaggaaagaaaaatattatgacgctcactctgtgggaaaaaggatgaggataatggctgcagcttgtggaaagggccaaatttacggccagttgtcctggttgcaactgctatcttctctcttcaattaggcatgttctagaacagggaaacatggatactgtacactcacaagggtctttcatttgaagatttcaggaacctttaataaaggtccatctgcactaaccagcactactaatcccatttggatgttttccgcctcatataactgtgcccctcactatcaatagcttcataggaggtccgtttttattctcttgtattgcatgtagataaccaatatatgccacgcaaagtgaaagagttaccaatccgaaagccattacagggtttggtagggttaatgaagagctctggattcacagcacgaaataaggttgttgtgcgcacccctctgagccctgggctttgaaactctttttctttgggtggttcctttttgaatgttggaggctcaggtgctgaagacatcttgatcaatgatgatttattatctttcgcggggtcacctcttctcctcgcccg

SEQ ID NO: 2037 - DNA, 843 bp, Homo sapiens
  SIMILAR (1)..(84): 821254mologous to Macaca fascicularis hypothetical protein,accession number AB047603,Smith-Waterman Score=117.
atgccacgcagcagccagcactcggagagcagtcccctggatactaccacacagagaaaaggggcatcttcacttgcacatcaggcctcagagaagcagtttcagcctacccatgacttagcagctaaagaaagatgtattcctggggccaacaggacccaagggagaagaagccaatgtccacttaggtgccattctcagagcataaagaagtctcatccaggtaaatcagggatttcttcttcatttggatccattgcaggccctgcaggagcaatccacttccttcagagcgtctatggattcgctcagcattcctggtatattcctgcagtagttctggagcaaaagttaatgatgggctccctccctgcaggggctccccctcaacagggtcactgtgggctacctgtggccctagacaagggtcacacttatgaaggaccctttccacacagccctgtctgttctcaggttctggccaccactccctgctctcacacctacccgcctagggttagcaacagctcgaaatttctcatagttctgggtgctgggaagtccgagctcaatatgccagcagattcggtggctggaggctttgtgggcccagcggaccagaacacaagctctggagtcagccctgagtttgaattctacctctcctatttactagctgcaataccagactcacattactttacctctttgtgcctccatatttttctctctataactggagacccagaagctaaacctggattaaaaggacttgtaccacaggaatggcacatgggcccccatacccccatggtggtactggtttccattgagctcagttaa

SEQ ID NO: 2038 - DNA, 408 bp, Homo sapiens
  SIMILAR (277)..(402): 301254mologous to Brugia pahangi ribosomal protein L26,accession number X82316,Smith-Waterman Score=60.
ctgtccagcacttgatctgactcttagctagaaaggttcatactatcagctgtgcctatctcactggcttagagaaaggataaaaaaaaaccctgcagtacaagctgggggtggcggtgggggcactgaagccacgctccaggtgaggtggggaggcacactgatggaggggtatgagcccacttcatggggaacatgcacaaagaagaaaacatctcaggctgctgtgggagggcagatgtcctgtgcctgcagtccagaatccccctcattccccccttcaataaagggaatcctgtgggaagagaaaggaatgtgttaaagtgtagatcaagaagggacaggagaataaaaagaaatgtaagcaggtgcccactcagaaaagatgatgagtgttctattgttgcc

SEQ ID NO: 2039 - DNA, 526 bp, Homo sapiens
  misc_feature (1)...(526): n = a,t,c or g
agtgcatgccagaaataggatccagaaatttaagtggaataaatggaaagttctggactttggtttaacaaacccgtgacacagctgaaagattttagctgactaaatgctcaatatgagttcataggaaccaagccacgttaagcagctcatgtttcccctttgccttcaggatgccagatccctccttagtgtccagcagggggtcctccagatgtgagctgggctaccaatcctgtgttcagggttgcagacttgccatgtcctttgaacaccttttgcacctctggcacatggtctcatctcttttcttcctgtagggttcgccagcttgagggtcctattcacactttctttctttctgagtcagaatccctgtcccccaggctggcagtgcaattgccgtgattcatgggtttcantgtgggcntcaaatttccagggttcaagtggatcctcccacntcaggcntccagagttagttggaaaccagagggtttgttgcggaccacaaccnggttatttt

SEQ ID NO: 2040 - DNA, 534 bp, Homo sapiens
  SIMILAR (130)..(2): 371254mologous to Homo sapiens Human secreted protein sequence encoded by gene 49 SEQ ID NO:115,accession number Y91394,Smith-Waterman Score=61.
atgtgcagaggtgcaaaggtgttcaaggacatggcaagtctgcagcctgacacaggattggtagccagctcacatctggaggaccccctgctggacactaaggagggatctggcatcctgaaggcaaaggggaaacatgagctgcttaacgaagtcacaagagaccttatcagctgtcttgctgaaatccagatgtaccacatcctcaacgtctccctgatctacccgccctgccacaccattagaagaagaaatgagtgcaggggtgccgtgcacagtgtgatggatgtggatggagccctgcagcaggcagtgggcagcctgggtggcagccggaatgtgaacttggaaacagacgagcaggaaagaggctctttggagaagtcactcattagacattatccgggatctcagattacagggaatgcagaggcaaaaagcctcccctttgtaacagccggcacccaatttgctttatatggtcatgagccctcttacctgcagcatcaaatgggaggcatgaagccacgataa

SEQ ID NO: 2041 - DNA, 535 bp, Homo sapiens
  misc_feature (1)...(535): n = a,t,c or g
ggcctcgtgccaggatgccagaaataggatccagaaatttaagtggaataaatggaaagttctggactttggtttaacaaacccgtgacacagctgaaagattttagctgactaaatgctcaatatgagttcataggaaccaagccacgttaagcagctcatgtttcccctttgccttcaggatgccagatccctccttagtgtccagcagggggtcctccagatgtgagctgggctaccaatcctgtgttcagggttgcagacttgccatgtcctttgaacaccttttgcacctctggcacatggtctcatctcttttcttcctgtagggttcgccagcttgagggtcctattcacactttctttctttctgagtcagaatccctgtcccccaggctggcagtgcaattgccgtgattcatgggtttcantgtgggcntcaaatttccagggttcaagtggatcctcccacntcaggcntccagagttagttggaaaccagagggtttgttgcggaccacaaccnggttatttt

SEQ ID NO: 2042 - DNA, 534 bp, Homo sapiens
  SIMILAR (132)..(4): 371254mologous to Homo sapiens Human secreted protein sequence encoded by gene 49 SEQ ID NO:115,accession number Y91394,Smith-Waterman Score=61.
ccatgtgcagaggtgcaaaggtgttcaaggacatggcaagtctgcagcctgacacaggattggtagccagctcacatctggaggaccccctgctggacactaaggagggatctggcatcctgaaggcaaaggggaaacatgagctgcttaaggaagtcacaagagaccttatcagctgtcttgctgaaatccagatgtaccacatcctcaacgtctccctgatctacccgccctgccacaccattagaagaagaaatgagtgcaggggtgccgtgcacagtgtgatggatgtggatggagccctgcagcaggcagtgggcagcctgggtggcagccggaatgtgaacttggaaacagacgagcaggaaagaggctctttggagaagtagctcattagacattatccgggatctcagattacagggaatgcagaggcaaaaagcctcccctttgtaacagccggcacccaatttgctttatatggtcatgagccctcttacctgcagcatcaaatgggaggcatgaagccacgat

SEQ ID NO: 2043 - DNA, 974 bp, Homo sapiens
  SIMILAR (3)..(572): 991254mologous to Homo sapiens hypothetical protein,accession number AL136619,Smith-Waterman Score=1015.
accattacgtgacaaagaagaaattggttacagagcataaagacacagaggattttagacaagacttccactcagagatgtctggattttgtaaagctgctttgaacacttctgcagggaactcaaatccttatcttccgtattcctgtgaattgcctttatgttatttctcctcaaaatgtatgtgttcatccgggggacctgtagacagagcaccagactcctctaaggatggtagaaaccatcataaaacaatggggcattataaccacaatgactctttgcggaaaacacagataaactctttgaaaaactcagtggcctgccctggtgcacaaaaggctattacgtcttcagaggcagttgacagatttatgcctaggacaacacaactgcaggagcgcaaaagaagaagagaagatgatcgtaaacttggaacttttcttcaaacaaacccaactggtaatgagattatgattggacctctgttaccagacatctctaaagtggatatgcacgatgactcattgaatacaacggcgaatttaattcggcataaacttaaagagttaataaggttcaatttcagctatgatgtacttgtagcaggacgagctgcagacaaaaccccgcagacaccaggttatagaaagaagaggctttattcggccaggagcgtcggcagacttgtgtctcaagaaccgtgctccctgaagaaaaagttcctggtccttttaagggcttacaactcaagccaatataccctggatttggtttgggaaatacaccatacttacaggaaacaggaattgtctattgctaaagaggttaaaagctcaatggaagtcttgaatatagttactgaaataatcatgaatgtcttcttggggcccaaatgccaggatggggctgaactctcaatgattgccttgacttcagcagtgggctgcagcccaacagaggagagtgtctag

SEQ ID NO: 2044 - DNA, 871 bp, Homo sapiens
  SIMILAR (835)..(710): 801254mologous to Rana catesbeiana myosin I beta,accession number U14549,Smith-Waterman Score=177.
ctggttgccagggattctctttttgagagagggaaagcataatgaatggaagtacccagctggaggtttcagggcttctggaggatgctctcgcatagctcgaggtcctctgcccacctcttctctccaaggaaaatgaggactgccccttccccctgcaggattggcccccagcctgcgcatgcaccctcctcttgcccaagtggggagcacagaggcggagaggaatcccttaccacacccacggcccagcttgctcacgagtgtcacctctgtgacggtcaccactgctcccttggagggccacttgagttactgttgcttcctcgcctgctggcttgatgagcaccgatggtggggatctgaccccgaggggcagagctgtcggtgactgaggactggactgtggtgaccatgccgatttgcttcagggagaacgttgcaattgcacccagcagctcctggctctgcaggcggcacagcctggggccctgtgatcctctggtttcttccattggggcggagtcgggggtggagggagctggccacaacccactgctctgatgggtggtttgtccaaggatgctgaatgtaatgcctggtcaatgtggaagcccatgaggttgcccagggaagcctccaaaagctgggatgcttgagggtatccaagttgaaaaagacaaaatctgaccatcagccagtgacagtcgtatatgaggttctcgctgaaacgcttgcggaggttgtcgacaaaggcagattcgctggtgtacgcgtccaatagcacaaaatcctgaaccccgaccttgtcccgggcagtcagcgccccttccatgtgcagacggatgtgtttcctcctcacgtcttcttt

SEQ ID NO: 2045 - DNA, 965 bp, Homo sapiens
  SIMILAR (180)..(320): 651254mologous to Homo sapiens PRO1546,accession number AF116638,Smith-Waterman Score=168.
ccaaaaaaaaaaaaaaaaaaaaaattagctgggcatggaggcaagcacctatagttccatctactatatagttccatctactccagaggctgaggtggaaggatcatttgagcatggaaggcggaggttgcactgagccaagatggtgccgctacactccagcctgagacgcagagtgagagaccctgtcttctcagcaaactattgcaaggacaaaaaaccaaacaccgcgtgttctcactcataggtgggaactgaacaatgagaacacttggatacaggaaggcggacatcacacaccggtgcctgttgaggggtggtggggttttttttttttttttttccttcaaaaaatagtttattctgcacatttcctagtaggctctctgcccaccgttccaggggtagcagctactcataacttgtctttctctccaaaaccaagagggccttcccaacagaaaaaccttcagttcccaaagcagcatcgattcttcccctcacccccagcaaacctcggggtgggaataatggaatcattcaccttctcccacccctcactgccccgccccaccttcatttgccagggactgtcactgggctgatgggtcaggattttgtcttttttcaacttgggatacccttcaaggcatcccaggcttttgggagggctttcctgggggcaacctcatggggcttccacattggaccaggggattacattcaggcatccttgggacaaaaccacccattcaggaggcagtggggttgtgggccaggttccctccacccccgactccgccccaatggaagaaaccagaggatcacagggccccaggctgtgccgcctgcagagccaggagctgctgggtgcattgcaacgttctccctgagcaaatcggcatggtcaccacagtccagtcctcagtcaccgacagctctgcccctcggggtcagatcccacc

SEQ ID NO: 2046 - DNA, 555 bp, Homo sapiens
  SIMILAR (280)..(324): 801254mologous to Mus musculus alpha-1 type IV collagen,accession number M13043,Smith-Waterman Score=73.
atgcagactctttttacattactacaaccttcctcccaaactcctggcatcccacagcccatcgtctgctgtgtttatgcagaaagtggggccagagattctggacagccgcctctaaagtgccagtgccttcattctgcactcctgctgccacacagaggggctgaagggaaccaggatgcagccacccagcaggagattgctctgctccccaacaatgcagctgacctgggcaagtatatcactggtgacaaggtgctggcctcaaacacctaccttccaggacctcctggcctgcctgggggccagggccctcccgggacatggatgaaggtggaaaccatcactcagcaaacgaacacaggaacagaaaaccgcgtgttctcactctccctttacatgaccatcagcaaacagtacctgagtgaggagcaggggagtcattggctgtcttgcttaataaatgccttgcaagctttcttctccaatgctgccatttggcttgtaacatggtttgagctgtccagggtccttgatggagcagagaatgattga

SEQ ID NO: 2047 - DNA, 390 bp, Homo sapiens
  SIMILAR (94)..(246): 331254mologous to Rattus norvegicus MARRLC2A,accession number AF010437,Smith-Waterman Score=76.
atgactccaaagcacgaccatctggggcacgtgctgccgatctctctgcagctgctgttggaattgtcttcctgtcttcctgcagcctccgccgtgtggtgtgccggctgtaatgacccatggatgacaggttacccggacaacatgcattacaattacaagccaatgctgcatgacagaggaggctcggcagtgacgttgtctgcctcgcagagttggtatgctggctgtaatgctgaaaagtcagaagtaaacgcgttccccgggacccagggcatgcgcttcatctcagcggcttcttacaaggattgggtgcaagtgctgcagcagaaagatgtttccaggaacatgggaaccaaggctaggtctgcatcttctctgaaaaactag

SEQ ID NO: 2048 - DNA, 2534 bp, Homo sapiens
  SIMILAR (1829)..(1882): 551254mologous to Homo sapiens Human pp392_3 secreted protein,accession number Y28682,Smith-Waterman Score=44.
  misc_feature (1)...(2534): n = a,t,c or g
atgaaggaagccctgcgggaggccgtgtttgtcacttctgaagccagcctgaaaaatctctgccagatgtcccaggccgtactggatgaggatctcttcaacttcctgcaggcccactggttcacctgtgaactgctgtggtacatgcatgttaggaagggcctgcttgcgtgtaacacctacatggacagcctagacattgtcaccagcaaggtgtcaagcctctttcgggaacagcagtcgctgctggactgcatcctctgctttgtggattacatagacttctttaataccaaaggcttgaagaacttgcccacacctcctcccaaattaaagagagctcggccggcaagcatgccactgaagtccaagaaagcttttggaatctgtggagagagccttaccagcctccctgcagaagagaccaagccagacgcacagcanatagcaaaagtgatgaagaactttcttaaggtagatgagggttccatggcttccttcagtgtgggtgacagccagcacctggaccggcgggggggccagagcagtaagatgaccgacctgttcatccgcttcccagagaatctcttgctacaccgggtggagaacacccagggccacatcctctatgctttcttggtggagaacaaggaacgagaaagtcgagtggtgcactttgctgtgctcaaggcggagacagtcacctctgtggccaagatgctgagcatcttcacagagttcaactccgattggcccaaggtcaaggtggtctttgtggacccttcattccattaccgggctatcctgcaggagatctttcctgctgcccgcatcctcctttccatctaccacacaacccgactcttggagaagaagttgcatcgtagttcagcaaatccatcctttaaaaggctcatgaaggaagccctgcgggaggccgtgtttgtcacttctgaagccagcctgaaaaatctctgccagatgtcccaggccgtactggatgaggatctcttcaacttcctgcaggcccactggttcacctgtgaactgctgtggtacatgcatgttaggaagggcctgcttgcgtgtaacacctacatggacagcctagacattgtcaccagcaaggtgtcaagcctctttcgggaacagcagtcgctgctggactgcatcctctgctttgtggattacatagacttctttaataccaaaggcttgaagaacttgcccacacctcctcccaaattaaagagagctcggccggcaagcattgccactgaagtccaagaagggttttgggaatctgtggagagagccttaccagcctccctgcagaagagacccaagccagacgcacagcaggtacaggtacagcagcagttcacaagtgccgccctcgcaggttggcatgctggacaccttgcaccagagtggctctgaactaggcctacaagctgtgccacaatgagtgggaggtggtacagaacttccacccacctggtggacatggctggctctttcagtggacgtttcagctgctagaggactctcaccaggttagcaaagatgggctgtaagctgcaagctggttcctttcaacaatggtaccacctgccatgccgacacattttggctctgctgcacaccagccagcagccggttggtgaagccatggtgtcccgccggtggcagaagaagtaccagtacctccttgggcccaatggggagctccaggatcgtggtatggtcccgatcacaggaaagcataagaagcaaggacggaacgacatgattcaggacctaagcagggagttagcaaacctgctcatgcagacccgaggggccagagctggaggaacgctactccaccctgcgcaagatgtggaataatctgggctggcccctcccagccatctgagctctttcagccagccaggagaactttaaggactgggcccgcctccctttcctctggggaaagcaagaagaaggggagggattccctcctgctacagcctgtgatgccattattgaagccactttagctgaagccattggaccacaaacacttctcccttggaagtgtgagagttttaaagtgggccaggacatactagggtttagcattttagccaatgtcttcctaggtggggctaggaatattgttacagtagagaggaagggaactccccctgtgtgacagtcctttcaatctgccccttttcagcccctacttttggcattccttgggagcctcagcttgcttgcttcaaggccaaagcttatctccgctactgccaatgctcatcctcttcctcccccagctcccctgagatcagatcttatttgctctgcaaagatgaatccctgcctcaggttagggtgagacaaaatcggtctggtaaaagggcctgttttcagggacaaagggaatgaggatgatctttggactgttgctgactactttatgaagaatacttatttgtaactttttattacatattaaagttgtttttaataaaattaaaaaaaaa

SEQ ID NO: 2049 - DNA, 567 bp, Homo sapiens
  SIMILAR (414)..(97): 791254mologous to Mus musculus ataxin 2-binding protein,accession number AF107204,Smith-Waterman Score=461.
cggccgcaagtgtttttgttttttttgttttgtgattttttttgtttttttgtttttgcccttcatggtccgagaaggaaacggtggaaggtttcacatggttccaatgctgtaggtcgccgcgggcccgatggtgtgatggtacgggtcggcagctgcgtagactctgccgtaactgtcgctgtaggctgccgccgctgcagcgggctgagcgtatctgtaggctgcgtagcctccataaatctcagcaccataaaatccatcctgatacacgaccgctccgtaagtcgggatggggggtgggggtggcgcagcccgaaatgtattatacacggcccggccccggccccgaagatgtgcgccccggtaggcaacggctgtgccggtggtggggtaggggaaccccgtcactgcatagaattcaggcccgtagactgcgccgaccactggatttagcttccagccgttggtgtaggggttccccgtcttcttgttggtcatcactcgggccgtggcattattgacctcaattttccgtccctctacgatcgtcccattcagcttctc

SEQ ID NO: 2050 - DNA, 593 bp, Homo sapiens
  SIMILAR (54)..(176): 581254mologous to Mus musculus ataxin 2-binding protein,accession number AF107204,Smith-Waterman Score=101.
gggtggcaacggctagccctgatgaggccacctttaccaaaacatcctcgccggtcaataatgccacggcccgagtgatgaccaacaagaagacggggaacccctacaccaacgtccctcctctggaagtgggtgtgataaccgccttaaggaagccaggtgtccagacaggttcctgggcccagtccattctgaagatgagaaaacagcacccccagggaggtgaaggacttaccgaggaccccccaactctcaaggactcaggctatagcctgcccgaccccaggcacattgccaaggggctgtggctttctccacagtgctcatcagtccaggagctctcaggcctccgttctgcctgtatcgacagccgcccacacaccctggatgctgtgtgtgccgtggctatatccgccacccaccaccaggaactcgtgcatgtaggtttacaatccagatctctggcacctcatagatcttactacgtggttactggtgccaacgtcactcaacgtgtgggacagagaacagacgagggcctctcccgaaacctcctctaccgctgcccctcccagtatagtcaatggcactaa

SEQ ID NO: 2051 - DNA, 612 bp, Homo sapiens
  SIMILAR (64)..(210): 371254mologous to Homo sapiens Human secreted protein encoded by gene 78,accession number Y36301,Smith-Waterman Score=64.
atgtcccaatctgctttggctttcacagccgctgacccacaggctgtcccacgaagaatgggagaggcctgtcaagggagccacatgtcttccatcaaactcaagggaccaaaggaaatggcagtgactgagaacagtggcccgtggctggctggcgctctggagaacagttacgcaggacagcggcccggagagacctgtgctcctgggggttctgcgccggccggcagctcccttgaagaaattccacagtgtgtgtacagcctaagggtccccttaaatctgagtggcaagcccacagtggcgagggccagtcgctggaatgtcggggctgctgttgaggtcctcaggctacactggttgtctgtgtcacatggcggtcgggcgtggactttgatccctgttgagagagcatgctgctgtgggcgctgggctggggaaggtccttccatgcttcatgctgccttggaggtggtcagcaggttccaggctggtgtttacaatctcggaggaagtgcgatggtttctgttcttttgacagttcagtctgatttcaagtcagtcgaaagcgaaccagaagcaccgggcacagcagctcctctggctgtgtag

SEQ ID NO: 2052 - DNA, 374 bp, Homo sapiens
  SIMILAR (24)..(374): 851254mologous to Homo sapiens calcium/calmodulin dependent protein kinase,accession number L24959,Smith-Waterman Score=515.
cccgggtcgacccacgcgtccgctatggacctgagggggacatgcggtttgtacgattaatcacctacatcttactttgtggatttgaaccattctatgatgaaagaggcgaaccggtcatgttcaagagaaacctgaaatgtgaatattactttatctccccctggggggatgaagaatctctaaatgccaaggacttgggcagaaaattaattgttttggatccaaagaaacggctgactacatttcaagctctccagcatccgtgggtcacaggtaaagcagccaattttgtacacatggataccgctcaaaagaagctccaagaattctatgcccggcgtaagcttaaggcaccggcgaaagctgtggtg

SEQ ID NO: 2053 - DNA, 642 bp, Homo sapiens
  SIMILAR (456)..(617): 481254mologous to Homo sapiens mariner transposase,accession number U49974,Smith-Waterman Score=114.
atgccgataatcttgcgtaataccaggttcttgtataccacgagtaaacgcaaggtggacttgcagatattgggcttgagtattgtacctagcatgtacacagccgccgtgtggcatcgctacgtatcatgtcgcatagcgagctataaagttgcaacgccagaagtcccctgcacgacctcggcgcgaacaacctcggtcatgaacggctgcccctctgaacaggggccgtgtgatttagcgtgcccagtgccatcacggaatttcacgagcacaatagacgtggagcacacagatcataccagaggtcagaaaattaattgtttaggatccaaagaaacggctgactacattcaagctctccagcatccgtgggtcacagtccttttcttggtttcaatcgcgttttcatatggcgccagccatgatacaatcgatgctcggtaccaaattgagcaagaacaacatcaacttatggtaaagctgggtggaagaatggcgaaatcactgaggctttataaaagttgtggggacaatgttctaaagaaattaacagtatacaagtggatactcattttaagaagggataagacaatgttgaagacaaagcccacagtgcagatcatccacatcaatttttga

SEQ ID NO: 2054 - DNA, 1763 bp, Homo sapiens
  SIMILAR (100)..(687): 981254mologous to Homo sapiens calcium/calmodulin dependent protein kinase,accession number L24959,Smith-Waterman Score=981.
cccggacccaggtgctgccagggcggcggctggcggccggcttctcgctcgggcagcggcggcggcggcggcggcggcttccggagtcccgctgcgaagatgctcaaagtcacggtgccctcctgctccgcctcgtcctgctcttcggtcaccgccagtgcggccccggggaccgcgagcctcgtcccggattactggatcgacggctccaacagggatgcgctgagcgatttcttcgaggtggagtcggagctgggacggggtgctacatccattgtgtacagatgcaaacagaaggggacccagaagccttatgctctcaaagtgttaaagaaaacagtggacaaaaaaatcgtaagaactgagataggagttcttcttcgcctctcacatccaaacattataaaacttaaagagatatttgaaacccctacagaaatcagtctggtcctagaactcgtcacaggaggagaactgtttgataggattgtggaaaagggatattacagtgagcgagatgctgcagatgccgttaaacaaatcctggaggcagttgcttatctacatgaaaatgggattgtccatcgtgatctcaaaccagagaatcttctttatgcaactccagccccagatgcaccactcaaaatcgctgattttggactctctaaaattgtggattatcaagtgtctcatgaagacagtatgtggaaccccagggtactgcgcacctgaaattcttataggttgtgcctatggacctgaggtggacatgtggtctgtaggaataatcacctacatcttactttgtggatttgaaccattctatgatgaaagaggcgatcagttcatgttcaggagaattctgaattgtgaatattactttatctccccctggtgggatgaagtatctctaaatgccaaggacttggtcagaaaattaattgttttggatccaaagaaacggctgactacatttcaagctctccagcatccgtgggtcacaggtaaagcagccaattttgtacacatggataccgctcaaaagaagctccaagaattcaatgcccggcgtaagcttaaggcagcggtgaaggctgtggtggcctcttcgcgcctgggaagtgccagcagcagccatggcagcatccaggagagccacaaggctagccgagacccttctccaatccaagatggcaacgaggacatgaaagctattccagaaggagagaaaattcaaggcgatggggcccaagccgcagttaagggggcacaggctgagctgatgaaggtgcaagccttagagaaagttaaaggtgcagatataaatgctgaagaggcccccaaaatggtgcccaaggcagtggaggatgggataaaggtggctgacctggaactagaggagggcctagcagaggagaagctgaagactgtggaggaggcagcagctcccagagaagggcaaggaagctctgctgtgggttttgaagttccacagcaagatgtgatcctgccagagtactaaacagcttccttcagatctggaagccaaacaccggcattttatgtactttgtccttcagcaagaaaggtgtggaaccatgatatgtactatagtgattctgtttttgaggtgcaaaaaacatacatatataccagttggtaattctaacttcaatgcatgtgactgctttatgaaaataatagtgtcttctatggcatgtaatggatacctaataccgatgagttaaatcttgcaagttaac

SEQ ID NO: 2055 - DNA, 390 bp, Homo sapiens
  SIMILAR (305)..(90): 291254mologous to Homo sapiens nuclear receptor co-repressor isoform 1,accession number AB028450,Smith-Waterman Score=68.
ctgagtgggttgggggtgtatgtttgcaaggatagaatttctcatgggggagtggccctgcttcctcccttagaatggcttggggcttagggctggggacttgccctccatggaggtcagtgggagttgcagctgcagcgagggggtagcgcagtgcccagctggctgggtgacctcgggcacggctcgtcccctggtcggcttcagtttgcctatcggtatgttggagcttctactccacatttcttctcccctaactccagcccctgaaaccgtcttccccagtccctcctcgggctgcgactaggttggacctagaagcacacgggaccaggctgggcgaagaacactgacgcccagagccgaataaacaagagttccgtgtttcaa

SEQ ID NO: 2056 - DNA, 591 bp, Homo sapiens
  SIMILAR (388)..(579): 791254mologous to Homo sapiens Human transferase TRNSFS- 12,accession number Y79220,Smith-Waterman Score=252.
atgactatccacatcctcatcctgctgttgctcctcgccttctccgcccaaggggacctggacactgcagccaggcgaggccagcaccaggtcccccagcaccgcgggcacgtctgctacctgggcgtatgccggacccaccgcctggcggagatcatatactggattcgctgtctccaccaaggagccctcggggaaggccagccacgagccccaggacccctacagctatgggcgccgccggtggcgcgaggcggaagcccggctcggttcccaggattccggcctgcagcgagggggctagcgcagtgcccagctcgctgggtgacctcgggcacggctcgtcccctcctcggcttcagtttgcctatctggctccagcgtgacatggctgaagcgcaccaggccgtgggcttccgaccctcgctgacctcggacggggctgaagtggaactcagtgcccctgtgctgcaggagatctacctctctggcctgcgctcctggaaaaggcatctctcacgtttctgggtgaggagcggtgctggtcggtttccttccggggatccaggtttctgcttccgggatgtctga

SEQ ID NO: 2057 - DNA, 441 bp, Homo sapiens
  SIMILAR (204)..(133): 411254mologous to Homo sapiens lysyl oxidase,accession number AF039290,Smith-Waterman Score=43.
gctacctgggcgtatgccggaaccaaccgcttggcggaagaatcatatactggattcgcttgtctccaaccaaggagccttcgggaaagcccagccacggagccccaggaccccttacagcttatgggcgccgccggtggcgcgaggcggaagcccggctcggttcccaggattccggcctgcagcgagggggctagcgcagtgcccagctcgctgggtgacctcgggcacggctcgtcccctcctcggcttcagtttgcctatctgtatgttggagcttctactccacatttcttctcccctaactccagcccctgaaaccgtcttccccagtccctccccgggctgcgactaggttggacctagaagcacacgggaccaggctgggcgaagaacactgacgcccagagccgaataaacaagagttccgtgtttcaaaaa

SEQ ID NO: 2058 - DNA, 1300 bp, Homo sapiens
  SIMILAR (969)..(427): 371254mologous to Homo sapiens px19,accession number AF153607,Smith-Waterman Score=146.
tttttttttttttttttggggccaactgaattcaacaagtatttattgagtgtctattatgtgctagagacgtgagacacatcgagagaacgaaaccgaaagccctgccctggtcgggcttacagtctagcacttagcgccagttaacctgcaggctacctggagccccgggcaagtcaccgcacctctgtgccctcggtcctcagctgcccaatgggagaataagcagacctggctcaaaacatgaatcatgtgccttggtgtaactgcaagatgcccaaactgcatcccccacaacccaccacgtaggacagcagacaggggcctggaagttgatttttaatgataaatgtacaatgaagggtagggcagaggggctaagcctaactgtcctggggtgcctgtggtggtggtaaaatggcctaacacaaactgttgctgctgctgctgcttcttggtgcgtcgccttgctggcgagggtccttggccttctctgtaagctgccagtgccgtctcctttgccttcttccttggcttccattggctgtcctcaaacaaatgttttggaaggggccttcgcccttgcaagcttagccaagatatattcaaaaacccttccataatccttggtcaacgttgcttttgaaccggggcaagaccaaattcctgggacagctctggaagacaccaaattaagctaggaggagaccccaggcttcccggcggattttcagtcccagcccactgttgtcaagagttcacaacagtaaaacacatcgtttcctccaccaccattcagccggggcgtggttggatgttcccaggtgaaggtagtcatggtctgattctgtgggtccacaatagagtcctccaggacgttacacccgagtgggagctacattggcaaggaaaataagtcgctcgggcccagcgtgggcattcctgttggtctttggtcaggagtcgccggggacagcagtttctggtcaggggtcacctcccggtgtactatgtcttccgtcaagacatgtttgctatagggattcgggtacccgctgccagaaaggcgggaaacactttggtcccaggaactccggagcacgctctggcccaggaaatacttcaccatcgtcccggccgaagcgggctcagcacccgcgcagcatcaggggtgcggagcctgggaggcacgcgagggccgggccgggccggggctcggcgcacacccgccagccaggctcgtagctcagctcaccaccgcaccgcgcccaagcagctgccgccgccgccgccgccgcca

SEQ ID NO: 2059 - DNA, 498 bp, Homo sapiens
  SIMILAR (3)..(338): 251254mologous to Homo sapiens retinitis pigmentosa GTPase regulator,accession number AF286472,Smith-Waterman Score=92.
atggggcaggactttgccgcaagtccagcaattcaggtgggaggaaggagagtggagggaagacaagcggtcaccaacttagagcggcagggcaggaaggaatgcaggtacaagagcagcagcgaggccatcactggctctgccggggcagacccagaagtggaattgctggatcataaggaccgggccaaagccgaggcagtgaataagaggctccggaagcagctggccgagttccgggcaccacaggtgatgacttacgtccgggagaagatcttaaatgcggacctggagaagagcatcaggatgtgggaaaggaaagtggagatagcagaggacctcattccatgcatgtacacagtcggcatgggtctttcggattctgtacgaatcccgcagactttgaatatggtaccatgtaacaggaagcaccctcgctcctgtgagctccgggagatcaatgggctatgggaaaccatatgctggtgtcagaagtaa

SEQ ID NO: 2060 - DNA, 567 bp, Homo sapiens
  SIMILAR (195)..(91): 431254mologous to Homo sapiens Human GCAP-II (89-112) endoprotease digested fragment 1,accession number W18488,Smith- Waterman Score=65.
  misc_feature (1)...(567): n = a,t,c or g
tcaatctggacaaggagatcttgctgagaaaagagctacttgaaaaaattgaaaaagaaacactacaagtagaggaggaccgggccaaagccgaggcagtgaataagaggctccggaagcagctggccgagttccgggcaccacagggtgatgacttacgtccgggagaagatcgttaaatgcggacctgggagaagagcatcaggatgtgggaaaggaaagtggagatagcagagatgtccttaaaaggccatcgtaaggcttgggaatcgaatgaaaataaccattgagcagttgcaggcagattaccttgctgggaagtagccagaggcaggccacggcttacagaccactacatgacctataaaagtaatcagctcctttctagtcacgggctcctctcactgttccctgtctgccttggtgtttcccaaccccccaccccanggctgagtatcatctccttggggccacatctgcccattgggaagttgttttcaaagccttggcccctggaactgttaccactgaaagaaccacagggcactctaatggtttgacacttgg

SEQ ID NO: 2061 - DNA, 557 bp, Homo sapiens
  SIMILAR (88)..(456): 791254mologous to Homo sapiens unnamed protein product,accession number AK000061,Smith-Waterman Score=494.
  misc_feature (1)...(557): n = a,t,c or g
atgggtgcatccagtcaaggncctcttaagagccttgatggtgctctatatgatgatgaagatgatgatgacattgaaagagcaagcaagttatcttctgaagatggtgaagaagcttctgcttatctctatgagagtgatgactctgttgaaacaagagtgaagactccttactcaggactggatttccaactcacttcccctgaagtttcccagactgataaaggaaaaacagaaaagagggaaacactaagccagatttcagatgatctgcttatacccggtcttgggcggcattcatcgacttttgttccttgggagaaagaagggaaagaagccaaagagacttcagaagatattggactgctccatgaagtagtgtcattatgtcatatgacatctgacttccaacaaagcttgaacatttcagacaaaaacacaaatggaaaccaaacttaaatcttgcatccaagcttctatggagacatttttgaggttcaatggcaatcttgtattattaaacaggaattattttgtagggattgggcaactcctac

SEQ ID NO: 2062 - DNA, 816 bp, Homo sapiens
  SIMILAR (231)..(299): 951254mologous to Homo sapiens Human secreted protein encoded by gene 10 clone HSAXR76,accession number W74740,Smith-Waterman Score=112.
ttaaagatgaaacatgtatgataggatggattctttctgtattctgagagtgtacagtacaggattattataatgaaagtttatatcaacagggtttcgttggctctgccatatattataagcaaaagagattggtaaagtgccacagtattccagataacttttcagttgcggcctttcttctcgttctttaatttgaaacctagatacatgcagtaaaaactaggagaatgacttttacccttggggacagccaagttttgttgataaacctatttcctagcatgccttcaggaacgttgtgccacaccctagattgtgaaggacccactgttcttctgttgtacgagctccctgaaccattgttcagaggacccaatgtcacatcgctttcatgggcatggcccatggagcatctgggtgatatctgtctaacagtattggctccttctgcgaaggctgataacacaaggcctctcctcccacatgatcatttgcaaacctcccccagcccctacccatcccaatgtggaaggaaaacaagaactgccctgaagaagagtcccaagcctacagatacacagcgtgtgcattgcgtctgtcaccttcctcctcccactttctgtatcctcagagatgctgcgtggatgtttccttaacctcagctgacttccctgtgaatgtctaatgctagttcagggcctccaggcattgatttgtacagtggtaactcccaatgaggcttctgttatcatttggtgtgctttctctgtcattaaaagaaatgattttcccagaaaaaaaaaaaaaaaaaaa

SEQ ID NO: 2063 - DNA, 437 bp, Homo sapiens
  SIMILAR (3)..(152): 501254mologous to Bos taurus cytokeratin type II, component Ib/c,accession number K03534,Smith-Waterman Score=95.
  misc_feature (1)...(437): n = a,t,c or g
ggggttacggaggcggctacggtggccagagcagcatgagtggatacggtaaccaaggagcagtgaacagcagctactacagtagtggaagccgtgcatctatgggcgtgaacggaatgggagggttgtctagcatgtccagtatgagtggtggatggggaatgtaattgatcgatcctgatcactgactcttggtcaaccttttttttttttttttttttttctttaagaaaacttcagtttaacagtttctgcaatacaagcttgtgatttatgcttactctaagtgggaaatcaggattgttatgaagacttaaggcccagtatttttgaatacaatactcatctagggatgtaacagtgaagcntgagtaaactataacngtttaaaacttaagttcccgctttttcnccaagttagttnttagggntgtact

SEQ ID NO: 2064 - DNA, 2723 bp, Homo sapiens
  SIMILAR (1039)..(1200): 881254mologous to Homo sapiens ribonucleoprotein,accession number L32610,Smith-Waterman Score=246.
gttttaaagaatttgaataatcagttgaataaaaacctgaaaagtggtgaatgaaaatttgagagataaggaaaggctagagttggcattcaggggacacaaatagtttgaagactctggtagtagaattatgcaagttttcttaaaattaggcaatatataatattgatactacgaaattcagtacttttccgtaggagggggtcaggtctcattgccttttccgtaccccaaaatatgaaaggtggtctacaattttgttgtggcattgtcacagcagttggccccatgttacatttcctcttgtggcacctctgagaggtgtttcttcattacctcttgacaagagtatattttgattgactgctctatgtgcttgtttattttttatagcatttaaatcaaacggtattgagatggattgggttatgaaacataatggtccaaatgacgctagtgatgggacagtacgacttcgtggactaccatttggttgcagcaaagaggaaatagttcagttctttcaaggtacctctagtattagtcaaagtttagtagtattgtaattttatatttgtattgttttactgtttttaatttgtaaaacccatttgattttggaacttttaagtttaactatgatagtcttggttaatgtattaaaataatatgctccagttaatattcaatacagaatgtgtagaatatgtaaaacctaattaatgtgcagtaacatatttgagaattgtgatgaaatgaaccgtgaattagtatatggagcatatatttgattttgtagccttttttcatgtaatataggtgggcttttagagtgtgtaattacacagtgtttttacactggtcgcaaaaaatttatttaatccagtaatatttgaaaaaatctttcatttgtattatggggtgatgggaaactaagcttttttgttttgttttgttttgttttgtttagacttgttttaaatatttgattcagatgggaatgtttcagcctttaacactgttccccttgatggggttatttgtccttgggttaaagggttggaaatcgtgccaaatgggataacattgacgatggactaccaggggagaagcacaggggaggccttcgtgcagtttgcttcaaaggagatagcagaaaatgctctggggaaacacaaggaaagaatagggcacaggtggggatggagagtttgggatggtgttaaatttttatttttgggggttgtgggtcactattgcttaaatgggggggtagccataacatttttctggggtagtttaaaagaattgataattatctaaatttaacttggaaactacagatttgggtggggaattaatgctaatagttaaattaaaattagattgtttccatttctctgtaggatgttgttgataaatgcttttgtataatcacctatttcctttaaaacacctattatgtactaaaagagacaaagtaaaaatatactttatgaattgttttccgtgactaatttctttgtaaaacttaaatatttaattaagtttgtaggtttaaactgttaacttacggtgtatttaggcaatttaaattgggttatgtatctagatatagaaaaacttactgcattttgcccagtatctaatttacactaatacatttatgctgaaacctgtaccttaaaacatttttaaataggtatattgagatcttcagaagtagcaggagtgaaatcaaaggattttatgatccaccaagaagattgctgggacagcgaccgggaccatatgatagaccaataggaggaagagggggttattatggagctgggcgtggaagtatgtatgacagaatgcgacgaggaggtgatggatatgatggtggttatggaggttttgatgactatggtggctataataattacggctatgggaatgatggctttgatgacagaatgagagatggaagaggtatgggaggacatggctatggtggagctggtgatgcaagttcaggttttcatggtggtcatttcgtacatatgagagggttgccttttcgtgcaactgaaaatgacattgctaatttcttctcaccactaaatccaatacgagttcatattgatattggagctgatggcagagccacaggagaagcagatgtagagtttgtgacacatgaagatgcagtagctgccatgtctaaagataaaaataacatgcaacatcgatatattgaactcttcttgaattctactcctggaggcggctctggcatgggaggttctggaatgggaggctacggaagagatggaatggataatcagggaggctatggatcagttggaagaatgggaatggggaacaattacagtggaggatatggtactcctgatggtttgggtggttatggccgtggtggtggaggcagtggaggttactatgggcaaggcggcatgagtggaggtggatggcgtgggatgtactgaaagcaaaaacaccaacatacaagtcttgacaacagcatctggtctactagactttcttacagatttaatttcttttgtattttaagaactttataatgactgaaggaatgtgttttcaaaatattatttggtaaagcaacagattgtgatgggaaaatgttttctgtaggtttatttgttgcatactttgacttaaaaataaatttttatattcaaaaaaaaaaaaaaaaa

SEQ ID NO: 2065 - DNA, 2234 bp, Homo sapiens
  SIMILAR (61)..(1392): 991254mologous to Homo sapiens hnRNP H,accession number L22009,Smith-Waterman Score=2368.
ggcacgaggcgcagaagtcgcgtgtctagtttgtttcgacgccggaccgcgtaagagacgatgatgttgggcacggaaggtggagagggattcgtggtgaaggtccggggcttgccctggtcttgctcggccgatgaagtgcagaggtttttttctgactgcaaaattcaaaatggggctcaaggtattcgtttcatctacaccagagaaggcagaccaagtggcgaggcttttgttgaacttgaatcagaagatgaagtcaaattggccctgaaaaaagacagagaaactatgggacacagatatgttgaagtattcaagtcaaacaacgttgaaatggattgggtgttgaagcatactggtccaaatagtcctgacacggccaatgatggctttgtacggcttagaggacttccctttggatgtagcaaggaagaaattgttcagttcttctcagggttggaaatcgtgccaaatgggataacattgccggtggacttccaggggaggagtacgggggaggccttcgtgcagtttgcttcacaggaaacccctgaaaaggctctaaagaaacacaaggaaagaatagggcacaggtatattgaaatctttaagagcagtagagctgaagttagaactcattatgatccaccacgaaagcttatggccatgcagcggccaggtccttatgacagacctggggctggtagagggtataacagcattggcagaggagctggctttgagaggatgaggcgtggtgcttatggtggaggctatggaggctatgatgattacaatggctataatgatggctatggatttgggtcagatagatttggaagagacctcaattactgtttttcaggaatgtctgatcacagatacggggatggtggctctactttccagagcacaacaggacactgtgtacacatgcggggattaccttacagagctactgagaatgacatttataattttttttcaccgctcaaccctgtgagagtacacattgaaattggtcctgatggcagagtaactggtgaagcagatgtcgagttcgcaactcatgaagatgctgtggcagctatgtcaaaagacaaagcaaatatgcaacacagatatgtagaactcttcttgaattctacagcaggagcaagcggtggtgcttacgaacacagatatgtagaactcttcttgaattctacagcaggagcaagcggtggtgcttatggtagccaaatgatgggaggcatgggcttgtcaaaccagtccagctacgggggcccagccagccagcagctgagtgggggttacggaggcggctacggtggccagagcagcatgagtggatacgaccaagttttacaggaaaactccagtgatttttcaatcaaacattgcataggtaaccaaggagcagtgaacagcagctactacagtagttggaagcccgtgcatctatggggcgtgaacggaatggggagggttgtctagcatgtccagtatgagtggtggatggggaatgtaattgatcgatcctgatcactgactcttggtcaacccttttttttttttttttttttttctttaagaaaacttcagtttaacacgtttctgcaatacaagcttgtgatttatgcttactctaagtcggaaatcaggattgttatgaagacttaaggcccagtattttttgaatacaatactcatctaggatgtaacagtgaagctgagtagactataactgttaaacttaagttccagcttttctccaagttaggttatagggatgtacttaagcagtaagcgttatttagggtaaaaggcaggttggaatttatggttaaatggttggcccctttgccacggtttaaattggaacactgttttggggatggcatggttggaaaggaccatggcttttattttttttgtaaaacaatatagggagctgtgtcctacttattaaaaggtggaaccattttgggccatgtttgttaaattctagtttcatttaataacctgtaaggcacgtaagtttaagcttttttttttttttaagttaatgggaaaaatttgagacgcaataccaatacttaggattttggtcttggtgtttgtatgaaattctgaggccttgatttaaatctttcattgtattgtgatttccttttaggtatattgcgctaagtgaaacttgtcaaataaatcctccttttaaaaactgc

SEQ ID NO: 2066 - DNA, 572 bp, Homo sapiens
  SIMILAR (204)..(419): 771254mologous to Homo sapiens lysophosphatidic acid acyltransferase-delta,accession number AF156776,Smith-Waterman Score=265.
tccagtgttggctgacttacagctcttataaactagtggcaatttctgaacccagccggctccatctcagcttctggtttctaagtccatgtgccaaaggctgccaggaaggagacgccttcctgagtcctggatctttcttccttctggaaatctttgactgtgggtagttatttatttctgaataagagcgtccacgcatcatggacctcgcgggactgctgaagtctcagttcctgtgccacctgggcttctgctacgtctttattgcctcagggctaatcatcaacaccattcagctcttcactctcctcctctggcccattaacaagcagctcttcccggaagatcaactgcaagactgttcctattgcatctcaagccggcatgtggttctcttgccagaagaacaaggcaccaactcatcagacacagacaccagccatcacagggcattcccggtgaatgcatacgtgttcaattggtctttgcaggcatcacatagaacatgctctacgctacaaggtccccattcactggaagtggagcttgttggagggatctctgtctag

SEQ ID NO: 2067 - DNA, 818 bp, Homo sapiens
  SIMILAR (740)..(612): 341254mologous to Bacillus subtilis yxiL,accession number Z99124,Smith-Waterman Score=65.
  misc_feature (1)...(818): n = a,t,c or g
caacacttttaattccactgcagcactgctgggttatttcttgctttccaaattcccttgtctgtagctatctttcatcacttgcaaaaatagcacgtgctcaatcctagattaaaatataagctactctcagaattgataactcataccactctttttaaaaatcaactaaccagaattcagtttttattcacagttcttatctttagctcagggcgtaatataaaagcactaggtttaaaacttacttggtcagcagcaatccacttctaggtacatgtccaaaggaactgaagaaagcatctcaatgtgtgaatgcctacctgtgttcattcgcagcatttattcagaagaagccaagaggtggaagccaaagtaaatgtcccattgacagatcgaaantggtaaaccaaaatggcattatatacatacaatgccaatatccatttagccttaaaaacaaaattcctgccctatgcctacaacatggacgttatgcctaagtgaaataaacccagttcccgaaagggacaaatacaccccatttcccacttatatggggtatctaacgtcaaacgtcagaagaacaaagtactgcggtatttgcccacaagctggtggaggagaaaatgagttgttcaatgggtattgagtgtcagccacgcaagatggaaaagctttttgagatttgttgtataaaaatatgcctatagttaacaatactcttcggtacacacaaagtatgtgaaagggtaaattttatgtgtttttatcacaataaaacttgtaataaaagaaaaaaaaaaaaaaagtcgacc

SEQ ID NO: 2068 - DNA, 889 bp, Homo sapiens
  SIMILAR (344)..(466): 921254mologous to Homo sapiens Human adult testis secreted protein hy370_9,accession number W88405,Smith-Waterman Score=222.
atgtgggaaagcttggaactccctagagactggtttaatggctttgaccaaaattgtggcaatgatatggacaatgaaatccaggatgaggtggtctcagatggagatgagaaacttgttgggaactggagcaaagcagggacttccaatctctcagagacagagccccctctgtggaaggagagtcctggtcagctcagtgactacagggtggagaacagcatgtacattattaatccctgggtataccttgagagaatggggatgtataaaatcatattgaatcagacagccaggtattttgcaaaatttgcaccagataatgaacagaatattttatgggggtttgcctctgcagtatggctggcaatatatgacaggcagattaactgatcccacccgaaggacaaactggggctatgaatctggagatcatatgtgcatctctgtggacagttggtgggctggtcactttaagggatttaagagccacaatgtcaataatgattccttacgacatatccagcttttcacagaaggacgaaaacaaggttctgcaaaagcagtggcctctgaagggccagctctggtagttagcactagagggcacctgatgaccaggttagaaacaaaactcacaatgactccaccactaaagctgttccagctggatgggctgatagatttatggagggctctcagggccatgtgggagagccagtcagcctctagattccagagcatctgtggactgtgcttcccacagtgtggcacccataaacagcctctctggtgcactaagatagggaagctaaaagcagaccctgcaggtatgccttcagctgcagggatgtatgggaacagacacacaactctccctcccagataa

SEQ ID NO: 2069 - DNA, 259 bp, Homo sapiens
  SIMILAR (79)..(258): 731254mologous to Homo sapiens serologically defined breast cancer antigen NY-BR-16,accession number AF308285,Smith-Waterman Score=217.
atggcagcagtacagtccagctttggctcggcatcagagggagaccgtggaaagagagggagagggagaccgtggggagagggagagggcgagggcgagggcgaggttgaatcatttattttggaccaagaagatctggataacccagtgcttaaaacaacatcagagatattcttatcaagtactgcagaaggagcagacttacgcactgtggatccagagacacaggcacgactagaagcattgctagaagcagcag

SEQ ID NO: 2070 - DNA, 2625 bp, Homo sapiens
  SIMILAR (1720)..(2622): 1001254mologous to Homo sapiens Human transmembrane protein HTMPN-69,accession number Y57945,Smith-Waterman Score=1543.
atgctgcgctctctccgcctgcagcaggagtggctggaatgggaggaccggcggcgggcggctgcccagcagtgccggagccgcaggtgcccgtcaagtccccgggcccgactcactaggcctcaccgttcctgccgagacccagctgtccaccaagccctcttctccggcaacctgcagcaggtccaagccctgttccaagatgaagaggccgccaacatgattgtggagactgtgagcaaccagctggcctggtcggctgaacaggggttctgggtgctgacccccaagaccaagcagacggcacccctcgccatcgctacagcccgaggctacacagactgtgctcgacacctgatccggcagggagctgagctggatgcccgtgtcgggggtcgcgctgccttgcatgaggcctgtgcccgagcccagtttgactgtgtgcggctgctgctgaccttcggagccaaggctaatgtgctgactgaggagggcacgactcctttgcacctctgcacgatccccgagtccttgcagtgcgccaagttgctgctggaagcaggagcgacggtgaacctggcagcaggcgagagccaggagacgcccctgcacgtggcggcggcgcgcggcctggagcaacatgtggctctgtacctggagcatggcgccgacgtgggcctgcgcaccagccagggcgagactgcgctgaacacggcgtgcgctggggccgagggcccaggtagctgcaggcgacaccaggctgcggcgcgccggctcctggaggctggagctgatgcccgggcggccgggcgcaagcgccacacgccgctgcacaacgcttgtgccaacggctgcgggggcctggccgagctgctgctgcgttacggggcccgcgctgaggtccccaatggggcgggccacacgcccatggactgtgcgctgcaggccgtccaggactcccccaactgggagcctgaagtccttttcgccgcactgctggactacggggcgcagccagtgcgccctgagatgctgaaacactgcgccaacttccctcgggccctggaagtcctgcttaatgcctatccttgtgtcccatcctgtgagacctgggtggaggcggtgctcccagagctgtggaaggagcacgaagccttctacagctcggccctgtgcatggtgaaccagccaaggcagctgcagcacctggcccgactagctgtgcgcgctcggttgggaagccgctgccggcagggtgccacccggctgccactgcccccgctcctcagggactacctgctgctgcatatgaagcggagccgctgccgcgaccgaccgcagccgccgccgcccgaccgccgggaggatggagttcagcgggcagcggagctgtctcagtctttgccgccgcgccggcgagcgccgcccgggaggcagcggctggaggagcggacgggccccgcggggcccgagggcaaggagcagccgcctgccttggcctcccaaagtgccgagattgcagcctctgcccggctgccaccccgtctgggaagtgaggagcgtctctgcctggccgcccatcgtctgggatataattctttgagcaactactggggcattatattggacacttcagtaccaagagaaatacatacgatccttgtctaccaggagtctaatagaaagatggacagcgtggaccctgccagcagccaggccatggagctctctgatgtcaccctcattgagggtgtgggtaatgaggtgatggtggtggcaggtgtggtggtgctgattctagccttggtcctagcttggctctctacctacgtagcagacagcggtagcaaccagctcctgggcgctattgtgtcagcaggcgacacatccgtcctccacctggggcatgtggaccacctggtggcaggccaaggcaaccccgagccaactgaactcccccatccatcagagggtaatgatgagaaggctgaagaggcgggtgaaggtcggggagactccactggggaggctggagctgggggtggtgttgagcccagccttgagcatctccttgacatccaaggcctgcccaaaagacaagcaggtgcaggcagcagcagtccagaggcccccctgagatctgaggatagcacctgcctccctcccagccctggcctcatcactgtgcggctcaaattcctcaatgataccgaggagctggctgtggctaggccagaggataccgtgggtgccctgaagagcaaatacttccctggacaagaaagccagatgaaactgatctaccagggccgcctgctacaagacccagcccgcacactgcgttctctgaacattaccgacaactgtgtgattcactgccaccgctcacccccagggtcagctgttccaggcccctcagcctccttggccccctcggccactgagccacccagccttggtgtcaatgtgggcagcctcatggtgcctgtctttgtggtgctgttgggtgtggtctggtacttccgaatcaattaccgccaattcttcacagcacctgccactgtctccctggtgggagtcaccgtcttcttcagcttcctagtatttgggatgtatggacgataa

SEQ ID NO: 2071 - DNA, 2950 bp, Homo sapiens
  SIMILAR (1201)..(1157): 471254mologous to Homo sapiens Human PRO1342 (UNQ697) amino acid sequence SEQ ID NO:243,accession number Y99408,Smith-Waterman Score=41.
gccactgcactccagcctggcgacagagcaagactgcgtctcaaaaaaaaaaaaaaaaaaaaggctggagtgcaacggcacaatctcggctcaccgcaacctccgcctcccgggttcaagcgattctgctgcctcagcctctccggagtagctgggactacaggtgcccgccaccacgcccggctaattttttgtatttttagtagagacagggtttctccatattggtcaggctggtctcgaactcccaacctcaggtgatccgcatgcctcagcctcccaaagttctgggattacaggcatgagccaccgcacccggccatttgtatgtaattttctatatttattgaaatgcattttaagtaatatgaaagcatttttctccttacaatggaaaaaccaacttgattttacatttatttatataacctgacttaattctatgtaagtcaagtgaaaaaggaaacaactgctctgtggaatcaacctgaagatgtctaatttttcctctgatgccaccagacttaaagcagttcacgatcctctctacaaagaagtatatttaggttctccctctccctctccctctccctctccccacggtctccctctgatgccgagccgaagctggactgtactgctgccatctcggctcactgcaacctccctgtcctgattctcctgcctcagcctgccgagtgcctgcgattgcaggcgcgcgccgccacgcctgactggttttcggtttttttttggtggagacggggattcgctgtgttggctgggctggtctccagctcctaacccgtgagtgaatccgccaagccttcggccttcccgaggtgccgggattgcaagacggagtcttgttaactcaagtgctcaaatggtgcccaggctggagtgcagtggcgtgatctcggctagctacaacctcccacttccccagccgcctgtcttggccccccaaagtgccgagattgcagcctctgcccggccgcttaccccgtctgggaaagtgaggaagcgtctctgcctggccgcccatcgtctgggatgtgaggagcccctctgccctggctgcccagtctggaaagtgaaggaagtgtctctgcccggccgcccatcccatctaggaagtgaggagcgcctcttcccacccgccatcccatctaggaagtgagggagcgtctctgcccggccgcccatcgtctgagatgtggggagcgcctctgcccggccgcgaccccgtctgagaagtgaggagcgtctcagcccggccgccatcccatctaggaaacatttaattttggcttctgctgctagccggatcttcattgccaaaagaagcacccaaccctctgcagtggctattggccgaccttccgtaccccagtgcactatgcggctttcagttaataactgctctaggccacctggcattttcaaggcatccctgcactcacacagaggtacacaggcactcaccacacagaagaagagcccagcaaagagccccacggccgccacaaccgagaccagggtgatgaggaagatttcccacggcaccagggacccaccaggcttcgcctcactcactgcagtagatgcactatgggaagttgtgtgcattccagtcagagctgctgttccagagcctgcagaggtcacactggacccagagttggtggctgtgttggccccactggaggttgtgctggactcagaattggtggcagtgctggccccactggacactgtgctggactcagagttggtggctgtgctggccccactggaggtcgtgctggactcagaggtggtggctgtgctggccccactggacactgtgctggactcagagttggtggctgtgctggtcccactggaggtcgtgctggacccagagttggtggctgtgctggccccactggaggttgtgctggactcagagttggtggctgtgctggccccactggaggtcgtgctggactcagagttggtggctgtgctggccccactggaggttgtgctggagtcagagttggtggctgtgttggccccactggaggttgtactggactcagagttggtggctgtgttggccccactggagggtgtgctggactcagaattggtgactgtgctgatcccactggacactgtgctggactcagagttggtggctgtgccggccccactggaggtcgtgctggactcagagttggtggctgtgccggccccactggagggtgtgctggactcagagttggtggctgtgctggccccactggaggtcgtgctggactcagagttggtggctgtgccagccccattggaggtcgttctggactcagagttggtggctgtgctggccccactggaggttgtgctggactcagagttggtggcagtgctggccctactggacactgtgctggactcagagttggtggctgtgctggccccactggaggttgtgctggactcagagttggtggctgtgctggcctcactggaggttgtgctggagtcagagttggtggctgtgctagccccactggaggttgtgctggagtcagagttggtggctgtgctggccccactggagggtgtgctggactcagagttggtggctgtgctggccccactggaggttgtgctggactcagagttggtggctatgctgatcccactggacgctgtgctgaactcagagttggtggctgtgctgatcccactggaggttgtatggaactcagagttggtgactatgctgaccccattggaggtcacgctggaccctgagatggtggctgtgctgaccccactggaggtcacactggacccagagttggtggctgtgctggctccactggagatcacactggatccagtgttggcagaggtgctagtctcattggaatttgttgctgaagaaatcatataa

SEQ ID NO: 2072 - DNA, 3384 bp, Homo sapiens
  SIMILAR (2016)..(2957): 301254mologous to Homo sapiens 80K-L protein,accession number D10522,Smith-Waterman Score=181.
ttgagtaacaagatgctaacacactttcaaaaaaaaaaaaaaaaaaaggatgcttaaaactatgctaaaggcccatgaactgacatcatccattcaacaccattactttgttacataaacctgttttcttaaggtagaacatattatgcaataatttggaaattagccaagcactaagcaattacaatagcaggtaatacaccatcaatttttgaaacacatttggtcacatttcatgacccatctgcagtatggattctatagactctcactcagtttaaaatttgtttctggacctgaatgacaagagaatggctttatgaaattttctcataagacatttaaatagtcttaggttcacaccccttttgttgtaaatgatttaatctgacatgctatatagctacaataaaaataattatgttcaattcttaaatgaaaactaaatgccaataaatggtaacagatttgacatggaatgttgtaagatcttcctctacgtaatctgacactgcgcctcactgaatttcagagcttgaaaacttcagattaaaaaccacaataaaatttactcttgatggcatgcaagatcttcctaaaattaaccctaggccctagaagtctcagtattattggaccataaaaaaacacaacaaattggtacattttattcaccatttatttttcgcttttagtgtgctcacaggaaaaattaggacaaccttaagcgggagttaaatagaaatttttgtaagcaaagttacattccatctctaagtcaaattggtcaaagcatctccagtatctaccaaacctgatggaccaggatgctacacaaaacccattgcatcttgaagatttttttttcctttattcctcaaagacggactggaaaaagaaagcattatctgcctgtaatccaaaaacataccccacagtataaaccagtaacccatccccacttatccacagcttgggttgagtttaaaatttcgtgttttaaaaggtcccaagatgactgccagttttaacaaaaatgggggcagggtgggaaaggttggcaaactttcatgtggcttctggggtttccaggtttgttttttattaccatagtcacaggttaaaaaccaccctgctgggtaatacataattacactttaataagggtcataaacccggcaaataaaacaaataaagcctatacaacttgtagttcctacttaatcactgaactggtacagctaacatggagataaagtgaaaagttgctaatggtttaaaatgaactccctaagactatggatcgttttttttttttttaaatctgggtaattggtgttttttcttttttcctctttccttcttaaactcaggactggtagtgttgtaaacctgcctcacaaaatacatgggtattaccttttctttaaaaaaaaaaaaaaaaaagacagcctttacaccatttctagtggcacaactattttcggcaatgttatgcaccacttcaatttccccattgtgacccctatcacttcatttgatatccctttttgacccacccatctccttcatatatgggcatgtccatagattgacaaagaaagtttacacttttgaataaagatgcaaagtatgcaaaaacattaatactgatgccgaaaaaaataaaaaataaaagagaaacaaggccagaggaagaaggtggttttaagctctcctcgacctgttggaatggtgggttaacagaatgattttgagatgggatctgtggggaggggagaaaaaaaaaaaacaacaaaatttggtgcttaaaaaaaagtaaaataaaaaaagacatctttaaaatcaatccctggttgtagacaagttctccaaaaccagtggcctggcaccactccaaccaaacaaacgggggagaaaatgttcttcgattatctcacaaaagcttgctcttttactctgccgacttccgctgggggggctttaggactgcactcgggctgggcctcatgtgagggggctgcgcaggcttgattgaggctgcggcggccgcgggctcctccgcgggggctgcctcctgctccgggggcgcgccgggcccggcggcggagggggcctcgcaggcggcggcgctggccccggcctcctcggcctttttctcctccaccttgctgggctcctcggcggccttggtctcgtcgctggcgggcggcttctctggcgcgacagcggcctcctggggcttggcctcctgcgggtcgccacccgccgccccctcctcgcccgctgccgcctcctcgcccggcgccgctgcctgctccccggaggccgcgcccgcctcggcggcggccgcagctgcgcccccggcggcctcgtccttgccgccttcggcagcgggcgcctcagcctcaccgccttctccagcctccttcttgttcttcttgaaggagaagccgctcagcttgaaagacttcttgaaggaaaagcgcttctttttttttttcggggtctcgttgctgggcgagggcgtggccccgtcctcggccttgggcgaagaagtcgaggaggcggccgacgcggcctctccctccgcggccgtggccgagccgggctcggcagcctcgccttccgcgggggcctccttctctaccgggctggccccggcctcgggggcagcggcggcggccggctcacctttctcggccgaggagggcgacgccgccccgctcccggcggccgcgggctcctccttgtcggcggccggggcgctgccgttggcctgcagctcctccttggcgcccgactcggcggccgcgggcgaagcgtcgccgtttaccttcactttggcccattctcccttgtcccgttcgcttttggaaaagccgaacgaaggcccaacagccgcctcccccccaagccctctcccgcggcggccttctccccttcgctgcggtccttggagaacttgggcaccccatgctggccttccttccaacaaagaaactccaacagatcccaagaggggaaaacaaagagccctcgggttggtgtaacgacggggcgagcagcagcagcagcggcggcggcaaacagcggcagcggcacacacaccggatggaagcgggggtgggggtggtggagaggacagaacagaaccgattaaatacactccggataaaaaaattttaagtccgaagagattcaaaaagcagcagcaccaggaggggaggggaaaaagggttggaaaagttcgaggcacaaaaaaagggagcccaagttttagtttcgaaaaaaaaagaagtaataaaaaaatccccagatttgtagccgcactgtagacaagaggaaaatggagaaatctccctggttgctaataagatgcgg

SEQ ID NO: 2073 - DNA, 565 bp, Homo sapiens
atggagacagccttacattccttgtaccaggatctgtctcgggttgacatctggggcgagtcaagaatgtatttggaaaaaatcccatccgcaaactgttttccagctgacaacaactgggtgtcctacaattcaattacatgttggcatcatctacctggagaaagcttcagatcccacaggttgaggactcagtcccacaagactgcccctgacttcgccagacctgtacttttgaccaacctgctacaaagaggggattgtcaagactccctccgtggatttgatcaattggctagagcttacagaactcagggaaatagtttacttattataaagcctattagatgaagagccaggtggaagagatgcatgggggaatgcatatgtgagcgcttccatgccctctccaggtgctgccccaccctacggtcacctctatgttaccagacactcctgttactcaggagattacaaaggtctcaggagctctgtgtcaggaaccgggttcaaagaccacgtattagtgcaaaagattgtataccccaatctacaagagttttag

SEQ ID NO: 2074 - DNA, 567 bp, Homo sapiens
  SIMILAR (26)..(178): 411254mologous to Plasmodium falciparum merozoite surface antigen 1,accession number U91651,Smith-Waterman Score=69.
atgagggagaaccagaaaagagatttctggccgtcgtctggaatcatcctacgcgtttaccagtttgttgtcagattgtccttctggaatggaagctccacgtggacctgggactgcagccccctcctccctgacacggggcctgcctcggtccaaaagctccagaaccgggaaatcaaggaagcaggagacccaattccagccctgcttcttctgcctgagcctcagttttttgatctgcaatctgcatgccctgcatatctcagggccaggctgaagatcgaccggactgctctgaggcctgggagccgccccagctgtgagagtgtgaagtggactcacgctggcacccacgtgccgagctgcggatggaaagctgagaaaggtgaagggaagggctactttttcctaaaggagaaaaaagctttcagacaaagctcgtaccaacccctgaactgcaaatttgctcaagtgaccgtgcatacttatattcctaatttaaatgattatttatgtcaaacgctcattgtgaaacttgaaaatgttgtattacattacatcaaataa

SEQ ID NO: 2075 - DNA, 442 bp, Homo sapiens
  SIMILAR (158)..(298): 321254mologous to Bos taurus cytochrome c oxidase subunit VIb (AA 1-86),accession number X15112,Smith-Waterman Score=62.
ttagagcaccatagagtactgctccctagcaggaaagatgtcctcagaggtcttggaggaattcctgggccactttgttccctgctatagacaggtctctggaagccaccacccccactcccagcgatcagggcctgtgcccatattgtcctgagctgacaccctctttagaggaatgaaccaggcctcttgtgccggccaccaggactttgtctctctcaagggaagcaggatgacctgcgttcagatctgtgaatggcgccttgaagcctggaaaggacagtgtggtgttagctgggcttaggattgcctatttccacatcccgaggcctagtcccaaagcacaatggccacagcccaccctcggggctgtcgtcttggcctcctggtcaattctgtcctgagtcgtgctcttagaagacaccctggctgcgttccatgg

SEQ ID NO: 2076 - DNA, 308 bp, Homo sapiens
  SIMILAR (2)..(79): 961254mologous to Homo sapiens hypothetical protein,accession number AL133109,Smith-Waterman Score=123.
  misc_feature (1)...(308): n = a,t,c or g
ggcagcttattttggattggttcacaatgtggatcaaacaggaaaatctgttatcatcaacaagaccagcagcaccagaatntnccgagtcttccagcagtgcaggctcctcaggntcgctgtcccgcacccatccacctctccagagcacacccctagtctcaggtgtggcagctggctctccaggctgtgtgccttatccagagaatggaatagggggccaggttgctcccagcagcaccagctacatcctccttccacttgaagctgcaacaggcatcccgcctgggaagcaatccttctttaat

SEQ ID NO: 2077 - DNA, 371 bp, Homo sapiens
  SIMILAR (2)..(259): 791254mologous to Homo sapiens KIAA1002 protein,accession number AB023219,Smith-Waterman Score=368.
  misc_feature (1)...(371): n = a,t,c or g
ggattctacaggcatagacttacacgagtttctgattaacacattaaagaataattccagggacaggatgatacttttgaaaatggagcaggaaattattgatttcattgctgacaacaataatcattataaaaagttccctcagatgtcatcgtatcagaggatgcttgtccatcgagtggcagcttattttggattggttcacaatgtggatcaaacaggnaaatctgttatcatcaacaagnccagcagcaccagaatnttaccagccagtcttgtctngtcaacaggggnttccaagggctaataggagtncagcagcccacctcagagtcagacgtggttaaatnacccccaagggactccggtgc

SEQ ID NO: 2078 - DNA, 567 bp, Homo sapiens
  SIMILAR (202)..(429): 1001254mologous to Homo sapiens hypothetical protein,accession number AL133109,Smith-Waterman Score=395.
tgaatttttaaagccataatcttgttcactcttagaagtaaaaaaaagagaaaatgcattcttagggaataaacatctgataacacattctgaatgtggagactgagatgtctgaaggctgccttttgaaccagtagttttaccccatgaaacatcactgtgttctttctgcacaaccagttcaaaagatctcttttcttcgcaggttaccagccagtcttgtctggtcaacagggattccaaggcctaataggagtgcagcagccacctcagagtcagaacgtgataaataaccaacaaggaactccggtgcaaagcgtgatggtttcctacccaacaatgtcttcttatcaggtgccaatgacccagggttctcaaggactgccccagcagtcataccaacagccaatcatgctacctaaccaggcagctataacagaatacctgaagctgggtaatttacaaagaaacaaagtttatttggctcaaggtgctgatggctggaaagtccaagattgggcagctgcatctggtgagagcctcaagctgcttcaactcgtggcataa

SEQ ID NO: 2079 - DNA, 1305 bp, Homo sapiens
  SIMILAR (7)..(972): 851254mologous to Homo sapiens hypothetical protein,accession number AL133109,Smith-Waterman Score=1397.
atgccaggttccgagtcttccagcagtgcaggctcctcaggatcgctgtcccgcacccatccacctctccagagcacacccctagtctcaggtgtggcagctggctctccaggctgtgtgccttatccagagaatggaatagggggccaggttgctcccagcagcaccagctacatcctccttccacttgaagctgcaacaggcatcccgcctggaagcatccttcttaatccacacacaggccagccctttgtgaatcccgatggaactcctgcaatatacaacccacccaccagtcagcagcccctgcgaagcgccatggtggggcagtcccaacagcagccaccacagcagcagccctccccgcagccccaacagcaggtccagccaccgcagccacagatggcaggccctctggtcactcagagtataccagcaaagaaggaactgaatgccttcagagttagaaatcaggaacagagagatacaggaactttgcatgagggttcgggaaagatctcaaggatggtgttgggatgggaaccattatcaccctatgctcctgatagagatgatgtggcaacacagtttggccagatgaccctgagccggcagtcctcgggggagactcctgaacccccatcaggtcctgtctacccatcctcccttatgccacagccggcccagcagcccagctatgtaatcgcctctacaggccagcagcttcctacaggaggattctcaggctctggccctcccatctcccagcaggtcctccagccccctccctcaccacagggatttgtgcaacagcctccgcctgcacagatgcctgtatattattacccatctggtcagtaccctacctcaaccacgcaacagtaccggcccatggccccggttcagtacaacgctcagaggagtcaacagatgccacaggcagcacagcaagcagtactggaagtgctgtcacccctggtcagcaccgtgatgcccccaaaactcgccgtcttggtcatggcgggctttagattgcggttggaactgtcggagtctgtgctgctccaggccctttggtggtcagaccacttgagttcattttctgagctgctctgtcgactcccagatgttctccctgagccatctctgttgcccctggagtacgaccaccagaaagatgcacagggacaggattaccttacatgcatggtgttggttactctcctactggaatcacctactggaatccaggaagatgatagtaatgagatatctgtcattggagctgggccctcttgtaagtaa

SEQ ID NO: 2080 - DNA, 1488 bp, Homo sapiens
  SIMILAR (757)..(1017): 741254mologous to Homo sapiens KIAA1002 protein,accession number AB023219,Smith-Waterman Score=363.
cccacgcgtccggagggaagacagagcagtgcatggttatggatactggacaaggatatttggaaaggttgacgatgtgtcacactgtgtaagggaatcgcatggagatgggcattccgaactgttaatggggacatgggactccagttgtctctgatcacttgtgtggattttcctggcgtagaacgacagaagccgctagtaagtcgccaagacctaccgcaagaattttcgccccaaagggcataaaatcttgttattttaatttgcatctgggagaatgtctgagcaaggagacctgaatcaggcaatagcagaggaaggagggactgagcaggagacggccactccagagaacggcattgttaaatcagaaagtctggatgaagaggagaaactgggaacttgcagaggcggctggaggctcagaatcaagaaagaagaaaatccaagtcaggagcaggaaaaggtaaactgactcgcagtcttgctgtctgtgaggaatcttctgccagaccaggaggtgaaagtcttcaggatcaggaatcaattcatttacagctttccagtttttccagcctgcaagaggaggataaatctaggaaagatgactctgaaagagaaaaagaaaaggataaaaacaaagataaaacctctgaaaaacccaagatcagaatgttatcaaaagattgcagccaagaatacacggattctacaggcatagacttacacgagtttctgattaacacattaaagaataattccagtaatcattataaaaagttccctcagatgtcatcgtatcagaggatgcttgtccatcgagtggcagcttattttggattggatcacaatgtggatcaaacaggaaaatctgttatcatcaacaagaccagcagcaccagaataccagagcaaaggttttgtgaacatttaaaagatgaaaaaggtgaagaatcccagaagcggtttatcttgaagcgagataactctagtattgataaagaagacaatcagtttccgctgcatgtctgggagggtcgggatgccacaggctccgagctgtggagaaaagctttgtcagtcgcatatccagatgtctgtgtaactatggcagtcgttccactccctacagctttgtccttcagttgtgcacaaattgagctggattatcaatacggaccgatgatcaaccggtgtagctgtaaagaacaaaccttgttatgtccccaagctttcaaaatgatttcttccctcagctaccttgaactagccacttcctcttttttcaccggcattctgcctccttctgaggagtcagaaccacacagctctgcagctccagaagaaaccactagctcggaatccgacggccacacgtttctccagctgtttcattcacatttctcttcttctgacctccatgccgaacagactaaatctaaaacctggagacgtcctgaaggaaaaataccctatgctgcatga

SEQ ID NO: 2081 - DNA, 2548 bp, Homo sapiens
  SIMILAR (1738)..(1986): 401254mologous to Homo sapiens hypothetical protein,accession number AL133109,Smith-Waterman Score=101.
  misc_feature (1)...(2548): n = a,t,c or g
acagggacaggatgatacttttgaaaatggagcaggaaattattgatttcattgctgacaacaataatcattataaaaagttccctcagatgtcatcgtatcagaggatgcttgtccatcgagtggcagcttattttggattggatcacaatgtggatcaaacaggaaaatctgttatcatcaacaagaccagcagcaccagaataccagagcaaaggttttgtgaacatttaaaagatgaaaaaggtgaagaatcccagaagcggtttatcttgaagcgagataactctagtattgataaagaagacaatcagtcagtttgctcccaggaaagcctttttgtggaaaacagtaggctcttggaagacagtaacatatgcaatgagacctataagaaaagacagctctttcggggcaacagagatggctcagggagaacatctgggagtcgacagagcagctcagaaaatgaactcaagtggtctgaccaccaaagggcctggagcagcacagactccgacagttccaaccgcaatctaaagcccgccatgaccaagacggcgagttttgggggcatcacggtgctgaccaggggtgacagcacttccagtactaggagtaccgggaagctgtccaaagcaggttccgagtcttccagcagtgcaggctcctcaggatcgctgtcccgcacccatccacctctccagagcacacccctagtcgcagggtgtggcagctggctctccaggctgtgtgccttagtccagagaatggaatagggggccaggttgctcccagcagcaccagctacatcctccttccacttgaagctgcaacaggcatcccgcctggaagcatccttcttaatccacacacaggccagccctttgtgaatcccgatggaactcctgcaatatacaacccacccaccagtcagcagcccctgcgaagcgccatggtggggcagtcccaacagcagccgccacagcagcagccctccccgcagccccaacagcaggtccagccaccgcagccacagatggcaggccctctggtcactcagtctgtccaggggctgcaggcttcctcccagtcagtgcaatatccggcagtctcttttcctccccagcacctcctacctgtgtctccaacgcagcactttcccatgagagatgatgtggcaacacagtttgggccagatgaccctgagccggcagtcctcgggggagactcctgaacccccatcaggtcctgtctacccatcctcccttatgccacagccggcccagcagcccagctatgtaatcgcctctacaggccagcagcttcctacaggaggattctcaggctctggccctcccatctcccagcaggtcctccagccccctccctcaccacagggattcgtgcaacagcctccgcctgcacagatgcctgtatattattacccatctggtcagtaccctacctcaaccacgcaacagtaccggcccatggccccggttcagtacaacgctcagaggagtcaacagatgccacaggcagcacagcaagcaggttaccagccagtcttgtctggtcaacagggattccaaggcctaataggagtgcagcagccacctcagagtcagaacgtgataaataaccaacaaggaactccggtgcaaagcgtgatggtttcctacccaacaatgtcttcttatcaggtgccaatgacccagggttctcaaggactgccccagcagtcattaccaacagccaatcatgctacctaaccagggcaggtcaagggtcacttcccaggccactgggaatgcctgtttactgttaatgttcacaccgcccacccctcaggaacaaccttagggcttgattggggcccacattgcccttccaggcattgttcccagttgatgttcaggctagcttgcaggaacaaactgttggcaagtatggaggcantgctgggttgggcaggtcaaattctgaggagctcttggctgttggtacatttctttcagatatttctcatgggcctttgatggaagaggaacaaggtgggaaaactggctgaggacttaagtattcactcaacactcaaatggattgctgctggtattctgtaaaaaataaacaaagactaatatacacgttagctggttaatggtgcatatttctgtccatgtccggcctaggtatgccctttaatagccttagcctagtgacatgaattccatccaaggtaagattttcctccctacccactgaatacccactgtgtagattataatatcccctaatttggattagttttgtactttgtgttgagtttgtgatgcctaaaagtatttaaaaattatatactaaatcacattgtaccaaagctgtaatggaaaagcaaagaagaattgatgaattgaaggaataatttatatacattatagagttttcttttttaatggatatatactgtattgtagtgtttaatcaaaataaaactatttgaccttatggaggaaggtcatgtttttaccaccagtttggttca

SEQ ID NO: 2082 - DNA, 284 bp, Homo sapiens
  SIMILAR (71)..(205): 381254mologous to Homo sapiens high mobility group protein,accession number M23618,Smith-Waterman Score=68.
acctgcgtgctctgaggctgcccgaccctgagctccagaacagaccatcgagttcaggagacaagcatgtcagccatgacacaaggcagatgagagggacccccagcgtccacacgtggaggcagcgggggcagccggagatggaacgaggaaaacagttaagcaacgatggactccagggggaaaaccggagaagaagaaactgtaattccagtccgtccacatggcccagcagtgaacgacaattgcatggtcagagagagcaaaagcaccacgccgactga

SEQ ID NO: 2083 - DNA, 2466 bp, Homo sapiens
  SIMILAR (1437)..(904): 981254mologous to Homo sapiens GPR-NGA,accession number U55312,Smith-Waterman Score=938.
atgtggatgggccgtaaatccagtgacaagtgtccttataagactaagggagtcagtgaagcaggatatttccctgaccctttcacgggactcacaacgggtgcctcatatactcagcccaccactctcaactccttgcaggagggagcatgtgagcaaatgagtgagggaactggagtgaatgagcacgggaatcggccagctgctttggtgctagcaggagtgaactttatgcaggcccaatggcagcatccagagttttacagtgtttgggacaaagtggttggaggcaaagtaaagaagcccggtaaacgtggtcggaagccagccaaaattgacttgaaagcaaaacttgagaggagccggcagagtgcaagagaatgccgagcccgaaaaaagctgagatatcagtatttggaagagttggtatccagtcgagaaagagctatatgtgccctcagagaggaactggaaatgctggcttttgctggctccccagaggagaaccaattgtgtgcatctcttcccaacttgatgttcagtgacatcaggctgtacaggaagcatgactggggaggcctcaggaaacttacagtcatgatggaagacaaagtgagagcaggcatcttgcatggcagcattgggaccagggatcgggggtaccacacgcttttaaataaccggatcttcagcaggctggacattaacgtattcgatgaagatgagaagaaagggagaattcagattccactcaaaggatgcatccctgtcccttccctcctcaccgacggtttacgagaacctggagccagaatcctgattaaaatccaaccacagaagacttgccagcaagttccaatatatggcgtgctttccatagcagatctggctagtggttacttggaggaagcccaccaagaagtggatgacagtgtaggcagtgccttcccaagaggaggggaggaaatagttacaatgactgtcccagttggagccatagaaaaagagcacaggggtcacaaagcctgcatcaaagacccacgatgccgcaatcattttcttggctttttctctggacaccttgaagctcagaggatagacgatggtgtagaaccggtctatgcagatggagaggagaacgtagatctggacacctggagtgagatattgaaaatatcgcacaaccttgcacgttgcactacccagcgtccaccttccagtggtgaactggagcaggacgaaaggcgtgctggcaacgctgatgagaaggtcagcacatgccatggagaccacaaagtagttggtggtagactgagtcctcctactcctatggatgaccaaacaaaccagggaattgccgaagatagaaaacaaccacagaatcccaaagaagatgctggctgtggccacttccccgggtttcagcacatagtgaagctgctttacacccatgagtctgtctgcccatttccccagcccaaccacttggaagcagaggatcccaatgctcagaaacaggacgagggagcccgaggagttcctgagtctagatttcccctgctgggtctggttttagatggagtggttagagaaaggttctctgaagaggttatatggcagctgaaaccccaacgacaggaagtccgccataacattcaggcagaagaaatgatgagtgcaaagaccctggtgggccacgagttcaccatgagttcaccagctgcaggcttcagcatcacaggacagcatgttccccagggatcaggcagacaagggcattttcctatgcacttcacacatacagcgcagctgccaggatatactttaggctgccaaaatgaaatgaagtcactttcttggctagcggcatttctctggggccgaggaattccacgaagaagatctctgcgaggcccagaaggccgcacaactacttcttcagaaacaaaattttttaaaaaagtaaaaatagaggaagtcagccagtttatcaccttggaaccagcgttttgtttggcttttccgcttttcactctacgaaaaagcccattggcggctacccaggttaccgtcctgttgccattgcgcctgcgcggcggttgtgaagattacagaaatctgggatggcttatgggacgcttctcagccctaagtaggaaaacagcagtgaaaatggcaaccaaaacatcacgcaggactgggggttttggggaaacagctcactttagagcagtgcagtgtagagctttccgtcttttaccagggtccacctttaacactgtttatctgaaaattttccccctggcttactcgcttgcagctgcccactttgcagaaggatggcgctctgatctctacgctccctgttccttcagggactccatagtattttttttcacgcgtcgtcgctactacagcagacgcctgcgttctcattatttgctgtacagatctccggtgccttga

SEQ ID NO: 2084 - DNA, 603 bp, Homo sapiens
  SIMILAR (578)..(249): 231254mologous to Mycobacterium tuberculosis echA10,accession number Z95584,Smith-Waterman Score=84.
atggtgcttctccccaaaaaggggcgtcggggatattcaccacggcgggtgtggagcccacacgagtacctgtcttatagctacctagatacagacgagaccttcgatgtcacagaccatgcacagtttgagcgggaccagggcatggagctgagctttggatatagacgacgaatcctgattaaaatccaaccacagaagacttgccagcaagttccaatatatggcgtgctttccatagcagatctggctagtgggtacttggaggaagggcacccccaaccaacacacaccccagtactggcacgcttccctgcaaaggcccagagaacccccagcaagcatcctgctgctggctctgggattcgtctaggtcccttccagcaattattgccagtgtcgggtgctgaatggaagtatgaagagttaatggaagcctttaaaactttgcataaagaatatgagcagctcaagatatctggattttctacagcagaaataagaaagggggagctcttcgccaagatggtggagcacatgtacgacatattcgacgaggacgtcgactcagagggcggtgtacgacgatcaacatgttcgtga

SEQ ID NO: 2085 - DNA, 954 bp, Homo sapiens
  SIMILAR (470)..(523): 501254mologous to Homo sapiens Human secreted protein, SEQ ID NO: 6708,accession number G02627,Smith-Waterman Score=47.
atggtgctggccacagagcctctctctgagccccgtgcccggctttaccagcctgctcatagctcaagaaatgcagagtctgctcaagggctgggaggagaagtcagggccaccggggattcactgatccatcaggtgatgggcccggaggatgtggatatgagaggcctctaccacgtggcaataaggcaaaaccctgccctcagagttacagagcccgggactcataccccagcagcaccgctcaacaactcagctgcgccctcagcacagcttcccaccctgagaggaagggtgctgagggtgcagggcggtgggaaccctaagcagctgaaggtgaacagccactggcaggatggacaggaaaagtcacaaaggtgcaggcaagctgggcctgccgcacaggaacttggccaaggaaaggcacagctggcctgcagctgctgggggtgccagcgcaagaagtcatgtagccaaccccatggcgaccaacaagggccactgtccctcaaaggcggccccaccagcacaaaagatggaaagtggaagctggctgggggggcttcacctggggaggacctgtccagcaaagagctgcgagtcactgatgagcatacgcacaagctctcccaacttcctgcagcaacccctcatcctgcccagtccctgcggccccgcccacccagctctcctggactcacccccaggaatacggctctcagaggcttcccaaagacgtgctggcatgctggtttctctcatgcttcttttctaccccaaactgcccctggccagctttcacggtccctcaaacatctgctaacacaacagttgctgcctgttctgaggcctgctcagggaggttcggggactcagtgtgtgggcagccgcaatcaatcaaacctctgtttcgacatcccgacccctccccacaaacatcttgcttctgtttga

SEQ ID NO: 2086 - DNA, 503 bp, Homo sapiens
  SIMILAR (67)..(138): 911254mologous to Homo sapiens Human secreted protein, SEQ ID NO: 4983,accession number G00902,Smith-Waterman Score=116.
  misc_feature (1)...(503): n = a,t,c or g
agggcnatganaatgatagctgtacgcctgcgcnaccggnccggaattccggggtcgacgggaggcaggaggaggacaccctgccgaccaaagagaccattgagcaggagaagcggagtgaaatttggtaagatgctggaggatttcctacccccgtcctcttcgagaccccagtcgtgatgtggaggaagagccacctgcaagatggacacgagccacaagctgcactgtgaacctgggcactctccagatcggatgcctggaaaaacagaaccggagactgctggtcccaaccaggtccacaacgttcgggggttgctcaagaggctgaaagagaagaaaaaggccaggttggagccccgggatggaccccccagtgctctgggctctagggagtcgctggccacactctctgaactggacctgggtgccgagcgggatgtgcggatctggccactgcaccccagccttctggnggagcctcactgctttcagagtacctg

SEQ ID NO: 2087 - DNA, 2063 bp, Homo sapiens
  SIMILAR (1239)..(1655): 791254mologous to Homo sapiens FLJ00087 protein,accession number AK024488,Smith-Waterman Score=529.
atggggaactcagggatccagatcggatgcctggaaaaacagaaccggagactgctggtcccaccaggtccacaacgttcgggtaaggcagccagtgaaggggttgctcaagaggctgaaagagaagaaaaaggccaggttggagccccgggatggaccccccagtgctctgggctctagggagtcgctggccacactctctgaactggacctgggtgccgagcgggatgtgcggatctggccactgcaccccagcctcctgggggagccccactgctttcaggtaacctggacgggtggaagccgctgcttctcttgtcgctcggccgctgagagagaccgctggatcgaggaccttcgtcgccaattccagcccaccaggacacgtggagcgggaagagacatggctgagcgtgtgggtgcacgaagcgaagggcttccccgagcagcggcgggggcacccggcgtgcgcgccgagctgtgctggatggcgcgctgctggcacgcacggcgcctcgggccggcccaggccgctcttctgggccgagcgcttccacttcgaggcgctgccaccggcacgtgcctgtcgctgcggctgcgcggcttgggcccgggaagcgcggtgctgggcgcgtggccctggcgctggaggagctggacgccccacgcgcgcctgccgcggtctggagcgctggttcccgctgctcggggcgccggcgggcgcagcgtgcgggcgcggattcgggcgcgtcgcctgcgcgtgctgccgtccgagcgtacaaggagctggcggagttcctcaccttccactatgcgcgcctctgcgggccctggagcccgcgctgcctgcgcaggccaaggaggagctggcggcaccatggacaggttgtgcggcgtctctgtgcttctactgaggactgtgaagtggaccccagcaaatgtccagcctcggagctgccagagcaccaggccagacttcggaacagctgcgaggaggtcttcgaaaccattatccattcctacgactggttccctgcgagctgggcatcgtgttctcaagctggcgagaagcatgtaaagaacgtggtctgaggtgctgggcccccgactggttcggtgagaaggaggcctacatgggcttcagaatagcttcctggaggaacatggaccagccatgcaatgcttcctggacagagccagtctctgcgcagcgttcgccgctcagagagttgggcccgccacggccggacgaagagcggcccctgcggcggccccggccggtgcagccacgcagagtgtcccggtccggcgtcctgcccgccgccgccaatctgcgggccctggccgcgacccaaaggctccctgagcatgggaccagcgccccggcccggccttggacccgggactccgcctcgctgcctcggaagccgtctgtaccctggcagcgccaaatggaccagccgcaagaccgaaaccaggcactgggcacgcaccgacctgtgaacaagttggcagagctgcagtgcgaggtggccgctctgcgtgaggagcagaaagtgctgtcccgcctcgtggagtcgctgagcacccaaatccgggccttgacggagcagcaggagcagctgcggggccagctgcaggatctggactccagggctccgtgctgggagctcagagtttgattcagagcacaacctaacaagcaaatgaaggcaccagtctgaaaaaccctggagccccgcctaaatgagatggagagaactcaggctcagctgagggatgctgtccagagcctgcacttttctccaaggacgcgggggtcttggagtcaaccccagcccctcaaagctccctgcctcaatggagacacccacctgagctgcccatcctgcctcatcacacgtggtctgggagcagagagatagccatcttagggggggtgtctgactttgccttagccctacttggcctacagtggggagtggagctgctggtcccaaccactctggcagtatgaagttgcccagtaaaatcttgatttcagtgaaaaaaaaaaaaaaaaa

SEQ ID NO: 2088 - DNA, 639 bp, Homo sapiens
  SIMILAR (137)..(376): 311254mologous to Caenorhabditis elegans Similar to repetitive proline-rich cell wall protein,accession number U40959,Smith-Waterman Score=74.
gcgccggggcactctaggctaatgtaatcatacgattacataattaacccagctgtctcattaagaaaatcaactggaattcagggcataattagtcatacggcaattagcatgctgatgagcgactgatgaaaagctgtctagatacccggcgtgccaggaccaccccggtcatggcaaagcggggcacaaacgacgcacctctccactctccacgcaagcacaccgaggaggagtccccaagtcacatccagggtgttctcactctagtgctgtgtcgagggaccgggggaggatggatggaggagggaaagccttgggaaggacggcagccggcaaaacctggcggcaacaggcctaacgcccatcttgtcatgcctgcttgtctttagaacagtggtggccaattcctcagcctgcaaacatacagtgtcctacatggagaggcggattgagccccaggtttatgaacctggccgaggaaggtcttgtttgccaacacctggagacctggaatacgtggactggagtcaccgtacagaatcaggctgcaatggccacatttctatcaccttcgagaaggctaccaagtggcacattgatgaacttcttggcatgaaaaccaggggctatttctaa

SEQ ID NO: 2089 - DNA, 1356 bp, Homo sapiens
  SIMILAR (403)..(1353): 951254mologous to Homo sapiens p40,accession number U93564,Smith-Waterman Score=1552.
atggcagaaggcaaggaggagcaagtcccatcttacatggatggcagcaggcaaagaaagaatgaggaagatgtaaaagcagaaacccctgataaaaccatcagctctctaaggggtgctggtgggtactacatgtggggccacactcgagctgccttctcagtcaacccctttggcagcttgggccaagtctctttgaagaggaagactgtgatatctgaactcaaacaggcagtgcccagagagagaagcacaggtccacgcaggcagccaaagccatcttcttggttgaaagatactcttttcggggggaggagccaagatggccgagtaggaacagctccggtctacagctcccagcgtgagcgacaaagaagacgggtgatttctgcatttgcatctgaggaacgcagttcctcaccagcaacggaacaaagctggatggagaatgactttgacgagctgagagaagaaggcttcagacgatcaaattactctgagctacgggaggacattcaaaccaaaggcaaagaagttgaaaactttgaaaaaaatttagaagaatgtataactagaataaccaatacagagaagtgcttaaaggcgctgatggagctgaaaaccaaggctcgagaactacgtgaagaatgcagaagcctcaggagccgatgcgatcaactggaagaaagggtatcagcgatggaagatgaaatgaatgaaatgaagcgagaagggaagtctagagaaaaaagaataaaaagaaatgagcaaagcctccaagaaatatgggactatgtgaaaagaccaaatctacgtctgattggtgtacctgaaagtgatgcggagaatggaaccaagttggaaaacactctgcaggatattatccaggagaacttccccaatctagcaaggcaggccaacgttcagattcaggaaatacagagaacgccacaaagatactcctcgagaagagcaactccaagacacataattgtcagattcaccaaagttgaaatgaaggaaaaaatgttaagggcagccagagagaaaggtcgggttaccctcaaagggaagcccatgagactaacagcgaatctctcggcagaaaccctacaagccagaagagagtgggggccaatattcaacactcttaaagaaaagaattttcaacccagaatttcatatccagccaaactaagcttcataagcgaaggagaaataaaatactttacagacaagcaaatgctgagagattttgtcaccaccagacctgccttacaagagctcctgaaggaagcacgaaacatggaaaggaacaaccggtaccagctgctgcaaaattatgccaaaatgtaa

SEQ ID NO: 2090 - DNA, 1326 bp, Homo sapiens
  SIMILAR (478)..(1323): 671254mologous to Homo sapiens p40,accession number U93573,Smith-Waterman Score=958.
acccacactccagcagacttattgttcatgtgctttcaaatagacctcagctctggaccagcccccaggtttcaggctggaccctcggccccagaatccaagtcagccctcacagatctgtcctctagattaggacccacacattcagtctccagctttgcccaggggactcaaggtttatgttcattcccatggctccaggaaccaagacttgatgttgtgctgacccaatcagccaacaacaccatgaccaacacccattcttatgggcttaaaggtcgagcccaacatttacaagccccacctttacaattacactccccgtcacccatccaaacaatgctgaactttactgttggtcataaacaaaggtgtcaagcattgtccactaccttcatgagttttgtcccagagaaatgcaggactattatccactgcagtgctcgggtagaggaatgcagctcctcaccagcaatggaacaaagctggatggagaatgactttgacgagctgagagaagaaggcttcagacgatcaaattactctgagctatgggaggacattcaaaccaaaggcaaagaagttgaaaacattgaaaaaaatttagaagaatgtataactagaataatcaatacagagaagtgcttaaaggagctgatggagctgaaaaccaaggctcaagaactacatgaagaatgcagaagcctcaggagccgatgcgatcaactggaagaaagggtatcagcaatggaagatgaaatgaatgaaatgaaaccaaatctacgcctgattggtgtacctgaaagtgatgtggagaatggaaccaagttggaaaacactctgcaggatattatccaggagaacttccccaatctagcaaggcaggccaacgttcagattcaggaaatacagagaacaccacaaagatactcctcgagaagagcaactccaagacacttaattgtcagattcaccaaagttgaaatgaaggaaaaaatgttaagggcagccagagagaaaggtcgggttaccctcaaagggaagcccatcagactgacagcggatctctcggcagaaaccctacaagccagaagagagtgggggccaatattcaacatttttaaagaaaagaattttcaacccagaatttcatatccagccaaactaagcttcataagtgaaggagaaattaaatactttacagacaagcaaatgctgagagattttgtcaccaccaggcctgccctaaaagagctcctgaaggaagcgctaaacatggaaacgaacaaccagtaccagctgctgcaaaatcatgccaaaatgtaa

SEQ ID NO: 2091 - DNA, 1041 bp, Homo sapiens
  SIMILAR (475)..(936): 941254mologous to Homo sapiens p40,accession number U93570,Smith-Waterman Score=751.
atgagtgtccactcctggaagccctcttggatcagacccatccgtagcctttctcccaagcgtcctctagggacccaagggacctctgaagtcccaccagatactcacatctgccagacaaaatttcacagtctttcttcaggaccacttctcttgtcagtccatccagttggaaagctatccgcagttgttggcagagtcttcatacacatactctcccagcgtgagcgacgaagaagacgggtgatttcagcatttccatctgaggtaccgggttcatctcaccagggagtgccagacagcgggtgcaggtcagtgggtgcgcaccccgtgcgcgagccgaagcagggcgaggcattgcctcactcaggaagcccaagggaaggaaaactaacaaacagaaaggacatccacaccaaaaacccatctgtacatcaccatcatcaaagaccaaaagtagataaaaccacaaagattgggaaaaaacagaacagaaaaactggaaactctaaaacgcagagcgcctctcctcctccaaaggaatgtagttcctcaccagcaacggaacaaagctggatggagaatgactttgatgagctgagagaagaaggcttcagacaatcaaattactctgagctacggaaggacattcaaaccaaaggcaaagaagttgaaaactttgaaaaaaatttagaagaatgtaaaactagaataaccaatacagagaagtgcttaaaggagctgatggagctgaaaaccaaggctcgagaactatgtgaagaatgcagaagcctcaggagccgatgcaatcaactggaagaaagggtatcagtgatggaagatgaaatgaatgaaatgaagcgagaagggaagtttagagaaaaaagaataaaaagaaatgagcaaagcctccaagaaatatgggactatgtgaaagaccaaatctacgtccgattggtgtacctgaaagtgacggggagaatggaaccaagttggaaaacactctgcaggatactatccaggagaacttccccaatctag

SEQ ID NO: 2092 - DNA, 1695 bp, Homo sapiens
  SIMILAR (94)..(1167): 941254mologous to Homo sapiens WD40 repeat domain 11 protein,accession number AF320223,Smith-Waterman Score=1776.
atggagagaagtttcaaagagaagagagctcagatttgggctatgggacaaatgtggaaggaggaagaaggaaatgaaaggtggagtgtggacagagtggtgactcttggaaaggaagacctgagggaggttaaatgggccagggaaaactatcaccataacattggctcaccatattgcttacggttagcttctgctgatgtcaatgggaagatcatcgtctgggatgtagcagcaggagtagctcagtgtgagatccaagagcatgccaagcctatccaggatgttcagtggttgtggaatcaagatgcttcccgcgatttactgcttgctatccacccgccaaattacattgtgctctggaatgccgacactggcaccaaactatggaagaagagctatgcagataacattctttctttttcttttgacccttttgatccctcacatttaactttgcttaccagcgagggtattgttttcatctcagacttctccccatccaagcctccctcaggccctgggaaaaaagtttacatatccagcccacactctagcccagctcataacaagctggccacagccacaggtgccaagaaagctctaaataaagtaaaaattttaatcactcaagagaaacctagtgctgaattcataactctcaatgattgccttcagttggcatacctgccttcaaaaaggaatcacatgttgttgctctatcctcgagagattttaatccttgaccttgaggtgaatcagacggtgggtgtgattgcaatagaacgcacaggagttccatttttacaggtaataccctgctttcagcgtgatggtttattttgtctacatgaaaatggttgtataactttacgtgttcgaagatcttataataacatttttaccacttcaaatgaggaaccagatccagatccagttcaggagcttacctatgatttacgaagccagtgtgatgcaatcagggtgacaaaaaccgtccgtcccttcagtatggtgtgctgtcctgtcaatgagaatgcagccgccctcgtagtgagtgatggcagggtcatgatatgggaactcaagtctgcagtttgtaatcgaaattcacggaacagggtttctgccgagagatccgctgttagtctgatgggcttccctttgaagcccgtcggaaaagcgcagtattcgggtgggagtgacccgattttccaggtgctgtccgtcacccctttctttgactcagaaagggaactccctgaccccttgcgcttcccaggtgaggcaatgcctcgccctgcttcggctcgcgcacggtgcacgcacccactgacctgcgccgactgtctggcactccctagtgagatgaacctggtacctcagatggaaatgcagaaatcacccgtcttctgcgtcactcaggctgggagctgtagaccggagctgttcctattcggccatcttggctcctccctcgagggttcagccttttggagagctgtaacactcaccgtgaaggtctgtggcttcattcttgaagtcagcgagaccaagaacccaccggaaggaaccaactccagacacagaactgctcgccaaagcaccgagctacggacaaatattcctgggacaggccttcctttccatggagctcagttccttgacagaagggtgtcagactggttggtctaa

SEQ ID NO: 2093 - DNA, 1767 bp, Homo sapiens
  SIMILAR (1033)..(1575): 961254mologous to Homo sapiens putative p150,accession number U93572,Smith-Waterman Score=893.
  misc_feature (1)...(1767): n = a,t,c or g
atgggcccaaggtggtcgaggcacagcttggttttatacactttatacactttagggagacatgagacatcaatcaatatatgtaaggtgtacattagttcagtccagaaagaaggaaaactaacaaacagaaaggacatccacaccaaaaacccatctgtacatcaccgtcatcaaagaccaaaagtagataaaaccacaaagacggggaaaaaacagaacagaaaaactggaaactctaaaaagcagagcgcctctcctcctccaaaggaatgcagttcctcaccagcaatggaacaaagctggatggagaatgactttgatgaactgagagaagaaggcttcagacgatcaaattactctgagctacgggaggacattcaaaccaaaggcaaagaagttgaaaactttgaaaaaaatttagaagaatgtataactagaataaccaatacagagaagtgcttaaaggagctgatggagctgaaaaccaaggctcgagaactacgtgaagaatgcagaaggctcaggagccgatgcgatcaactggaagaaagggagaatggaaccaagttggaaaacactctgcaggatattatccaggagaacttccccaatctagcaaggcaggccaacattcagattcaggaaatacagagaacaccacaaagatactcctcgagaagagcaactccaagacacataattgtcagattcaccaaagttgaaatgaaggaaaaaatgttaaaggcagccagagagaaaggtcgggttaccctcaaaggggagcccatcagactaacagctgatctctcaacagaaaccctacaagccagaagagagtgggggccaatattcaacattcttaaagaaaagaattttcaacccagaatttcatatccagccaaactaagcttcatcagtgagggagaaataaaatattttacagacaagcaaatgctgagagattttgtcaccaccaggcctgccctaaaacagctcctgaaggaagcactaaacatggaaaggaacaancgactaaaccaggaagaagttgaatctctgaatagaccaataacaggatctgaaattgtggcaataatcaatagcttaccaaccaaaaagagtccaggaccagatggattcacagccgaattctaccagaggtgcaaggaggaactggtaccattccttctgaaactattccaatcaatagaaaaagagggaatcctccctaactcattttatgaggccagcatgattctgataccaaagcctggcagagacacaaccaaaaaagagaattttagaccaatatccttgatgaacattggtgcaaaaatcctcaataaaatacttgcaaaaaaaatccagcagcacatcaaaaagcttatccaccatgatcaagtgggcttcattcctgggatgcaaggctggttcaatatatacaaatcaataaatgcgatccagcatataaacagagccaaagacaaaaaccacatgattatctcaatagatgcagaaaaggcctttgacaaaattcaacaacccttcatgctaaaaactctcaataaattagttactgtaaaatggggaaaggagaaatttgaaggtgtagaattgaatacagatgaacctccaatggtattcaaggctcagctgtttgcgttgactggagtccagcctgccagacagaaagttatggtgaaaggaggaacgctaaaggatgttgaaggctgcaataccgaaggcctcaccactgaacgctga

SEQ ID NO: 2094 - DNA, 2286 bp, Homo sapiens
  SIMILAR (295)..(1782): 671254mologous to Homo sapiens putative p150,accession number U93574,Smith-Waterman Score=1617.
atggagctgaaagccaaggctcgagaactacgtgaagaatgcagaagcctcaggagccgatgcgatcaactggaagaaagggtatcagtgatggaagatgaaatgaatgaaatgaaactaaaccaggaagaagctgaatctctgaatagactaataacaggctctgaaattgtggcaataatcaatagcttaccaaccaaaaagagtccaggaccagatggattcacagccgaattctaccagaggtacaaggaggaactgatgcaaaaaaggcctttgacaaaattcaacaccttcatgctaaaaactctcaataaattaggtattgatgggacgtatctcaaaataataagagctatctatgacaaacccacagccaatatcatactgaatgggcaaaaactgggagcattccctttgaaaactggcacaagacagggatgccctctctcaccactcctatttaacatagtgttggaagttctggccagggcaattaggcaggagaaggaaataaagggtattcaattaggaaaagaggaagtcaaattgtccctgtttgcagatgacatgattgtatatctagaaaaccccattgtctcagcccaaaatctccttaagctgataagcaacttcagcaaagtctcaggatacaaaatcaatgtacaaaaatcacaagcattcttatacaccaacaacagacaaacagagagccaaatcatgagtgaactcccattcacaattgcttcaaagagaataaaacacctaggaatccaacttacaagcgacgtgaaggacttcttcaaggagaactacaaaccactgctcaatgaaataaaagaggatacaaacaaatggaagaacattccatgctcatgggtaggaagaatcaatatcgtgaaaatggccatactgcccaaggtaatttacagattcaatgccatccccatcaagctaccaatgactttcttcacagaattggaaaaaactactttaaagttcatatggaaccaaaaaagagcccgcattgccaagtcaatcctaagccaaaagaacaaagctggaggcatcacgctacctgacttcaaactacactacaaggctacagtaaccaaaacagcatggtactggtaccaaaacagagatatagatcaatggaacagaacagagccctcagaaataacgctgcatatctacaactatctgatctttgacaaacctgagaaaaacaagcaatggggaaaggatttcctgtttaataaatgcagtgccccactctcctggtacccatttactatactggtccattttcacattgctgataaagacataaccacgaagatggccgaacaggaacagctccggtctacagctcccagtggtattccaacagacctgcagctgagggtcctgtctgttagaaggaaaacaaacagaaaggacatccacaccgaaaacccatctgtacatcaccatcatcaaagaccaaaagtagataaaaccacaaagatggggaaaaaacagagcagaaaaactggaaactctaaaacgcagagcacctctcctcctccaaaggaacgcagttcctcaccagcaacggaacaaagctggatggagaatgactttgacgagctgagagaagaaggcttcagacgatcaaattactctgagctacaggaggacattcaaaccaaaggcaaagaagttgaaaactttgaaaaaaatttagatgaatgtataactagaataaccaataaagagaagtgcttaaaggagctgatggagctgaaagccaaggctcgagaactacgtgaagaatgcagaagcctcaggagccgatgcgatcaactggaagaaagggtatcagtgatggaagatgaaatgaacgaaatcaagcgagaagggaagtttagagaaaaaagaataaaaagaaaggagcaaagcctccaagaaatatgggactatgtgaaaagaccaaatctacgtctgattggtgtacctgaaagtgacggggagaatggaaacaagttggaaaacactctgcaggatattatccaggagaacttccccaatctagcaaggcaggccaacattcagattcaggaaatacagagaatgccacaaagatactcctcgagaagagcaactccaagacacataattgtcacatcctccaaggttgaaatgcagaaaaaaatgttaagggcagccagagagaaaggtcatgttacttacaaagggaagcccaccaaaccaacagcgaatctctctgcagaaaccctataa

SEQ ID NO: 2095 - DNA, 1167 bp, Homo sapiens
  SIMILAR (631)..(1164): 971254mologous to Homo sapiens p40,accession number U93564,Smith-Waterman Score=899.
atgtacagaaggagtagcagaccttcagcaaggtctcaggatgaaaaatcaatgtgcaaaaatcacaagcactcctatacaccaataacaaacagagagccaaaacatgagcgaactcccatttgcaattgctacaaagagaataaaatacctaagaatacagcttacaagggatgtgaaggacctcttcaaggagaactacaaaccactgctcaaggaaataagagaggacacaaacaaatggaaaaacattccatgctcatggataggaagaatcaatatcgtgaaaatggccatactgcccaaaaaataaaaactaccataagagaatactataaacacttctacacaaataaactagaaaatctagaagaaattgataaattcctggaaacatacaccctcctaagtctaaaccaggaggaagtcgaatctctgaatagaccaataacaagtagtgaaattgaggaagtaattaatagcttaccaaccaaaaaagtccaggaccagacaaagtcacaaccagattctatcagagaaggaaaactaacaaacagaaaggacatccacaccaaaaacccatctgtacatcaccatcatcaaagaccaaaagtagataaaaccacaaagatggggaaaaaacagaacagaaaaactggaaactctaaaacgcagagcacctctcctcctccaaaggaacgcagttcctcaccagcaacggaacaaagctggatggagaatgactttgacgagctgagagaagaaggcttcagacgatcaaattactctgacctacgggaggacattcaaaccaaaggcaaagaagttgaaaactttgaaaaaaatttagaagaatgtataactagaataaccaatacagagaagtgcttaaaggagctgatggagctgaaaaccaaggctcgagaactacgtgaagaatgcagaagcctcaggagccgatgtgatcaactggaagaaagggtatcagcaatggaagatgaaatgaatgaaatgaagcgagaagggaaggttagagaaaaaagaataaaaagaaatgagcaaagcctccaagaaatatgggactatgtgaaaagaccaaatctacgtctgattggtgtacctgaaagtgatgcggagaatggaaccaagttggaaaacactctatag

SEQ ID NO: 2096 - DNA, 2343 bp, Homo sapiens
  SIMILAR (334)..(1041): 741254mologous to multiple sclerosis associated retrovirus polyprotein,accession number AF009668,Smith-Waterman Score=862.
atgacacatgtcacaacatggcaactgactttccaacagatccatgagcaagagagtgagagaggggccttagaactgatgaccaagtactttaacaactggaactgggtctatgacaacgtaataaatcacgatgaaagtgaattgaacttgaagcatattaaaatagacctagataaattctcagataaccctgatggctatattgatgttttacaagggttaggacaatcctttgatctgacatggagagatataatgttactgctagatcagacactaaccccaagtgagagaagtgccgccataactgcagctcgagagtttggcaatctctggtatctcagtcagtctgggcaacagaaggacaatatggacggacaaagaatgcccgtcctgttcaagttaaaggattctgcttcctttccctaccaaaggcggtacccccttagactggaggcccaacaaggactccaaaagattgttaaagacctaaaagcccaaggcttagtaaaaccattcaatagcccctgcaatactccaattttaggagtacagaaacccaacggacagtggaagttagtacaagatctcaggattatcaatgaggccattgtccctctatacccagctgtacctaacccttatactctgctttcccaaataccagaggaagcagagtggtttacagtcctggaccttaaggatgcctttttctgtatccctgtacatcgtgagtctcaattcttgtttgcctttgaagatccttcaaacccaacatctcaactcacctggactgttttaccccaagggttcaggaatagccctcatctatttggccaggcattagcccaagacttgagccagttctcatacctgaatactcttgtccttcggtacctggatgatttacttttagctgcccatttagaaaccttgtgccatcaagccacccaaaaaaaaacaggaatagctctaggagtccttacacaggttcaagggaccagctttcaacccgtggcacacctgagcaaggaaattgatgtggtggcaaagggttggcctcattgtttatgggtagtggctgcagtagcagtcttagtatctgaagcagttaaaataatacagggaagagaacttactgtgtggacatctcatgatgtaagtggcacactcactgctaaaggagacttgtggctgtcagacaaccttttgcttaatcaggctctattatttaaaaggccagtgctgcgactgcacacttgtgcaactcttaacccagccacatttcttccaaacaataaagaaaagatagaacataaccatcaacaggtgattgttcaaacctacaccattcaaggggaccttctagaggttcccttgactgatcccgacctcaacttgtatactaatggaagttcctttgtagaaaaaggacttcgaaaagcggggattcatccttcaaggcagtggactcccctctggcccaaggcaggtccagaaatgctgtccaagaggcaagtcctagaatcaggaatcctaaaagccttcttggttccctacctccttgtggctgtgctgggcagcattgacttcaatggaaagcctccagttgctgtgttctccctctcccaagctcacagatttctctgtgccacgtggctgctgctggggtatggggaagtgtggatccattctcatactgctataaagacataccagaggaggaggagccaagatggccgaataggaacagctccggtctacagctcccagcgtgagcgacgcagaagacgggtgatttctgcatttccatctgagggtattccaacagacctgcagctgagggtcctgtctgttagaaggaaaactaacaaacagaaaggacatccacaccaaaaacccatctgtacatcaccatcatcaagaccaaaagtagataaaaccacaaagatggggaaaaaacagaacagaaaaactggaaactctaaaacgcagagcgcctctcctcctccaaaggaacgcagttcctcaccagcaacggaacaaagctggatggagaatgactttgacgagctgagagaagaaggcttcagacgatcaaattactctgagctacgggaggacattcaaaccaaaggcaaagaagttgaaaactttgaaaaaaatttagaagaatgtataactagaataaccaatacagagaagtgcttaaaggagctgatggagctgaaaaccaaggctcgagaactacgtgaagaatgcagaagcctcaggagccaatgcgatcaactggaagaaagggtatcagcaatggaagatgaaatgaatgaaatgaagtga

SEQ ID NO: 2097 - DNA, 1056 bp, Homo sapiens
  SIMILAR (397)..(1053): 951254mologous to Homo sapiens putative p150,accession number U93568,Smith-Waterman Score=1089.
atggggaaaaaacagaacagaaaaactggaaactctaaaacgcagagcacctctcctcctccaaaggaatgcagttcctcaccagcaacggaacaaagctggatggagaatgactttgaagagctgagagaagaaggcttcagacgatcaagttactctgagctacgggaggacattcaaaccaaaggcaaagaagttgaaaactttgaaaaagatttagaagaatgtataactagaataaccaatacagagaagtgcttaaaggagctgatggagctgaaaaccaaggctcgagaactacgtgaagaatgcagaagcctcaggagccgatgcgatcaactggaagaaagggtatcagcgatggaagatgaaatgaatgaaatgaagcgagaagcgaaggaaacccatctcacgtgcagagacacacataggctcaaaataaaaggatggaggaagatctaccaagcaaatgggaaacaaaaaaaggcagggggtgcaatcctagtctctgataaaacagacattaaaccaacaaagatcaaaagagacaaagaaggccattacataatggtaaagggatcaattcaacaagaagagctaactatcctaaatacatatgcacccaatacaggagcacccagattcataaagcaagtcctgagtgacctacaaagagacttagactcccacacaataataatgggagactttaacaccccactgtcaacattagacagatcaacgagacagaaagtcaacaaggatacccaggaattgaactcagctctgcaccaagcagacctaatagacatctacagaactctccaccccaaatcaacagaatatacatttttttcagcaccgcaccacacctgttccaaaattgaccacatacttggaagtaaagctctcctcagcaaatgtaaaagaacagaaattataacaaactgtctctcagaccacagtgcaatcaaactagaactcaggattaagaatctcactcaaaaccgctcaactacatggaaactgaacaacctgctcctgaatgactactag

SEQ ID NO: 2098 - DNA, 1395 bp, Homo sapiens
  SIMILAR (340)..(1395): 881254mologous to Homo sapiens putative p150,accession number U93572,Smith-Waterman Score=1606.
atggggaaaaaacagagcagaaaaactggaaactctaaaaagcagagcgcctctcctcctccaaaggaatgcagttcctcaccagcaacggaacaaagctggatggagaatgactttgacgagctgagagaagaaggcttcagacgatcaaattactccgagctacgggaggacattcaaaccaaaggcaaagaagtcgaaaacttcgaaaaaaatttagaagaatgtataactagaataaccaatacagagaagtgcttaaaggagctgatggagctgaaaaccaaggctcgagaactacgtgaagaatgcagaagcctcaggagccggtgcgatcaactggaagaaagggtatcagtgatggacgatgaaatgcatgaaatgaagcaagaaagaaaatcgagacagaaagtcaacaaggatacccaggaattgaactcagctcagcaccaagctgacctaatagacatctacagaactctccactccaaatcaatagaatatacatttttttcagcaccacaccacacctattccaaatttgaccacatacttggaagtaaaactctcctcagcaaatgtaaaagaacagaaattataacaaactatctctcagaccacagtgcaatgaaactagaactcagaattaagaatctctctcaaaacctctcaactacatggaaactgaacaacctgctcctgaatgactactgggtacataatgaaatgaatgcagaaataaagatgttctttgaaaccaacgagaacaaagacacaacataccagaatctctgggacgcattcaaagcagtgtgcagagggagatttatagcactaaatgcccacaagagaaagcaggaaagacctaaaattgacaccctaacatcacaattaaaagaactagagaagcaagagcaaacacattcaaaagctagcagaaggcaagaaataactaaaatcagagcagaactgaaggaaatagagacacaaaaaacacttcaaaaaattaatgaatccaggagctggttttctgaaaggatcaacaaaattgatagactgctagcaagactaataaagaaaaagagagagaagaatcaaatagatgcaataaaaaatgataaaggggacatcatcaccgatctcacagaaatacaaactaccatcagagaatactacaaacacctctacgcaaataaactagaaaatctagaagaaatggataaattcctcgacacatacactctcccaagactaaaccaggaagaagttgaatttctgaatagaccaataacaggatctgaaattgtggcaataatcaatagcttaccaaccaaaaagagtccaggaccagatggattcacagctgaattctaccagaggtacaaggaggaactg

SEQ ID NO: 2099 - DNA, 1839 bp, Homo sapiens
  SIMILAR (1)..(930): 951254mologous to Cloning vector pZC320 SopA,accession number U26464,Smith-Waterman Score=1562.
atgaaactcatggaaacacttaaccagtgcataaacgctggtcatgaaatgacgaaggctatcgccattgcacagtttaatgatgacagcccggaagcgaggaaaataacccggcgctggagaataggtgaagcagcggatttagttggggtttcttctcaggctatcagagatgccgagaaagcagggcgactaccgcacccggatatggaaattcgaggacgggttgagcaacgtgttggttatacaattgaacaaattaatcatatgcgtgatgtgtttggtacgcgattgcgacgtgctgaagacgtatttccaccggtgatcggggttgctgcccataaaggtggcgtttacaaaacctcagtttctgttcatcttgctcaggatctggctctgaaggggctacgtgttttgctcgtggaaggtaacgacccccagggaacagcctcaatgtatcacggatgggtaccagatcttcatattcatgcagaagacactctcctgcctttctatcttggggaaaaggacgatgtcacttatgcaataaagcccacttgctggccggggcttgacattattccttcctgtctggctctgcaccgtattgaaactgagttaatgggcaaatttgatgaaggtaaactgcccaccgatccacacctgatgctccgactggccattgaaactgttgctcatgactatgatgtcatagttattgacagcgcgcctaacctgggtatcggcacgattaatgtcgtatgtgctgctgatgtgctgattgttcccacgcctgctgagttgtttgactacacctccgcactgcagtttttcgatatgcttcgtgatctgctcaagaacgttgatcttaaagggttcgagcctgatgaacgcagttcctcaccagcaacggaacaaagctggatggagaatgactttgacgagctgagagaagaaggcttcagacgatcaaattactctgagctacgggaggacattcaaaccaaaggcaaagaagttgaaaactttgaaaaaagtttagaagaatgtataactagaataaccaatacagagaagtgcttaaaggagctgatggagctgaaagccaaggctcgagaactacgtgaagaatgcagaagcctcaggagccgatgcaatcaactggaagaaagggtatcagtgatggaagatgaaatgaatgaaatgaagcaagaagggaagtttagagaaaaaagaataaaaagaaatgagcaaagcctccaagaaatatgggactatgtgaaaagaccaaatctacgtctcattggtgtacctgaaagtgatggggagaatggaaccaagttggaaaacactctgcaggatattatccaggagaacttccccaatctagcaaggcaggccaacactcagattcaggaaatacagagaacaccacaaagatactcctcgagaagagcaactccaagacacatatttgtcagattcaccaaagttgaaatgaaggaaaaaatgttaagggcagccagagagaaaggttgggttacccacaaagggaagcccatcagactaacagcagatctctcagcagaaaccctacaagccagaagagagtgggggccaatattcaacattcttaaagaaaagaattttcaacccagaattgcatatccagccaaactaagcttcataagcgaaggagaagtaaaatactttacagacaagcaaatgctgagagattttgtcaccaccaggcctgccctaaaagagctcctgaaggaagcactaaacatggaaaggaacaaccggtaccagccactgcaaaatcatgccaaaatgtaa

SEQ ID NO: 2100 - DNA, 6094 bp, Homo sapiens
  SIMILAR (2075)..(5899): 961254mologous to Homo sapiens unknown,accession number AF148856,Smith-Waterman Score=6525.
atgggagactttaacaccccactgtcaacattagacagatcaacgacacagaaagtcaacaaggatacccaggaattgaactcagctctgcaacaagcagacctaatagacatctacaaaactctccaccccaaatcaacagaatatacattcttctcagcacctcatcacacttattctaaaattgaccacataattggaagtaaagcactcctcagcaaatgtaaaagaacagaaatcacaacaaactatctctcagatcaccgtgcaatcgaattagaaatcaggattaagaaacttactcaaaaccacacaactacatggaaactgaacaacctgctccggaatgactactgggtaaataatgaaatgaaggcagaaataaagatgttctttgaaaccaacgagaacaaagacacaacgtaccagaatctctgggacacatttaaagcagtgtgtagagggaaatgtacagcactaaatgcccacaagagaaagcaggaaagatctaaaatcaacaccctaacatcacaattaaaagaactagagaagcaagaggaaacaaattcaaaagctagcagaaggcaagaaataactaagatcagagcagaactgaaggagataaagacacaaaaaacccttcaaaaaatcagtgaatccgggaggaggagccaagatggccgaataggaacagctccggtctacagctcccagcgtgagcgacgcagaagacaggtgatttctgcatttccatctgagggcacagacaaacaaaaagacagcagtaacctctgcagacttacgtgtccctgtctgacagctttgaagagagcagtggttctcccagcacgcagctggagatctgagaacgggcagactgcctcctcaaaaggaaaactaacaaccagaaaggacatctacaccgaaaacccatctgtacatcaccatcatcaaagaacaaaagtagataaaaccacaaagatggggaaaaaacagaacagaaaaactggaaactctaaaacgcagagcacctctcctcctccaaaggaacgcagttcctcaccagcaacagaacaaagctggatggagaatgattttgacgagctgaaagaagaaggcttcagacgatcaaattactctgagctacgggaggacattcaaaccaaaggcaaagaagttgaaaactttgaaaaaaatttagaagaatgtataactagaatagccaatacagagaagtgcttaaaggagcagctgatggagctgaaaaccaaggctcgagaactacgtgaagaatgcagaagcctcaggagccgatgtgaacaactggaagaaagggtatcagcaatggaagacgaaatgaatgaaatgaatgaaatgaagcgagaaggaaagtttagagaaaaaagaataaaaagaaacgagcaaagcctccaagaaatatgggactatgtgaaaagaccaaatctacgtctgactggtgtacctgaaagtgatggggagaatggaaccaagttggaaaacactctgcaggatattatccaggagaacttccccaatctagcaaggcaggccaatgttcagattcaggaaatacagagaacaccacaaagatactcctcgagaagagcaactccaagacacataattgtcagattcaccaaagttgaaatgaaggaaaaaatattaagggcagccagagagaaaggtcgggttaccctcaaagggaagcccatcagactaacagcggatctctcggcagaaaccctacaagccagaagagagtgggggccaatattcaacattcttaaagaaaagaattttcaacccagaatttcatgtccagccaaactaagcttcataagtgaaggagaaataaaatactttacagacaagcaaatgctgagagattttgtcaccactaggccctgccctaaaagagctcctgaaggaagcgctaaacatggaaaggaacaaccggtaccagccgctgcaaaatcatggccaaatgtaaagaccatcgagacaaggaagaaactacatcaactaacgagcaaaatcaccagctaacatcataatgacaggatcaaattcacacataacaatattaactttaaatgtaaatggactaaattctccaattaaaagacacagactggcaagttggataaagagtcaagacccatcagtgtgctgtattcaggaaacccatctcatgtgcagagacacacataggctcaaaataaaaggatggaggaagatctaccaagcaaatggaaaacaaaaaaaggcaggggttgcaatcctagtctctgataaaacagactttaaaccaacaaagatcaaaagagacaaagaaggccattacatgatggtaaagggatcaattcaacaagaggagctaactatcctaaatatgtatgcacccaatacaggagcacccagattcataaagcaagtcctgagtgacctacaaagagacttagactcccacacattaataatgggagactttaacaccccactgtcaacattagacagatcaacgagacagaaagtcaacaaggatacccaggaattgaactcagctctgcaccaagcagacctaatagacatctacagaactctccaccccaaatcaacagaatatacatttttttcagcaccacaccacagctattccaaaattgaccacatacttggaagtgaagctctcctcagcaaatgtaaaagaacagaaattataacaaactatctctcagaccacagtgcaatcaaactagaactcaggattaagaatctcactcaaagccgctcaactacatggaaactgaacaacctgctcctgaatgactactgggtacataacgaaatgaaggcagaaataaagatgttctttgaaaccaacgagaacaaagacacaacataccagaatctctaggacgcattcaaagcagtgtgtagagggaaatttatagcactaaatgcccacaagagaaagcaggaaagatccaaaattgacaccctaacatcacaattaaaagaactagaaaagcaagagcaaacacattcaaaagctagcagaaggcaagaaataactaaaatcagagcagaactgaaggaaatagagacacaaaaaacccttcaaaaaatcaatgaatccaggagctggttttttgaaaggatcaacaaaattgatagaccgctagcaagactaataaagaaaaaaagagagaagaatcaaatagacacaataaaaaatgataaaggggatatcaccaccgatcccacagaaatacaaactaccatcagagaatactacaaacacctctacgcaaataaactagaaaatctagaagaaatggatacattccttgacacatacactctcccaagactaaaccaggaagaagttgaatctctgaatagaccaataacaggagctgaaattgtggcaataatcaatagtttatcaaccaaaaagagtccaggaccagatggattcacagccgaattctaccagaggtacaaggaggaactggtaccattctttctgaaactattccaatcaatagaaaaagagggaatcctccctaactcattttatgaggccagcatcattctgataccaaagccgggcagagacacaaccaaaaaagagaattttagaccaatatccttgatgaacattgatgcaaaaatcctcaataaaatactggcaaaccaaatccagcagcacatcaaaaagcttatccaccatgatcaagtgggcttcatccctgggatgcaaggctggttcaatatacgcaaatcaataaatgtaatccagcatataaacagagccaaagacaaaaaccacatgattgtctcaatagatgcagaaaaagcctttgacaaaattcaacaacccttcatgctaaaaactatcaataaaataggtattgatgggatgtatttcaaaataataagagctatctatgacaaaaccacagccaatatcatactgaatgggcaaaaactggaagcattccctttgaaaaccggcacaagacagggatgccctctctcaccgctcctattcaacatagtgttggaatttctggccagggcaatcaggcaggagaaggaaataaagggtattcaattaggaaaagaggaagtcaaattgtccctgtttgcagatgacatgattgttgatctagaaaaccccatcgtctcagcccaaaatctccttaagctgataagcaacttcagcaaagtctcaggatacaaaatcaatgtgcaaaaatcacaaggattcttatacaccaacaacagacaaacagagagccaaatcatgagtgaactcccattcacaattgcttcaaagagaataaaatacctaggaatccaacttacaagggatgtgaaggacctcttcaaggagaactacaaaccactgctcaaggaaataaaagaggatacaaagaaatggaagaacattccatgctcatgggtaggaagaatcaatatcgtgaaaatggccatactgcccaaggtaatttacagtttcaatgccatccccatcaagctaccaatgcctttcttcacagaattggaaaaaactactttaaagttcatatggaaccaaaaaagagcccgcatcaccaagtcaatcctaagccaaaagaacaaagctggaggcatcacactacctgacttcaaactatactacaaggctacagtaaccaaaacagcatggtactggtaccaaaacagagatatagatcaatggaacagaacagagccctcagaaataacgccgcatatctacaactatctgatctttgacaaacctgagaaaaacaagcaatggggaaaggattccctatttaataaatggtgctgggaaaactggctagctatatgtagaaagctgaaactggatcccttccttacaccttatacaaaaatcaattcaagatggattaaagacttaaacgttagacctaaaaccataaaaaccctagaagaaaacctaggcaataccattcaggacataggcatgggcaaggacttcatgtctaaaacaccaaaagcaatggcaacaaaagccaaaattgacaaatgggatctaattaaactaaagagcttctgcacagcaaaagaaactaccatcagagtgaacaggcaacctacaaaatgggagaaaatttttgcaacctactcatctgacaaagggctaatatccagaatctacaatgaactcaaacaaatttacaagaaaaaaacaaacaaccccatcaaaaagtgggtgaaggacatgaacagacacttctcaaaagaagacatttatgcagccaaaaaacacatgaaaaaatgctcatcatcactggccatcagagaaatgcaaatcaaaaccacaatgagataccatctcacaccagttagagtggcaatcattaaaaagtcaggaaacaacaggtgctggagaggatgtggagaaataggaacacttttacactgttggtgggactgtaaactagttcaaccattgtggaagtcagtgtggcgattccttagggatctagaactagaaataccatttgacccagccatcccattactgggtatatacccaaatgactataaatcatgctgctataaagacacatgcacacgtatgtttattgcggcattattcacaatagcaaagacttggaaccaacccaaatgtccaacaatgatagactggattaagaaaatgtggcacatatacaccatggaatactatgcagccataaaaaatgatgagttcatgtcctttgtagggacatggatgaaattggaaaccatcattctcagtaaactatcgcaagaacaaaaaaccaaacaccgcatattctcactcataggtgggaattgaacaatgagatcacatggacacaggaaggggaatatcacactctggggactatggtggggaggggggaggggggagggatagcattgggagatatacctaatgctagatgacgagttagtggtgcagtgcaccagcatggcacatgtatacatatgtaactaacctgcacaatgtgcacatgtaccctaaaac

SEQ ID NO: 2101 - DNA, 549 bp, Homo sapiens
  SIMILAR (544)..(419): 401254mologous to Homo sapiens prion protein, PrP,accession number S80732,Smith-Waterman Score=69.
ggaggcaggagatgtgtcaggctgctggtctcagctgtgctttcttatgcatttgaggggtaggctggctggatctggtctaggatgggttccacggggctcccttccacatggtctgccgtcctgtggcaggctagcccaggccatctgcttggttctaagaaggaagtagaagcatgcagtacctttggaggcccaggttgggacctggtgtactgtgacttctgcattttatcagccaaagcaaggtgcaagactagcccagattcaaaggagaggtggaaggaaacacttgcaaaagctctcattcgaatctcagaacgttatctggatctgcaacacagggcagctgctaacctttcagagcaatcttcggcagccctaaatggtattaacatcttagacatagcatcccaagccaatgagggccaatcggaagtccaaagcagttacctctccactgcccccaaccagcaaccaaaagccctatgctggttctccaaccggcgtgtgtgcctccttaaggaaaaaacttccttcctcccatag

SEQ ID NO: 2102 - DNA, 534 bp, Homo sapiens
  SIMILAR (184)..(351): 331254mologous to Mus musculus cAMP-dependent protein kinase C beta subunit,accession number X61434,Smith-Waterman Score=64.
atgattaaacaccaagggaaggctgccttcccagtccgtgaccggcgccggaattttgggtccacggataaaacgtgtctcctttgtctctaccagaaaatgaaaggaattgaaattaagagaagggagagattgaagtgtggcgccaagattgaaaggagaaagagaattttagaactggaaggaaacttagagaatgtcttctccatcatcctggcttttcagacaccaaagcttagagtagctgagtggattgtcattgtaacaaaacgggtcttagcagaactggagccaaagctcaggtcttcagattcccgttctgccctgataccttatcaaggaaaacaagtacttcttgaggacatggcccaagacacattgactgcggccagtgagaagaaagtccgggactcagctggacccactgacaatggctgtcagagttacagtcatcttccctccaagtctgagcagccacacgaaccccagatacttacatctgggagcaccccagtgacaaagccagtgacttaa

SEQ ID NO: 2103 - DNA, 537 bp, Homo sapiens
  SIMILAR (391)..(534): 1001254mologous to Homo sapiens Grb14,accession number L76687,Smith-Waterman Score=261.
atgattaaacaccaagggaaggctgccttcccagtccgtgaccggcgccggagttttgggttcatggataaaacatgtctcttttgtaaaaaccagaaaatgaaaggaattgaaattaagagaagggagagattgaagtgtggcgccaagattgaaaggagaaagaggttgagggataaaaccattacatttctgatgtctgtagctttgtataaagcaaatgagagaaaaatatctgaagaaattgtgtgcccttttgctaatgatggcactagaagtatatcagagaattccctggtagcaatggacttctcaggccagaaaagcagagttatagaaaatcccactgaagccctttcagttgcggttgaagaaggactcgcttggagggtagaagatgacggtgaaatgttccacacactggatgatggccacacaagatttacagatctaatacagctggtggagttctatcaactcaataagggcgttcttccttgcaagttgaaacattattgtgctaggattgctctctag

SEQ ID NO: 2104 - DNA, 423 bp, Homo sapiens; identical to SEQ ID NO: 639
  SIMILAR (1)..(117): 891254mologous to Homo sapiens Human secreted protein, SEQ ID NO: 5576,accession number G01495,Smith-Waterman Score=187.

SEQ ID NO: 2105 - DNA, 432 bp, Homo sapiens
  SIMILAR (1)..(117): 971254mologous to Homo sapiens Human secreted protein, SEQ ID NO: 5576,accession number G01495,Smith-Waterman Score=206.
atggtctacggggcttccgaggcgatcgggcagcatcagtcttcagccgctaagccgagaaggagtcagtcagagagccttgggccagagttccagggactctgggagtggctgccagggtctagggctgtgaagcatctcagggttatatttgatgaaaaagagcctaaacgctatctgatttgggataaagaaaaaggagcattaaccttgactatgcctttggctccagccacctttttaagagtaaattgctgggcaggtgggggagggctagtcacggaacgaaactgtaagcccgaccagaaaatgaaaggaattgaaattaagagaagggagagattgaagtgtggctccaagattgaaaggagaaagaggttgagggatagtgagggaggttggagaagagtagaggccgcttaccggatttga

SEQ ID NO: 2106 - DNA, 615 bp, Homo sapiens; identical to SEQ ID NO: 642
  SIMILAR (1)..(117): 871254mologous to Homo sapiens Human secreted protein, SEQ ID NO: 5576,accession number G01495,Smith-Waterman Score=176.

SEQ ID NO: 2107 - DNA, 696 bp, Homo sapiens
  SIMILAR (217)..(327): 831254mologous to Homo sapiens Human secreted protein, SEQ ID NO: 5576,accession number G01495,Smith-Waterman Score=154.
atggccttgggtgaacatagtcagaagtcagggagtggtgacaacagaccttgggcaagggccagcactgtgctggcttcaggtctgacccagcacagtgatagtggtggaggccacagggctgcttgtgtcactccatccccagctgtaggtggctcaggagagagagagagagagagagagagagagagatatgctcgatatgtttgggaaaaagcttccgaggcgatcgggcagtgtcactcttcagctgctaagccaagaagatctgggaaggagtcagagagccttgggccagagttccaggggctctgggagtggctgccgggcgagttggacagttcgatttccagtgggaaaatgaaaggaattgaaattaagagaatggagagattgaagtgtggcgccaagattgaaaggagaaagaggttgagggatagtgaggagaggttgagggatagtggagaagagaataaaaagaggccacttacgggatttaaaattggctggaggaagaaattctcctctggttcttcaaaaatccagcattactgtcgtaagttgtcaaaggagaaggccgcacggcaaggaattgtggggtctctaggaattgaatatgggtcctgccttagccagaaagacaccagagatgtgaattctacaactgcaaagaactcaattgttccaacaagatga

SEQ ID NO: 2108 - DNA, 1464 bp, Homo sapiens
  SIMILAR (265)..(1434): 1001254mologous to Homo sapiens bG153O3.1 (similar to C.elegans hemicentin precursor),accession number AL133515,Smith- Waterman Score=2035.
ggggcttctgaggcgatcgggcagtgtcagtcttcagccgctaagccgagaagatctgggaaggagtcagtcagagagccttgggccagagttccaggggctctgggagtggctgccagaaaataccagaaaatgaaaggaattgaaattaagagaagggagagattgaagtgtggcgccaagattgaaaggagaaagaggttgaaggatagggaggttggagaagagagtaaaaagaggccacttactggatttgaaattgaaccacccaaagtcactgtgatgcccaagaatcagtctttcacaggagggtctgaggtctccatcatgtgttctgcaacaggttatcccaaaccaaagattgcctggaccgttaacgatatgtttatcgtgggttcacacaggtataggatgacctcagatggtaccttatttatcaaaaatgcagctcccaaagatgcagggatctatggttgcctagcaaaagcccctaagttgatggtagttcagagtgagctcttggttgcccttggggatataaccgttatggaatgcaaaacctctggtattcctccacctcaagttaaatggttcaaaggagatcttgagttgaggccctcaacattcctcattattgaccctctcttgggacttttgaagattcaagaaacacaagatctggatgctggcgattatacctgtgtagccatcaatgaggctggaagagcaactggcaagataactctggatgttggctcacctccagttttcatacaagaacctgctgatgtgtctatggaaattggctcaaatgtgacattaccttgttatgttcagggttatccagaaccaacaatcaaatggcgaagattagacaacatgccaattttctcaagacctttttcagttagttccatcagccaactaagaacaggagctctctttattttaaacttatgggcaagtgataaaggaacctatatttgtgaagctgaaaaccagtttggaaagatccagtcagagacaacagtaacagtgaccggacttgttgctccacttattggaatcagcccttcagtggccaatgttattgaaggacagcagcttactttgccctgtactctgttagctggaaatcccattccagaacgtcggtggattaagaattcagctatgttgctccaaaatccttacatcactgtgcgcagtgatgggagcctccatattgaaagagttcagcttcaggatggtggtgaatatacttgtgtggccagtaacgttgctgggaccaataacaaaactacctctgtggttgtgcatgttctgccaaccattcagcatgggcagcagatactcagtacaattgaaggcattccagtaactttaccatgcaaagcaagtggaaatcccaaaccgtctgtcatctggtccaaggtaaatgatacatctagttatatttcctga

SEQ ID NO: 2109 - DNA, 357 bp, Homo sapiens
  SIMILAR (347)..(309): 531254mologous to Caenorhabditis elegans similar to C. elegans cuticlin 2 precursor CUT-2 (SP:P34682),accession number AF016446,Smith-Waterman Score=41.
atggaggaagtgaaggttggtgcaaaagtgggaaaggtcagaggtctccaaatcagaagtaaccaagaagttatgtcctcaaagaattgtgtctgtggagccttctctataccaagagctactttagatgacattgccattggatctttggagtggccacccttaacacccaaggaggaggatcctcaatccttctgggccagtggaaaagtcacagtcctccactgctggcgtggaagcctcccagctgggaagagtgggcaggaccattaccgctgcccacgtggcctccaccagcaccacagtgtgggcggcttcatcgctgctgagcctgaccctccactaggcctctcttaa

SEQ ID NO: 2110 - DNA, 429 bp, Homo sapiens
  SIMILAR (376)..(266): 401254mologous to Homo sapiens Human secreted protein, SEQ ID NO: 6751,accession number G02670,Smith-Waterman Score=77.
atgatattgagcgggactatcaagcaccagcagacttctgtttacatctcattggtcagaggtctccaaatcagaagtaaccaagaagttatgtcctcaaagaattgtgtctgtggagccttctctataccaagagctactttagatgacattgccattggatctttggagtggaaaatgaaaggaattgaaattaagagaagggagagattgaagtgtggcaccaagattgaaaggagaaagaggttgagggataccacccttaacacccaaggaggaggatcctcaatccttctgggccagtggaaaagtcacagtcctccactgctggcgtggaagcctcccagctgggaagagtgggcaggaccattaccgctgcccacgtggcctccaccagcaccacagtgtgggcggcttcatcgctgctga

SEQ ID NO: 2111 - DNA, 469 bp, Homo sapiens
  SIMILAR (313)..(447): 951254mologous to Homo sapiens plasma prekallikrein,accession number M13143,Smith-Waterman Score=246.
atgggggctgtctgtgaggccttgcggcagtacggcccagaaggggacagacttaccttccactgtgagagttacccgaagctcggtgtccatgatggtttagggggcttccgaggagatccggcagtgtcagtcttcagccgtgaagctgagaagatctgggaaggagtcaatcagagagccttgggccagagttccaggggctctgggagtggccgccagaaaatgaaaggaaatgaaattaagagaagggagagattgaagggtggcaccaagattgaaaggagaaagtggttgagggatagggagagagatgtggatgttgccagggttctcactccagatgcttttgtgtgtcggaccatctgcacctatcaccccaactgcctcttctttacattctatacaaatgtatggaaaatcgagtcacaaaggcgagtatgcatggaaaatcgcatcacaaaggcga

SEQ ID NO: 2112 - DNA, 459 bp, Homo sapiens
  SIMILAR (177)..(43): 661254mologous to Homo sapiens neutral protease large subunit,accession number M27826,Smith-Waterman Score=143.
atgggggctgtctgtgaagctctgcagcagtacagcctagaaggggatgggcttaccttccactgtgagagctatccgaagcttggcgtcggtgatggtctagggggcttccgaggcgatcgggcagtgtcagtcttcagccgccaagccaagaagatctgggaaggagtcagtcagagagccttgggccagagttccaggggctctgggagtggctgccagaaaatgaaaggaattgaaattaagagaagggagagattgaagtgtggggccaagattgaaaggagaaagaggtggagggatagtgagggaggttggagaagagtaaaaagaggccgcttaccagatttgaaattgaaaggctttgtggcaaatgtttatgagcgaagaactttttacctcctctttgtggctgagatccagaaggccaagtgtgcagaaactctgtccctggaataa

SEQ ID NO: 2113 - DNA, 738 bp, Homo sapiens
  SIMILAR (123)..(278): 801254mologous to Homo sapiens Human secreted protein, SEQ ID NO: 5210,accession number G01129,Smith-Waterman Score=224.
taaaacggccccacccttatctccctttgctgactctcttttcggactcagcccacctgcacccaggtgaaataaacaaccatgttgctcacacaaggcctgtttggtggtctcttcacacggacgtgcatgaaatttggtgccgtgactcggatcaggggacctcccttgggagatcaatcccctgtcctcctgctctttgctccgtgaaaaagattcacctatgacctcaggtcctcagacccaccagcccaaggaacatctcaccaattttaaatcatgtaagcaagcctcttgttactctcttctccaacctctctcactatccctcaacctctttctccttttaatcttggcgccacccttcaatctctcccttctcttaatttcaactcctttcattttctggtggagccaaaggagacatattttatccattgacccaaaactccagcgccagtcacggactcggaaaggcagacttcccttggtgtttaatcattgcgaggacgcctctctgattattcacccacgttccactggtgtctgatctccgccgggacgtctgccttggtctttcacccttagtggcaagtcctgcttttctgggggagggggaagtaccccaaccccttctctccatgtctctaccccttttttgcttttctgaggcaggggcaagaacccctcaaccccttctccttcacgcttagtggtaagtcccgcttttctaggggg

SEQ ID NO: 2114 - DNA, 1035 bp, Homo sapiens
  SIMILAR (257)..(162): 1001254mologous to Homo sapiens cyclic AMP phosphodiesterase,accession number L20969,Smith-Waterman Score=160.
atgatagtgctgaggaaatatgataatgatgatgatagtgatggtgatgatgatgatgacaataatctactgaacatttctatttgtgtgttcactagcaaactcttcagctttcctcccctgacctgtcagagcagccccaccgaccctcttcccaataggagatgcttgggggctttgagcgtggccccgccggcgctgtcgctgccctctccgctgcccgcccgggccggcgcgctgctgccctctgcctccatcctggctcgcggctccgcgacctgctgcccagcccgggttcaccgcgctggcccgagcgccttcctgatgctgctgctgctgctgccgccgccgccgcttctgcagcccagcagaggctggtgcttagcttctcacttgaaggcgccagagcctcagggctaccgagagggggccctgccagcgggaggggtcacagaacgcggcagggctccttccaccgaggctatggcagagacacgctcccgggctccccaagtcaccaagactagggtgcgcggtgcccggtttcgccagaggttggtccttcttcctccctttcttcttcccttcctttgggcgccggcggcgagagcagggattgtcagcaactcgggctgcagaagcagcagcaacggcggcggcggcagtggtagccgcctccagggcaccggaaccctgatcccggagctgctgaaaagttggacagctccaggctggcacgcccgagctgtgactttcaccaaaaccactccagccatgctcttagagaaatggagtttggcgattcctggctggttctcagagcttgttgacgatgagccccatgctggtgcttccaaagataaggaatgtgaccaggcaaagttgcctggaatattgtctatgcgcgtcgctgaaaaattggatctgggtgaagatccaatacagggagaatgcccaatgtttcctcttgaagatcttcctccaacttggcctcgggagtggtcctcgctggaaatcaaggcgagtcgtccttag

SEQ ID NO: 2115 - DNA, 1023 bp, Homo sapiens
  SIMILAR (720)..(445): 331254mologous to Mus musculus putative hepatic transcription factor,accession number AF156604,Smith-Waterman Score=97.
atggatttaatgcaactagcaatgataatgctcaaacaacaggagtgctatgaagacaatgaaacaggtccatcggacaaaaaattctccaaccctgtttacggctcaagtttcgaaccggtgcggatcctctatcggatcttgtttctacctgaaagtgctcttagagaaatggagttggcgattcctggctggttctcagagcttgttgacgatgagccccatgctggtgcttccaaagataaggaatgtgaccaggcaaagttgcctggaatattgtctatgcgcgtcgctgaaaaaatggatctgggtgaagatccaataaccctgagacccctgactgtgaggggcgcttcctcgcgtccttgcagctcaggcctctgtcagggacctagaggcgccggcgggtggaatccctgtttccgacacccggttgatgcggtctggagagcgagactggccgagggaccggcttaggcaaaggcctggaggcacgactgcgccaggaggattcggaacacagggacatcttgtgtccactgagaacaaagtatgagtcggagttatttcctcagtaccaggctgaggattgatctttgtgaggaccgtagaagccatggacagttttgaacaaagaaggaaatctgtgttagagttaaagattccgaaaggatgttcaaaggaagaacggagtgtaaggcggtgatgagaacagtgaggcattgagaggttgaatatttgctcaaggtcacgtagctggtaaaaggtgacattgagcactgggccacaagattagagactcagcctgaggtcacctggctacagggccaaaaaaaagcttacagagaaacctgagtctatcaaatcccagcagggacacattcctgaaagctccgccttttggcacaccttctcatggctatggaagtatttaaggaacccacagaaggaagtataggatgctctagtccctcactggtaaaaaacctcacctatatgtctagatcttaatgtcctgggaat

SEQ ID NO: 2116 - DNA, 321 bp, Homo sapiens
  SIMILAR (243)..(175): 431254mologous to Homo sapiens CLP 3.7 monomer,accession number W49710,Smith-Waterman Score=47.
atgatagaaggcacacaggcttctagaagagctaaaggaggagcacttaactctgaagagtggacaagcagaggaggcttcccagaggaggcggtgcctgtactaacccttgagaggcaggcagcagtggcactgctggagggaatggcttggttcttaagtccagagaagaggacctgggccctcatgggtgtgagcaggcccaggattgcatggggagtgtggagactgacccaacccttcattcaaggcaagctcttcctccaggaagtcctaccggataaaccagctttggtccagcacccctcactgaagcagtga

SEQ ID NO: 2117 - DNA, 317 bp, Homo sapiens
  SIMILAR (91)..(240): 341254mologous to Penicillium chrysogenum S5 ribosomal protein,accession number D13859,Smith-Waterman Score=82.
atgattaaacaccaagggaaggctgccttcccagtccgtgaccggcgccggaattttgggtccacggataaaacgtgtctcctttgtctctaccagaaaatgaaaggaattgaaattaagagaagggagagattgaagtgtggcgccaagattgaaaggagaaagagaattttagaactggaaggaaacttagagaatgtcttctccatcatcctggcttttcagacaccaaagcttagagtagctgagtggattgtcattgtaacaaaacgggtcttagcagaactggagccaaagctcaggtcttcagattcccg

SEQ ID NO: 2118 - DNA, 495 bp, Homo sapiens; identical to SEQ ID NO: 643
  SIMILAR (150)..(260): 891254mologous to Homo sapiens Human secreted protein, SEQ ID NO: 5576,accession number G01495,Smith-Waterman Score=181.

SEQ ID NO: 2119 - DNA, 696 bp, Homo sapiens; identical to SEQ ID NO: 2107
  SIMILAR (217)..(327): 831254mologous to Homo sapiens Human secreted protein, SEQ ID NO: 5576,accession number G01495,Smith-Waterman Score=154.

SEQ ID NO: 2120 - DNA, 390 bp, Homo sapiens
atggtgacagagaaggaaagaaatgtagtaaatgagcaaaagcaaagcgtgttccaagcaattagaataataatcattttacccgcggctataaatatacccacgctaatccgaaaatatatcctgcatcgaaacccgcaccgcatagtgaatctccgagggtatctccgaacttactctgcgacaatacacttgaaaatgaaaggaattgaaattaagataagggagagactgaagtgtggcgccaagattgaaaggagaaagaggttgagggatattcacctgtatctcatcattggaccacgagagcaagcagctggaccctgttcctccggcaacggcatcaatcttaccaccaaccttggctctttgaggggcttggtatattaa

SEQ ID NO: 2121 - DNA, 643 bp, Homo sapiens
  SIMILAR (1)..(72): 701254mologous to Homo sapiens Human secreted protein, SEQ ID NO: 5576,accession number G01495,Smith-Waterman Score=80.
ggggcttccgacacgatcaggcagtatcagtcttcagccgctaagccgagaagatctgggaaggagtcagtcagagagccttgggccagagttccaggggctctgggagtggctgccagaaaagcaggacttgccgctaagggtgaaggaccaaggcaggcgtccctgcgtggtctgacacccttgaaacatgagtgtataatcagagaggtgtccctgcaatgattaaacaccaaggaaaggctgccttccctagtctgtgacaggcgccggaattttggctccacggataaaacgtgtctcctttgtctctaccagaaaatgaaaggaattgaaattaagagaagggagagattgaagtgtggcgccaagattgaaaggagaaagaggttgagggatagtgagggagggtggagaagagagtaaaaagaggctgcttaccagatttgaaattggtgagatgtttcttgggctgcgacacaaggacctcaaaatgttcaggtggaagtcttatctcccagttgttggatccattgttgtgtgcccagtggaagcattcctctccatgaggaccaaaatctctaaactagcagagctcaaagctgttgaggagagaagcaattattcaagttactgtgtgtaa

SEQ ID NO: 2122 - DNA, 416 bp, Homo sapiens
  SIMILAR (201)..(389): 401254mologous to Lactuca sativa oleate 12- hydroxylase,accession number AF162199,Smith-Waterman Score=77.
cgacccctgaacgtgactttgccacctctcacccacaaagcagagccccttccataaggaagccacaggcacttaaggcatccatgtgccaacataccgagttttaaatctgttacagatttacagacccttcagtctggtccccccggattaatccaaactatatctcagattcccctgacaaacaccccattctaatgaggctgacctcccgttcccctgacaaacaccctgttccaatgaggccgatctcctgggcacctgtgatcagaccatttccatttcctcctccatccctttgctcaaattctttcgttcctctgcaatgtcctttcttcttccttaaagtcagaagcacagtcataccccacctttctacaccattgtccttgactcctttgatgactgtgtctttt

SEQ ID NO: 2123 - DNA, 701 bp, Homo sapiens
  SIMILAR (237)..(106): 401254mologous to Homo sapiens PRO1367,accession number AF130056,Smith-Waterman Score=63.
  misc_feature (1)...(701): n = a,t,c or g
tgtgaaagcccaanacaaggaattttnggcaaaagaaacagacaacagcctgaattttgttttcaaactagaacccagttgatgttcagaatggattaaaggagaataggtgcttgggacaacgggaaaataccaactgttaatcctgaccttctagggcagcacaccaacacttggatgtgtatattcatcacctggcgattccgttacagtagaagatatgctacagcaggcctgggtggaatccaagagtcagcatgtccaacaagccccaggtgatgccaatgttgcaggctctcagacaaccccgagtcaagagggtctgggggaaagcagatggggctctgagctcaggcagagaccgtgaggaggggaggatggactatgttccagagaaaatacactgtcttgccactcttgtctttctccctcactgtatcagaagtaggtccgaagcaggaaggagggggacgaaggagtcagtgggagcagatgagtaaaaagcacctgcctttggtatccttcgttgatctgagatgcattatccgagcccgggaccacggaaaagccgccagtttcccctaaccagtgagatgtgcctgctggatttttcctgcagctctggcccttgactacatcgacttgagggatgcccttgactgcctgtcagcagggcctgcatcagacgcctcttcacgaaa

SEQ ID NO: 2124 - DNA, 1034 bp, Homo sapiens
  SIMILAR (470)..(282): 351254mologous to Homo sapiens keratin associated protein,accession number AJ296345,Smith-Waterman Score=71.
cgggcccccagccctgagagccttctgccttcccgctcctgcccagcaaactccactcacctctcacgctgtcatttcctccaggagatcttttctaagttgaagccttctgtccaagacactcccataatgatgaatctaaccatcctcccttcctagaggggctcatggagaacagaacatggctgccctgcctggatcccttcagagcctcaggcccacccagctcaggaccctgcctaagagcaggcacttgataaacgcctgttgaatgaatgaatacatgagccatggtgtccagcgagagaacactgctgccccagaagaggtgcgtgcggtggggagggggtggagactgggggacaggaacagtgacaacaggggcccagtcttgggtggtggtcacagctcgagggccaccagaagtcttcccagcagacggggccatgcacaaccgtgtcacagcacatgcctcagaaatcatgttgctgacagcagtcagcgtcaagccacagtcagcgtctacacgtgcccccgcttctcaggctttgaacctgaatcaccccttctgtccagaggaagccatccacaaagttggagcatcaagggcagaagaatttgcccatcttctgatagggcagaagatgacgggaggacagccacacatgttccaaactgctctcagcttccagggcagcacaccaacacttggatgtgtatattcatcacctggcgattccgttacagtagaagatatgctacagcaggcctgggtggaatccaagagtcagcatgtccaacaagccccagctctggcccttgactacatcgacttgagggatgcccttgactgcctgtcagcagggcctgcatcagacgcctcttctgcaccccctttctccttccaaaatgcgaacatggctcatcaaaaggagcgagagagtcagaagcacagtcataccccacctttctacaccattgtccttgactcctttgatgactgtgtcttttattatttgcaccacacagtttag

SEQ ID NO: 2125 - DNA, 834 bp, Homo sapiens
  SIMILAR (346)..(660): 311254mologous to Homo sapiens keratin associated protein 9.8,accession number AJ406950,Smith-Waterman Score=82.
atggctcttccatctcccaaacgtgtcatgttggtctgcacccagtcagcaggaaagggtaagagtggaggatcttgcaggggagcctttgggaccaagcctgggatgctccccacttctgttcatagtccactggtcagactcagtcacaagccagcttccacctatcgggagccggggcagcagggagcccaggacatttctgtagtcatggacccaggaagaacaggaaatggatttggtgaacacatggttgagtctctaccacacacagaacagctgtgttcctggaaattcccagattttgccccaagcttctctcttgtgaccgatgccccgatctggtgctggacccctgcctgtgttactgagttctgctcttctgtgtctctgctcgctgaccccctgtgcaagccgacctccacatgccagatttcccactggagccctctgaacataacctcacctgccagcccagtcctacacccctggtgctcccctcctcatccagaagctgatcttgatgacatgattgattgtccctgtggatccttcccctttatgctttccatatcccccaactgctcagagattgaccgcgtgccaatgcaggcagaagggacacgggttaaaagctgccaaggcccaggctctctgtgtagtgaagttagatgccctgctcaggatgtgttgaattgggcaaaaatccgaacccacatgaaagaacagagagctattcttacaaaacagcaggtggattgtattcaggaggagttccaggagttgctgcaggaagagagaaattccaggaggaaaggagggagactatactag

SEQ ID NO: 2126 - DNA, 7863 bp, Homo sapiens
  SIMILAR (3061)..(7788): 551254mologous to Homo sapiens proliferation-related protein P80,accession number AF200415,Smith-Waterman Score=3712.
atgaagccgcggaccctcacggtgagagttacagctcttaaggtggcgcgtctcgagtctgtcccttctgatgttcagatgtgttcggagtttcttccttctgactcagcagcccagctggcttcacccagtggatctcgcaccggggctgcaggtggagctgcctaccagtcctgtgccgtgctcccgcactcctcagccctttgggtggtcgatgggactaggtgccgtggagcagggggcagtgctcatcagggaggctcagccacacaggagcccacggagcgggtggaaggctcaggcatggcgggctgcaggtcccgagtcctgccccactggaaggcagctaatgttctgggaatgtcagtggaatctgctcctgctgtggaggaagagaagggagaagagttggaacagaaggagaaagagaaggaagaagatacttcaggcaatactacacattcccttggtgctgaagatactgcctcatcacagttgggttttggggttctggaactctcccagagccaggatgttgaggaaaatactgtgccatatgaagtggacaaagagcagctacaatcagtaaccaccaactctggttataccaggctgtctgatgtggatgctaatactgcaattaagcatgaagaacagtccaacgaagatatccccatagcagaacagtccagcaaggacatccctgtgacagcacagcccagtaaggatgtacatgttgtaaaagagcaaaatccaccacctgcaaggtcagaggacatgccttttagccccaaagcatctgttgctgctatggaagcaaaagaacagttgtctgcacaagaacttatggaaagtggactgcagattcagaagtcaccagagcctgaggttttgtcaactcaggaagacttgtttgaccagagcaataaaacaggagtggtgaaaggacataggaaggagtctggggaactgtactacagcattgaaaaagaaggccaaagaaagtggtataagcgaatggctgtcatcctgtccttggagcaaggaaacagactgagagagcagtatgggcttggcccctatgaagcagtaacacctcttacaaaggcagcagatatcagcttagtagcagcagcacaacccctacccgaaagatcacagaaagtcctcgtgcctccattgggagttctctcaggcaaaagaaaacttatcacttctgaagaggaacggtcccctgccaagcgaggtcgcaagtctgccacagtaaaacctggtgcagtaggggcaggagagtttgtgagcccctgtgagagtggagacaacaccggtgaaccctctgccctggaagagcagagagggcctttgcctctcaacaagaccttgtttctgggctacgcatttctccttaccatggccacaaccagtgacaagttggccagccgctccaaactgccagatggtcctacaggaagcagtgaagaagaggaggaatttttggaaattcctcctttcaacaagcagtatacagaatcccagcttcgagcaggagctggctatatccttgaagatttcaatgaagcccagtgtaacacagcttaccagtgtcttctaattgcggatcagcattgtcgaacccggaagtacttcctgtgccttgccagtgggattccttgtgtgtctcatgtctgggtccatgatagttgccatgccaaccagctccagaactaccgtaattatctgttgccagctgggtacagccttgaggagcaaagaattctggactggcaaccccgtgaaaatcctttccagaatctgaaggtactcttggtatcagaccaacagcagaacttcctggagctctggtctgagatcctcatgactggtggtgcagcctctgtgaagcagcaccattcaagtgcccataacaaagggattctctcctggaacattgacctgtcatcctttgacttgaaccaacagttgagactcttcattacccggcacctagctcacttctcctcagaggtcaaagcatttttatttaggctgcacaggtttcagggtttctggttcctgcttcggcttagccaacagatctccagggcagagcagaatcttggtacttacatgatgatgggcaccatcaaatccagagtggaaggaggggctcctgaatttactgctacaagatcaagttgtactctgagatttggcccagatcaaagctcacataatgcagtttcccattctgctgggagaatagtagagaatttcctggaaaaacccacacagctcaagacagccacagccccacccctgctggctcctctttcagctgtccccacaaacaacagtcagcccagagcagctgcagacactgcccctccctccagccttctgttaccccacagagccaagcaaaagcactggagctcagacgtcgtgaaggcaaagaaacagttaagtctccagtgcctcgtcacggaccagcccctcttccccgccctggcgccgccctcctcatcaagcacccccctcccccccccaccgcccgccccactcccacctttaagtgctgcagactcttccctgaagctgccggctgaggccggagctgccgcctccatgagaggcttcctcctacaccccagggtaagaaccgaaccaaagggcttggcatgtgggggccagaggaccctttgccaccagagtgagatcctagagaccatcatcctggtaaatcccagtgcagacagcatcagctctgaggttcatcatcttcttagcagctcatcagcttataaactactaatcttgagtgggcaaagtttagagcctgggggagacctcatcctacagagtggcacctactcatatgaaaactttgcccaggtccttcacaaccccgagatttcccaattgctcagcaatagagaccctgggatacaggccttccttaccgtgtcctgcttaggggaaggtgattggagccacctgggattatccagttcccaagagaccctgcacctccggctaaaccctgagcccactctgcccaccatggacggcgtggctgagttctccgagtatgtctctgagactgtggacgtgccatccccatttgacctactagagccccccacctcagggggcttcctcaagctctccaagccttgttgctacatcttcccaggtggtcgtggggactctgccctctttgctgtcaatggtttcaacatcctggtggatggtggctctgatcgcaagtcctgtttttggaagctggtacggcacttggaccgcattgactcggtgctactcacacacattggggcagacaacctgccaggcatcaatggactactgcagcgcaaagtggcagagctagaggaggagcagtcccagggctctagcagttacagcgactgggtgaagaaccttatctctcctgagcttggagttgtctttttcaacgtgcctgagaagctgcggcttcctgatgcctcccggaaagccaagcgtagcattgaggaggcctgcctcactctgcagcacttaaaccgcctgggcatccaggctgagcctctatatcgtgtggtcagcaataccattgagccactgaccctcttccacaaaatgggtgtgggccggctggacatgtatgtcctcaaccctgtcaaggacagcaaggagatgcagttcctcatgcaaaagtgggcaggcaatagtaaagccaagacaggcatcgtgctgcccaatgggaaggaggctgagatctccgtgccctaccttacctctatcactgctctggtggtctggctaccagccaatcccactgagaagattgtgcgtgtgctttttccaggaaatgctccccaaaacaagatcttggagggcctagaaaagcttcggcatctggacttcctgcgttaccctgtggccacgcagaaggacctggcttctggggctgtgcctaccaacctcaagcccagcaaaatcaaacagcgggctgatagcaaggagagcctcaaagccactaccaagacggccgtgagcaagttggccaaacgggaggaggtggtagaagagggagccaaggaggcacgttcagagctggccaaggagttagccaagacagagaagaaggcaaaagagtcatctgagaagcccccagagaagcctgccaagcctgagagggtgaagacagagtcaagtgaggcactgaaggcagagaagcgaaagctgatcaaagacaaggtagggaaaaagcaccttaaagaaaagatatcaaagctggaagaaaaaaaagacaaggagaaaaaagagatcaaaaaggagaggaaagagctcaagaaggatgaaggaaggaaggaggagaagaaggatgccaagaaggaggagaagaggaaagataccaaacctgagctcaagaagatttccaagccagacctaaagccctttactcctgaggtacgtaagaccctctataaagccaaggtccctggaagagtcaaaatagacaggagccgtgctatccgtggggagaaggagctgtcttctgagccccagacacccccagcccagaagggaactgtaccactcccaaccatcagtgggcacagggagctggtcctatcctcaccagaggacctcacacaggactttgaggagatgaagcgtgaggagagggctttgctggctgaacaaagggacacaggactaggagataagccattccctctagacactgcagaggagggacccccaagtacagctatccagggaacaccaccctctgttccagggctgggacaagaagaacatgtgatgaaggagaaagagcttgtcccagaggtccctgaggaacaaggcagcaaggacagaggcctagactctggggctgaaacagaggaagagaaagatacctgggaggaaaagaagcagagggaagcagagaggctcccagacagaacagaagccagagaggaaagtgaacctgaagtaaaggaggatgtgatagaaaaggctgagttagaagaaatggaggaggatgagacaatccctggctactcagagactgagcagaccatctcagatgaggagatccatgatgagccggaggagcgcccagctccacccagatttcatacaagtacatatgacctgcccgggcctgaaggtgctggcccattcgaagccagccaacctgccgatagtgctgttcctgctacctctggcaaagtctatggaacgccagagactgaactcacctaccccactaacatagtggctgcccctttggctgaagaggaacatgtgtcctcggccacttcaatcactgagtgtgacaaactttcttcctttgccacatcagtggctgaggaccaatctgtggcctcacttacagctccccagacagaggagacaggcaagagctccctgctgcttgacacagtcacaagcatcccttcctcccgtactgaagctacgcagggcttggactatgtgccatcagctggtaccatctcacccacctcctcactggaagaagacaagggcttcaaatcaccaccctgtgaggacttctctgtgactggggagtcagagaagagaggagagatcatagggaaaggcttgtctggagagagagctgtggaagaggaagaggaggagacagcaaacgtagagatgtctgagaaactttgcagtcaatatggaactccagtgtttagtgcccctgggcatgccctacatccaggagaaccagcccttggagaagcagaggagcggtgccttagcccagatgacagcacagtgaagatggcttctcctccaccatctggcccacccagtgccacccacacaccctttcatcagtccccagtggaagaaaagtctgagccccaagactttcaggaggcagactcctggggagacactaagcgcacaccaggtgtgggcaaagaagatgctgctgaggagacagtcaagccagggcctgaagagggcacactagagaaggaagataaagataaagcaatagtctttgagattatggaggcaggagagcccacaggcccaattctgggagcagaagcccttcccggaggtttgaggactttaccccaagaacctggcaaacctcagaaagatgaggtgctcagatatcctgaccgaagcctctctcctgaagatgcagaatccctctctgtcctcagcgtgccctccccagacactgccaaccaagagcctacccccaagtctccctgtggcctgacagaacagtacctacacaaagaccgttggccagaggtatctccagaagacacccagtcactttctctgtcagaagagagtcccagcaaggagacctccctggatgtctcttctaagcagctctctccagaaagccttggcaccctccagtttggggaactaaaccttgggaaggaagaaatggggcatctgatgcaggccgaggacacctctcaccacacagctcccatgtctgttccagagccccatgcagccacagcgtcacctcccacagatgggacaactcgatactctgcacagacagacatcacagatgacagccttgacaggaagtcacctgccagctcattctctcactctacaccttcaggaaatgggaagtacttacctggggcgatcacaagccctgatgaacacattctgacacctgatagctccttctccaagagtcctgagtctttgccaggccctgccttggaggacattgccataaagtgggaagataaagttccagggttgaaagacagaacctcagaacagaagaaggaacctgagccaaaggatgaagttttacagcagaaagacaaaactctggagcacaaggaggtggtagagccgaaggatacagccatctatcagaaagatgaggctctgcatgtaaagaatgaggctgtgaaacagcaggataaggctttagaacaaaagggcagagacttagagcaaaaagacacagccctagaacagaaggacaaggccctggaaccaaaagacaaagacttagaagaaaaagacaaggccctggaacagaaggataagattccagaagagaaagacaaagccttagaacaaaagaatacagccctggaacagaaggacaaggccctggaaccaaaagataaagacttggaacaaaaggacagggtcctagaacagaaggagaagatcccagaagagaaagacaaagccttagatcaaaaagtcagaagtgttgaacataaggctccggaggacacggtcgctgaaatgaaggacagagacctagaacagacagacaaagcccctgaacagaaacaccaggcccaggaacaaaaggataaagtctcagaaaagaaggatcaggccttagaacaaaaatactgggctttgggacagaaggatgaagccctggaacaaaacattcaggctctggaagagaaccaccaaactcaggagcaggagagcctagtgcaggaggataaaaccaggaaaccaaagatgctagaggaaaaatccccagaaaaggtcaacgccatggaagagaagttagaagctcttctggagaagaccaaagctctgggcctggaagagagcctagtgcaggagggcagggccagagagcaggaagaaaagtactggagggggcaggatgtggtccaggagtggcaagaaacatctcctaccagagaggagccggctggagaacagaaagagcttgccccggcatgggaggacacatctcctgagcaggacaataggtattggaggggcagagaggatgtggccttggaacaggacacatactggagggagctaagctgtgagcggaag

SEQ ID NO: 2127 - DNA, 1320 bp, Homo sapiens
  SIMILAR (667)..(1314): 971254mologous to Homo sapiens microtubule associated protein 1A,accession number U80458,Smith-Waterman Score=1098.
atggctcccctcagttcgggcgaggctgcggaattgccagacagtacttatcagggatacatcttaactagaagcttcttccggcgccgaggcaaccgcctcgccccaccaatgggtcccccagagaccccacccccgctcaagtctaagtggaagctcccgctggcagcagccaatgaactgcacctgccgccggcctttaagagccgcgcgcactctgcctgcagcggaagctgccggactaacactccgcgggtgtttccatggagaccgaggccgagcctgcgcggccttacggcgttggccatggagacaactccggggctggggcttcgaagtcccggcgccccccttgctcagaacccccgcggagcttgtgggccaagcccggagccgcgctgtcctggaaaagtgagtatggctgagtttctcacagaatttttggaaattcctcctttcaacaagcagtatacagaatcccagcttcgagcaggagctggctatatccttgaagatttcaatgaagcccaggtagatgtgttggagtctcagttctcccagctgcttcatcagatcaattctacccgagactttgaaagcatccgattggctcatgaccacttcctgagcaatttgctggctcaatcctttatcctattgaaaccttccccagtggaagaaaagtctgagccccaagactttcaggaggcagactcctggggagacactaagcgcacaccaggtgtgggcaaagaagatgctgctgaggagacagtcaagccagggcctgaagagggcacactagagaaggaagagaaagttcctcctcccaggagcccccaggcccaggaagcacctgtcaacattgatgagggacttacaggctgtaccattcaactgttgccagcacaggataaagcaatagtctttgagattatggaggcaggagagcccacaggcccaattctgggagcagaagcccttcccggaggtttgaggactttaccccaagaacctggcaaacctcagaaagatgaggtgctcagatatcctgaccgaagcctctctcctgaagatgcagaatccctctctgtcctcagcgtgccctccccagacactgccaaccaagagcctacccccaagtctccctgtggcctgacagaacagtacctacacaaagaccgttggccagaggtatctccagaagacacccagtcactttctctgtcagaagagagtcccagcaaggagacctccctggatgtctcttctaagcagctctctccaaaagccttggcacccttccagttggggaactaa

SEQ ID NO: 2128 - DNA, 2815 bp, Homo sapiens
  SIMILAR (2815)..(1835): 991254mologous to Homo sapiens microtubule associated protein 1A,accession number U80458,Smith-Waterman Score=1703.
cttccgctcacagcttagctccctccagtatgtgtcctgttccaaggccacatcctctctgcccctccaatacctattgtcctgctcaggagatgtgtcctcccatgccggggcaagctctttctgttctccagccggctcctctctggtaggagatgtttcttgccactcctggaccacatcctgccccctccagtacttttcttcctgctctctggccctgccctcctgcactaggctctcttccaggcccagagctttggtcttctccagaagagcttctaacttctcttccatggcgttgaccttttctggggatttttcctctagcatctttggtttcctggttttatcctcctgcactaggctctcctgctcctgagtttggtggttctcttccagagcctgaatgttttgttccagggcttcatccttctgtcccaaagcccagtatttttgttctaaggcctgatccttcttttctgagactttatccttttgttcctgggcctggtgtttctgttcaggggctttgtctgtctgttctaggtctctgtccttcatttcagcgaccgtgtcctccggagccttatgttcaacacttctgactttttgatctaaggctttgtctttctcttctgggatcttctccttctgttctaggaccctgtccttttgttccaagtctttatcttttggttccagggccttgtccttctgttccagggctgtattcttttgttctaaggctttgtctttctcttctggaatcttatccttctgttccagggccttgtctttttcttctaagtctttgtcttttggttccagggccttgtccttctgttctagggctgtgtctttttgctctaagtctctgcccttttgttctaaagccttatcctgctgtttcacagcctcattctttacatgcagagcctcatctttctgatagatggctgtatccttcggctctaccacctccttgtgctccagagttttgtctttctgctgtaaaacttcatcctttggctcaggttccttcttctgttctgaggttctgtctttcaaccctggaactttatcttcccactttatggcaatgtcctccaaggcagggcctggcaaagactcaggactcttggagaaggagctatcaggtgtcagaatgtgttcatcagggcttgtgatcgccccaggtaagtacttcccatttcctgaaggtgtagagtgagagaatgagctggcaggtgacttcctgtcaaggctgtcatctgtgatgtctgtctgtgcagagtatcgagttgtcccatctgtgggaggtgacgctgtggctgcatggggctctggaacagacatgggagctgtgtggtgagaggtgtcctcggcctgcatcagatgccccatttcttccttcccaaggtttagttccccaaactggagggtgccaaggctttctggagagagctgcttagaagagacatccagggaggtctccttgctgggactctcttctgacagagaaagtgactgggtgtcttctggagatacctctggccaacggtctttgtgtaggtactgttctgtcaggccacagggagacttgggggtaggctcttggttggcagtgtctggggagggcacgctgaggacagagagggattctgcatcttcaggagagaggccttcggtcaggatatctgagcacctcatctttctgaggtttgccaggttcttggggtaaagtcctcaaacctccgggaagggcttctgctcccagaattgggcctgtgggctctcctgcctccataatctcaaagactattgctttatctttatcttccttctctagtgtgccctcttcaggccctggcttgactgtctcctcagcagcatcttctttgcccacacctggtgtgcgcttagtgtctccccaggagtctgcctcctgaaagtcttggggctcagacttttcttccactggggactgatgaaagggtgtgtgggtggcactgggtgggccagatggtggaggagaagccatcttcactgtgctgtcatctgggctaaggcaccgctcctctgcttctccaagggctggttctcctggatgtagggcatgcccaggggcactaaacactggagttccatattgactgcaaagtttctcagacatctctacgtttgctgtctcctcctcttcctcttccacagctctctctccagacaagcctttccctatgatctctcctctcttctctgactccccagtcacagagaagtcctcacagggtggtgatttgaagcccttgtcttcttccagtgaggaggtgggtgagatggtaccagctgatggcacatagtccaagccctgcgtagcttcagtacgggaggaagggatgcttgtgactgtgtcaagcagcagggagctcttgcctgtctcctctgtctggggagctgtaagtgaggccacagattggtcctcagccactgatgtggcaaaggaagaaagtttgtcacactcagtgattgaagtggccgaggacacatgttcctcttcagccaaaggggcagccactatgttagtggggtaggtgagttcagtctctggcgttccatagactttgccagaggtagcaggaacagcactatcggcaggttggctggcttcgaatgggccagcaccttcaggcccgggcaggtcatatgtacttgtatgaaatctgggtggagctgggcgctcctccggctcatcatggatctcctcatctgagatggtctgctcagtctctgagtagccagggattgtctcatc

SEQ ID NO: 2129 - DNA, 8643 bp, Homo sapiens
  SIMILAR (223)..(8640): 961254mologous to Homo sapiens microtubule-associated protein 1a,accession number U38291,Smith-Waterman Score=14092.
  misc_feature (1)...(8643): n = a,t,c or g
gggggagacctcatcctacagagtggcacctactcatatgaaaacttggcccaggtccttcacaaccccgagatttcccaattgctcagcaatagagaccctgggatacaggccttccttaccgtgtcctgcttaggggaaggtgattggagccacctgggattatccagttcncaagagaccctgcacctccggctaaaccctgagcccactctgcccaccatggacggcgtggctgagttctccgagtatgtctctgagactgtggacgtgccatccccatntgacctactagagccccccacctcagggggcttcctcaagctctccaagccttgttgctacatcttcccaggtggtcgnggggactctgccctctttgctgtcaatggtttcaacatcctggtggatggtggctctgatcgcaagtcctgtttgtggaagctggtacggyacttggaccgcattgactcggtgctactcacacacattggggcagacaacctgccaggcatcaatggactactgcagcgcaaagtggcagagctagaggaggagcagtcccagggctctagcagttacagcgactgggtgaagaaccttatctctcctgagcttggagttgtctttttcaacgtgcctgagaagctgcggcttcctgatgcctcccggaaagccaagcgtagcattgaggaggcctgcctcactctgcagcacttaaaccgcctgggcatccaggctgagcctctatatcgtgtggtcagcaataccattgagccactgaccctcttccacaaaatgggtgtgggccggctggacatgtatgtcctcaaccctgtcaaggacagcaaggagatgcagttcctcatgcaaaagtgggcaggcaatagtaaagccaagacaggcatcgtgctgcccaatgggaaggaggctgagatctccgtgccctaccttacctctatcactgctctggtggtctggctaccagccaatcccactgagaagattgtgcgtgtgctttttccaggaaatgctccccaaaacaagatcttggagggcctagaaaagcttcggcatctggacttcctgcgttaccctgtggccacgcagaaggacctggcttctggggctgtgcctaccaacctcaagcccagcaaaatcaaacagcgggctgatagcaaggagagcctcaaagccactaccaagacggccgtgagcaagttggccaaacgggaggaggtggtagaagagggagccaaggaggcacgttcagagctggccaaggagttagccaagacagagaagaaggcaaaagagtcatctgagaagcccccagagaagcctgccaagcctgagagggtgaagacagagtcaagtgaggcactgaaggcagagaagcgaaagctgatcaaagacaaggtagggaaaaagcaccttaaagaaaagatatcaaagctggaagaaaaaaaagacaaggagaaaaaagagatcaagaaggataggaaagagctccagaaggatgaaggaaggaaggaggataaaaaggatgcccggaaggaggagaagaggaaagattccagccctgagctcaggaagatttccaagccagacctaaagccctttactcctgaggttcgtaagaccctctataaagccaaggtccctggaagagtcaaaatagacaggagccgtgctatccgtggggagaaggagctgtcttctgagccccagacacccccagcccagaagggaactgtaccactcccaaccatcagtgggcacagggagctggtcctatcctcaccagaggacctcacacaggactttgaggagatgaagcgtgaggagagggctttgctggctgaacaaagggacacaggactaggagataagccattccctctagacactgcagaggagggacccccaagtacagctatccagggaacaccaccctctgttccagggctgggacaagaagaacatgtgatgaaggagaaagagcttgtcccagaggtccctgaggaacaaggcagcaaggacagaggcctagactctggggctgaaacagaggaagagaaagatacctgggaggaaaagaagcagagggaagcagagaggctcccagacagaacagaagccagagaggaaagtgaacctgaagtaaaggaggatgtgatagaaaaggctgagttagaagaaatggaggaggtacacccttcagatgaggaggaagaggacgcgacaaaagctgagggtttttaccaaaaacatatgcaggaacccttgaaggtaactccaaggagccgggaggcttttgggggtcgggaattgggactccagggcaaggcccctgagaaggagacctcgttattcctaagcagcctgaccacacctgcaggagccactgagcatgtctcttacatccaggatgagacaatccctggctactcagagactgagcagaccatctcagatgaggagatccatgatgagccggaggagcgcccagctccacccagatttcatacaagtacatatgacctgcccgggcctgaaggtgctggcccattcgaagccagccaacctgccgatagtgctgttcctgctacctctggcaaagtctatggaacgccagagactgaactcacctaccccactaacatagtggctgcccctttggctgaagaggaacatgtgtcctcggccacttcaatcactgagtgtgacaaactttcttcctttgccacatcagtggctgaggaccaatctgtggcctcacttacagctccccagacagaggagacaggcaagagctccctgctgcttgacacagtcacaagcatcccttcctcccgtactgaagctacgcagggcttggactatgtgccatcagctggtaccatctcacccacctcctcactggaagaagacaagggcttcaaatcaccaccctgtgaggacttctctgtgactggggagtcagagaagagaggagagatcatagggaaaggcttgtctggagagagagctgtggaagaggaagaggaggagacagcaaacgtagagatgtctgagaaactttgcagtcaatatggaactccagtgtttagtgcccctgggcatgccctacatccaggagaaccagcccttggagaagcagaggagcggtgccttagcccagatgacagcacagtgaagatggcttctcctccaccatctggcccacccagtgccacccacacaccctttcatcagtccccagtggaagaaaaatctgagccccaagacttccaggaggcagactcctggggagacactaagcgcacaccaggtgtgggcaaagaagatgctgctgaggagacagtcaagccagggcctgaagagggcacactagagaaggaagagaaagttcctcctcccaggagcccccaggcccaggaagcacctgtcaacattgatgaggggcttacaggctgtaccattcaactgttgccagcacaggataaagcaatagtctttgagattatggaggcaggagagcccacaggcccaattctgggagcagaagcccttcccggaggtttgaggactttaccccaagaacctggcaaacctcagaaagatgaggtgctcagatatcctgaccgaagcctctctcctgaagatgcagaatccctctctgtcctcagcgtgccctccccagacactgccaaccaagagcctacccccaagtctccctgtggcctgacagaacagtacctacacaaagaccgttggccagaggtatctccagaagacacccagtcactttctctgtcagaagagagtcccagcaaggagacctccctggatgtctcttctaagcagctctctccagaaagccttggcaccctccagtttggggaactaaaccttgggaaggaagaaatggggcatctgatgcaggccgaggatacctctcaccacacagctcccatgtctgttccagagccccatgcagccacagcgtcacctcccacagatgggacaactcgatactctgcacagacagacatcacagatgacagccttgacaggaagtcacctgccagctcattctctcactctacaccttcaggaaatggggaagtacttacctggggcgatcaccaagccctgaatgaacacattctgacacctgatagctccttctccaagagtcctgagtctttgccaggccctgccttggaggacattgccataaagtgggaagataaagttccagggttgaaagacagaacctcagaacagaagaaggaacctgagccaaaggatgaagttttacagcagaaagacaaaactctggagcacaaggaggtggtagagccgaaggatacagccatctatcagaaagatgaggctctgcatgtaaagaatgaggctgtgaaacagcaggataaggctttagaacaaaagggcagagacttagagcaaaaagacacagccctagaacagaaggacaaggccctggaaccaaaagacaaagacttagaagaaaaagacaaggccctggaacagaaggataagattccagaagagaaagacaaagccttagaacaaaaggatacagccctggaacagaaggacaagaccctggaaccaaaagataaagacttggaacaaaaggacagggtcctagaacagaaggagaagatcccagaagagaaagacaaagccttagatcaaaaagtcagaagtgttgaacataaggctccggaggacacggtcgctgaaatgaaggacagagacctagaacagacagacaaagcccctgaacagaaacaccaggcccaggaacaaaaggataaagtctcagaaaagaaggatcaggccttagaacaaaaatactgggctttgggacagaaggatgaagccctggaacaaaacattcaggctctggaagagaaccaccaaactcaggagcaggagagcctagtgcaggaggataaaaccaggaaaccaaagatgctagaggaaaaatccccagaaaaggtcaaggccatggaagagaagttagaagctcttctggagaagaccaaagctctgggcctggaagagagcctagtgcaggagggcagggccagagagcaggaagaaaagtactggagggggcaggatgtggtccaggagtggcaagaaacatctcctaccagagaggagccggctggagaacagaaagagcttgccccggcatgggaggacacatctcctgagcaggacaataggtattggaggggcagagaggatgtgtccttggaacaggacacatactggagggagctaagctgtgagcggaaggtctggttccctcacgagctggatgtccagggggcccgcccacactacactgakgaacgggaaagcactttcctagatgagggcccagatgatgagcaagaagtacccctgcgggaacacgcaacccggagcccctgggcctcagacttcaaggatttccaggaatcctcaccacagaaggggctagaggtggagcgctggcttgctgaatcaccagttgggttgccaccagaggaagaggacaaactgacccgctctccctttgagatcatctcccctccagcttccccacctgagatggttggacaaagggttccttcagccccaggacaagagagtcctatcccagaccctaagctcatgccacacatgaagaatgaacccactactccctcatggctggctganatcccaccctgggtgcccaaggncagacccctccccnctgcacccctctccccagctcctggtccccccacacctgccccggaatcccatactcctgcacccttctcttggggcacacccgagtatgacagtgtggtggctgcagtacaggagggggcagctgagttggaaggtggnccatactcccccctggggaaggactaccgcaaggttganggggaaagggaagaagaaggtagggctgaggctcctgacaaaagctcacacagntcaaaggtaccagaggccaggaaaagccatgccaccacggagcctgagcagactgagccggagcagagagagcccacaccctatcctgatgagagaagctttcagtatgcagacatctatgagcagatgatgcttactgggcttggccctgcatgccccactagagagcctccacttggagcagctggggattggcccccatgcctctcaaccaaggaggcagctgccggccgaaacacatctgcagagaaggagctttcatctcctatctcacccaagagcctccagtctgacactccaaccttcagctatgcagccctggcaggacccactgtacccccaaggycagagccagggccaagtatggagcccagyctcaccccacctgcagttcccccccgtgctcctatcctgagcaaaggcccaagcccccctcttaatggtaacatcctgagctgcagcccagataggaggtccccatcccccaaggaatcaggncggagtcactgggatgacagcactagtgactcagaactggagaagggggctcgggaacaggcagaaaaagaggcccaatccccaagtcctcctcaccccattcctatggggtcccccacattatggccagaaactgaggcacatgttagccctcccttggnctcacacctggggnctgcccgacccagtctggacttccctgcttcagcctttggcttctcctcattggarrcagctcccccacagstgccctctccagctgaaccccgctcggcaccctgtggctcccttgccttctctggggatcgagctctggctctggctccaggaccccccaccagaacccggtatgatgaatacctggaagtgaccaaggcccccagcctggattcctcactgccccagctcccatcacccagttctcctggggnccctctcctctccaatctgccacgacctgcctcaccagccctgtctgagggctcctcctctgaggctaccacgcctgtgatttcaagtgtggcggagcgcttctctccaagccttgaggctgcagaacaggagtctggagagctggacccaggaatggaaccagctgcccacagsctctgggacctcactcctctgagcccagcacccccagcttcactggacttggccctagctccagctccaagcctgcctggagacatgggtgatggcatcctgccgtgccacctggagtgctcagaggcagccacggagaagccaagccccttccaggttccctctgaggattgtgcagccaatggcccaactgaaaccagccctaaccccccagnccctgccccagccaaggctgaaaatgaagaggctgcggcttnccctgcctgggaacgtggggcctggcctgaaggagctgagaggagctcccggcctgacacawtgctctcccctgagcagccagtgtgtcctrcagggggctccgggggcccacccagcagtgcctctcctgaggtcgaagctgggccccagggatgtkccactgagcctcggccccatcgtggggagctctccccatccttcctgaacccacctctgcccccatccatagatgatagggacctctcaactgaggaagttcggctagtaggaagaggggggcggcgccgggtaggggggccagggaccactggggkkccatgscctgtgactgatgagacacccccnacatcagccagtgactcaggctcctcacagtcagattctgatgtnccgccagaaactgaggagtgtccgtccatcacagctgaggcagccctcgactcagatgaagatggagacttcctacctgtggacaaanctgggggtgtcagtggtactcaccaccccaggcctggccatgacccacctcctctcccacagccagaccnccgcccatcccctccccgccctgatgtgtgcatggctgaccccgaggggctcagytcagagtctgggagagnagagaggctacggnagaaggaaaaggttcaggggcgagtagggcgtagggccccaggtaaggacaagccagtgtcccctgnacggcgtctggntcttcggggaaaacgctcacccacccctggtaaagggtctgnagatcgagtatcccggnccccanctcgatcacgnagtancacaagccaggtcaccccagcagaggaaaaggatggacacagccccatgtccaaaggyctagtcaatggactcaaggcaggaccamtggccttgagttccaagggcagctctggtgcccctgtatatgtggatctcgcctacatcccgaatcattggagtggcaagactgctgacctygacttcttccgtcgagtgcgtgcatcctactatgtggtcagtgggaatgaccctgccaatggcgagccaagccgggctgtgctggatgccctgctggagggcaaggcccagtggggggagaatcttcaggtgaaggtgactctgatccctactcatgacacggaggtgactcgtgagtggtaccaacaaactcatgagcagcagcaacaactgaatgtcctggtcctggctagcagcagcaccgtggtgatgcaggatgagtccttccctgcctgcaagattgagttctga

SEQ ID NO: 2130 - DNA, 475 bp, Homo sapiens
  SIMILAR (184)..(474): 961254mologous to Homo sapiens GTPase-activating protein,accession number M23612,Smith-Waterman Score=471.
taattatcgtgttctctttttaaacaataattgcttgtttttcttcccaagtatttatgcgctgccagttgagccgattacagaaagggcatgccacagatgaatggtttctgctcagctcccatataccattaaaaggtattgaaccagggtccctgcgtgttcgagcacgatactctatggaaaaaaatcatgccagaagaagagtacagtgaatttaaagagcttatactgcaaaaggaacttcatgtagtctatgctttatcacatgtatgtggacaagaccgaacactactggccagcatcctactgaggatttttcttcacgaaaagcttgaatcgttgttgttatgcacactaaatgacagagaaataagcgtggaagatgaagccactaccctatttcgagccacaacacttgcaagcaccttgatggagcagtatatgaaagccactgcttcacagtttgttcatg

SEQ ID NO: 2131 - DNA, 795 bp, Homo sapiens
  SIMILAR (10)..(129): 431254mologous to Homo sapiens transmembrane protein,accession number U16954,Smith-Waterman Score=66.
atgggtccggaattggagggtcttggtctcactgacttcaagaatgaagccgtggactctcgcgcaggcttggggatgtccgagtgtggggccgcaaaccaagacaaccggaatccagtggcgaaaggcggacaagaccggaccgaaaacaatactatagctgaccgcgcagtgtgcgattacagaaagggcatgccacagatgatggtttctgctcagctcccatataccattaaaaggagctatccctttaatgggtttggctcctggcccggttcagtggggaaccttgtctccacggttatagatctcgcaacgccgggaaaacgtgagattgagggccatcggatcgacaagatatcaagcagcaccaaagccgaagagttctccccaagggaaaaggttccaccaggggtatccagaaattttggcacgagaccgcaaagaggggtgctatacaccccccaagaaaacccacttgacgaacaaaagtcgacccaactcacacaacaagtactgacgaacgtcttcttgagagaggatctgatgggtcctggaccagcaatgaacacatatgactgccccttccagaggcagaacactgagggaatctgcacaactatatcagctaatctgtctgggcctgttgggccagctgaccagcatgtggagaccccagtagccagacacccatggactttgacagctggtgttccacataccaccacagttggaaccgtacatttccagagtgggcatgcagacctcaacatccagcaaagacctcgcagatga

SEQ ID NO: 2132 - DNA, 663 bp, Homo sapiens
  SIMILAR (190)..(261): 421254mologous to Synechococcus vulcanus metallothionein,accession number X53839,Smith-Waterman Score=45.
atgcagagccttgggaggatctggcaggaagtccacaaaagcaaaactgaggacaaggctgtcctcagactgtgcccatccgtggtcagtccacctccaaatgccttagagattatagcaatcagacttatgagttttgtttcggttactgtgatgagggccactgaggactgctccatggccactttgtgtcagtgcatctctagccctcataacataattagttataacgagatcacactggttcagggtggcccctacatccaacgacaggtatccttacaagaagaggagaggtcacacagagaaaaccttgtgaaggcagaggtggagactgcagctacaagccaaggcatgaacacatacatgggtctcctcttggtacttgctctccttttcctggtcttggctgaaccaagaaatccctcacatactttacccagcaccaccaggaatgctcttcccttagagatcctcgtggtgaattccctcatttccttcaagtctgctcaaatgttacttctcaaacagaattcaaatgcagccattgaagataaaacatttgctgattatgagacaagagaacattgccccagatgtcagattatttatcgccacagagctgaacatcagaaaccaattcacacatcacaatggctgtag

SEQ ID NO: 2133 - DNA, 529 bp, Homo sapiens
  SIMILAR (366)..(277): 481254mologous to Homo sapiens furin,accession number S65442,Smith-Waterman Score=61.
atgggagagtttcctaagtggcatatgaccgtcctatgggaacattccgctggtgaaggaagaattcctcaagtgagtactttacttcctttcattcctgctaaaaactttttaataaactttcactcctcctctaaaacttgcttcaggctctccctctgccttatgccccttagtcgaattctttcttctgaggaagcaagaattgaggttgctgcagatccatgtggatttgccgccacgaacatttcttactacctatgtcgtttttccatttcttcctctgcttccagagacacctaaaatatcaggggcagcagaaaaacaagagcctgcgttgtcagacacaggccaagtaggaccaagagtgatttggtgctggcccatggatcatggagctgaggatgagcaaggccagactgaacaccaagcaggcagtccacatgaaacagccattgccaaggacaacgcagaaacacgatccataaatattgcaggcaggaagttagaaatcagaaatgctagatga

SEQ ID NO: 2134 - DNA, 515 bp, Homo sapiens
  SIMILAR (470)..(514): 661254mologous to Homo sapiens serine/threonine protein kinase,accession number U07747,Smith-Waterman Score=55.
gtcggttggctctttagcatccctcaggcaccgctggcttcttgccctcggctctcattccaagattaattggaaatgcatcatcaggtgctgccagacctggcttctcttctattctgagaactgatatcctgtggctgacttaccagggtcgtcctagtccccccgcacggtattgggagtggaggcagccccacacggaggcgctgggagactttcctcccagcagtgtcctgtcactgcattccggcccctgcgtttgtaggcagtgatgtcacagagtgccttcatgctcctcgggtctccggttctccccggacctctgtagtcctcattgccaaagttgtaccccctggggagtgcaccctgcctggcatttctggaggttcgggcggttccggggctctgcaggagcctccaggcgtgataaagagcgctgccggcactcccggggtctcggcctctttggggcccattgccaagccccttccctcctcgtgctcccgctccgcgtt

SEQ ID NO: 2135 - DNA, 729 bp, Homo sapiens
  SIMILAR (331)..(585): 271254mologous to Mesocricetus auratus class A scavenger receptor,accession number U43278,Smith-Waterman Score=72.
atgatggcacttctcattcaagctgtcctgcccccgcctccacgcctgctccccgctccgtccacagccacggcagcgagcaagcagaaggcacaggatgctttcagggaactcagagctcaagcctcgctgctttgggctgccatccccagcctcgctgagtcaaatccttcagtccctctcctgcagcacttctgctgctggaatttctcatggatgaacgtgcttctctggataaagtcttttgccttcaccacgagggcacagactggagctgtcacaggatatgttactatctgcctggggataaaaaccccatcaaggcacgacagcaaccgcaggtgtgaggaaattcaatctctaatggcaaaggctcaaacacaaaagctagaagctcacgtggtggctacactccagcagctccaggatactttgaagcaactggatttccgctgtatctcacaatcagtgaggcaagccattctcattttccacattcaggattttccatgtcttagtgatggcatttctggaatattcctggatctgacccagcctctgaaattagtcctcatgttctccccaccagacttaaagtccatgaagaaaggcagtgatgtcacagagtgccttgatgctcctcgggtctccggttctccccggacctttgtagtcctcattgccaaagttgtaccccctgtggagtgcaccctgcctgcatttctggag

SEQ ID NO: 2136 - DNA, 720 bp, Homo sapiens
  SIMILAR (401)..(469): 391254mologous to Enterococcus faecium unknown,accession number AF099088,Smith-Waterman Score=49.
atggttaccttaacagcaggttgggatgaacttgagtgccatcgcgtttataatttcttatgcgaactgactaatctctgccgcaagatacaaatggctgtctgcagcaaaccaggacaggtggtttggcaggaaatgatagaagaacctacagatgaattcagtctgaaaggtttggctgatgccattaagttactatatgacgctagcactaaagagtggacagcagatgatgttatcagtcttgtagatgaactatcagtggttccccgtgagtggcttctagagaataatgcacgtctcctaatgctaagtggaaacaacatctgtttcagtttcatggctagtaaagctgtgaatggacgcaccattgaactggcaaggctcgtagtctttttggctttggtgtgtgagaaagaactgtactgcatggattggacagttaaaatgatgcaaaaagtctgcaaagtctttagcactccagtggaaagaaagaacttcctgcagaatgtggcaaatgcatttgcatgtgttataatggaaatgctgcaatcaattatgtctggctccggccgcagctccaggccactagagcagatagataatgtaggacagaatgaccaggcctatgatggcaaagaacatcaggatgaaaatatccagcattgtggattcctaggccgaccaagcccctggattctggtgaaccgtgagctgtga

SEQ ID NO: 2137 - DNA, 909 bp, Homo sapiens
  SIMILAR (563)..(778): 361254mologous to Homo sapiens salivary proline-rich protein 1,accession number K02576,Smith-Waterman Score=73.
atttgagcagttctccgcggtaactttaataagtctccatttcaactttctgttctcaatcccatctacagctcaaacatatgcagtatctgccagccctgtcccatgaattcctgaagtcccagccaagtgcctctcagctcaaaaagccccttgcttgccaggggtcagccatgtctggaaggctctgaaagaggtctgctggacagtaggactgcttctgtggatgagaggcctcttgttggactggaagagaccaggagccgagattaacagcagaagccaaaaatcccaccggtgcgtcagcaagcagggcactcggccattcagctccatccttccttttgagctgttctccagcaggctccggccgcagctccaggccactagagcagatagataatgtaggacagaatgaccaggcctatgatggcaaagaacatcaggatgaaaatatccagcattgtggattcctaggccgaccaagcccctggattctggtgaaccgtgagctgtgagcacggaggttgcagtcggtggagagaaatggctccccttcactccacagctcagccctggttctttcccctccccctcccaggggcctgagactgaaggatgctgcagctccatccagcagcttcctgcccccccaccaaccacagccaaccaatcacaaagcctgggggtggatagccaaggagatgccagatttagacccacagaaccgcagaatcaaaggggctcaatttctccccaggaacccaatcccacccctttgtatctaaatggagcctgcatgctctggatgtaggaggagataggatcctacccagctcccccaagagtgaatcctcctgactgccttcttcgcgtttcccggacgcgtgggtcgagtcgggcaacggg

SEQ ID NO: 2138 - DNA, 216 bp, Homo sapiens
  SIMILAR (6)..(182): 301254mologous to Homo sapiens Fragment of human secreted protein encoded by gene 4,accession number Y36379,Smith-Waterman Score=67.
tcaagtctgctgaaactgtgcccacagccgccccttcccccaggtgctctgtcccaggcagatgaaagatttatctataagcccctgattggggctgctgcctttctttcggagatgccgcacacagctgttggcaggcccagggccttgctggcagctggccagaggtatcagttccttgccatgtgggcctttccgtgaggctgctgacagcat

SEQ ID NO: 2139 - DNA, 312 bp, Homo sapiens
  SIMILAR (311)..(120): 291254mologous to Pyrococcus abyssi CDP-ABEQUOSE SYNTHASE (EC 4.2.1.-),accession number AJ248288,Smith-Waterman Score=76.
tttttttttttttttttttgattaataaagaggtttatttggctcactgttctgcaaaatgtacaaaaatcatggtgcagcatctgcttctgctaagggtctcaggctgcttccactcatggcagatgatgaagggagagccagtgtatgcagacatcacaaaaattaacagagcgatagctcactcacccctcaatccagagagggcattaatttattcatgagggatcttcacacattcttttatgttcacaagatttctcatcaatatgagctctctggtgttgagtaaatttttcgtacacagtgaag

SEQ ID NO: 2140 - DNA, 393 bp, Homo sapiens
  misc_feature (1)...(393): n = a,t,c or g
atgaacatgatttttaacagacttgttccaatgaactgttatagagatggtccccaacaatgacaactaacaatttctcagctttatgatggcacaaaagtgatatggcgctatagcttggatatttgtccctnnnnnnnnnnnnnnnnnnnnnnnnnnnnnnnnnnnnnnnnnnnnnnnnnnnnnnnnnnnnnnnnnnnnnnnnnnnnnnnnnnnnnnnnaaattaatgccctctctgggngncnngnnngnnnanggnagcccancaaanannnntggggaaagccnnnnnnnnnnnncggttaattatcgcggcaaccgggggcgtggggaagaggnnnnnnnnnngggggggcacattaaaaatctggggcgggaaaccaaaagaaaag

SEQ ID NO: 2141 - DNA, 745 bp, Homo sapiens
  SIMILAR (547)..(720): 411254mologous to Homo sapiens Human secreted protein encoded by gene 75,accession number Y76198,Smith-Waterman Score=68.
tctgtatttgttccatcttgcttttacagatcaatacaaataggtacctaaacctcctaaacgaaacatccaagatggtggaaaaaaggccatatgaacagttctttcctcacctactatcaacaaacagtaaattaaacattcctaactgcagcctccttttgtaaaatttataaccatttatcttttgagtgtgacatgatactagatgtatgataattacatgttttgtgtatcagtatgaacatgatttttaacagacttgttccaatgaactattatagagatggtccccaacaatgtcaactaacaatttctcagctttatgatggtacaaaagtgatatgttgctatagtttggatatttgtccctccaaatctcatgttgaagtttgatctcagtgttggaggtggggcctaatggaaggtgtttgggtcatggtggaagatccctcatgaataaattaatgccctctctggattgaggggtgagtgagctatcgctctgttaatttttgtgagagctggttgttcaaaagaacctggcacctcctccctcaccctcttgttttctctcttgccatgtgatgtctgcatacactggctctcccttcatcatctgccatgagtggaagcagcctgagacccttagcagaagcagatgctgcaccatgattcttgtacattttgcagaacagtgagccaaataaacatctttattaatccaaaaaaaaaaaaaaaaaaa

SEQ ID NO: 2142 - DNA, 552 bp, Homo sapiens
gaacagggcaggcctgccacactgttaccgttagctgcccctgaagaaaagcctccctagggaaaggtggccagaagaagccagagagctgaaggagataaagactgaagccatgctgcccatctgggaaggatgttcctaagcgtatgccttggtgtgtgggggccacttggctggagcagcatgaaggtatgggacagtgacctgtacttgtggggaggtgggatcacccaggaacctcaaagaccagagtaaagactttgcttttgccttgcattctcagcgagagaaccagccacgaggggattcccgctgaaagagtaacacaacctgccttttgttttagcacagtgctgtgcagaacttcctgcaacgccgacacgttctacgttctgtgctgtctgcacagtgactatgaaccagacgtggctatttaagttaattaaaataaaatttaaaattcagtgcttccagtccagcggccacatttcaagggctgatgtggctgacggctatcacactggacagtgcggtgtcagagaatcagtctga

SEQ ID NO: 2143 - DNA, 268 bp, Homo sapiens
  SIMILAR (122)..(75): 621254mologous to Mus musculus protamine 1,accession number K02926,Smith-Waterman Score=58.
cgagagaaccagccacgaggggattcccgctgaaagagtaacacaacctgccttttgttttagcacagtgctgtgcagaacttcctgcaacgccgacacgttctacgtctgtgctgtctgcacagtgactatgaaccagacgtggctatttaagttaattaaaataaaatttaaaattcagtgcttccagtccagcggccacatttcaagggctgatgtggctgacggctatcacactggacagtgcggtgtcagagaatcagtctga

SEQ ID NO: 2144 - DNA, 462 bp, Homo sapiens
  SIMILAR (365)..(327): 461254mologous to Human papillomavirus type 58 open reading frame E5,accession number D90400,Smith-Waterman Score=40.
atgatcagtccatcagtttggagaagaggcttctggaaacatgggcagaaacagaaagaccagttaggaggctttgcaatgatccaggcgagagaggacagggtcctgagtgaaggtgataccagcagaggagcaaaggggtgttggaggatattgctggattctggttatcttttgaaggtagagtcaacgggatttgttgatagactagataacattggaaaggccggtccccgcctgggacttgggtccaaagttctggggcctaccctggactccctgcggaacgccagttcggggcagaagtcagaggacatgttttctcccggttggggatctagacataaacaagtgaaaatcatgaatttggggaaattccaggaacctgagccagaagaatgctgctctatgcagcagttggaaaacagttttgtggacagattacaagtctggcctaagtga

SEQ ID NO: 2145 - DNA, 531 bp, Homo sapiens
  SIMILAR (463)..(338): 331254mologous to Arabidopsis thaliana drought-induced protein like,accession number AL161542,Smith-Waterman Score=73.
atgttcaagtacgctaataagcaacatactgggaaaagaattggctgtggcatacaacgcacatcatttcagtatgctacctcctgccacttaagttttgtgacattcaatgtgttcttcatagccaactcaaagaataggatcttagataacagaaaagggcagctgggaactagctgcctgcccctttcagtccttgagggaactcgcccctttgccctggcctgtgtggtgttaaagctctgtttctcgggcacctcctcctccaaaccccggaccagccgcccagcgccgtcagagcagccccgactagcctcctctcctctcagccgtctgactcctctccccagtctgtagtcccctcaatttgcatcctttagccccgcttggaaagagaccggagagaaatttgcccactacccccgcgagaagacccacttgtcagccgtgtctcggggtggggggcactgcaaggcctggcgctgttttgtgcacgttaaatgcccagcagtatctcccagaccggcaacc

SEQ ID NO: 2146 - DNA, 3213 bp, Homo sapiens
  SIMILAR (835)..(2166): 871254mologous to Homo sapiens serine kinase SRPK2,accession number AC005070,Smith-Waterman Score=1991.
atgggggtagatttccactttgatgctgttctcatggtagtcaagctggcttttaagaagctttctgtctgcctgttcagtgtggccctcactggaggaatgagaagtgcctacacacttagactgcagggtctgagaattttgagggtcatccatgtaggcagctcagcagacgcagcaggcctgagggctgccgttgcagaaatgccccaaggaatggcactcacatgtcgggcaactgaccctcagagcaacctttccacagcagccgtcatcttcagcgcacgcattcagtggccggagcctcaacagaaagctcctttagttcctcctcctccaccgccaccaccaccaccaccgccacctttgccagaccccacacccccggagccagaggaggagatcctgggatcagatgatgaggagcaagaggaccctgcggactactgcaaaggtgatgtgccaagcatggtgagtattaaagtcagcatcagtaaggtcattagagatagtaaggttccctccttatacccgtgccagccccccccaaatttggtgggtagaatcagtattgcgaaaatgaccatactgccgaaagcagtctacaaattcggtgcaattcccatcaaagtactaccgtcattcttcacagaactagaaaaaaccatcctaaaattcacatggaaccgaaaaagagtctgcatagtcaaagcaagactaagcaaaaagagaaaatttgaaggcatcacattacctgatttcaaactgtactctggagcagctgctctggacagggcaggacctactgttgatgcagcagcagctgctggagcaggtggatatcatccagtgaaaattggagacctcttcaatggccggtatcatgttattagaaagcttggatgggggcacttctctactgtctggctgtgctgggatatgcagatggatggccttagtcgtaatgtgtccgtttccttctggtgggttcttggtctcactgacttcaagaatgaagctgcggaccttgcagtgagtgttacagctcttaaaggtggcgcatccagagttgtttgttcctcccggtgggttcgtggtctcgctgacttcaggaatgaagccacagaccctcatgatgtctgcatggtcttcgaagtacttggccaccatctcctcaagtggatcatcaaatccaactatcaaggcctcccagtacgttgtgtgaagagtatcattcgacaggtccttcaagggttagattacttacacagtaagtgcaagatcattcatactgacataaagccggaaaatatcttgatgtgtgtggatgatgcatatgtgagaagaatggcagctgaggccactgagtggcagaaagcaggtgctcctcctccttcagggtctgcagtgagtacggctccacagcagaaacctataggaaaaatatctaaaaacaaaaagaaaaaactgaaaaagaaacagaagaggcaggctgagttattggagaagcgcctgcaggagatagaagaattggagcgagaagctgaaaggaaaataatagaagaaaacatcacctcagctgcaccttccaatgaccaggatggcgaatactgcccagaggtgaaactaaaaacaacaggattagaggaggcggctgaggcagagactgcaaaggacaatggtgaagctgaggaccaggaagagaaagaagatgctgagaaagaaaacattgaaaaagatgaagatgatgtagatcaggaacttgcgaacatagaccctacgtggatagaatcacctaaaaccaatggccatattgagaatggcccattctcactggagcagcaactggacgatgaagatgatgatgaagaagactgcccaaatcctgaggaatataatcttgatgagccaaatgcagaaagtgattacacatatagcagctcctatgaacaattcaatggtgaattgccaaatggacgacataaaattcccgagtcacagttcccagagttttccacctcgttgttctctggatccttagaacctgtggcctgcggctctgtgctttctgagggatcaccacttactgagcaagaggagagcagtccatcccatgacagaagcagaacggtttcagcctccagtactggggatttgccaaaagcgagtaaaattgatgagccagccctgcaaacagcccgacattctgcagcccctttggttccagcagtctggaattgcacgccgacatgcccttccatggtgctgctagagtgtctttgcagtatgctcacccgatcagtgtattcccctgctcacagtttccacagctccccatcatctacagcagtggtctccacagtggagagtgtacatccctgcataaccagcaccatccaggaagcaaaaacccgggcagctgacttgttggtgaatcccctggatccgcggaatgcagataaaattagagtaaaaattgctgacctgggaaatgcttgttgggtgcataaacacttcacggaagacatccagacgcgtcagtaccgctccatagaggttttaataggagcggggtacagcacccctgcggacatctggagcacggcgtgtatggcatttgagctggcaacgggagattatttgtttgaaccacattctggggaagactattccagagacgaagaccacatagcccacatcatagagctgctaggcagtattccaaggcactttgctctatctggaaaatattctcgggaattcttcaatcgcagagctctggatcctgaatccagcaacgcgaggaaggcctgtacttttggtcattcaagttgcgctctgtttctgtctgcgcgggcggtggtagtgtctgcatgcagtgtactgattaaactgtcgtgtgtttctgttttgctggcaatgtttcccaatgcagatcacatagcattgatcattgaactgctggggaaagtccctcgaaaatacgctatgttggggaaatactccaaggagtttttcaccagaaaaggagaactgcgacacatcaccaagctgaagccctggagcctctttgatgtacttgtggaaaagtatggctggccccatgaagatgctgcacagtttacagatttcctgatcccgatgttagaaatggttccagaaaaacgagcctcagctggcgaatgccttcggcatccttggttgaattcttag

SEQ ID NO: 2147 - DNA, 682 bp, Homo sapiens
  SIMILAR (488)..(667): 301254mologous to Homo sapiens Human secreted protein clone kh13_4 protein sequence SEQ ID NO:116,accession number Y94955,Smith -Waterman Score=66.
gttggagaccctggctgggcccctggcccagtgcccgccgcctgcccctcccgctgagaacaggatgtgggtgtcaggagccccagcggccttcccagcttcccctgattgtgtacagggcgataaaggggctgatgagagggagatctctggcggcacagacacagcggcggcggctcaactgaagattcactattggataccagggcctagcacggtgcaggagcacaaggaagtgttcaacaccaagctggctgatggacaaaatggatcacccagcaaacaagcaagtatctgtgacaggcagtttgttgtggcaggagggtaccatcgctcattggcagatgaggcttatggagatgaggaggacttgcccaaggtcgtgggcctggtgcacagcaccagagggccagcccatcccacttacctgctcaggcctctgcagaaggaccaggactcaagtctgctgagagcgtctggaggaggaggtggcagccccagcagtagtacgaaatcagaacacagctgccgacagatacacattccaggccccttcagccatgctgatattacagggcagaagtggtttccaggcggcgtgtccacagagcctgccaggaacatggggttcctgaagcctaccccaacacctctgctacgctcacccaaggactttcggtga

SEQ ID NO: 2148 - DNA, 405 bp, Homo sapiens
  SIMILAR (97)..(363): 391254mologous to Homo sapiens PRO2221,accession number AF116695,Smith-Waterman Score=124.
atggctgactcgaagcagctgcggttcgaggctcccactgagatgaacgaaaacggtcagcagcgtcaaagaccaaagccagataaaatcaggaagatgagaaagaatcaatacaaaaatgctgaaaactcaaaaagccagaaagcctcttctcctccaaatgattgcaacacctctccagcaatggcacagaactggcctgaggctgagatggatgaactgacagaagtagccttcagaagtgggttcttggtctcgctgatttcaagaatgaagctgcggacccttgccgtgagtgttacagctcttaaagatggagtgaagccacggaccttcgtggagagtgttatagctcttaatgatgatgcagacccaaagagtgggcagctgcaagatttgttgtga

SEQ ID NO: 2149 - DNA, 914 bp, Homo sapiens
  SIMILAR (658)..(581): 841254mologous to Homo sapiens Human secreted protein, SEQ ID NO: 7678,accession number G03597,Smith-Waterman Score=115.
tcaagtaggaagttcagcttgcaactgaaatcctctagcctcactctggtgctttgaaacaaatggagctttcaggagctgctgataaaggatggggatgctggcttggaggtcaggcgccggcagtgtgggggctgaggtggcaagcagggttgtcattatgctaatagcatccgtggagccacagccagtgaccctattgtgtccggaattggttccttccggtgggttcttggtctcgctgacttcaagaatgaagccgtggaccctagcagtgagtgttaccgttcttaaagatggtgtgtccggagtttgttccttcagatgttcagatgtgtccagagtttcttccttctggtgggttaatagtctcgctggcttcaggagtgaagctgcagaccttcgcagtgagtgttacagctcataaaggtggcgcttctggagttgttcgttccttccggtgggttcgtggtctctctggcttcaggagtgaagctgcagacctttgcagtgttacatctcttaaaggtggcacgtccagagttgtacattcctcccgtccagagttgttttgttcctccttcctcgttcctcccagtgggtttgtggtctcgctggcttcaggagtgaagctgcagacctttgcagtgagtgttacagctcttaaaggtggcacagacccaaagagtgagcagcagcaagatttattgcaaagagcaaaagaacaaaacttcgaaaaagtggaaggggacctgagtgggttgctcaggtggcctgcttttattcccttatttggccccaatcacatcctgctgattggtctattttacagagagctgattggtccattttacagagtgctgattggtccgtttttacacagagcactgattggtgcatttacaaagctttag

SEQ ID NO: 2150 - DNA, 1314 bp, Homo sapiens
  SIMILAR (611)..(877): 311254mologous to porcine adenovirus 3 putative 13.1 kDa E3 protein,accession number AF083132,Smith-Waterman Score=71.
atgagggctatatccacagcagccaggacttccaaagcggagcccaaatgcctgttcaggcaggggcactcaagaacaatagatgaaggatctgaaaccagggctgtcctagaaaatctggggcactcggccacctgcacgatgcctgtagtgagcacagctgggccaggtgcatttagaaacctggctgaaaactgcaggtctgatgaggagcacaaaggtcgggtccctagagaacaggagcctttgaaggaagagggtggagctgattgcagactgccgaatcttgaaggggtccacagaaaggctgcagtgtcttacagccagagcttgcttcgagacacaaatcctgccttgactgcccagggcacacaggtctatacatggggcttcatgcccttctccggctctggagtaggaggcagagactttacagtttaccagggactttctctttcacttgtgcctgaactgtcagtggcctggcagcagcctcagctcactggaacgaggaagacacagtggccagaccttgaagagccaagcaccagttctattaatcaattatctgctgcctgggctgcgagtaaggctgttgggccagataaaccccaggggaggggaggcgaccaagagacagacagcccgcactccctgtctgccccacgtcagcaggtgcacagcaccagagggccagcccatcccacttacctgctcaggcctctgcagaaggaccaggactcaagtctgctgagagcgtctggaggaggaggtggcagccccagcagtagtacgaaatcagaacacagctgccgtgagtcctatgggagacaagaaagggggcagacactctcccgctccaggcccagctcctggacattgggagtgaagtctagtttctctctgtcctctgaactggttaacaaggaccacagagattccttgatggatgaatggtgccgtgaaaagtctctgagtcctgcacggagtgaccattgggaagggttctggaggggctcaggtggagccacggacaggagtggcagtgaagggcagatggcctgggggactcaggcttgggccccacccagcctggggagtgggggtagtcattcttgtgtagcctttggttgcatggacccaaagtttacagaagaagaccctggaggaggacacgtctcccttgatgtcaaccgcttgtgggttcttggtctcgctgatttcaagaatgaagctgcggactttgaggtgagtgttacagctcttaaaggtggcacggacccaaagagtgagcagcagcaagatttactgtga

SEQ ID NO: 2151 - DNA, 397 bp, Homo sapiens
  SIMILAR (364)..(11): 711254mologous to Homo sapiens p40,accession number U93566,Smith-Waterman Score=400.
  misc_feature (1)...(397): n = a,t,c or g
agctgttantctgaagggcttcccctttgtgggtaaacccgaacctatcnacactggctgcccttaacatcttntccttcatttcaactttggtgaatctgacaattatgtgtcttggagttgctcntctcgaggagtaccnntgtggtgtttgaatgttggcctgccttgctagattggggaagttctcctggataatatcctgcagagtgttttccaacttggttccattctccccgtcactttcaggtacaccaatcagacgtagatttggtcttttcacatagtcccatatttcttggaggctttgtttctttttattcttttttctctaaacttctcttctcgcttcatttcattcatttgatcttccatcactgataccctttcttccagn

SEQ ID NO: 2152 - DNA, 756 bp, Homo sapiens
  SIMILAR (642)..(701): 501254mologous to Homo sapiens p40,accession number U93570,Smith-Waterman Score=43.
atggggaaaaaacagaacagaaaaactggaaactctaaaaatcagagcgcctctcctcctccaaaggaacgcagctcctcaccagcaacggaactaagctggatggagaatgactttgacgagctgagagaagaaggcttcagacgatcaaattactctgagctacgggaggacattcaaaccaaaggcaaagaaattgaaaactttgaaaaaaatttagaagaatgtataactagaataaccaatacagagaagtgcttaaaggagctgatggagctgaaaaccaaggctcgagaactacatgaagaatgcagaagcctcaggagccgatgcgatcaactggaagaaagggtatcagcgatggaagatgaaatgaatgaaatgaagcgagaagggaagtttagagaaaaaagaataaaaagaaatgagcaaagcctccaagaaatatgggactatgtgaagagaccaaatctacgtctgattggtgtacctgaaagtgatggggagaatggaaccaagttggaaaacactctgcaggcaacaaaagacaaaattgacaaatgggatctcattaaactaaagagcttctgcacagcaaaagaaactaccatcagagtgaacaggcaacctacaaaatgggagaaaattttcgcaacctactcatctgacaaagggctaatatccagaatgtacaacgaactcaaacaaatttacaagaaaaaaacaaccccatcaaaaagtgggcaaaggacatga

SEQ ID NO: 2153 - DNA, 645 bp, Homo sapiens
  SIMILAR (112)..(642): 861254mologous to Homo sapiens p40,accession number U93570,Smith-Waterman Score=787.
atggccgaacaggaacagctctggtctacagctcccagcatgagcaactcagaagacaggcgatttctgcatttccatctgaggtaccgcgttcatctcactagggagtgcccaacagaacgcagttcctcaccagcaatggaacaaagctggacggagaatgactttgacgagttgagagaagaaggcttcagacgatcaaactactccgagctacaggaggaaattcaaaccaatagcaaagaagttataaactttgaaaaacaattagatgaatgtataactggaataatcaatgcagagaagtgcttaaaggagctgatggagctgaaagccaaggctcaagaactacatgaagaatgcagaagcctcaggagcggatgcaatcaactggaagaaagagtaccagggatggaagatgaaatgaatgaaatgaagcaagaagggaagtttagagaaaaaagaataaaaagaaatgaacaaagcctccaagaaatatgggactatgtgaaaagaccaaatctacgtctgattagtgtacctgaaagtgacggggagaatggaaccaagttggaaaacactctgcaagatattatccaggagaacttccccaatctagcaaggcaggccaacattcagatttag

SEQ ID NO: 2154 - DNA, 948 bp, Homo sapiens
  SIMILAR (7)..(945): 861254mologous to Homo sapiens p40,accession number U93573,Smith-Waterman Score=1354.
atggctgaacagctctggttgcaaacagcaacagctctggtctacagctcccagcgtgagcgatgcagaagatgcatgatttctgcatttccatctgaggaggaaattcaaaccaaaggcaaagaatttgaaaactttgaaaaaaatttagacgaatgtataactagaataaccaatacagagaagtgcttaaaggagctgatggagctgaaagccaaggctggagaactacgtgaagaatgcagaagcctcaggagccgatgcgatcaactggaagaaagggtatcagcgatggaagatgaaatgaatgaaatgaagcgagaagggaagtttagagaaaaaagaataaaaagaaacgaacaaagcctccaagaaatatgggactatgtgaaaagaccaaatctgcatctgattggtgtacctgaaagtgacggggagaatggaaccaagttggaaaacattctgcaggatattatccaggagaacttccccaatctagcaaggcaagccaacattcagattcaggaaatacagagaatgccacaaagatactcattgagaagagcaactccaagacacataattgtcagattcaccaaagttgaaatgaaggaaaaaatgttaagggcagccagagagaaaggtcgggttacccacaaagggaagcccatcagactaacagcggatctctcggcagaaactctacaaaccagaagagagtgggggccaatattcaacattcttaaagaaaagaattttcaaaccagaatttcatatccagccaaactaagcttcataagtgaaggagaaataaaatactttacagacaagcaaatgctgagagattttgtcaccaccaggcctgccctaaaagagctcctgaaggaagcactaaacatggaaaggaacaaccggtaccagctgctgcaaaatcatgccaaaatgtaa

SEQ ID NO: 2155 - DNA, 660 bp, Homo sapiens
  SIMILAR (1)..(579): 871254mologous to Homo sapiens p40,accession number U93572,Smith-Waterman Score=863.
atggggaaaaaacagaacagaaaaactggaaactctaaaaagcagagcgcctctcctcctccaaaggaaagcagttcctcacgagcaacggaacaaagctggatggagaatgactttcacgagctgagagaagaaggcttcagacgatcaaattactctgagccacaggaggacattcaaaccaaagacaaagaagttgaaaactttgaaaaaaatttggaagaatgtataactagaataaccaatacagagaagtgcttaaaggagctgatggagctgaaaaccaaggctcgagaactacgtgaagaatgcagaagcctcaggagccaatgcaatcaactggaagaaagggtatcagcaatggaagaagaaatgaatgaaatgaagcgagaagggaagcttagagaaaaaaagcataaaaagaaaagagcaaacatccaagaaatatgggactatgtgaaaagaccaaatctacgtccgattggtgtacctgaaagtgacagggagaatggaaccaagttggaaaacactctgcaggatattatccaggagaacttccccagtctagcaaggcctgccctaaaagagctcctgaaggaagcactaaacatggaaaggaacaaccggtaccagccgctgcaaaatcatgccaaaatgtaa

SEQ ID NO: 2156 - DNA, 518 bp, Homo sapiens
  SIMILAR (75)..(515): 981254mologous to Homo sapiens p40,accession number U93564,Smith-Waterman Score=742.
ggtcaaccgtcgacagcgacacacttgcatcggatgcagcccgggttacgtgccggcacgggctggatccccctgagctacgggaggacattcaaaccaaaggcaaagaagttgaaaactttgaaaaaaatttagaaaaatgtataactagaataaccaatacagagaagtgcttaaaggagctgatggagctgaaaaccaaggctcgagaactacgtgaagaatgcagaagcctcaggagccgatgcgatcaactggaagaaagggtatcagcaatggaagatgaaatgaatgaaatgaagcgagaagggaagtttagagaaaaaagaataaaaagaaatgagcaaagcctccaagaaatatgggactatgtgaaaagaccaaatctacgtctgattggtgtacctgaaagtgatgtggagaatggaaccaagttggaaaacactctgcaggatattatccaggagaacttccccaatctagcaaggcaggccaacgttcagattcaggaaatatag

SEQ ID NO: 2157 - DNA, 3570 bp, Homo sapiens
  SIMILAR (790)..(2313): 951254mologous to Homo sapiens putative p150,accession number U93572,Smith-Waterman Score=2493.
atgcacattgttgtagaaacagctctgtcagcttcatggcagaacaaggccaagcccccagctagggttctgcttcaggtggtccccaatgtgtggttccttgtggctgttgtgtgggaactgtatccatctttggatctcatggatcgttccatagaatgcagttcctcaccagcaacggaacaaagctggacagagaatgactatgacaagctgagagaagaaggcttcagacgatcaaattactctgagctacaggaggacattcaaaccaaaggcaaagatgttgaaaactttgaaaaaaatttagaagaatgtataactagaataactaatacacagaagtgcttaaaggagctgatggagctgaaaaccaaggctcgagaactacgtgaagaatgcagaagcctcaggagccgatgcgatcaactggaagaaagggtatcagtgatggaagatgaaatgaatgaaatgaagcaagaagggaagtttagagaaaaaagaataaaaagaaatgagcaaagcctccaagaaatatgggactatgtgaaaagaccaaatctacgtctgattggtgtacctgaaagtgatggggagaatggaaccaagttgaaaaacactctgcaggatattatccaggagaacttccccaatctagcaaggcaggccaaagttcagattcaggaaatacagagaatgccacaaagatattccttgacaagagcaactccaagacacataattgtcagattcaccaaagttgaaatgaaggaaaaaatgttaagggcagccagagagaaaggagcacccagattcataaagcaagtcctgagtgacctacaaagagacttagactcccacacattaataatgggagactttaacaccccactgtcaacattagacagatcaacgagacagaaagtcaacaaggatacccaggaattgaactcagctctgcaccaagtggacctaatagacatctacagaactctccaccccaaatcaacagaatacacatttttttcagcaccacaccacacgtattccaaaattgaccacatacttggaagtaaagctctcctcagcaaatgtaaaagaacagaaattataacaaactatctctcagaccacagtgcaatcaaactagaactcaggattaagaatctcactcaaaaccgctcaactacatggaaactgaacaacctgctcctgaatgactactgggtacataacgaaatgaagctagaaataaagatgttctttgaaaccaacgagaacaaagacacaacataccagaatctctgggacgcattcaaagcagtgtatagagggaaatttatagcactaaatgcccacaagagaaagcaggaaagatccaaaattgacaccctaacatcacaattaaaagaactagaaaagcaagagcaaacacattcaaaagctagcagaaggcaagaaataactaaaatcagagcagaactgaaggaaatagagacacaaaaaacccttcaaaaaattaatgaatccaggagctggttttttgaaaggatcaacaaaatagatagactgctagcaagactaataaagagaaaaagagagaagaatcaaatagatgcaataaaaaatgataaaggggacatcaccaccaatcccacagaaatacaaactaccatcagagaatactacaaacacctctacgcaaataaactagaaaatctagaagaaatggataaattcctcgacacatacactctcccaagactaaaccaggaagaagttgaatctctgaatagaccaataacaggatctgaaattgtggcaataatcaatagcttaccaaccaaaaagagtccaggaccagatggattcacagccgaattctaccagaggtacaagaaggaactggtaccattccttctgaaactattccaatcaatagaaaaagagggaatcctccctaactcattttatgaggccagcatcattctgataccaaagccaggcagagacacaaccaaaaaagagaattttagaccaatatccttgatgaacattgatgcaaaaaccctcaataaaatactggcagaccgaatccagcagcacatcaaaaagcttatccaccatgatcaagtgggcttcatccctgggatgcaaggctggttcaatatacacatatcaataaatgtaatccagcatataaacagagccaaagacaaaaaccacatgattatctgcatagatgcagaaagggcctttgacaaaattcaacaacccttcatgctaaaaactcttaataaattagtgttggaagttctggccagggcaattaggcaggagaaggaaataaagggtattcaagtaggaaaagaggaagtcaaattgtccctgtttgcagatgacatgattgtatatctagaaaaccccattgtctcagcccaaaatctccttaagctgataagcaacttcagcaaagtctcaggatacaaaatcaatgtacaaaagtcacaagcattcttatacaccaataacagacaaacagagagccaaatcatgagtgaactcccattcacaattgcttcaaagagaataaaatacctaggaatccaacttacaagggatgtgaaggacctcttcaaggagaactacaaaccactgctcaacgaaataaaagaggatacaaacaaatggaagaacattctatgctcatgggtaggaagaattaatatcgtgaaaatggccatactgcccaaggtaatttacagattcaatgccatccccatcaagctaccaatgcctttcttcacagaattggaagaaactactttaaagttcatatggaaccaaaaaagagcccgcattgccaaggcaatcctaagccaaaagaaaaaagctggaggcatcacactacctgacttcaaactatactacaaggctacagtaaccaaaacagcatggtactggtaccaaaacacagatatagaacaatggaacagaacagagccctcagaaataatgctgcatatctacaactatctgatctttgaccaacctgagaaaaacaagcaatggggaaaggattccctatttaataaatggtgctgggaaaactggctagccatatgtagaaagctgaaactggatcccttccttacaccttatacaaaaatcaattcaagatggattaaagacttaaacgttagacctaaaaccataaaaaccctagaagaaaacctaggcattaccattcaggacataagcatgggtaaggacttcatgtctaaaacaccaaaagcaaaggcaacaaaagccaaaattgacaaatgggatctaattaaactaaagagtttctgcacagcaaaagaaactaccatcagagtgaacaggcaacctacaaaatgggagaaaattttcgcaacctactcatctgacaaagggctaatatccagaatctacaatgaactcaaacaaatttacaagataaaaacaaacaaccccatcgaaaagtgggtgaaggacatgaacagacacttctcaaaagaagacatttatgcagccaaaaacacatga

SEQ ID NO: 2158 - DNA, 3354 bp, Homo sapiens
  SIMILAR (337)..(1851): 941254mologous to Homo sapiens putative p150,accession number U93563,Smith-Waterman Score=2435.
atggggaaaaaacagaacagaaaaactggaaactctaaaatgcagagcgcctctcctcctccaaaggaacgcagttcctcaccagcaacggatcaaagctggatggagaatgactttgacgagctgagagaagaaggtttcagacgatcaaattactctgagctacgggaggacattcaaaccaaaggcaaagaagttgaaaactttgaaaaaaatttagaagaatgtataactagaataaccaatacagagaagtgcttaaaggagctgatggagctgaaaaccaaggctcgagaactacgtgaagaatgcagaagcctcaggagccgatgcgatcaactggaagaaagggtatcagcaatggaagatgaaatgaatgaaatgaagcaagaagggaagatcaaaagagacaaagaaggccattacataatggtaaagggatcaattcaacaagaagagctaactatcctaaatatatatgcacccaatacaggagcacccagattcataaagcaagttctgagtgacctacaaagagacttagactcccacacattaataatgggagactttaacacctcactgttaacattagacagatcaatgagacagaaagtcaacaaggatacccaggaattgaactcatctctgcaccaagcggacctaatagacatctacagaactctccaccccaaatcaatagaatatacatttttttcagcaccacaccacacctattccaaaattgaccacatagttggaagtaaagctctcctcagcaaatgtaaaagaacagaaattataacaaactatctctcagaccacagtgcaatcaaactagaactcaggattaagaatctcactcaaagccgctcaactacatggaaactgaacaacctgctcctgaatgactactgggtacataacgaaatgaaggcagaaataaagatgttctttgaaaccaacgagaacaaagacacaacataccagaatctctgggacgcattcaaagcagtgtgtagagggaaatttatagcactaaatgcccacaagagaaagcaggaaagatccaaaattgacaccctaacatcacaattaaaagaactagaaaagcaagagcaaacacattcaaaagctagcagaaggcaagaaataactaaaatcagagcagaactgaaggaaatagagacacaaaaaacccttcaaaaaatcaatgaatccaggagctggttttttgaaaggatcaacaaaattgatagaccgctagcaagactaataaagaaaaaaagagaggagaatcaaatagacacaataaaaaatgataaaggggatatcaccaccgatcccacagaaatacaaactaccatcagagaatactataaacacctctacgcaaataaaccagaaaatctagaagaaatggataaattcctcgacacatacactctcccaagactaaagcaggaagaagttgaatctctgaatagaccaataacaggagctgaaattgtggcaataatcaatagtttaccaaccaaaaagagtccaggaccagatggattcacagccgaattctaccagaggtacaaggaggaactggtaccattccttctgaaactattccaatcaatagaaaaagagggaatcctccctaactcattttatgaggccagcatcattctgataccaaagccgggcagagacacaaccaaaaaagagaattttagaccaatatccttgatgaacattgatgcaaaaatcctcaataaaatactggcaaaccgaatccagcagcacatcaaaaagcttatccaccatgatcaagtgggcttcatccctgggatgcaaggctgccaatatcatactgaatgggcaaaaactggaagcattcctttgaaaactggcacaagacagggatgccctctctcaccactcctattcaacacagtgttggaagttctggccagggcaatcaggcaggagaaggaaataaagggtattcaattaggaaaagaggaagtcaaattgtccctttttgcagacgacatgattgtttatctagaaaaccccatcgtctcagcccaaaatctccttaagctgataagcaacttcagcaaagtctcaggatacaaaatcaatgtacaaaaatcacaagcattcttatacaccaacaacagacaaacagagagccaaatcatgagtgaactcccattcacaattgcttcaaagagaataaaatacctaggaatccaatttacaagggatgtgaaggacctcttcaaggagaactacaaaccactgctcaaggaaataaaagaggatacaaacaaatggaagaacattccatgctcatgggtaggaagaatcaatatcgtgaaaatggccatactgcccaaggtaatttacagattcaatgccatccccatcaagctaccaatgactttcttcacagaattggaaaaaactactttaaatttcatatggaaccaaaaaagagcccgcatcgccaagtcaatcctaagccaaaagaacaaagctggaggcatcacactacctgacttcaaactatactacaaggctacagtaactaaaacagcatggtactggtaccaaaacagagatatagatcaatggaacagaacagagccctcagaaataacgccgcatacctacaattatctgatctttgacaaacctgagaaaaacaagcaacggggaaaggattccctatttaataaatggtgctgggaaaactggctagccatatgtagaaagctgaaactggatcccttccttacaccttatacaaaaatcaattcaagatggattaaagatttaaacgttagacctaaaaccataaaaatcctagaagaaaacctaggcattaccattcaggacataggcgtgggcaaggacttcatgtccaaaacaccaaaagcaatggcaacaaaagccaaaattgacaaatgggatctaattaaactaaagagcttctgcacagcaaaagaaactaccatcagagtgaacaggcaacctacaacatgggagaaaattttcgcaacctactcatctgacaaagggctaatatccagaatctacaatgaactcaaacaaatttacaagaaaaaaacaaacaaccccatcaaaaagtgggcgaaggacatgaacagacacttctcaaaagaagacatttatgcagccaaaaaatacatgaaaaaatgctcatcatcactggccatcagagaaatgcaaatcaaaaccacaatgagataccatctcacaccagccccggtgtgtgatgttcgccttcctgtatccaagtgttctcattgttcagttcccacctatgagtga

SEQ ID NO: 2159 - DNA, 2232 bp, Homo sapiens
  SIMILAR (856)..(2226): 921254mologous to Homo sapiens putative p150,accession number U93572,Smith-Waterman Score=2170.
atggaacaaagctggagggagaatgactttgatgagttgagagaagaagccttcagacgatcaaactactctgagctacaggaggaaattcaaaccaaaggccaagaagttaaaaactttgaaaaaactttagatgaatatataactagaataaccaatacagagaagtgcttaaaggagctgatggagctaaaagccaaggctcgagaactacgtgaagaatgcagaagcctcaggagccgatgcgatcaactggaagaaagggtatcagtgatggaagatgaaatgaatgaaatgaagcgagaagggaagtttagagaaaaaagaataaaaagaaacgaacaaagcctccaagaaaaatgggactatgtgaaaacaccaaatctacgtctgattggtgtacctgaaagtgatggggagaatggaaccaagttggaaaacactctgcaggatattatccaggagaacctccccaatctagtaaggcaggccaacattcagattcaggaaatacagagaacaccacaaagatactcctcgagaagagcaactccaagacacataattgtcagattcaccaaagttgaaatgaaggaaaaaatgttaagggcagccagagagaaagaaatacaaactaccatcagagaatactacaaacacctctacgcaaataaactagaaaatctagaagaaatggataaattccttgacacatacactctcccaagactaaaccaggaagaagttgaatctctgaatagaccaataacaggatctgaaattgtggcaataatcaatagcttaccaaccaaaaagagtccagaccagttggattcacagccgaattctgccagagaaaaagagggaatcctctctatctcattttgtgaggccagcatcatcctgataccaaagctgggcagagacacaaccaaaaaagagaattttagaccaatatccttgatgaccattgacacaaaaatcttcaataaaatactggcaaaccaaatccagcagcacatcaaaaagcttatccaccatgatcaagtgggcttcatccccgggatgcaaggctggttcaatatatgcaaatcaataaatgtaatccagcatataaacagaaccaaagacaaaaaccacatgattatctcaatagatgcagaaaaggcctttgacaaaattcaacaactcttcatgctaaaaactctcaataaattaggtattgatgggacgtatttcaaaataataagagctatctatgacaaacccacagccaatatcatactgaatgggcaaaaactggaagcattccctttgaaaactggcacaagacagggatgccctctctcaccactccttttcaacatagttttggaagttctggccggggcaattaggcaggagaaggaaataaagggtgttcaattaggaaaagaggaagtcaaattgtccctgtttgcagacgacatgattgtatatctagaaaaccacattgtctcagcccaaaatctccttaagctgataagcaacttcagcaaagtctcaggatacaaaatcaatgtacaaaaatcactagcattcttatacaccaataacagacaaacagagagccaaatcatgagtgaactcccattcacaattgcttcaaagagaataaaatacttaggaatccaacttacaagggacgtgaaggacctcttcaaggagaactacaaaccactgctcaatgaaataaaagaggatacaaacaaatggaagaacattccatgctcatgggtaggaagaatcaatatcgtgaaaatggccatactgtccaaggtaatttacagattcaatgccatccccatcaacctaccaatcactgtcttcacagaattggaaaaaactactttaaagttcacatggaaccaaaaaagagcccacattgccaagtcaatcctaagccaaaagaacaaagctggaggcatcacgctacctgacttcaaactatactacaaggctacagtaaccaaaacaggatggtactggtaccaaaacagagatatagatcaatggaacagaacagagccctcagaaataacgacacatatctacaactatctaatctttgacaaacctgagaaaaacaagcaacggggaaaggattccctatttaataaatggtgctgggaaaactggctagccatatgtagaaagcagtgtgttttcattgtacctccaacagaagggtag

SEQ ID NO: 2160 - DNA, 1356 bp, Homo sapiens; identical to SEQ ID NO: 2089
  SIMILAR (403)..(1353): 951254mologous to Homo sapiens p40,accession number U93564,Smith-Waterman Score=1552.

SEQ ID NO: 2161 - DNA, 1206 bp, Homo sapiens
  SIMILAR (409)..(1104): 861254mologous to Homo sapiens p40,accession number U93564,Smith-Waterman Score=1014.
  misc_feature (1)...(1206): n = a,t,c or g
atgagtatgcaggatggagaaccagatgctctcctagcgctctcccaagcatcatttcctgatgactccctgtgcccagtgccatgcagtgttcttgatgcacaggtgcgtaaggagctggctttgccttccaggaactttttgtcaaatggggagatgtgctatgagtgtgacctgaaaggcattgtgtgccatttgatctcagactgctgtgctagcaatcagcgagattccgtgggcgtaggaccctctgagccaggtgtgggatatagtctcgtggtgcgccgtttcttaagccggtctgaaaagcgcaatattcgggtgggagtgacccgattttccagggaactccctgaccccttgcgcttcccagncaaaagagataaacctcaaagatgggaaacaccagaccagaaacctggaactctaaacgcagagcgctcttctctcacaaaggaacgcagttcctcacagccaacagaccaaagctggatggagaatgattttgacgagctgaaaaaaaagggcttcagacgatcatattactctgagctacgggagcacattcaaaccaaaggcaaagaagttgaaaactttgaaaaaaatttagaagaatgtataactagaataaccaatacagaaaagtgcttaaaggagctgatggagctgaaaaccaaggctcgagaactacgtgaagaatgcagaagcctcaggagccgatgcgatcaactggaagaaagggtatcagcaatggaagatgaaatgaatgaaatgaagcgagaagggaagtttagagaaaaaagaataaaaagaaatgagcaaagcctccaagaaatatgggactatgtgaaaagaccaaatctacgtctgattggtgtacctgaaagtgatgtggagaatggaaccaagttggaaaacactctgcaggatattatccaggagaacttccccaatctagcaaggcaggccaacgttcagattcaggaaatacagagaactccacaaagatactcctcgagaagagcaactccaagacacataattgtcagattcaccaaagttgaaatgataggaaaaaatgttaagggcagccagagagaaaggtcgggttaccctcaaaggaaagcccatcagactaacagcggatctctcggcagaaaccctacaagccagaagagagtgggggccaatattcaacattcttaa

SEQ ID NO: 2162 - DNA, 1902 bp, Homo sapiens
  SIMILAR (1845)..(1901): 891254mologous to Homo sapiens putative p150,accession number U93565,Smith-Waterman Score=97.
atgaatgctaaagcactgccaacgctctccccactgccccaggccactacagagagtgtgagcttgacccaggaacgcagttcctcaccagcaacggaacaaagctggacggagaatgactttgacgagctgagagaagaaggcttcagacgatcaaattactccgagctacgggaggacattcgaaccaaaggcaaagaagttgaaaactttgaaaaaaatttagaagaatgtataactagaataatcaatacagagaagtgcttaaaggagctgatggagctgaaaaccaaggctcgagaactacgtgaagaatgcagaagcctcaggagccgatgtgatcaactggaagaaagggtatcagcgatggaagatgaaatgaatgaaatgaagcgagaagggaagtttagagaaaaaagaataaaaagaaacgagcaaagcctccaagaaatatgggactatgtgaaaagaccaaatgtacgtctgattggtgtacctgaaagtcatggggagaatggaaccaagttggaaaacactctgcaggatattatccaggagaacttccccaatctagcaaggcaggccaacattcagattcaggaaatacagagaacaccacaaagatactcctcgagaagagcaactccaagacatataattgtcagattcaccaaagttgaaatgaaggaaagaatgttaagggcagccagagagaaagaaatacaaactaccatcagagaatactacaaacacctctatgcaaataaactagaaaatctagaagaaatggataaattcctcgacacatacactctccgaagactaaaccaggaagaagttgaatctctgaatagaccaataacaggagctggaattgaggcaataatcaatagcttaccaaccaaaaagattccaggaccagatggattcacagccgaattctaccagaggtacaaggaggaactgagaataaaatacctaggaatccaatttacaagggatgtgaaggacctcttcaaggagaactacaaaccgctgctcaaggaaataaaagaggatacaaacaaatggaagaatattccatgctcatgggtaggaagaatcaatattgtgaaaatggccatactgcccaaggtaatttacagattcaatgccatccccatcaagctaccaatgactttcttcacagaattggaaaaaactactttaaagttcatatggaaccaaaaaagagcccgcattgccaagtcaatcctaagccaaaagaacaaagctggaggcatcacactacctgacttcaaactatactacaaggctacagtaaccaaaacagcatggtactggtaccaaaacagagatatagatcaatggaacagaacagagccctcagaaatcatgccgcatatctacaactatctgatctttgacaaacctgagaaaaacaagcaacggggaaaggattccctatttaataaatggtgctgggaaaactggctagccatatgtagaaagctgaaactggatcccttccttacaccttatacaaaaatcaattcaagatggattaaagacttaaacgttagacctaaaaccataaaaaccctagaagaaaacctaggcattaccattcaagacatagacatgggcaaggacttcatgtctaaaacaccaaaagcaatggcaacaaaagccaaaattgacaaatgggatctaattaaactaaaagagcttctcacagcaaaagaaactaccatcagagtgaacaggcaacctacaaaatgggagaaaattttcacaacctactcatctgacaaagggctaatatccagaatctacaatgaactcaacaaatttacaagaaaaaaacaaacaaccccatcaaaaagtgggcaaaggacatga

SEQ ID NO: 2163 - DNA, 2232 bp, Homo sapiens
  SIMILAR (1964)..(2035): 881254mologous to Homo sapiens putative p150,accession number U93572,Smith-Waterman Score=105.
atggggaaaaaacagaacagaaaaactggaaactctaaaacgcagagcgcctctcctcctccaaaggaacgcagttcctcaccagcaacagaacaaagctggatggagaatgattttgacgagctgagagaagaaggcttcagacgatcaaattactctgagctacgggaggacattcaaaccaaaggcaaagaagttcaaaactttgaaaaaaatttagaagaatgtataactagaataaccaatacagagaagtgcttaaaggagctgatggagctgaaaaccaaggctcgagaactacgtgaagaatgcagaagcctcaggagccgatgcgatcaactggaagaaagggtatcagcaatggaagatgaaatgaatgaaatgaagcgagaagggaagtttagagaaaaaagaataaaaagaaatgagcaaagcctccaagaaatatgggactatgtgaaaagaccaaatctacgtctgattggtgtacctgaaagtgatgtggagaatggaaccaagttggaaaacactctgcaggatattatccaggagaacttccccaatctagcaaggcaggccaacgttcagattcaggaaatacagagaacgccacaaagatactcctcgagaagagcaactccaagacacataattgtcagattcaccaaagttgaaatgaaggaaaaaatgttaagggcagccagagagaaagaaatacaaactaccatcagagaatactacaaacacctctacgcaaataaactagaaaatctagaagaaatggatacattcctcgacacatacactctcccaagactaaaccaggaagaagttgaatctctgaatagaccaataacaggctctgaaattgtggcaataatcaatagtttaccaaccaaaaagagtccaggaccagatggattcacagccgaattctaccagaggtacaaggaggaactggtaccattccttctgaaactattccaatcaatagaaaaagagggaatcctccctaactcattttatgaggccagcatcattctgataccaaagccgggcagagacacaaccaaaaaagagaattttagaccaatatccttgatgaacattgatgcaaaaatcctcaataaaatactggcaaaccgaatccagcagcacatcaaaaagcttatccaccatgatcaagtgggcttcatccctgggatgcaaggctggttcaatatacgcaaatcaataaatgtaatccagcatataaacagagccaaagacaaaaaccacatgattatctcaatagatgcagaaaaagcctttgacaaaattcaacaacccttcatgctaaaaactctcaataaattaggtattgatgggacgtatttcaaaataataagagctatctatgacaaacccacagccaatatcatactgaatgggcaaaaactggaagcattccctttgaaaactggcacaagacagggatgccctctctcaccgctcctattcaacatagtattggaagttctggccagggcaatcaggcaggagaaggaaataaagggtattcaattaggaaaagaggaagtcaaattgtccctgtttgcagacgacatgattgtttatctagaaaaccccatcgtctcagcccaaaatctccttaagctgataagcaacttcagcaaagtctcaggatacaaaatcaatgtacaaaaatcacaagcattcttatacaccaacaacagacaaacagagagccaaatcatgggtgaactcccattcacaattgcttcaaagagaataaaatacctaggaatccaacttataagggatgtgaaggacctcttcaaggagaactacaaaccactgctcaaggaaataaaagaggacacaaacaaatggaagaacattccatgctcatgggtaggaagaatcaatatcgtgaaaatggccatactgcccaagaattggaaaaactactttaaagttcatatggaacaaaaagagccgcatcgccaagtcaatcctaagccaaaagaacaagctggaggcatcacactactgactcaactatactacaaggctacagtaaccaaaacagcatggtactggtaccaaaacagagatatagatcaatggaacagaacagagccctcagaaataatgccgcatatctacaactatctgatctttgacaaacctgagaaaaacaagcaatggggaaaggattccctattataa

SEQ ID NO: 2164 - DNA, 2991 bp, Homo sapiens
  SIMILAR (1618)..(2718): 951254mologous to Homo sapiens putative p150,accession number U93563,Smith-Waterman Score=1795.
atggagaatgactttgacgagctgagagaagaaggcttcagacgatcaaattactctgagctatgggaggacattcaaaccaaaggcaaagaagttgaaaactttgaaaaaaatttagaagaatgtataactagaataaccaatacagagaagtgcttaaaggagctgatggagctgaaaaccaaggctcgagaactacatgaagaatgcagaagcctcaggagccgatgtgatcaactggaagaaagggtatcagcaatggaagatgaaatgaatgaaatgaagggagaagggaagtttagagaaaaaagaataaaaagaaacgagcaaagcctccaagaaatatgggactatgtgaaaagaccaaatctacatctgattggtgtacctgaaagtgatggggagaatggaaccaagttggaaaacactctgcaggatattatccaggagaacttccccaatctagcaaggcaggccaacgttcagattcaggaaatacagagaatgccacaaagatactcctcgagaagagcaactccaagacacataattgtcagattcaccaaagttgaaatgaaggaaaaaatattaaaggcagccagagagaaagacagatcaacgagacagaaagtcaacaaggatacccaggaattgaactcagctctgcaccaagcagacctaatagacatctacagaactctccaccccaaatcaacagaatatacatttttttcagcaccacaccacacctattccaaaattgaccacatacttggaagtaaagctctcctcagcaaatgtgaaagaacagagattataacaaactatctctcagaccacagtgcaatcaaactagaactcaggattaagaatctcactcaaaaccgctcaactacatggaaactgaacaacctgctcctgaatgactactgggtacataacgaaatgaaggcagaaataaagatgttctttgaaaccaatgagaacaaagacacaacataccagaatctctgggatgcattcaaagcagtgtgtagagggaaatttatagcactaaatgcccacaagagaaagcaggaaagatccaaaattgacaccctaacatcacaattaaaagaactagaaaagcaagagcaaacacattcaaaagctagcagaaggcaagaaataactaaaatcagagcagaactgaaggaaatagagacacaaaaaacctttcaaaaaattaatgaatccaggagctggttttttgaaaggatcaacaaaattgatagaccgctagcaagactaataaagaaaaaaagagagaagaatcaaatagacacaataaaaaatgataaaggggatatcaccaccaatcccacagaaatacaaactaccatcagagaatattacaaacacctctacgcaaataaactagaaaatctagaagaaatggataaattcctcgacacaaacaccctcccaagactaaaccaggaagaagttgaatctctgaatagaccaataacaggatctgaaattgtggcaataatcaatagtttactaaccaaaaagagtccaggaccagatggattcacagccgaattctaccagaggtacaaggaggaactgctgggcagagacacaaccaaaaaagagaattttagaacaatatccttggtgaacattgatgcaaaaatcctcaataaaatactggcaaaacgaatccagcagcacgtcaaaaagcttatccactatgatcaagtgggcttcatccctgggatgcaaagctggttcaatatacgcaaatcaataaatgtaatccagcatataaagagagccaaagacagaaaccacatgattatctcaatagatgcagaaaaagcctttgacaaaattcaacaacccttcatgctaaaaactctcaataaattaggtattgatgggacgtatttcaaaataataagagttatctatgacaaacccacagccaatatcatactaaatgggcaacaactggaagcattccctttgaaaactggcacaagacagggatgccctccctcaccactcctgttcaacatagtgttggaagttctggccagggcaattaggcaagagaaggaaataaagggtattcaattaggaaaagaggaagtcaaattgtccctgtttgcagaccacatgattgtatatctagaaaaccccattgtctcagcccaaaatctccttaagctgataagcaacttcagcaaagtctcaggatacaaaatcaatgtacaaaaatcacaagcattcttatacaccaacaacagacaaacagagagccaaatcatgagtgaactcccattcacaattgcttcaaagagaataaaatacctaggaatccaacttacaagggatgtgaaggacctcttcaaggagaactacaaaccactgctcaaggaaataaaagaggatacaaacaaatggaagaacattccatgctcatgggtaggaagaatcaatatcgtgaaaatggccatactgcccaaggtaatttatagattcaatgccatccccatcaagttaccaatgcctttcttcacagaattggaaaaaactactttaaggttcatatggaaccaaaaaagagcctgcatcgccaaggcaatcctaagccaaaagaacaaagctggaggcatcacactacctgacttcaaactatactacaaggctacagtaaccaaaacagcatgtgagagttattctgttaaaaaaaatgccacaaataaaacagttgaaattggttcctttagtcttcttgaacataaaaaggagatggccctaggtcacaatcggacatcaaatcagttgggaggacttctgagaagcagatgccaagataggattaaatgtgcaagggtattattagagaaccaactgtgtggaggaaaacgaagagggaacagagaatttctgaaagagccttgggacctaagtgaaggagagggagaaaaagttgtatag

SEQ ID NO: 2165 - DNA, 2136 bp, Homo sapiens
  SIMILAR (1483)..(2130): 941254mologous to Homo sapiens p40,accession number U93566,Smith-Waterman Score=1035.
atggatgcatgtggagaccactattctaagcaaatcaaagcaggaacagaacaccaaataccacatgttctcacctctaagtgggccctggacacaaagaaagaaacaacaaacagtggagaccccaaaagtgggaagggacagagggagatcagtgttcaaaaccttcctgcattagtccattttcacactgctggggggtcccgaccccctgcccggagattccccccccttaaccacccaaagggcggggataaagggggtgacccaccgccccgggccccaaagggatttttcctaataaagggcttccaaccgggggtggaagagggccctaaaaaattgacccaattagagtcacagtctcccttgaagcctggtccacagttgcgatggcagcctgaatttcaggcccatgaaagacctgctcagcagatgaaatgctcccacaaacaaaaggcaaagacccgtctgaaaccaaagagcaactttcaccgcctgacacataaacttcatgacctccacattgagacaagatcttgccatgtgacatacaacactgctcgttcaactccaccaacatggggtcaaataaaggtttcatctcatcaaacagaaaatttcttaaaagaaaaagtcactccaaaaacgaccagtaatatgattctggctgcctttatggtagtcagtgcagcgttaagtataccaccggttagggcaatacataattatacttactgggaatatgttccttttccccctctaattcggtctgtctcctggatggactccccagtagaagtttacactaataatagtgcattcatgtcggtctctaatgatgattggttaccagctcaaccagaagaagacgtccagaaacttgaaatttgcattttacagacccaagcatccatattgtctaggaaactgatggatatgtcagaaataattgatgatggtaatgatggtgatgctcatggtagtgactatgatgttaatggtgatggtgatgatggtggtggtgatatcaattacggttatggtaatgataataatggcagtgatgatggtaataacgataatgataatgttgatgatcatgatggtggtgctggtgataatgatagtaatgatggggatggtgatgatggtggtgatggtgatggtaatggtaatgataattatgatgatgataataacaatggcaatgggatgataatgatgatgatgatggtgacaatgttgggcacagacaaacaaaaagacagcagtaacctctgcggacttaaatgtccctgtctgacagctttgaagagggcagtggttctcccagcacgcagctggagatttgagaaccagcagactgccgccttaagtgggtccctgacccctgaccccaagcagcctaactgggaggcaccccccagcaggggcagactgacacctcacacggctgggtactccaacagacctgcagctgagggcaaggaagttgaaaactttgaaaaaaatttagaagaatgtataactagaataaccaatacagagaagtgcttaaaggagctgatggagctgaaaaccaaggctcgagaactatgtgaggaatgcagaagcctcaggagccgatgtgatcaactggaagaaagggtatcagcgatggaagatgaagcgaatgaaatgaagcgagaagggaagtttggagaaaaaagaataaaaagaaatgaacaaagcctccaagaaatatgggactatgtgaaaagaccaaatctatgtctgattggtgtacctgaaagtgacggggagaatggaaccaagttgaaaaacactctgcaggatattatccaggagaacttccccaatctagcaaggcaggccaacattcagattcaggaaatacagagaacaccacaaagatactcctcgagaagagcaacttcaagacacataattgtcagattcaccaaagttgaaatgaaggaaaaaatgttaagggcagccagagagaaaggtcgggttaccctcaaagggaagcccatcagactaacagtggatctcttggcagaaactctacaagccagaagagagtggggtccaatattcaacattcttaaagaaaagaattttcaaatctga

SEQ ID NO: 2166 - DNA, 1524 bp, Homo sapiens
  SIMILAR (1)..(852): 881254mologous to Homo sapiens p40,accession number U93570,Smith-Waterman Score=1274.
atggggaaaaaacagagcagaaaaactggaaactctaaaacgcagagtgcctctcctcctccaaaggaactcagttcctcaccagcaatggaacaaagctggacggagaatgactttgatgagctgagagaagaaggcttcagacgatcaaattactctgagctacgggaggacattcaaacgaaaggcaaagaagttgaaaactttgaaaaaaatttagaagaatgtataactagaataaccaacacagagaagtgcttaaaggagctgatggagctgaaaaccaaggctcaagaactacgtgaagaatgcagaagcctcaggagccgatgcgatcaactggaagaaagggtatcagcaatggaagatgaaatcaatgaaatgaagcgagaagggaagtttagagaaaaaagcataagaagaaatgagcaaagcctccaagaaatatgggactatgtgaaaagaccaaatctacgtctgattggtgtacctgaaagtgacagggagaatggaatcaagttggaaaacactctgcaggatattatccaggagaacttccccaatctagcaaggcaggccaacattcagattcaggaaatacagagaacgccacaaagatactcctcaagaagagcaactccaagacacataattgtcagattcaccaaagttgaaatgaaggaaaaaatgttaagggcagccagagagaaaggtcgggttaccctcaaagggaagcccatcagactaagagcggatctcttggcagaaactctacaagccagaagacagatcaacaaaattgctagaccgctagcaagactaataaagaagaaaagggagaagaatcaaatagatgcgataaaaaatgataaagaggatatcaccaccgatcccacagaaatacaaactaccatcagagaatactacaaacacctctacgccaataaactagaaaatctagaagaaatggataaattcctggacacatacactctcccaagactaaaccaggaagaagttgaatctctgaatagaccaataacaggagctgaaattgtggcaataatcaatagcttaccaaccaaaaagagtccaggaccagatggattcacagccgaattctaccagaggtacaaggaggaactggtaccattccttctgaaactatgccaatcaatagaaaaagagggaatcctccctaactcattttatgaggccagcatcatcctgataccaaagcctggcagagacacaaccaaaaaagagaattttagaccaatagccttgatgaacattgatgcaaaaatcctcaataaaatactggcaaaccaaatccagcagcacatcaaaaagcttatccaccatgatcaagtgggcttcattcctgggatgcaaggctggttcaatatatgcaaatcaataaatgtaatccagcatataaacagaaccaaagacaaaagccacatgataatctcaatagatgcagaaaaggcctctgacaaaattcaacaaccttcatgctaa

SEQ ID NO: 2167 - DNA, 2106 bp, Homo sapiens
  SIMILAR (805)..(2103): 851254mologous to Homo sapiens putative p150,accession number U93567,Smith-Waterman Score=1828.
atggggaaaaaacagagcagaaaaactggaaactctaaaaagcagagcgcctctcctcctccaaaggaacacagttcctcaccagcaacagaacaaagctggacggagaatgactttgacgagttgagagaagaaggcttcagacgatcaaactactccgagctacaggaggaaattcaaaccaaaggcaaacaagttgaaaactttgaaaaaaatttagacgaatgtataactagaataaccaatacagagaagtgcctaaaggagctgatggagatgaaaggcaaggctcgagaactatgtgaagaatgtagaagcctcaggagccgatgcgatcaactggaagaaagggtatcagtgataaaagatgaaattaatgaaatgaagcgagaagggaagtttagagaaaaaagaataaaaagaaacgaacaaagcctccaagaaatatgggactatgtgaaaagaccaaatctacgtctgactggtgtacctgaaagtgatggggagaatggaaccaagttggaaaacactctgcaggatattatccaggagaacttccccaatctagcaaggcaggccaacattcagaatcaggaaatacagagaatgccacaaagatactcctcgagaagagcaactccaagacacataattgtcagattcaccaaagttgaaatgaaggaaaaaatgttaagggcagccagagagaaaggtcgggttacccacaaagtgaagcccatcagactaacagcggatctctcggcagaaactctacaagccagaagagagtgggggccaatattcaacatgcttaaagaaaagaattttgaatccagaatttcatatccagccaaactaagcttcataagtgaaggagaaataaaatactttacagacaagcaaatgctgagagattttgtcaccaccaggcctgccctaaaagagctcctgaaggaagcactaaacatggaaaggaacaactggatcaacaaaattgatagactgctagcaagactaataaagaagaaaagagagaagaatcaaatagatgcaataaaaaatgataaaggggatatcaccactgatcccacagaaatacgaactaccatcagagaatactacaaacacctctacgcaaataaactagaaaatctagaagaaatggataaattccttgacacatacaccctcccaagactaaaccaggaagaggttgaatctctgaatagaccaataacaggctctgaaattgtggcaataatcaatagcttaccaatgaaaaagagtccaggaccagatggattcacagccgaattctaccagaggtacaaggaggaactggtaccattccttctgaaactattccaatcaatagaaaaagagggaatcctccctaactcattttatgaggccagcatcatcctgataccaaagccgggcagagacacaaccaaaaaagagaattttagaccaatatccttgatgaacattgatgcaaaaatcctcaataaaatactggcaaacagaatccagcagcacatcaaaaagcttatccaccatgatcaagtgggcttcatccctgggatgcaaggctggttcaatatacgcaaatcaataaatgtaatccagcatataaacagaaccaacgacaaaaaccacatgattatctcaaaagatgcagaaaaggcctttgacaaaattcaacaacgcttcatgctaaaaactctcaataaattaggtattgatgggacatatctcaaaataataagagctatctgtgacaaacccacagccaatatcatactgaatgggcaaaaactggaagcattccctttgaaaactggcacaagacagggatgccctctctcaccactcctattcaacatagtgttggaagttctggccagggcaattaggcagaagaaggaaataaagggtattcaattaggaaaagaagaagtcaaattgtccctgtttgcagatgacatgattgtatatctagaaaaccccattgtctcagcccaaaatctccttaagctgataagcaacttcagcaaagtctcaggatacaaaatcaatgtacaaaaatcacaagcattcttataa

SEQ ID NO: 2168 - DNA, 1224 bp, Homo sapiens
  SIMILAR (1)..(774): 981254mologous to Homo sapiens p40,accession number U93564,Smith-Waterman Score=1293.
atggggaaaaaacagaacagaaaaactggaaactctaaaacgcagagcgcctctcctcctccaaaggaacgcagttcctcaccagcaacagaacaaagctggatggagaatgattttgacgagctgagagaagaaggcttcagacgatcaaattactctgagctacgggaggacattcaaaccaaaggcaaagaagttgaaaactttgaaaaaaatttagaagaatgtataactagaataaccaatacagagaagtgcttaaaggagctgatggagctgaaaaccaaggctcgagaactacgtgaagaatgcagaagcctcaggagcctatgcgatcaactggaagaaagggtatcagcaatggaagatgaaatgaatgaaatgaagcgagaagggaagtttagagaaaaaagaataaaaagaaatgagcaaagcctccaagaaatatgggactatgtgaaaaggccaaatctacgtctgattggtgtacctgaaagtgatgtggagaatggaaccaagttggaaaacactctgcaggatattatccaggagaacttccccaatctagcaaggcaggccaacgttcagattcaggaaatacagagaacgccacaaagatactcctcgagaagagcaactccaagacacataattgtcagattcaccaaagttgaaatgaaggaaaaaatgttaagggcagccagagagaaaggtcgggttaccctcaaagggaagcccatcagactaacagcggatctctcggcgaaggacatgaacagacacttctcaaaagaagacatttatgcagccaaaaaacacatgaagaaatgctcatcatcactggccatcagagaaatgcaaatcaaaaccactatgagatatcatctcacaccagttagaatggcaatcattaaaaagtcaggaaacaacagttatataatggctgcagaagctccaagcatcatggcctctgacaaccatctccaaagacaagagaatatgtctctttgggacacaagttctccacaggacacttctccaggagtctcccagcagacttgctctcgtcactacctagaattctatcacatgccttcattaagcaatcacttgcaagaggaatggaattactatggttggcttactaacaaagattcacccctggaatcatatggccaaccagcatctaaaggaaggagtgaagatagacaagactgctgctga

SEQ ID NO: 2169 - DNA, 1935 bp, Homo sapiens
  SIMILAR (1)..(1011): 941254mologous to Homo sapiens p40,accession number U93564,Smith-Waterman Score=1622.
atgggaaaaaaagagaacagaaagactggaaactctaaaaagcagagcgcctctcctcctccaaaggaacgcagttcctcaccagcaatggaacaaagctggatggagaatgactttgacgagctgagagaagaaggcttcagacgatcaaattactctgagctacaggaggacattcaaaccaaaggcaaagaagttgaaaactttgaaaaaaatttagaagaatgtataactagaataaccaatacagagaagtgcttaaaggagctgatggagctgaaaaccaaggctcaagaactacgtgaagaatgcagaagcctgaggagccgatgcaatcaactggaagaaagggtatcagcaatggaagatgaaatgaatgaaatgaagcgagaagggaagtttagagaaaaaagaataaaaagaaatgagcaaagcctccaagaaatacgggactctgtgaaaagacctaatctacgtcggactggtgtacctgaaagtgatggggacaatggaaccaagttggaaaacactctccaggatattatccgggagaacttccccaatctagcaaggcaggccaacgttcagattcaggaaatacagagaacgccacaaagatactcctcgagaagagcaactccaagacacataattgtcagattcaccaaagttgaaatgaaggaaaaaatgttaagggcagccagagagaaaggtcaggttaccctcaaagggaagcccatcagactaacagcggatctctcggcagaaaccctacaagccagaagagagtgggggccaatattcaacattcttaaagaaaagaattttcaacccagaatttcatatccagccaaactaagcttcataagtgaaggagaaataaaatactttacaaacaagcaaatgctgagagattctgtcaccaccaggcctgccctaaaagagctcctgaaggaaacgctaaacatggaaaggaacaaccggtaccagccactgcaaaatcatgccaaaacagacacacatagcctcaaaataaaaggatggaggaagctctaccaagcaaatggaaaacaaaaaaaggcaggggttgcaatcctagtctctgataaaacagactttaaaccaacaaagatcaaaagagacaaagaaggccattacataatggtaaagggatcaattcaacaagaagagctaactatcctaaatgtatatgcacccaatacaggagcacccagattcataaagcaagtcctgagtgacctacaaagagacttagactcccacacattaataatgggagactttaacaccccactgtcaacattagacagatcaatgagacagaaagtcaacaaggacacccaggaactgaactcagctctgcaccaagcagacctaatagacatctacagaactcttcacctcaaatcaacagaatatacatttttttcagcacgacaccacacctattccaaaattgaccacatacttggaagtaaagctctcctcagcaaatgtaaaagaacagagattataacaaactatctctcagaccacagtgcaatcaaactagaactcacgattaagaatctcactcaaaacccctcaactacatggaaactgaacaacctgctcctgaatgactactgggtacataacgaaatgaagtcagaaataaagatgttctttgaaaccaacgagaacaaagacacaacataccagaatctctgggacgcattcaaagcagtgtgtagaggcaaatttatagcactaaatgcccacaagggaaagcaggaaagatccaaaattgacaccctaacatcacaattaacagaactagaaaagcaagagcaaacacattcaaaagctagcagaaggcaagaaataactaaaatcagagcagaaccgaaggaaatagagacaccaaaaaattaa

SEQ ID NO: 2170 - DNA, 1428 bp, Homo sapiens
  SIMILAR (1)..(822): 881254mologous to Homo sapiens p40,accession number U93570,Smith-Waterman Score=1237.
atggggaaaaaacagagcagaaaaactggaaactgtaaaaagcagagtgcctctcctcctccaaaggaatgcagctcctcaccagcaatggaacaaagctggatggggaatgactttgacgagctgagagaagaaggcttcagacaatcaaactactccgagctacaggaggaaattcaaacaaatggcaaagaagttaaaaactttgaaaaaaaattagatgattggataactagaataaccaacacagagaagtccttaaaggagctaatggagctgaaagccaaggctcgagaattacttgaagaatgcagaagccccaggagccaatgtgatcaactggaagaaagggtatcagtaatggaagacgaaatgaatgaaatgaagcgagaagggaagtttagagaaaaaagaataaaaagaaatgaacaaatcctccaagaaatatgggactatgtgaaaaggccaaatctacatctgattggtgtacctgaaagtgacggggagaatggaaccaagttggaaaacactctgcaggatattatgcaggagaacttccccaatctagcaaggcaggccaacattcagattcaggaaatacagagaacgccacaaagatactccttgagaagagcaactccaagacacataattgtcagattcaccaaagttgaaatgaaggaaaaaatgttaagggcagccagagagaaaggtcaggttacccacaaagggaagcccatcagactaacagcagatctcttcgcagaaactctacaagccagaagagagtgggggccaatattcaacattcttaaagaaaagatggggaaaaaacagagcagaaaaactggaaactgtaaaaagcagagcgcctctcctcctccaaaggaatgcagctcctcaccagcaatggaacaaagctggatgtggaatgactttgacgagctgagagaagaaggcttcagacgatcaaactactctgagctacaggaggaaattcaaacaaatggcaaagaagttaaaaactttgaaaaaaaattagatgattggataactagaataaccaacgcagagaagtccttaaaggagctaatggagctgaaagccaaggctcgagaattacgtgaagaatgcagaagccccaggagccaatgtgatcaactggaagaaagggtatcagtaatggaagacgaaatgaatgaaatgaagcgcgaagggaagtttagagaaaaaagaataaaacccagaatttcatatccagccgaactaagcttcataagtgaaggagaaataaaatactttacagacaaccaaatgctgagagattttgtcaccaccaggtctgccctaaaagagctcctgaaggaagcactaaacatggaaaggaacaaccggtaccagccactgcaaaaacatgccaaaatgtaa

SEQ ID NO: 2171 - DNA, 858 bp, Homo sapiens
  SIMILAR (91)..(846): 731254mologous to Homo sapiens p40,accession number U93567,Smith-Waterman Score=889.
atggtaggatggtctgtggatttaaactttcttccatcggttgatcctgaaacagttcttcagacagggcatgaattgttgtccgaattacagcagcgtcgatttaatggctcagacggaggggtttcatggtctcctatggatgatgaacttcttgcacagccacaggttatgaaattattagattcactccgagagcaatatacccgctaccaggaagtttgtaggcaacgtagcaagcgcacacagttagaagagattcaacagaaggaggaaattcaaaccaaaggcaaagaagttaaaaactttgaaaaaaatttagacgaaagtataactagaataaccaatacagagaagtgcttaaaggagctgatggagctgaaagccaaagttcaagaactacaggaagaatgcagaagcctcaggagccgatgcaatcaactggaagaaatggtatcagtgatgaaagatgaaatgaatgaaatgaagcaagaagggaagtttagagaaaaaagaataaaaagaaatgaacaaagcctccaagaaatatgggactatgtgaaaagaccaaatctacatctgattggtgtacctgaaagtgatggggagaatggaaccaagctggaaaacactctgcaggatattatccaggagaacttcccccacctagcaaggcaggccaagattcacattcaggaaatacagagaacgccacaaagatactcctcaagaagagcaaccccaagacaaataattgtcagattcaccaaagttgaaatgaaagaaaaaatgttaagggcagccagagagaaaggtcgggttaccctcaaagggaagcccatccagactaacagctga

SEQ ID NO: 2172 - DNA, 2305 bp, Homo sapiens
  SIMILAR (790)..(2304): 951254mologous to Homo sapiens putative p150,accession number U93572,Smith-Waterman Score=2492.
atgcacattgttgtagaaacagctctgtcagcttcatggcagaacaaggccaagcccccagctagggttctgcttcaggtggtccccaatgtgtggttccttgtggctgttgtgtgggaactgtatccatctttggatctcatggatcgttccatagaatgcagttcctcaccagcaacggaacaaagctggacagagaatgactatgacaagctgagagaagaaggcttcagacgatcaaattactctgagctacaggaggacattcaaaccaaaggcaaagatgttgaaaactttgaaaaaaatttagaagaatgtataactagaataactaatacacagaagtgcttaaaggagctgatggagctgaaaaccaaggctcgagaactacgtgaagaatgcagaagcctcaggagccgatgcgatcaactggaagaaagggtatcagtgatggaagatgaaatgaatgaaatgaagcaagaagggaagtttagagaaaaaagaataaaaagaaatgagcaaagcctccaagaaatatgggactatgtgaaaagaccaaatctacgtctgattggtgtacctgaaagtgatggggagaatggaaccaagttgaaaaacactctgcaggatattatccaggagaacttccccaatctagcaaggcaggccaaagttcagattcaggaaatacagagaatgccacaaagatattccttgacaagagcaactccaagacacataattgtcagattcaccaaagttgaaatgaaggaaaaaatgttaagggcagccagagagaaaggagcacccagattcataaagcaagtcctgagtgacctacaaagagacttagactcccacacattaataatgggagactttaacaccccactgtcaacattagacagatcaacgagacagaaagtcaacaaggatacccaggaattgaactcagctctgcaccaagtggacctaatagacatctacagaactctccaccccaaatcaacagaatacacatttttttcagcaccacaccacacgtattccaaaattgaccacatacttggaagtaaagctctcctcagcaaatgtaaaagaacagaaattataacaaactatctctcagaccacagtgcaatcaaactagaactcaggattaagaatctcactcaaaaccgctcaactacatggaaactgaacaacctgctcctgaatgactactgggtacataacgaaatgaagctagaaataaagatgttctttgaaaccaacgagaacaaagacacaacataccagaatctctgggacgcattcaaagcagtgtatagagggaaatttatagcactaaatgcccacaagagaaagcaggaaagatccaaaattgacaccctaacatcacaattaaaagaactagaaaagcaagagcaaacacattcaaaagctagcagaaggcaagaaataactaaaatcagagcagaactgaaggaaatagagacacaaaaaacccttcaaaaaattaatgaatccaggagctggttttttgaaaggatcaacaaaatagatagactgctagcaagactaataaagagaaaaagagagaagaatcaaatagatgcaataaaaaatgataaaggggacatcaccaccaatcccacagaaatacaaactaccatcagagaatactacaaacacctctacgcaaataaactagaaaatctagaagaaatggataaattcctcgacacatacactctcccaagactaaaccaggaagaagttgaatctctgaatagaccaataacaggatctgaaattgtggcaataatcaatagcttaccaaccaaaaagagtccaggaccagatggattcacagccgaattctaccagaggtacaagaaggaactggtaccattccttctgaaactattccaatcaatagaaaaagagggaatcctccctaactcattttatgaggccagcatcattctgataccaaagccaggcagagacacaaccaaaaaagagaattttagaccaatatccttgatgaacattgatgcaaaaaccctcaataaaatactggcagaccgaatccagcagcacatcaaaaagcttatccaccatgatcaagtgggcttcatccctgggatgcaaggctggttcaatatacacatatcaataaatgtaatccagcatataaacagagccaaagacaaaaaccacatgattatctgcatagatgcagaaagggcctttgacaaaattcaacaacccttcatgctaaaaactcttaataaattag

SEQ ID NO: 2173 - DNA, 1374 bp, Homo sapiens
  SIMILAR (598)..(1368): 821254mologous to Homo sapiens p40,accession number U93570,Smith-Waterman Score=1049.
atgcgttctgttactggcaatggtcggctggaaaagtctctatgcgctgatcatgctggcggggttatggctgttgctgccaaaacgaaaaacgccggaaaatggcataaccacataatccggcgtttcgacattaatcctggcgatcgtctttatgatcaaggcggtcgcgctcatcatcctttcgctgtattaccgccaccggtcccggcgctaaaaccgccgccaggcatgcgagaaaagcgcaaatgcggcatcaacttcactgtcagatgcttttgcaccggcggcaataaaagtagaagaccgaggaagtcggtaaaaaagcccggtaataaaagcagcaaccagcatgatcgggatcctcagagtgaccctcagcggcagtcgcgaccagcagcaactagccgggctagggtcacactggtaatgagagtccactatagagtgatacgaaataacagaacaaatgtactaatctgtataccctgtatgaggcgcctcctcgcacattacagaggtcggaatttctcggcgccacgatcggtacttgtttttcgtttccattcacccattcatagacaggtacgaagaggaggaagagaagaaagagagagaagacgacagagagaaaccgacgaaaaacgagagagacgagaggagaagaaccagtccttcacaacaccagaccaaagtggacgggagaatgacgagttgagagaagaaggcttcagacgatcaaactactctgagctacaggaggaaattcaaaccaaaggcaaagaagttgaaaactttgaaaaaaatttagaagaatgtataactagaataaccaatacagagaagtgcttaaaggagctgatggatctgaaagccaaggctcgagaactacgtgaagaatgcagaagcctcaggagccgatgtgaccaactggaagaaagggtatcagcgatggaagatgaaatgaatgaaatgaagcgagaagggaagcttagagaaaaaacaataaaaagaaatgaacaaagcctccaagaaatatgggactatgtgaaaagaccaaatctacgtctgattggtgtacctgaaagtgatggggagaatggaaccaacctggaaaacactctgcaggatattatccaggagaacatccccaatctagcaaggcaggccaacattcagattcaggaaatacagagaacgccacaaagatactcctcgagaagagcaactccaagaaacataattgtcagattcaccaaagttgaaatgaaggaaaaaatgttaagggcagccagagagaaaggttgggttacccacaaagggaagcccatcatactaacagcggatctcttggcagaaactctacagccataa

SEQ ID NO: 2174 - DNA, 3666 bp, Homo sapiens
  SIMILAR (736)..(3006): 961254mologous to Homo sapiens putative p150,accession number U93563,Smith-Waterman Score=3773.
gaacacagttcctcaccagcaacggaacaaaggtggacggagaatgactttgacgagctgagagaagaagacttcagacgatcaaattactccgagctatgggaggacattcaaaccaaaggcaaagaagttgaaaactttgaaaaaaatttagaagaatgtataactagaataaccaatacagagaagtgcttaaaggagctgatggagctgaaaaccaaggctcgagaactacgtaaagaatgcagaagcctcaggagccgatgcaatcaactggaagaaagggtatcagcgatggaagatggaatgaatgaaatgaagcaagaagggaagtttagagaaaaaagaataaaaagaaacaagcaaagcctccaagaaatatgggactatgtgaaaaggccaaatctacgtctgattggtgtacctgaaagtgacggggagaatggaaccaagttggaaaacactctacaggatattatccaggagaacttccccaatctagcaaggcaggccaatattcagattcaggaaatacagagaacgcgacaaagatactcctcgagaagagcaactccaagacacataattgtcagattcaccaaagttgaaatgaaggaaaaaatgttaagggcagccagagagaaaggtcgggttacccacaaagggaagcccatcagactaacagcagatctctcggcagaaactctacaagccagaagagagcagaaaccttcattctttgaaaccaacgagaacaaagacacaacataccagaatctctgggatgcattcaaagcagtgtgtagagggaaatttatagcactaaatgcccacaagagaaagcaggaaagatccaaaattgacaccctaacatcacaattaaaagaactagaaaagcaagagcaaacacattcaaaagctagcagaaggcaagaaataactaaaatcagagcagaactgaaggaaatagagacacaaaaaaccattcaaaaaattaatgaatccaggagctggttttttgaaaggatcaacaaaattgatagaccgctagcaagactaacaaagaaaaaaagagagaagattcaaatagacgcaataaaaaatgataaaggggatatcaccactgatcccacagaaatacaaactaccatcagagaatactacaaacacctctatgcaaataaactagaaaatctagaagaaatggataaattccttgacacatacactctcccaagactaaaccaggaagaagttgaatctctgaatagaccaataacaggatctgaaattgtggcaataatcaatagcttaccaaccaaaaagagtccaggaccagatggattcacagccgaattctaccagaggtacaaggaggagctggtaccattccttctgaaactattccaatcaacagaaaaagagggaatcctccctaactcattttatgaagccagcatcatcctgataccaaagccaggcagagacacaaccgaaaaagagaattttagaccaatatccttgatgaacattgatgcaaaaatcctcaataaaatactgccaaacagaatccagcagcacatcaaaaaccttttgcaccatgatcaagtgggcttcatccctgggatgcaaggctggttcaatatatgcaaattaataaatgtaatccagcatataaacagaaccaaagacaaaaaccacatgattatctcaatagatgcagaaaaggcctttgacaaaattcaacaacccttcatgctaaaaactctcaataaattaggtattgatggcacatatctcaaaataataagagctatctatgacaaacccacggccaatatcatatggaatgggcaaaaactggaagcattccctttgaaaactggcacaagacagggatgccctctctcaccactcctattcaacatagtgttggaagttctggccagggcaattaggcaggagaaggaaataaagggtattcaattaggaaaagaggaagtcaaattgtccctgtttgcagacgacatgattgtatatctagaaaaccccattgtctcagcccaaaatctccttaagctgataagcaacttcagcaaagtctcagcatacaaaatcaatgtacaaaaatcacaagcattcttatacaccaacaacagacaaacagagagccaaatcaggagtgaactcccattcacaattgcttcaaagagaataaaatacctaggaatccaacttacaagggatgtgaaggacctcttcaaggagaactacaaaccactgctcaatgaaataaaagaggatacaaacaaatggaagaacattccatgctcatgggtaggaagaatcaatatcgtgaaaatggccatactgcccaagataatttacagattcaatgccatccccatcaagctaccaatgactttcttcacagaattggaaaaaactactttcaagttcatatggaaccaaaaaagagcccgcatcgccaagtcaatcctcagccaaaagaataaagctggaggcatcacactacctgacttcaaactatactacaaggctacagtaaccaaaacagcatggtactggtaccaaaacagagatatagatcaatggaacagaacagagccctcagaaataacgccgcctatctacaactatctgatctttgacaaccctgagaaaaacaagcaatggggaaaggattccctatttaataaatggtgctgggaaaactggctagccatatgtagaaagctgaaactggatcccttccttacaccttatacaaaaatcaattcaagatggattaaagacttaaaggttagacctaaaaccataaaaacgctagaagaaagcctaggcattaccattcaggacataggcatgtgcaaggacttcatgtctaaaacaccaaaagcaatggcaacaaaagccaaaattgacaaatgggatctaattaaactaaagagcttctgcacagcaaaagaaactaccatcagactgggagtggagttacacaagcacccctgtggccaccaccactatgacaccactggatcagatctgaagccagcacagcactgggtctcacccaaagcttattataaccactcacaggctattgccaatgttcactcaaggccctgtgactttacaatcagcatgtggcagagccagtcaggcctgtgtccttcccttcaggatggcaaggtttcccatgccctagggcggctggctcccctctggcctagggaaggtcccgaaatgccatccaagtatcaagtcctggaatcaggaactccaagtattcttttgatgctctacccttctgtggccatgcttgtacctaaggtgcaagacaaagtcacctttacttttccctctacttttctcaagcagatggagtttcttcatgcagccagcacagctggtgaggggagaggaggggtggcatcagagattcaggactgttttttctatctcttcagtgcctctttaagtgatatgaagttaaaaccaggtacagtggatgctcactggacttttggttcttatgaagctatcatagccaaaaattcggggaagtcaatggtgtcgttaccattggcatccacttcgttgatcatatcccgtaattcggcttctgacccagtgacctcatga

SEQ ID NO: 2175 - DNA, 4345 bp, Homo sapiens
  SIMILAR (3392)..(4342): 941254mologous to Homo sapiens p40,accession number U93569,Smith-Waterman Score=1526.
gtattcctctttgttaacctataagctgcccgtggcagacgtttaccctctatcacagacctttcacaaattagaagcagtgaagcataactttaacctggaagaatacagcctttctcagtgcacactggagaagtttgaacttcctgacagctttgtttacactgtgagaggaaaaccacctattcaagcctcagtaatggcagacacccctcccgtcaccaagctcgagcaccccaggtcgacttcagactgctgtgctggcagtgagaatttcagtctagtggatctgacattgctgggctctgtgaaggaaacaggtcaaaatgagcaagagacgcatgagcgtgggtcagcaaacatgggctcttctctgcaagaactgtctcaaaaaatggagaatgaaaagacagaccttgttgatagcttagagactagccatcaagacctgatcggttatgccaaaagaactcagcagccaatgtggcgaagaacaatcatggggtggcctgatgaaaaaagcatggatgaattggatttgaactattcaatagacgcagtgagagtcatctttactgataccttctcctaccatttgaagttttcttggggacatagaatccccatgatgaaagagcacagagaccattcagctcactgtcaagcagtgaatgaaaaaatgaagtgtgaaggttcagagttctgggagaaaggctttgtagcttttcaagctgccattaatgctgctatcatagaaatcgcaacaaatcattcagtgatggaacagctgatgtcagttactggtgtacatatgaagatattaccttttgttgcccaaggaggagttgcaactgattttttcattttcttttgcattatttctttttctacatttatatactatgtatcagtcaatgttacacaagaaagacaatacattacgtcattgatgacaatgatgggactccgagagtcagcattctggctttcctggggtttgatgtatgctggcttcatccttatcatggccactttaatggctcttattgtaaaatctgcacaaattgtcgtcctgactggttttgtgatggtcttcaccctctttctcctctatggcctgtctttgataactttagctttcctgatgagtgtgttgataaagaaacctttccttacgggcttggttgtgtttctccttattgtcttttgggggatcctgggattcccagcattgtatacacgtcttcctgcatttttggaatggactttgtgtcttcttagcccctttgccttcactgttgggatggcccagcttatacatttggactatgatgtgaattctaatgcccacttggattcttcacaaaatccatacctcataatagctactcttttcatgttggtttttgacacccttctgtatttggtattgacattatattttgacaaaattttgcccgctgaatatggacatcgatgttctcccttgtttttcctgaaatcctgtttttggtttcaacacggaagggctaatcatgtggtccttgagaatgaaacagattctgatcctacacctaatgactgttttgaaccagtgtctccagaattctgtgggaaagaagccatcagaatcaaaaatcttaaaaaagaatatgcagggaagtgtgagagagtagaagctttgaaaggttcagtcactgtctataatcacacactttcaagaatggctgatatagaaaatatcagcaagttcactggattttgtccacaatccaatgtgcaatttggatttctcactgtgaaagaaaacctcaggctgtttgctaaaataaaagggattttgccacatgaagtggagaaagaggtacaacgagttgtacaggaattagaaatggaaaatattcaagacatccttgctcaaaacttaagtggtggacaaaataggaaactaacttttgggattgccattttaggagatcctcaagttttgctattggatgaaccgactgctggattggatcctctttcaaggcaccgaatatggaatctcctgaaagaggggaaatcagacagagtaattctcttcagcacccagtttatagatgaggctgacattctggcggacaggaaggtgttcatatccaatgggaagctgaagtgtgcaggctcttctctgttccttaagaagaaatggggcataggctaccatttaagtttgcatctgaatgaaaggtgtgatccagagagtataacatcactggttaagcagcacatctctgatgccaaattgacagcacaaagtgaagaaaaacttgtatatattttgcctttggaaaggacaaacaaatttccagaactttacagggatcttgatagatgttctaaccaaggcattgaggattatggtgtttccataacaactttgaatgaggtgtttctgaaattagaaggaaaatcaactattgatgaatcagatattggaatttggggacaattacaaactgatggggcaaaagatataggaagccttgttgagctggaacaagttttgtcttccttccacgaaacaaggaaaacaatcagtggcgtggcgctctggaggcagcaggtctgtgcaatagcaaaagttcgcttcctaaagttaaagaaagaaagaaaaagcctgtggactatattattgctttttggtattagctttatccctcaacttttggaacatctattctacgagtcatatcagaaaagttacccgtgggaactgtctccaaatacatacttcctctcaccaggacaacaaccacaggatcctctgacccatttactggtcatcaataagacagggtcaaccattgataactttttacattcactgaggcgacagaacatagctatagaagtggatgcctttggaactagaaatggcacagatgacccatcttacaatggtgctatcattgtgtcaggtgatgaaaaggatcacagattttcaatagcatgtaatacaaaacggctgaattgctttcctgtcctcctggatgtcattagcaatggactacttggaatttttaattcgtcagaacacattcagactgacagaagcacattttttgaagagcatatggattatgagtatgggtaccgaagtaacaccttcttctggataccgatggcagcctctttcactccatacattgcaatgagcagcattggtgactacaaaaaaaaagctcattcccagctacggatttcaggcctctacccttctgcatactggtttggccaagcactggtggatgtttccctgtactttttgatcctcctgctaatgcaaataatggattatatttttagcccagaggagattatatttataattcaaaacctgttaattcaagagtgcagctcctcaccagcaacggaacaaagctggatggagaatgactttgacaagctgagagaagaaggcttcagacgatcaaattactctgagctacgggaagacatgcaaaccaaaggcaaagaagttgaaaactttgaaaaaaatttagaagaaagtataactagaataacgaatacagagaagtgcttaaaggagctgatagagctgaaaaccaaggctcgagaactacgtgaagaatgcagaagcctcaggagcccacgtgatcaactggaagaaagggtatcagcgatggaagatgaaatgaatgaaatgaagcgagaagggaagtttagagaaaaaagaataaaaagaaatcagcaaaacctccaagaaatatgggactatgtgaaaagaccaaatctacgtctgattggtgtacctgaaagtgatggggagaatggaaccaagttggaaaacactctgcaggatagtatccaggagaatttccccaatctagcaaggcaggccaacgttcagattcaggaaatacagagaacgccacaaagatactcctcgagaagagcaactccaagacacataattgtcagattcaccaaagttgaaatgaaggaaaaaatgttaagggcagccagagagaaaggtcgggttaccctcaaagggaagcccatcagactaacagtggatctctcggcagaaaccctacaagccagaagagagtgggggccaatattcaacattcttaaagaaaagaattttcaacccagaatttcatatccagccaaactaagcttcataagtgaaggagaaataaaatcctttacagacaagcaaatgctgagagattttgtcaccaccaggcctgccctaaaagagctcctgaaggaagtgctaaatatggaaaggaacaactggtaccagcctctgcaaaatcatgccaaaatgtaa

SEQ ID NO: 2176 - DNA, 1311 bp, Homo sapiens
  SIMILAR (415)..(1305): 901254mologous to Homo sapiens p40,accession number U93564,Smith-Waterman Score=1371.
atgcttgttgatcttgtcactggggcctgcatgtcagggaaacatcctcagagcatgtctgagggcagagctctgacggtaatcagagcaggcagatgtcaccgacagctggagctaatgggctgtcagacagggccggaccaacctgggacatcctccgtgctccctggcacgagtccagtccagaccgagggcactcaagcatgggacgccaggggaacggctttgatgcctactggaaaagccaaacttggttgctttggcaacaggggtcttggtgagaagctggtacacaagcaggtgcttccagtgtgccagagaaaggcacagggccttcttcgccccgagtcttcttacttctctgatggagctgagtcatgcatcacctcttgtttaatggtggtgaaatatactcaggaatgcagttcctcaccagcaacagaacaaagcttgacggagaatgactttgacgagttgagagaagaaggcttcagacgatcaaactactccgagctacaggaggaaattcaaagcaaaggcaaaaaagttaaacactttgaaaaaaatttagacgaatgtataactagaatcaccaatagagagaagtgcttaaaggagctgatggagctgaaagccaaggctcgagaactacgtgaagaatgcagaagcctcaggagccaatgcgatcgactggaagaaagggtatcagtgatggaagatgaaatgaatgaaatgaagcgagaagggaagtttagagaaaaaggaataaaaagaaacgaacaaagcctccaagaaatatgggactatgtgaaaagaccaaatctacatctgattggtgtacctgaaagtgacagggagaatggaactaagttggaaaacactctgcaggatattatccaggagaacttccccaatctagcaaggcaggccaacattcagattcaggaaatacagagaatgccacaaagatactcctcgagaagagcaactccaagacacataattgttagatacaccaaagttgaaatgaaggaaaaaatgttaagggcagccagagagaaaggtcgagttacccacaaagggaagcccatcagactaacagctgatctcttggcagaaactctacaagccagaagagagtgggggccaatattcaacattcttaaagaaaagaattttcaacccagaatttcatatccagacaaactacgcttcataagtgaaggagaaataaaatactttacagacaagcaaatgctgagagattttgtcaccaccaggcctgccctaaaagagctcctgaagcactaa

SEQ ID NO: 2177 - DNA, 2742 bp, Homo sapiens
  SIMILAR (103)..(2556): 831254mologous to Homo sapiens putative p150,accession number U93574,Smith-Waterman Score=3474.
atggggaaaaaacacaacagaaaaactggaaactctaaaaagcagagcgcctctcctcctccaaaggaacgcagttcctcaccagcaacggaacaaacctggatggagaatgactttgacgagctgagagaagaaggcttcagacgatcaaattactctgagctacgggaggacattcaaaccaaagtcaaagaagttgaaaactttgaaaaaaatttagaagaatgtataactagaataaccaatacagagaagtgcttaaaggagctgatggagctgaaaaccaaggctcgagaactacgtgaagaatgcagaagcctcaggagccgatgcaatcaactggaagaaagggtatcagcgatggaagatgaaatgaatgaaatgaagcgagaagggaagtttagagaaaaaagaataaaaagaaatgagcaaagcctccaagaaatatgggactatgtgaaaagaccaaaatctacgtctgatttggtgtacctgaaagaagaagttgaatctctgaatagaccaataacaggagctgaaattgtggcaataatcaatagcttaccaaccaaaaagagtccaggaccagatggattcacagccgaattctaccagaggtacaaggaggaactagtaccattccttctgaaactattccaatcaatagaaaaagagggaatcctccctaactcattttatgaggccagcatcattctgataccaaagccaggcagagacacagcaaaaaaagagaattttagaccaatatctttgatgaacattgatgcaaaaatcctcaataaaatactgacaaaacgaatccagcagcacatcaaaaagcttatccaccatgatcaagtgggcttcatccctgggatgcaaggctggttcaatatacgcaaatcaataaatgtaatccagcatataaacagagccaaagacaaaaaccacatgattatctcaatagatgcagaaaaagcctttgacaaaattcaacaaccctccatgctaaaaactctcagtaaattaggtattgatgggacgtatttcaaaataataagagctatctatgacaaacccacagccaatatcatactgaatgggcagaaactggaagcattccctttgaaaactggcacaagacagggatgccctctctcaccactcctattcaacacagtgttggaagttctggccagggcaattaggcaggagaaggaaataaagggtattcaattaggaaaagaggaagtcaaattgtccctctttgcagacaacataattgtatatctagaaaaccccattgtctcagcccaaaatctccttaagctgataagcaacttcagcaaagtctcaggatacaaagtcaatgtacaaaaatcacaagcattcttatacaccaacaacagacaaacagagagccaaatcatgagtgaactcccattcacaattgcttcaaagagaataaaatacctaggaatccaacttacaagggatgggaaggacctctccaaggagaactacaaaccactgctcaaggaaataaaagaggatacaaacaaatggaagaacattccatgctcatgggtaggaagaatcaatatcgtgaaaatggccatactgcccaaggtaatttacagattcaatgccatccccatcaagctaccaatgactttcttcacagaattggaaaaaactactttaaagttcatatggaaccaaaaaagagcccgcatcgccaagtcaatcctaagccaaaagaacaaagctggaggcatcacactacctgacttcaaactatactataaggctacagtaaccaaaacagcatggtactggtaccaaaacagagatatagaccaatggaacagaacagagccctcagaaataatgccgcatatctacaactatctgatctttgacaaacctgagaaaaacaagcaatggggaaaggattccctatttaataaatggtgctgggaaaactggctagccatatgtagaaagctgaaactggatcccttccttacaccttatacaaaaatcaattcaagatggattaaagacttaaacgttagacctaaaaccataaaaaccctagaagaaaacctaggcattaccattcaggacacaggcaggggcaaggacttcatgtctaaaacaccaaaagcaatggcaacaaaagccaaaactgacaaatgggatctgattaaactaaagagcttctgcacagcaaaagaaactaccatcagagtgaacaggcaacctacaaaatgggagaaaattttcacaacctactcctctgacaaagggctaatatccagaatctacaatgaactcaaacaaatttacaagaaaaaaacaaacaaccccatcaaaaagtgggcaaaggatatgaacagacacttctcaaaagaagacatttatgcagccaaaaaacacatgaaaaaatgctcatcatcactggccatcagagaaatgcaaatcaaaaccacaatgagataccatctcataccagttagaatggcaatcattaaaaagtcaggaaacaacaggtttgatgacaaatacaccttgaagctgaccttcatcagtgggagaacaaagcagcagcgggaagccgagttcacaaagtccattgctaagttttttgaccacagtgggacactggtcatggatgcatatgagcctgaaatatccaggctccatgacagtcttgccatagaaagaaaaataaagtag

SEQ ID NO: 2178 - DNA, 1878 bp, Homo sapiens
  SIMILAR (919)..(1875): 951254mologous to Homo sapiens p40,accession number U93564,Smith-Waterman Score=1570.
atgaaactcatggaaacacttaaccagtgcataaacgctggtcatgaaatgacgaaggctatcgccattgcacagtttaatgatgacagcccggaagcgaggaaaataacccggcgctggagaataggtgaagcagcggatttagttggggtttcttctcaggctatcagagatgccgagaaagcagggcgactaccgcacccggatatggaaattcgaggacgggttgagcaacgtgttggttatacaattgaacaaattaatcatatgcgtgatgtgtttggtacgcgattgcgacgtgctgaagacgtatttccaccggtgatcggggttgctgcccataaaggtggcgtttacaaaacctcagtttctgttcatcttgctcaggatctggctctgaaggggctacgtgttttgctcgtggaaggtaacgacccccagggaacagcctcaatgtatcacggatgggtaccagatcttcatattcatgcagaagacactctcctgcctttctatcttggggaaaaggacgatgtcacttatgcaataaagcccacttgctggccggggcttgacattattccttcctgtctggctctgcaccgtattgaaactgagttaatgggcaaatttgatgaaggtaaactgcccaccgatccacacctgatgctccgactggccattgaaactgttgctcatgactatgatgtcatagttattgacagcgcgcctaacctgggtatcggcacgattaatgtcgtatgtgctgctgatgtgctgattgttcccacgcctgctgagttgtttgactacacctccgcactgcagtttttcgatatgcttcgtgatctgctcaagaacgttgatcttaaaggctcccagtgtgagcgacacagaagacgggtgatttctgcatttccatctgaggaacgcagttcctcaccagcaacggaacaaagctggatggagaatgattttgacgagctgagagaagaaggcttcagacgatcaaattactctgagctacgggaggacattcaaatcaaaggcaaagaagttgaaaactttgaaaaaaatttagaagaatgtataactagaataaccaatacagagaagtgcttaaaggagctgatggagctgaaaaccaaggctcgagaactacgtgaagaatgcagaagcctcaggagccgatgcgatcaactggaagaaagggtatcagcaatggaagatgaaatgaatgaaatgaagcgagaagggaagtttagagaaaaaagaataaaaagaaatgagcaaagcctccaagaaatatggaactatgtgaaaagaccaaatctacgtctgatttgtgtacctgaaagtgatgcggagaatggaaccaagttggaaaacactctgcaggatgttatccaggagaacttccccaatctagcaaggcaggccaacgttcagattcaggaaatacagagaatgccacaaagatactcctcgagaagaacaactccaagacacataattgtcagattcaccaaagttgaaatgaaggaaaaaatgttaagggcagccagagagaaaggtcgggttaccctcaaagggaagcccatcagactaacagcggatctctcggcagaaaccctacaagccagaagagagtgggggccaatattcaacattcttaaagaaaagaattttcaacccagaatttcatatccagccaaactaagcttcataagtgaaggagaaataaaatactttacagacaagcaaaggctgagagattttgtcaccacaaggcctgccctaaaagagctcctgaaggaagcgctaaacatggaaaggaacaaccagtaccagccgctgcaaaatcatgccaaaatgtaa

SEQ ID NO: 2179 - DNA, 1074 bp, Homo sapiens
  SIMILAR (382)..(1020): 811254mologous to Homo sapiens p40,accession number U93570,Smith-Waterman Score=912.
  misc_feature (1)...(1074): n = a,t,c or g
atggtcctgcctctgaaactgctctttgcccaggggctgtcatctctactgtactgccaggactgccagcgctgccatgggaatgcacatgtttatgcccgggtgctcttgatgttctcagagctgcgggcactgcccttaccagaggactgcgggtacaaagaagtgcacaagagcccccaccccatcgccactactaccaatacagccagtccctcgcggtgtggcgtacaccaccctggctgcttcctgctgctgcccctgccttgtccactccccctgcgcggagagccccgggctccctcgccccgagagcgcggctcagcggggagcccagggggcctaggggctcagatctgctggagccaccgacgccaaggggaacacaaatcctcaccagcaacggaacaaagctggacggaaaatgactttgatgagttgagagaagaaggcttcagacgatcaaactactccgagctacaggaggaaattcaaaccaaaggcaaagcagttaaaaactttgaaaaaagtttagacgaatgtataactagaataaccaatacagagaagtgcttaaaggagctgatggagctgaaagccaaggctcgagaactacgtgaagaatgcagaagcctcaggagccaatgcgatcaactggaagaaagggtatcagtgatggaagatgaaatgaatgaaatgaagcaagaagggaagtttagagaaaaaagattaaaaagaaacgaacaaagcctccaagaaatatgggactatgtgaaaagaccaaatctacgtctgattggtgtacctgaaagtgacggggagaatgggaccaagttggaaaacactctgcaagatattatccaggagaactttcccaatctagcaaggcaggccaccgttcacattcgggaaatacagagaacgccacaaagattctccttaagaagaagcactccaagacacctanttgaaaactatctgaacaagcgcttaactaaaggggctcccataaagggccggcccttggggacttttcgactgggaaaacggggcaacggcggcctgagtggctga

SEQ ID NO: 2180 - DNA, 2217 bp, Homo sapiens
  SIMILAR (1165)..(2109): 951254mologous to Homo sapiens putative p150,accession number U93572,Smith-Waterman Score=1533.
atgactctctgcaatgataatggcttttatcaaaagcagaagttgaagaacaggaaagctcagcatcagaaaagtagtccagccctgaggatgagtttcacctgcaggccagtaatggtgcacaatctcactggaagcagtggcgtgctggagtgggctcgcagtaccattagggttgactctgtgcatctcttcccagctgcattttttccaatattccctgatggatacactacaggaagaaaagaaatcaaggctgacttctatgataaatccctggtgctagaacggatatcctgcaagaagcaatcatcaaataccagaaccaatgacaaaaacgacatgattgtctcaatagatgcagaaaaggccttcgataaaattcaacaccgcttcatgctaaaaactctgaataaactagaccccctctcccttactctgtgcatgttcggacactccaggtctctgtctggctgccactttgccaacacctgtgccaagaagccttcccaggtgatgccacctcgtcgtgcatgggcctccacatcctgccctgaagtccatcaaggcacccttccttgcttgcaaaccctctcccctcgtgaccttaagactgaatcacacagcgaaggaagaaaaggcaaagaagttgaaaactttgaaaaaaatttagaagaatgtataactagaataaccaatacagagaagtgtttaaaggagctgatggagctgaaaaccaaggcccgagaactacgtgaagaatgcagaagcctcaggagccgatgcgatcaactggaagaaagggtatcagcaatggaagatgaaatgaatgaaatgaagcgagaaggaaagtttagagaaaaaagaataaaaagaaatgaggaaagcctccaagaaatatgggactatgtgaaaagaccaaatctacgtctgattggtgtacctgaaagtcatggggagaatggaaccaagttggaaaacactctgcaggatattatccaggagaatttccccaatctagcaaggcaggccaacgttcagattcaggaaatacagagaatgccacaaagatactcctggagaagagcaactccaagacacataattgtcagattcaccaaagttgaaatgaaggaaaaaaggttaagggcagccagagagaaagaaatacaaactaccatcagagaatactacaaacacttctacacaaataaactagaaaatctagaagaaatggataaattccttgacacatacactctcccaagactaaaccaggaagaagttcaatctctgaatagaccaataacaggagctgaaattgtggcaataatcaatagcttaccaaccaaaaagagtccaggactagatggcttcacagccaaattctaccagaggtacaaggaggaactggtaccattccttctgaaattattccaatcaatagaaaaagagggaatcctccctaactcattttatgaggccagcatcattctgatacaaaagccgggcagagacacaaccaaaaaagagaattttagaccaatatccttgatgaacattgatgcaaaaatcctcaataaaatactggcaaaccgaatccagcagcatatcaaaaagcttatccaccatgatcaagtgggcttcatccctgggatgcaaggctggttcaatatacgcaaatcaataaatgtaatccagcatataaacagagccaaagacagaaaccacatgattatctcaatagatgcagaaaaggcctttgacaaaattcaacaacccttcatgctaaaaactctcaataaagtaggtactgatgggacatatttcaaaataataagagctatctgtgacaaacccacagccaatatcatactgaatgggcaaaaactggaagcatttcctttgaaaactggcacaagacagggatgccctctctcaccactcctattcaacatagtgttggaagttctggccagggcaattaggcaggagaaggaaataaagggtattcaattaggaaaagaggaagtcaaattgtccctgtttgcagatgacatgaatgtatatctagaaaaccccatcgtctcagcccaaaatctccttaaagctgataagcaacttcagcaaagtctcaggatacaaaatcaatgtgcaaaaatcacaagcattcctatacaccaacaacagacaaacagagagccaaatcatgagtga

SEQ ID NO: 2181 - DNA, 2005 bp, Homo sapiens
  SIMILAR (1397)..(2002): 891254mologous to Homo sapiens p40,accession number U93568,Smith-Waterman Score=909.
atggggaaaaaacagagcagaaaaaccggaaactctaaaaagcagagcgccactcctcctccaaaggaacgcagttcctcaccagcaacggaacaaagctggacagagaatgactttgacgagttgagagaagaaggcttcagacgatcaaactactctgagctacaggaggaaactcaaaccaaaggcagagaagttgaaaactttgaaaaaaatttagacgagtgtataactagaacaaccaatacagagaagtgcttaaaggagctgatggagctgaaagccaaggcttgggaactacgtgaagaatgcagaagcctcaggagccgatgcaatcaactggaagaaagggtatcagtgatggaagatgaaatgaatgaaatgaagcgagaagggaagtttagagaaaaaagaataaaaagaaatgaacaaagcccccaagtaatacgggactatgtgaaaagaccaaatctacgtctgattggtgtacctgaaagtgacgggaagaatggaaccaagttggaaaacactctgcaggatattatccaggagaacttccccaatctagcaaggcaggccaacattcagattcaggaaataccgagaacgtcaaaagatactcttcagaagagcactccattattggccttattggtcgattcccaagttgaaggacggacatgtttagggccccaaaaaagcgggaacaaaaaaggaacaacagaaagattcaaaaagaagaaggaggacgaaccgcaccaactgggatctgagctgggcatttctgaaagaaacacagcagccccagtcagggactgtgggcgcagctttagcagacttaaacgttcctgcctgctggctctgaagacagcagcagatctcccagtacagcattcgagctatgctaagggacagactgcctcctcaagtaggtacctgacccatgtgcctcctcatggggagacacctcccagcagagatcgacagacatctcatacaggagagctccagctggcatctggtgagtgcccctctgggatgaagcttccagaagaaagaaaaggcagcaatcttttctgttctgcagcctccgctggtgatactcaggcaaacagggtctggagtggacctccagcaaactccaacagacctgcagctgagggtcctgactgttggaaggaaaactaacaaacagaaaggacatccacaccaaaaccccaactgtacgtcaccatcatcaaagaccaaagacaaaacttccagaggaatgatcaggcagcagcatttgcaggtcaccaatatccgctgttctacagccactgctgctgatacccaggcaaacagggtctggagtggacctctagcaaactccaacagacctgcagctgagggtcctgaggaaattcaaatcaatggcaaagaagttaaaaagtttgaaaaaaaattagacgaatggataactagaataaccaatgcagagaagtccttaaaggagctgatggagctgaaagccaaggctcgagaactatgtgaagaatgcagaagcctcaggagccgatgtgatcaactggaagaaagggtatcagtgatggaagatgaaatgaatgaaatgaagcgagaagggaagtttagagaaaaaagaataaaaagaaatgaacaaagcctccaagaaatatgggactatgtaaaaagaccaaatctacgtctgattggtgtacctgaaagtgacagagagaatggaaccaagttggaaaacactctgcaggatattatccaggagaacttccccaatctagcaaggcaggccaacattcagattcaggaaatacagagaacgccacaaagatactcctcgagaagagcaactccaagacacataattgttagattcaccaaagttgaaatgaaggaaaaaatgttaagggcagccagaaagaaaggtcaggtaacccacaaagggaagcccatcagactaacagcggatctctcagtagaaactctataa

SEQ ID NO: 2182 - DNA, 1941 bp, Homo sapiens
  SIMILAR (988)..(1938): 961254mologous to Homo sapiens p40,accession number U93569,Smith-Waterman Score=1553.
atgggggccagggcagggggcagctgcagctgtttaatgtggctcctcttggcttctggacactttatgggctgtgtggctgctggtgacactgttggaccagagaagttcagatcctgctataccattacccttttacagtcgaagctctcatattcatttgggaagaacaataaaaatttccagttaaggaaatgcttacagacagttgataacctctttgtgcccaaccagaacggatactactgtcactctcagacaagcttggatagagcccagattgacctcaacggtcggatccgtaatggcagtgtctacagtgcacacagcaccaactccttaaataatcctcagccctacttgcagccctcgccgatgtcgtccaaccctagcatcaccgggagtgacgtcatgaggcctgactacctcccgtcccatcggcacagcgccgtgatacccccgtcctaccgccccaccccagactatgagactgtgatgaagcagctcaacaggggcctggtgcatgcggaacggcagagccactcgctgcgaaacctcaacatcggcagctcgtacgcctacagcaggcccgcggcgctggtctacagccagcccgagatccgcgagcacgcacagctcccctcgccagcggccgcacactgcccgttcagcctgagctacagcttccacagcccgtctccctacccctaccctgccgagcggcggcccgtggtgggcgcggtcagcgtgccggagctgaccaatgcgcagctgcaggcgcaggactacccgtctcccaacatcatgcggacgcaggtgtaccggccacccccaccctacccgccccccaggcccgccaacagcacgccagacctgtcccgccacctttacatcagcagcagcaaccccgacctcatcacgcggcgcgtgcaccactcggtgcaaacgttccaggaggacagcctgcccgtggcgcactcgctgcaggaggaacgcagttcctcaccagcaacggaacaaagctggacggagaatgactttgacgagctgagagaagaaggcttcagacgatcaaattactccgagctacgggaggacattcaaaccaaaggcaaagaagttgaaaactttgaaaaaagtttagaagaatgtataactagaataaccaatacagagaagtacttaaaggagctgatggagctgaaaaccaaggctcgagaactatgtgaagaatgcagaagcctcaggagccaatgcgatcaactggaagaaagggtatcagcgatggaagatgaaatgaatgaaatgaagcgggaagggaagtttagagaaaaaagaataaaaagaaacgagcaaagcctccaagaaatatgggactatgtgaaaagaccaaatctacgtctgattggtgtacctgaaagtgacggggagaatggaaccaagttggaaaacactctgcaagatattatccaggagaacttccccaatctagcaaagcaggccaacgttcagattcaggaaatacagagaacgccacaaagatactcctcgagaagagcaactccaagacacataattgtcagattcaccaaagttgaaatgaaggaaaaaatgttaagggcagccagagagaaaggtcgggttaccctcaaagggaaacccatcagactaacagcggatctctcggcagaaactctacaagccagaagagagtgggggccaatattcgacattcttaaagaaaagaattttcaacccagaatttcatatccagccaaactaagcttcagaagtgaaggagaaataaaatcctttacagacaagcaaatgctgagagattttgtcaccaccaggcctgccctaaaagagctcctgaaggaagcgctaaacatggaaaggaacaaccggtaccagccgctgcaaaatcatgccaaaatgtaa

SEQ ID NO: 2183 - DNA, 1737 bp, Homo sapiens
  SIMILAR (475)..(1263): 951254mologous to Homo sapiens p40,accession number U93570,Smith-Waterman Score=1284.
atgagtgtccactcctggaagccctcttggatcagacccatccgtagcctttctcccaagcgtcctctagggacccaagggacctctgaagtcccaccagatactcacatctgccagacaaaatttcacagtctttcttcaggaccacttctcttgtcagtccatccagttggaaagctatccgcagttgttggcagagtcttcatacacatactctcccagcgtgagcgacgaagaagacgggtgatttcagcatttccatctgaggtaccgggttcatctcaccagggagtgccagacagcgggtgcaggtcagtgggtgcgcaccccgtgcgcgagccgaagcagggcgaggcattgcctcactcaggaagcccaagggaaggaaaactaacaaacagaaaggacatccacaccaaaaacccatctgtacatcaccatcatcaaagaccaaaagtagataaaaccacaaagattgggaaaaaacagaacagaaaaactggaaactctaaaacgcagagcgcctctcctcctccaaaggaatgtagttcctcaccagcaacggaacaaagctggatggagaatgactttgatgagctgagagaagaaggcttcagacaatcaaattactctgagctacggaaggacattcaaaccaaaggcaaagaagttgaaaactttgaaaaaaatttagaagaatgtaaaactagaataaccaatacagagaagtgcttaaaggagctgatggagctgaaaaccaaggctcgagaactatgtgaagaatgcagaagcctcaggagccgatgcaatcaactggaagaaagggtatcagtgatggaagatgaaatgaatgaaatgaagcgagaagggaagtttagagaaaaaagaataaaaagaaatgagcaaagcctccaagaaatatgggactatgtgaaaagaccaaatctacgtctgattggtgtacctgaaagtgatggggagaatggaaccaagttggaaaacactctgcaggatattatccaggagaatttccccaatatagcaaggcaggccaacgttcagattcaggaaatacagagaacgccacaaagatactcctcgagaagagcaactccaagacacataattgtcagattcaccaaagttgaaatgaaggaaaaaatgttaagggcagccagagagaaaggtcgggttaccctcaaaggaaagcccatcagactaacagcggatctctcggcagaaaccctacaagccagaagagaatgcagagcaggcagctgcaggaagatattcgcaaccataccaatcagcaccaccacaatacccgccatcagcataccgccgaggaacgacatatctttgcgggtggtcagcacatatgcagagcagcagaagaacactaacgccgttccgcccagcgtctaccttgggtttggtgtgggttctgcctggcgtgctgtgctgtggcgtgtttggtggtcccttgtggttgtcgtggggtttgtgtctatcgctgcggcgggggtctgtgttcgtgggggtgtctgtatgacttccgtggaggaagtgactctggatgtggtagaaatagcaaaagaacaagaattagaagtggagcctgaaaatgtggctgaattgctgccatttatgataaacgtgacgatagggcgccagtggccgtcccccaagtttttcgcccccaaaaaacaatgtccccagtttaagacccttctttaa

SEQ ID NO: 2184 - DNA, 1422 bp, Homo sapiens
  SIMILAR (463)..(1419): 921254mologous to Homo sapiens p40,accession number U93564,Smith-Waterman Score=1499.
atggcagaaggcaaggaggagcaagtcccatcttacatggatggcagcaggcaaagaaagaatgaggaagatgtaaaagcagaaacccctgataaaaccatcagctctcgggcagcactcaggagaggcacttcttctgatggaagaaaactgaatgggacatttgcagtaaggggtgctggtgggtactacatgtggggccacactcgagctgccttctcagtcaacccctttggcagcttgggccaagtctctttgaagaggaagactgtgatatctgaactcaaacaggcagtgcccagagagagaagcacaggtccacgcaggcagccaaagccatcttcttggttgaaagatactcttttcggggggaggagccaagatggccgagtaggaacagctccggtctacagctcccagcgtgagcgacaaagaagacgggtgatttctgcatttgcatctgaggaacgcagttccttcaccagcaaccggaaccaaaagcttggattggagaatgactttgacgagctgagagaagaaggcttcagacgatcaaattactctgagctacgggaggacattcaaaccaaaggcaaagaagttgaaaactttgaaaaaaatttagaagaatgtataactagaataaccaatacagagaagtgcttaaaggagctgatggagctgaaaaccaaggctcaagaactacgtgaagaatgcagaagcctcaggagccgatgtgatcaactggaagaaagggtatcagcaatggaagatgaaatgaatgaaatcaagcgagaaggaaagtttagagaaaaaagaataaaaagaaatgagcaaagcctccaagaaatatgggactatgtgaaaagaccaaatctacgtctgattggtgtacctgaaagtgatgcggagaatggaaccaagttggaaaacactctgcaggatattatccaggagaacttccccaatctagcaaggcaggccaacgttcagattcaggaaatacagagaacgccacaaagatactcctcgagaagagcaactccgagacacataattgtcagattcaccaaagttgaaatgaaggaaaaaatgttaagggcagccagagagaaaggtcgggttaccctcaaagggaagcccatgagactaacagcgaatctctcggcagaaaccctacaagccagaagagagtgggggccaatattcaacactcttaaagaaaagaattttcaacccagaatttcatatccagccaaactaagcttcataagcgaaggagaaataaaatactttacagacaagcaaatgctgagagattttgtcaccaccagacctgccttacaagagctcctgaaggaagcacgaaacatggaaaggaacaaccggtaccagctgctgcaaaattatgccaaaatgtaa

SEQ ID NO: 2185 - DNA, 9087 bp, Homo sapiens
  SIMILAR (8137)..(9084): 951254mologous to Homo sapiens p40,accession number U93564,Smith-Waterman Score=1553.
atggtgttgctcacttcaagaatgaagctgcagaccttactggttcgtggtcttgctcacttctttaatgaagctgcagaccttactgatgtgtccagagattcttccttctggcagtttcctggtcttcctcacttcaagaatgaagctgccgaccttagtgatgtttccagagtttcttccttctggcaggttcgtggtcttgctcacatctttaatgaagctgcagaccttactgatgtgtccagagtttcttccttcttgcagtttcgtggtcttcctcacttcaagaatgaagctgcagaccttactgatgtgtccagagtttcttccttcttgcaggttcgtggtcttgctcacttccttaatgaagctgcagaccttactgatgtgtccagagttttttccttctggcaggttcgtggtcttgctcacttccttaatgaagctgcagaccttactgatatgtccagtgtttcttccttctggcaggttcatggtgttgctcactttaagaatgaagctgcagaccttaatgatgtgtccagagtttcttccttcttgcaggttcgtggtcttgctcacttccttaatgaagctgcagaccttaatgatgtgcccagagtttcttccttcttgcaggttcgtgttcttgctcacttccttaatgaagctgcagaccttactgagtttgatccttcagatatttccagagtttcttccttctggcaggttcgtgttcttgctcacttctttaatgaagctgcagaacttactgatgtgtccagagtttcttccttctggcagtttcgtggtcttcctcacttcaagaatgaagctgcagaccttagtgatgtttccagagtttcttccttctggcaggttcgtggtcttgctcacttctttaatgaagctgcagaccttactgatgtttccagagtttcttccttctggcaggttcgtggtcttgctcacatctttaatgaagctgcagaccttactgatgtgtccagagttacttccttctggcaggttcatggtgttgctcacttcaagaatcaagctgcagaccttactgatgtttccagagtttcttccttctggcaggtacgtggtcttgctcacttctttaatgaagctgcagaccttactgatgtgtccagagtgtcttccttctggcaggttcatggtcttgctcacttcactaatgaagctgcagaccttacagatgtgtccagggtttctgtcttctggcaggttcatggacttcctcacttcaagaatgaagctgccgaccttagtgatgtgtccagggtttctgtcttctggcaggttcatggtcttcctcacttcaagaatgaagctgcagaccttagtgatgtttccagagtttcttccttctgtcaggttcgtggtgttgctcacttctttaatgaagctgcagaccttactgatgtgtccagagtttcttccttctggcagtttcgtggtcttcctcacttcaagaatgaagctgcagaccttactgatgtgtccagagttgcttccttctggcaggttcgtggtcttgctcacttccttaatgaagctgcagaccttactgatgtgtccagtgtttcttccttctggcaggttcatggtgttgctcacttgaagaatgaagctgcagaccttcctgatgtgcccagagtttcttccttcttgcaggttcgtgttcttgctcacttccttaatgaagctgcagaccttactgatgtttccagagtttcttccttctggcaggttcgtggtcttgctcacatctttaatgaagctgcagaccttactgatgtgtccagagtgtcttccttctggcaggttcatggtcttgctcacttcaagaatgaagctgcagaccttactggtgtgtccagggtttctgtcttctggcaggttcatcgtcttgctcacttcaagaatgaagctgccgacctttgtgatgtgtccagagtttcttccttcttggaggttcgtggtcttgttcacttccttaatgaagctgcagaccttaccggatcatggtcttgctcattgaagaatgaagctgccgaccttagtgatgtgtccagagtgtcttccttctggcagcttcatggtcttgctcacttcactaatgaagctgcagaccttactgatgtgtccagaggttcttccttctggcaggttcatggtgttgctcacttcaagaatgaagctgcagaccttagtgatgattccagagtttcttccttcttgcaggttcgtggtcttgctcacttccttaatgaagctgcagaccttactgatgtgtccagagtttcttctttctggcagtttcgtggtcttcctcacttcaagaatgaagctgcagaccttactgatatgtccagcgtttcttccttctggcaggttcatggtcttgctcatttcaagaatgaagctgcagacttttacgatgtgtccagagattcttccttctggcagtttcctggtcttcctcacttcaagaatgaagctgcagactttactgatgtgtccagggtttctgtcttctggcaggttcatggtcttgctcaattcaagaatgaagctgccgatattagtgatgtgtccagagtttcttccttcttgcatgttcgtggtcttgctcacttccttaatgaagctgcagaccttactgatgtgtccagagttacatccttctggcaggttcatggtgttgctcacttcaagaatcaagctgcagaccttactgatgtttccagagtttcttccttctggcaggttcgtggtcttgctcacttctttaatgaagctgcagaccttactgatgtgtccagagtgtcttccttctggcaggttcgtggtcttgctcacttcactaatgaagctgcagaccttactgatgtgtccagcgtttcttccttctggcaggttcatggtcttcctcacttcaagaatgaagctgcagaccttactgatgtttccagagtttcttccttctggcaggttcgtcttcttgctctcttctttaatgaagctgcagaccttactgatgtgtccagagtttcttccttctggcagtttcgtggtcttcctcacttcaagaatgaagctgcagaccttactgatgtgtccagagtgtcttccttctggcaggttcatggtcttgctcacttcactaatgaagctgcagaccttactgatgtgtccagggtttctgtcttctggcaggttcatggacttcctcacttcaagaatgaagctgccgaccttagtgatgtgtccagcgtttcttccttctggcaggttcatggtcttcctcacttcaagaatgaagctgcagaccttactgatgtttccagagtttcttccttctggcaggttcgtggtgttgctcacttctttaatgaagctacagaccttactgatgtgtccagagtttcttccttctggcagtttcgtggtcttcctcacttcaagaatgaagctgcagaccttactgatgtgtccagagtgtcttccttctggcaggttcatggtcttactcacttcaagaatgaagctgcagaccttactgatgtgtccagagtttcttccttctggcaggttcgtggtcttgctcacttccttaatgaagctgcagaccttactgatgtgtccagtgtttcttccttctggcaggttcatggtgttgctcacttcaagaatgaagctgcagaccttactgatgtgtccagagtttcttccttcttgcaggttcgtggtcttgctcacttccttaatgaagctgtagaccttaatggtgagtgttacagcacttcaaggtgttatgtccagagttttttccttcagatgtgtcctgagtgtcttccttctggcaggttcatggtcttgctcacttcactaacgaagctgcagaccttactggtacatggtcttgctcacttcaagaatgaagctgccgaacttagtgatgtgtccagagtttcttccttcttgcaggttcgtggtctggctcacttccttaatgaagctgcagaccttaatgatgtgtccagagtttcttccttcttgcaggttcgtggtcttgctcacttccttaatgaagctgcagaccttactgatgtgtccagagttgcttccttctggcaggttcgtggtcttgctcacttccttaatgaagctgcagaccttactgatgtgtccagtgtttcttccttctggcaggttcatggtgttgctcacttgaagaatgaagctgcagaccttcctgatgtttccagagtttcttccttcttgcaggttcgtggtcttgctcacttccttaatgaagctgcagaccttaatgatgtgtccagtgtttcttccttctggcaggttcatggtcttgctcacttcaagaatgaagctgcagaccttactgatgtgtccagagtttcttccttctggcagtttcgtggtcttcctcacttcaagaacgaagctgcagaccttactgatgtgtccagaatttcttcattcttggaggttcgtggtcttgctcacttccttaatgaagctgcagaccttaccgatgtgtccagagtgtcttccttctggcagcttcatggtcttgctcacttcactaatgaagctgcagaccttactgatgtgtccagagtttcttccttcttgcaggttcctggtcttgctcacttccttaatgaagctgcagaccttactgatgtgtccagagtgtcttccttctggcagattcatggtcttgttcacttcactaatgaagctgcagaccttactgatgtttccagagtttcttcattctggcactttcgtggtcttcctcacttcaagaatgaagctgcagaccttaccgatgtgtccagggtttctgtcttctggcaggttcatggtgttgctcacttcaagaatgaagctgccgaccttagtgatgtgtccagagtttcttccttctggcagtttcgtggtcttcctcacttcaagaacgaagctgcagaccttactgatgtgtccagagattcttccttctggcagtttcctggtcttcctcacttcaagaatgaagctgcagactttactgatgtgtccagggtttctgtcttctggcaggttcatggtcttgctcaattcaagaatgaagctgccgaaattagtgatgtgtccagagtttattccttcttgcaggttcgtggtcttgctcacttccttaatgaagctgcagaccttaccgatatgtccggagattcttccttctggcaggttctttgtcttgctcattgcaagaatgaaactgcagaccttagtgatgtgtccagaatgtcttccttctggcagcttcatagtcttgctcacttcactaatgaagctgcagaccttactgatgtgtccagaggttcttccttctggcaggttcatggtgttgctcacttcaaaaatgaagctgcagaccttagtgatgtgtccagagtttcttccttcttgcaggttcgtggtcttgctcacttccttaatgaagcttcagaccttactgatgtgtccagagtgtcttccttctggcaggttcatgttcttgttcacttcactaatgaagctgcaaaccttactgatgtttccagagtttcttccttcttgcaggttcgtggtcttgctcacttccttaatgaagctgcagaccttactgatgtgtccagtgtttcttccttctggcaggttcatggtcttgctcacttcaagaatgaagctgcaggccttactgatgtgtccagagtttcttctttctgggagtttcgtggtcttcctcacttcaagaatgaagctgcagaccttactgatatgtccagcgtttcttccttctggcaggttcatggtcttgctcatttcaagaatgaagctgcagacttttacgatgtgtccagagattcttccttctggcagtttcctggtcttcctcacttcaagaatgaagctgcagactttactgatgtgtccagggtttctgtcttctggcaggttcatggtcttgctcagttcaagaatgaagctgccgaaattagtgatgtgtccagagtttattccttcttgcaggttcgtggtcttgctcacttccttaatgaagctgcagaccttaccgatgtgtccagggtttgtgtcttctggcaggttcatggtcttgctcacttcaagaatgaagctgccgaccttagtgatgtgtccagggtttctgtcttctggcagtttcatggtcttgctcacttcaagaatgaagctgccgaccttagtgatgtgtccagagtttcttccttcttgcaggttcgtggtcttgctcacttccttaatgaagctgcagaccttaccgatgtgtccagtgtttcttccttctggcaggttgattgtcttgctcacttcaagaatgaagctgcagaccttactgatgtttccagagtttcttccttctggcaggttcgtgatcttgctcacttctttaatgaagctgcagaccttactgatgtttccagagtttcttctttctggcagtttcttggtcttcctcacttcaagaatgaagctgcagacattactgatgtgtccagagtttcttccttctggcagtttcgtggtcttcctcacttcaagaatgaagctgcagaccttactggtgagtgttacagcacttatagttgttatgtccagagtttgttccttcggatgtgtccagagtgtcttccttctggcaggttcatggtcttcctcacttcactaatgaagctgcagaccttactggttcatggtgttgctcacttcaagaatgaagctgcagaccttagtgttgagtgttacagcacttacaggtgttgtgtccagagtttgttccttcagatgtgtctagagtttcttccttctttcaggttcgtggtcttgctcacttccttaatgaagctgcagaccttaccggttcatggtcttgctcacttcaagaatgaagctgcagaccttactgatgtgtccagagtttcttctttctggcagtttcgtggtcttcctcacttcaagaatgaagctgcagacattactgatgtgtccagagtttcttccttctggcaggttcatggtgttgctcacttcaagaatgaagctgcagaccttactggtatttccagagtttcttccttctggcaggttcgtggtcttcctcacttctttaatgaagctgccgaccttactgatgtgtccagagtttcttccttctggcagtttcgtggtcttcctcacttcaagaatgaagctgcagaccttactgatgtgtccagagtttcttccttcttgcaggttcgtggtcttgctcacttccttaatgaagctgcagaccttaccgatgtgtccagtctttcttccttctggcaggttcatggtcttgctcacttcaagaatgaagctgcagaccttactgatgtttccagagtttcttccttctggcaggttcgtggtcttgctcacttctttaatgaagctgcagaccttactgatgtgtccagagtttcttctttctggcagtttcgtggtcttcctcacttcaagaatgaagctgcagacattactgatgcgtccagagtttcttccttctggcaggttcatggtgttgctcacttcaagaatgaagctgcagaccttactggtttttccagagtttcttccttctggcaggttcgtggtcttgctcacttctttaatgaagctgcagaccttactgatgtgtcaagagtttcttccttctggcagtttcgtggtcttcctcacttcaagaatgaagctgcagaccttactgatatgtccagagtgtcttccttctggcaggttcatggtcttgctcacttcactaatgaaggtgcagaccttactgatgtctccagagtttcttccttctggcaggttcgtggtcttgctcacttcaagaatgatgctgcagaccttagtggtgagtgtttcaacactaaaaggtgttatgtccagagtttgttccttcagaagtatccagggtttcttccttctggcaggttcatggtcttgctcactttaagaatgaagctgcagaccttactgaaacgcagttcctcaccagcaatggaacaaagctggatggagaatgactttgacgagctgagagaagaaggctacagacgatcaaattactctgagctacgggaggacattcaaaccaaaggcaaagaagttgaaaactttgaaaaaaatttagaagaatgtgtaactagaataaccaatacagagaagtgcttaaaggagctgatagagctgaaaaccaaggctcgagaactacatgaagaatgcagaagcctcaggagccgatgcgatcaactggaagaaagggtatcagcaatggaagatgaaatgaatgatatgaagcgagaagggaaggttagagaaaaaagaataaaaagaaatgagcaaagcctccaagaaatatgggactatgtgaaaagaccaaatctacgtctgattggtgtacctgaaagtgatgcggagaatggaaccaagttggaaaacactctacaggatattatccaggagaacttccccaatctagcaaagcaggccaacgttcagattcaggaaatacagagaacgccacaaagatactcctcgagaagagcaactccaagacacataattctcagattcaccaaagttgaaatgaaggaaaaaatgttaagggcagccagagagaaaggttgggttaccctcaaagggaagcccatcagactaacagcggatctctcggcagaaaccctacaagccagaagagagtggggaccaatattcaacattcttaaagaaaagaattttcaacccagaatttcatatccagccaaactaagcttcataagtgaaggagaaataaaatactttacagacaagcaaatgctgagagattttgtcaccaccaggcctgccctaaaagagctcctgaaggaagcgctaaacatggaaaggaacaaccagtaccagccgctgcaaaatcatgccaaaatgtaa

SEQ ID NO: 2186 - DNA, 4954 bp, Homo sapiens
  SIMILAR (1742)..(4540): 981254mologous to Homo sapiens putative p150,accession number U93563,Smith-Waterman Score=4809.
atgaaagagaatttcaaacacaggcacgtggtggcgttcattagcagtcaggaagctcaggaagattcaagagaggaagaagaccgactggagtctcggttttactttctttttctcttggagctgagctataagacaacaggactgaacagggagccaactgtttctttgaacagtaaatcaggaacaccaatggaccaaaatgaacacagtcactggggaccacatgcaaagggccaatgtgccagcagatctgagctgagaatcatcctggtgggcaaaacaggaactggcaaaagtgctgcagggaacagcatcctcaggaagcaagcatttgaatcgaagctgggttcccagaccttgactaagacttgcagcaaaagtcagggaagctggggaaatagagagattgtcattattgacacaccagatatgttttcttggaaggaccactgtgaagctctgtacaaagaggtgcagaggtgctacttgctgtctgcaccaggaccccatgtgctgctcctggtgactcagctgggccgctatacctcacaggaccagcaggctgcacagagggtgaaggagatctttggagaggatgccatgggacacacaattgtcctctttacccacaaggaagacctcaatggtggctccctgatggattacatgcacgactcagataacaaagccctaagcaagctggtggcagcatgtggtgggcgaatctgtgcctttaataaccgtgctgaagggagcaatcaggatgaccaagtgaaggaactaatggactgtattgaggatctgttgatggagaaaaatggtgatcactataccaatgggttgtacagcctaatacagaggtctaaatgtggacctgtgggatcagatgaaagagtaaaggaattcaaacagagccttataaagtacatggaaactcaaagaagttacacagccttggctgaagcaaactgcctaaaaggagccttaatcaaaacacaactaccaaaagtagataaaaccacaaagatagggaaaaaacagagcagaaaaactggaaactctaaaaagcagagcacctctcctcctccaaaggaacgcagttcctcaccagcaatggaacaaagctggacagagaatgactttgacgagctgagagaagaaggcttcagacgatcacattactctgagctaccggaggacattcaaaccgaaggcagagaagttgaaaactttgaaaaaagtttagaagaatgtataactagaataacccacacagagaagtgcttaaaggagctgatggagctgaaaaccaaggctcgagaactacgtgaagaatgcagaagcctcaggagccaatgcgatcaactggaagaaagggtgtcagcaatggaagatgaaatgaatgaaatgaagcgagaagggaagtttaaagaaaaaaagaataaaaagaaatgagcaaagccttcaagaaatatgggactatgtgaaaagaccaaatctacgtccgattggtgtatctgaaagtgatggggagaatggaaccaagttggaaaacactctgcaggatattatcccggagaatttccccaatctagcaaggcaggccaacgttcagattcaggaaatacagagaatgccacaaagatactcctcgagaagagcaactccaagacacataattgtcagattcaccaaagttgaaatgaaggaaaaaatgttaagggcagccagacagaaagcaccacaccacacctattccaaaattgaccacatagttggaagtaaagctctcctcagcaaatgtaaaagaacagaaattataacaaactatctctcagaccacagtgcaatcaaactagaactcaggattaagaatctcactcaaagccgctcaactacatggaaactgaacaacctgctcctgaatgactactgggtacataacgaaatgaaggcagaaataaagatgttctttgaaaccaacgagaacaaagacaccacataccagaatctctgggacacattcaaagcagtgtgtagagggaaatttatagcactaaatgcctacaagagaaagcaggaaacatccaaaattgacaccataacatcacaattaaaagaactagaaaagcaagagcaaacacattcaaaagctagcagaaggcaagaaataactaaaatcagagcagaactgaaggaaatagagacacaaaaaacccttcaaaaaatcaatgaatccaggagctggttttttgaaaggatcaacaaaattgatagaccgctagcaagactaataaagaaaaaaagagagaagaatcaaatagacacaataaaaaatgataaaggggatatcaccaccgatcccacagaaatacaaactaccatcagagaatactacaaacacctctacgcaaataaactagaaaatctagaagaaatggatacattcctcgacacatacactctcccaagactaaaccaggaagaagttgaatctctgaatagaccaataacaggctctgaaattgtggcaataatcaatagtttaccaaccaaaaagagtccaggaccagatggattcacagccgaattctaccagaggtacaaggaggaactggtaccattccttctgcaactattccaatcaatagaaaaagagggaatcctccctaactcattttatgaggccagcatcattctgataccaaagccgggcagagacacaaccaaaaaagagaattttagaccaatatccttgatgaacattgatgcaaaaatcctcaataaaatactggcaaaccgaatccagcagcacatcaaaaagcttatccaccatgatcaagtgggcttcatccctgggacgcaaggctggttcaatatacgcaaatcaataaatgtaatccagcatataaacagagccaaagacaaaaaccacatgattatctcaatagatgcagaaaaagcctttgacaaaattcaacaacccttcatgctaaaaactctcaataaattaggtattgatgggacatatttcaaaataataagagctatctatgacaaacccacagccaatatcatactgaatgggcaaaaactggaagcattccctttgaaaactggcacaagacagggatgccctctctcaccgctcctattcaacatagtgttggaagttctggccagggcaatcaggcaggagaaggaaataaagggtattcaattaggaaaagaggaagtcaaattgtccctgtttgcagacgacatgattgtttatctagaaaaccccatcgtctcagcccaaaatctccttaagctgataagcaacttcagcaaagtctcaggatacaaaatcaatgtacaaaaatcacaagcattcttatacaccaataacagacaaacagagagccaaatcatgagtgaactcccattcacaattgcttcaaagagaataaaatacctaggaatccaacttacaagggatgtgaaggacctcttcaaggagaactacaaaccactgctcaaggaaataaaagaggacacaaacaaatggaagaacattccatgctcatgggtaggaagaatcaatatcgtgaaaatggccatactgcccaaggtaatttacagattcaatgccatccccatcaagctaccaatgactttcttcacagaattggaaaaaactactttaaagttcatatggaaccaaaaaagagcctgcatctccaagtcaatcctaagccaaaagaacaaagctggaggcatcacactacctgacttcaaactatactacaaggctacagtaaccaaaacagcatggtactggtaccaaaacagagatatagatcaatggaacagaacagagccctcagaaataatgccacatatctacaactatctgatctttgacaaacctgagaaaaacaagcaatggggaaaggattccctatttaataaatggtgctgggaaaactggctagccatatgtagaaagctgaaactggatcccttccttacaccttatacaaaaatcaattcaagatggattaaagatttaaacgttagacctaaaaccataaaaaccctagaagaaaacctaggcattaccattcaggacataggcgtgggcaaggacttcatgtccaaaacaccaaaagcaatggcaacaaaagccaaaattgacaaatgggatctaattaaactaaagagcttctgcacagcaaaagaaactaccatcagagtgaacaggcaacctacaacatgggagaaaattttcacaacctactcatctgacaaagggctaatatccagaatctacaatgaactcaaacaaatttacaagaaaaaaacaaacaaccccatcaaaaagtgggcgaaggacatgaacagacacttctcaaaagaagacatttatgcagccaaaaaacacatgaagaaatgctcatcatcactggccatcagagaaatgcaaatcaaaaccactatgagatatcatctcgcaccagttagaatggcaatcattaaaaagtcaggaaacaacagcaaaatggtggaagcagatgggcctggcaatcttttcactggtgtcctccatttagaaaccaatgaaaagtcgcttaaagcagtatttgggaaatatggtcccatattggaagacaactttttggatggaaaagcaatgaaagtagaacaagttaacaaaccgtcttttcaaagtggtggtaatgtggagatcaccatcttcttggagaaacaggagcccttcaggaagtctgagacaggaaaaaaattttttaagttgttcctgctgacattagcaaacttttttaaatttagtgaccatgatgactatagtgggggccttggtagagatcattctgaacatccaaatgggagttcttacagagatgcatatcagagttatgggaccttctatggtgcaccacctgcatga

SEQ ID NO: 2187 - DNA, 1945 bp, Homo sapiens
  SIMILAR (361)..(915): 1001254mologous to Cloning vector pSacBII SacB,accession number U09128,Smith-Waterman Score=982.
  misc_feature (1)...(1945): n = a,t,c or g
atgggcaaatttgatgaaggtaaactgcccaccgacccacacctgatgctccgactggccattgaaactgttgctcatgactatgatgtcatagttattgacagcgcgcctaacctgggtatagggacgattaatgtcatatgtgctgctgatgtgctgattgttcccacgcctgctgtgttgttcgactacacctccgcactgcagttcttcgatctgctctgtgatctgctcaagaacgttgatcttaaatgggtcaccgtcgacagcgacacacttgcatcggatgcagcccggttaacgtgccggcacggcctgggtaaccagcctactgggcgctctaaagaacccccaagcccagttctgacttttacgactgcacttctggcaggaggagcgactcaagccttcgcgaaagaaaataaccaaaaagcatacaaagaaacgtacggcgtctctcatattacacgccatgatatgctgcagatccctaaacagcagcaaaacgaaaaataccaagtgcctcaattcgatcaatcaacgattaaaaatattgagtctgcaaaaggacttgatgtgtgggacagctggccgctgcaaaacgctgacggaacagtagctgaatacaacggctatcacgttgtgtttgctcttgcgggaagcccgaaagacgctgatgacacatcaatctacatgttttatcaaaaggtcggcgacaactcaatcgacagctggaaaaacgcgggccgtgtctttaaagacagcgataagttcgacgccaacgatccgatcctgaaagatcagacgcaagaatggtccggttctgcaacctttacatctgacggaaaaatccgtttattctacactgactattccggtaaacattacggcaaacaaagcctgacaacagcgcagccttgccctcacacacacttggagctgagcagtcagtatcagcagctatcaagtgcaggaggagtcacaagaagaaagatgccaactccatcttcccccaagggcaggaaggccaccaactacaagcccaagnatcccccaggcttcatacgatcaaactacactgagctacaggaggaaattcaaaccaaaggcaaagaagttaaaaactttgataaaaatttagacgaatgtgtaactagaataaccaatagagagaagtgcttaaaggagctgatggagctgaaagccaaggctcaagaactacgtgaagaatgcagaagcctcaggagccgatgcgatcaactggaagaaagggtatcagtgatggaagatgaaatgaatgaaatgaagcgagaagggaagtttagagaaaaaagaataaaaagaaatgaacaaagcctccaagaaatatgggattatgtgaaaagaccaaatctacgtctcattggtgtacctgaaagtgacgaggagaatggaaccaagttggaaaacactctgcaggatgttatccaggagaacttccccaatctagcaaggcaggccaacattcagattcaggaaatacagagaacgccacaaagatactcctttgagaagagcaactccaagacacataattgtccagattcaccaaactttgaaattgaaggaaaaaacgtttaagggcagcccagagagaaaggtcgggttacccacaaaggggaagcccatcagactaacagcagatctctgggcagaaactctacaagccagaagagagtgggggccaatattcaacattcttaaagaaaagaattttcaacccagaatttcatatccagccaaactaagcttcataagtgaaggagaaataaaatactttatagagaagcaaatgctgagagattttgtcaccaccaggcctgccctaaaagagctcctgaaggaagcgctaaacatggaaaggaacaaccggtaccagccgctgcaaaatcatgccaaaatgtaa

SEQ ID NO: 2188 - DNA, 939 bp, Homo sapiens
  SIMILAR (91)..(936): 671254mologous to Homo sapiens p40,accession number U93564,Smith-Waterman Score=936.
atggggaaaaaacagaacagaaaaactggaaactctaaaacacagagcaactctcctcctccaaaggaacgcagttcctcaccagcaacggaacgaagctggatggagaatgactttgacgagctgagagaagaaggcttcagacgatcaaattactctgagctacgggaggacattcaaaccaaatgcaaagaagttgaaaactttgaaaaaaatttagaagaatgtataactagaataaccaatacagagaagtgcttaaaggagctgatggagctgaaaaccaaggctcgagatctacatgaagaatgcagaagcgtcaggagccgatgcgatcaactggaagaaagggtatcagtgatggaagatgaaatgaatgaaatgaaaccaaatctacgtctgactggtgtacctgaaagtgatggggagaatggaaccaagttggaaaacactctgcaggatattatccaggagaacttccccaatctagcaaggcaggccaacgttcagattcaggaaatacagagaatgccacaaagatactcctcgagaagagcaactccaagacacataattgtcagattcaccaaagttgaaaaaaaggaaaaaatgttaagggcagccagagagaaaggtcgggttaccctcaaagggaagcccatcagactaacagcagatctctcggcagaaaccctacaagccagaagagagtgggggccaatattcaacattcttaaagaaaagaattttcaacccagaatttcatatccagccaaactaagcttcataagtgaaggagaaataaaatactttacagacaagcaaatgctgagagattttgtcaccagcaggcctgccctaaaagagctcctgaaggaagcactaaacatggaaaggaacaaccggaaccagccactgcaaaatcatgccaaaatgtaa

SEQ ID NO: 2189 - DNA, 2895 bp, Homo sapiens
  SIMILAR (1324)..(2121): 941254mologous to Homo sapiens p40,accession number U93564,Smith-Waterman Score=1255.
atggcactttcaccttatgcttgctcctgctatgggatatgctggctacccatcacctgtcgccttgattggaaacttcgtgaagcctctccagcaacagaagccgtcctcgtggattcctgtcagccctgcacttgcaagatccccctgagagaagaaggcttcagacgatcaaattactctgagctacaggaggacattcaaaccaaaggcaaagaagttgaaaactttgaaaaaaatttagaagaatgtatgactagaataaccaatacagagaagtgcttaaaggagctgatggagctgaaaaccaaggctcgagaactacatgaagaatgtagaagcctcaggagccgatgcgatcaactggaagaaagggtatcagcaatggaagatgaaatgaatgaaatgaagcgagaagggaagtttagagaaaaaagaataaaaagaaatgagcaaagcctccaagaaatatgggactatgtgaaaagaccaaatctacatctgatgggtgtacctgaaagtgatggggagaatggaagcaagttggaaaacacgctgcaggatattatccaggagaacttccccaatctagcaaggcttatttctggcactgcctataaccaattagaaaaagatctggctctgaaggggctacgtgttttgctcgtggaaggtaacgacccccagggaacagcctcaatgtatcacggatgggtaccagatcttcatattcatgcagaagacactctcctgcctttctatcttggggaaaaggacgatgtcacttatgcaataaagcccacttgctggccggggcttgacattattccttcctgtctggctctgcaccgtattgaaactgagttaatgggcaaatttgatgaaggtaaactgcccaccgatccacacctgatgctccgactggccattgaaactgttgctcatgactatgatgtcatagttattgacagcgcgcctaacctgggtatcggcacgattaatgtcgtatgtgctgctgatgtgctgattgttcccacgcctgctgagttgtttgactacacctccgcactgcagtttttcgatatgcttcgtgatctgctcaagaacgttgatcttaaagggttcgagcctgatgtacgtattttgcttacagaatacagcaatagtaatggctctcagtccccgtggatggaggaacaaattccggatgcctggggaagcatggttctaaaaaatgttgtacgtgaaacggatgaagttggtaaaggaatatttgctttacaattttttgatgctgacaattacttgaataggatccacgcagttgaaaactttgaaaaaaatttagaagaatgtataactagaataaccaatacagagaagtgcttaaaggagctgatggagctgaaaaccaaggctcgagaactatgtgaagaatgcagaagcctcaggagccgatgcgatcaactggaagaaagggtatcagcaatggaagatgaaatggatgaaatgaatgaaatgaagcgagaagggaagtttagagaaagaagaataaaaagaaatgagcaaagcctccaagaaatatgggactatgtgaaaagaccaaatctacgtctgattggtgtacctgaaagtgagggggagaattgaaccaagttggaaaacactctgcaggatattatccaggagaacttccccaatctagcaaggcaggccaacgttcagattcaggaaatacagagaacgccacaaagattctcctcgagaagagcaactccaagacacataattgtcagattcaccaaagttgaaatgaaggaaaaaatattaagggcagccagagagaaaggtcgggttaccctcaaaggaaagcccatcagactaacagcggatctctcggcagaaaccctacaagccagaagagagtgggggccaatattcaacattcttaaagaaaagaattttcaacccagaatttcatatccagccaaactaagcttcataagtgaaggagaaataaaatactctatagacaagcaaatgctgagagattttgtcaccaccaggcctgccctaatagaagctctgaaggaagtgctaaacatggaaaggaacaaccgatcccccagttcctcaccagcaacggaacaaagctggatggagaatgattttgacgagctgagagaagaaggcttcagacgatcaaattactctgagctacgggaggacattcaaaccaaaggcaaagaagttgaaaactttgaaaaaaatttagaagaatgtataactagaataaccaatacagagaagtgcttaaaggagctgatggagctgaaaaccaaggctcgagaactacgtgaggaatgcagaagcctcaggagccgatgcgatcaactggaagaaagggtatcagcaatggaagatgaaatgaatgaaatgaagcgagaagggaagtttagagaaaaaagaataaaaagaaatgagcaaagcctccaagaaatatgggactatgtgaaaagaccaaatctacgtctgattggtgtacctgaaagtgatgtggagaatggaaccaagttggaaaacactctgcaggatattatccaggagaacttccccaatctagcaaggcaggccaacgttcagattcaggaaatacagagaacgccacatagattctcctcgagaagagcaactccaagacacataatttctcatccagatctcatcaaacatgaaccattgttttcttcaccaagtgtccaaagggtcagtatcaatggtcaagggtccactctaaatgccctggccctgcagccacccttaagaacttttgttaacatttccactggagtatttgggaatattcgccaagagttacaaagaaaacatggctag

SEQ ID NO: 2190 - DNA, 6223 bp, Homo sapiens
  SIMILAR (3260)..(6067): 981254mologous to Homo sapiens putative p150,accession number U93563,Smith-Waterman Score=4773.
atggggaaaaaacagagcagaaaaactggaaactttaaaaagcagaggcacctttccttctccaaagggatcgcagttcttcaccagcaatggaacaaagctggacagagattgacttttgacgagttgagagaaggcttcagaccatcaaactattccaagctacagaaggaaattcaaaccaaaggcaaagaagttgaaaactttgaaaaaaattcagatgaatgtataactagaataaccaatacaaagaagtgcttaaaggagctgatggagctgaaagccaaggctcgagaactacgtgaagaatgcagaagcctcaggagccgatgtgatcaactggaagaaagggtatcagggatggaagatgaagcgaatgaaatgaagcgagaagggaagtttggagaaaaaagaataaaaagaaacgaacaaagcctccaagaaatatgggactatgtgaaaagaccaaatctacgtctgattggtgtacctgaaagtgacggagagaatggaaccaagttgaaaaacactctgcaggatattatccaggagaacttccccaatctagcaaggcaggccaacattcagattcaggaaatacagagaacgccacaaagatactcctcgagaagagcaactccaagacacataattgtcagattcaccaaagtcgaaggaaaaaatattaagggcagccagagagaaagggcggaaatacaaaccaccatcagagaatactacaaacacctctactcaaataaactagaaaatctagaagaaatggataaattcctcgacacatacaccctcccaagcctaaaccaagaagaagttgaatctctgaatagaacaataacaggatctgaaattgtggcaataattaatagcttaccaaccaaaaagagtccaggaccagatggatttacagctgaattctaccagaggtacaaggaggaagtggtaccattccttctgaaactattccaatcaatagaaaaagaggttatcctccctaactcattttatgaggccagaatcatcctgataccaaagcctggcagagacacaaccaaaaaagagaattttagaccaatatccttgatgaacattgatgcaaaaatcctcaataaaatactggcaaaccgaatccagcagcacatcaaaaagcttatccaccatgatcaagtgggcttcatccctgggatgcaaggctggttcaacatatgcaaatcaataaacataatccatcacataaacagaaccaacgacaaaaaccacacgattatctcaatagatgcagaaaaggccttcgataaaattcaacagcccttcatcctaaaaactcgcaataaactagttcattccacagataattcagctgcgcgcttcctctgtgcgaggcattgccggagagcggggagcgaattgaacgtggaacctgccagtaggggcttgccgcccaatacgaaattcaaaatatgtattggaatatttgttagtgtccccagacgaagttacattggttcaattttcggcgtgtgggagttttcgccactagcattcagcaccccagtttcaaccgttaaagctaccgactccacatacaggaaatgcatcttaaaatttggaaaaaaaatccccaaaacactgacatccaaacactttaaagctgccaaggtaggggaaacttccgcgaatttaggacagagagcaatcctgttattaaggcttgcaagtcgagagaaaggagagatggatcactttgcaggcagcagtagcagaaggacagacttggcgggttggttgtttggggcagacacccaggtgaccaagatggagttttctggaagaaagtggaggaagctgaggttggcaggtgaccagaggaatgcttcctaccctcattgccttcagttttacttgcagccaccttctgaaaacatatctttaatagaatttgaaaacttggctattgatagagttaaattgttaaaatcagttgaaaatcttggagtgagctatgtgaaaggaactgaacaataccagagtaagttggagagtgagcttcggaagctcaagttttcctacagagaaaacttagaagatgaatatgaaccacgaagaagagatcatatttctcattttattttgcggcttgcttattgccagtctgaagaacttagacgctggttcattcaacaagaaatggatctccttcgatttagatttagtattttacccaaggataaaattcaggatttcttaaaggatagccaattgcagtttgaggctctacgggaggacattcaaaccaaaggcaaagaagtggaaaactttgaaaaaaatttagaagaatgtataactagaataaccaatacagagaagtgcttaaaggagctgatggagctgaaaaccaaggctcgagaactacgtgaagaatgcagaagcctcaggagccgatgcgatcaactggaagaaaagatatcagcaatggaagatgaaatgaatgaaatgaagcgagaagggaagtttagagaaaaaagaataaaaagaaatgagcaaagcctccaagaaatatgggactatgtgaaaagaccaaatctgcgtctgattggtgtacctgaaagtgacggggagaatggaaccaagttggaaaacactctgcaggatattatccaggagaacttccccaatctagcaaggcaggccaacattcagattcaggaaatacagagaacgccacaaagatactcctcgagaagagcaactgcaagacacatagttgtcagattcaccaaagttgaaatgaaggaaacaatgttaagggcagccagagagaaaggttgggttaccctcaaagggaagcccatcagactaacagtggatctctcggcacaaactctccaagccagaagagagtgggggccaatattcaacattcttaaagaaaagaatttttcaaccgagaatttcatatccagccaaactaagcttcataagtgaaggagaaataaaatcctttacagacaagcaaatgctgagagattttgtcaacaccaggcctgccctaaaagagctcctgaaggaagtgctaaacatggaaaggaacaactggtaccagccactgcaaaatcatgccaaaatacagatcaacgagacagaaagtcaacaaggatacccaggaattgaactcagctctgcaccaagcggacctaatagacatctacagaactctccacaccaaatcaacagaatatactttttttcagcaccacaccacacctattccaaaattgaccacatagttggaagtaaagctctcctcagcaaatgtaaaagaacagaaattataacaaactatctctcagaccacagtgcaatcaaactagaactcaggattaagaatctcaatcaaagccgctcaactacatggaaactgaacaacctgctcctgaatgactactgggtacataacgaaatgaaggcagaaataaagatgttctttgaaaccaacgagaacaaagacacaacataccagaatctctgggacgcattcaaagcagtgtgtagagggaaatttatagcactaaatgcccacaagagaaagcaggaaagatccaaaattgacaccctaacatcacaattaaaagaactagaaaagcaagagcaaacacattcaaaagctagcagaaggcaagaaataactaaaatcagagcagaactgaaggaaatagagacacaaaaaacccttcaaaaaatcaatgaatccaggagctggttttttgaaaggatcaacaaaattgatagaccgctagcaagactaataaagaaaaaaagagaggagaatcaaatagacacaataaaaaatgataaaggggatatcaccaccgatcccacagaaatacaaactaccatcagagaatactacaaacacctctatgcaaataaactagaaaatctagaagaaatggataaattccttgacacatacactctcccaagactaaaccaggaagaagttgaatctctgaatagaccaataacaggagctgaaattgtggcaataatcaatagtttaccaaccaaaaagagtccaggaccagatggattcacagctgaattctaccagaggtacaaggaggaactggtaccattccttctgaaactattccaatcaatagaaaaagagggaatcctccctaactcattttatgaggccagcatcattctgataccaaagccgggcagagacacaaccaaaaaagagaattttagaccaatatccttgatgaacattgatgcaaaaatcctcaataaaatactggcaaaccgaatccagcagcacatcaaaaagcttatccaccatgatcaagtgggcttcatccctgggatgcaaggctggttcaatatacgcaaatcaataaatgtaatccagcatataaacagagccaaagacaaaaaccacatgattatctcaatagatgcagaaaaagcctttgacaaaattcaacaacccttcatgctaaaaactctcaataaattaggtattgatgggacgtatttcaaaataataagagctatctatgacaaacccacagccaatatcatactgaatgggaaaaaactggaagcattccctttgaaaactggcacaagacagggatgccctctctcactgctcctattcaacatagtgttggaagttctggccagggcaatcaggcaggagaaggaaataaagggtattcagttaggaaaagaggaagtcaaattgtccctgtttgcagacgacatgattgtttatctagaaaaccccatcgtctcagcccaaaatctccttaagctgataagcaacttcagcaaagtctcaggatacaaaatcaatgtacaaaaatcacaagcattcttatacaccaacaacagacaaacagagagccaaatcatgagtgaactcccattcacaattgcttcaaagagaataaaatacctaggaatccaacttacaagggatgtgaaggacctcttcaaggagaactacaaaccactgctcaaggaaataaaagaggatacaaacaaatggaagaacattccatgctcatgggtaggaagaatcaatatcgtgaaaatggccatactgcccaaggtaatttacagattcaatgccatccccatcaagctaccaatgactttcttcacagaattggaaaaaactactttaaagttcatatggaaccaaaaaagagcccgcatcgccaagtcaatcctaagccaaaagaacaaagctggaggcatcacactacctgacttcaaactatactacaaggctacagtaaccaaaacagcatggtactggtaccaaaacagagatatagatcaatggaacagaatagagccctcagaaataacgccgcatacctacaactatctgatctttgacaaacctgagaaaaacaagcaatggggaaaggattccctatttaataaatggtgctgggaaaactggctagccatatgtagaaaactgaaactggatcccttccttacaccttatacaaaaatcaattcaagatggattaaagatttaaacgttagacctaaaaccataaaaaccctagaagaaaacctaggcattaccattcaggacataggcgtgggcaaggacttcatgtccaaaacaccaaaagcaatggcaacaaaagccaaaattggcaaatggtacctaattaaactaaagagcttctgcacagcaaaagaaactaccatcagagtgaacaggcaacctacaacatgggagaaaattttcgcaacgtactcatctgacaaagggctaatatccagaatctacaatgaactcaaacaaatttacaagaaaaaaacaaacaaccccatcaaaaagtgggcgaaggacatgaacagacacttctcaaaagaagacatttatgcagccaaaaaatacgtgaaaaaatgctcatcatcactggccatcagagaaatgcaaatcaaaaccactatgagataccatctcacaccagttagaatggcaatcattaaaaagtcaggaaacaacagtgatctctaccttatgtctgcaggaaccagttgtttaatgggcagacactgggacagtggacaagaaacgtgtgtccaaaatgtcgtgctggacacgtgcagcccctctgaacaactcttaagagctattgctgatcttgtcccgcaaccctga

SEQ ID NO: 2191 - DNA, 4966 bp, Homo sapiens
  SIMILAR (1133)..(3361): 941254mologous to Homo sapiens putative p150,accession number U93563,Smith-Waterman Score=3675.
tttcgtaacaacagccgccaccacagcagcctgatgcccatcagcagcttccccccagcgcccccaactcgggggtggccctgccagcccttgtgcccgggctgccagggacagaggccagcgcgctgcaacacaagatcaagaactccatctgcaaaactgtacaatctaaagtggactgcattttgcaagaagttgagaagtttacagacctagagaaactctacctctaccttcagctgccttctggtctcagcaatggagagaaaagtgatcagaatgccatgtcatctagtcgggcacaacaaatgcatgccttttcctggattcggaataccctagaggaacatccggagacttcacttgccaaacaggaagtctatgatgagtacaaaccaaaagtagataaaaccacaaagatggggaaaaaacagaacagaaaaactggaaactctaaaaaccagagcgcctctcctcctccaaaggaacgcagttcctcaccagcaacggaacaaagctggatggagaatgtctttgaggagcagagagaagaaggcttcagacgatcaaattactctgagctacgggaggacattcaaaccaaaggcaaagaagttgaaaactttgaaaaacatttagaagaatgtataactagaataaccaatacagagaagtgcttaaaggagctgatggagctgaaaaccaaggttcgagagctacgtgaagaatgcagaagcctcaggagccgatgcgatcaactggaagaaagagtatcagcgatggatgatgaaatgaatgaaatgaagcgagaagggaattttagagaaaaaagaataaaaagaaatgagcaaagcctccaagaaatatggggactatgtgaaaaagaccaaatctacgtctgattggtgtacctgaaagtgatggggagaatggaaccaagttggaaaacactctgcaggatattatccaggagaacttccccaatctagcaaggcaggccaacattcagattcaggaaatacagagaacgccacaaagatactcctcgagaagagcaactccaaggcacataattgtcagattcagcaaagttgaaatgaaggaaaaaatgttaagggcagccagagagaaagaaatacaaactaacatcagagaatactacaaacaccgctacgcaaataaactagaaaatctagaagaaatggataaattcctcaacatatacacccttcgaagactaaaccaggaagaagttgaatctctgaacagaccaataagaggctctgaaattgtggcaataatcaatagtttaccaaccaaaaagagtccaggaccagatggattcacagccgaatactaccagaggtataaggaggaactggtaccattccttctgaaactattccaatcaatagaaaaagagggaatcctccctaactcattttatgaggccagcatcatcctgataccaaagccgggcagagacacaaccaaaaaagagaattttagaacaatatccttgatgaacattgatgcaaaaatcctcaataaaatactggcaaaccgaatccagcagcacatcaaaaagcttatccaccatgatcaagtgggcttcatccctgggatgcaaggctggttcaatatacgcaaatcaataaatgtaatccagcatataaacagaaccaaagacaaaaaccacgtgattatctcaatagatgcagaaaaggcctttgacaaaattcaacaactcttcttgctaaaaactctcaataaattaggtattgatgggacatatctcaaaataaaaagagctatctatgacaaacccacagccaatatcatactgaatgggcaaaaactggaagcattccctttgaaaactggcacaagacagggatgccctctctcaccactcctattcaacatagtgttggaagttctggccagggcaattaggcaggagaaggaaataaagggtattcaattaggaaaagaggaagtcaaattgtccctgtttgcagatgacatgattgtatatctagaaaaccccattgtctcagcccaaaatctccttaagctgataagcaacttcagcaaagtctcaggatacaaaatcaatgtacaaaaatcacaagcattcttatacaccaataacagacaaacagaaacccaaatcatgagtgaactcccattcacaattgcttcaaagagaataaaatacctaggaatccaacttacaagggacgtgaaggacctcttcaaggagaactacaaaccactgctcaatgaaataaaagaggatacaaagaaatggaagaatattccatgctcatgggtaggaagaatcaatatcatgaaaatggccatactgcacaaggtaatttatagattcaatgccatccccatcaagctaccaatgactttcttcacagaattggaaaaaactactttaaagttcacatggaaccaaaaaagagcccgcattgccaagtcaatcctaagccaaaagaacaaagctggaggcatcatgctacctgacttcaaactatactacaaggctacagtaaccaaaacagcatggtactggtaccaaaacagagatatagatcaatggaacagaacagagccctcagaaataacgccgcatatctacaactatctgatctttgacaaacctgagaaaaacaagcaatggggaaaggattccctattcaataaatggtgctgggaaaactggctagccatatggagaaagctgaaactggatcccttctttacaccttatacaaaaattaattcaagatggattaaagacttaaacgttagacctaaaaccataaaaaccctagaagaaaacctaggcattaccattcaggacataggtatgggcaaggacttcatgtctaaaacaccaaaagcaatagcaacaaaagccaaaattgacaaattggatctaattaaactaaagagcttctgcacagcaaaagaaactaccatcagagtgaacaggcaacctacagaatgggagaaaattttcgcaacctactcatctgacaaagggctaatatccagaatctacaatgaactcaaacaaatttacaagaaaaaaacaaacaaccccatcaaaaagtgggcaaaggacatgaacagacacttctcaaaagaagacatttatgcagccaaaaaacacatgaaaaaatgctcaccatcactggctatcagagaaatgcaaatcaaaaacacaatgagataccatctcacaccacttagaatggcaatcattaaaaagtcaggaaacaacagatgctggagaggatgtggagaaataggaacacttttacaccattggaattgtcgtgtgaaaatgacgcaacaaatgcaaaatttacatctctgtcagtcaaaaaaacatagtgctccctcatctcccaacgcagccaaacgcctgtacaggaacctctctgagaaactgaaagggagccactcttccttcgatgaggcctattttaggacaagaactgatcggctgagtctcaggaagacctcggtgaatttccagggcaatgaagccatgtttgaggcagtcgaacagcaggacatggatgctgtgcagatcctcctgtatcagtacacaccagaagaacttgacctcaacacacctaacagcgagggcttgacacccctggatattgccatcatgaccaacaatgtgcccattgcaaggattcttctgaggacaggggcccgagaaagtccacactttgtcagcctggaaagccgagcaatgcacctcaacacactggtccaggaagcccaggagagggtgagtgaactgtctgcccaggtggagaatgaaggattcactctggacaacacagagaaagagaagcagctgaaagcttgggagtggaggtatcggctctacagacgcatgaaaacaggctttgagcatgccagagcccctgagatgccaaccaatgtctgtctcatggtaaccagcagcacatcactcactgtcagcttccaagagcctcttagcgtcaatgcagctgtagtaaccaggtataaagaacgcagttcctcaccagcaacggaacaaagctggacagagaatgactttgatgagttgagagaagaaggcatcagacgatcaaactactccgagctacaggaggcaattcaaaccaaaggcaaacaagttgaaaactttgaaaaaaatttagatgaatgtataactagaataaccaatacagggaattgcttaaaggagctgatggagctgaaagccaaggctcgagaactacgtgaagaatgcagaagcctcaggagccgatgcaatcaactggaagaaagggtatcagtgatagaagatgaaatgaatgaaatgaagcgagaagggaagtttagagaaaaaagaataaaaagaaacgaacaaagcctccaagaaatatgggactatgtgaaaagaccaaatctacgtctgattggtgtacctgaatgtgacggggagaatggaaccaagttggaaaacactctgcaggatattatccaggagaacttccccaatctagcaaggcaggccaacattcagattcaggaaatacagagaacgccacaaagatactcctcgagaagagcaactccaagacacataattgtcagattcaccaaagttgaaatgaaggaaaaaatgttaagggcagccagagagaaagggtttattgagaatatgtttttcgtctcagccaatccctgggtgagtttcaccagttttgatttaaacgtggccaatatggacaacttcttcgcccccgttttcaccatgggcaaatattatacgcaaggcgacaaggtgctgatgccgctggcgattcaggttcatcatgccgtttgtgatggcttccatgtcggcagaatgcttaatgaattacaacagtactgcgatgagtggcagggcggggcgtaa

SEQ ID NO: 2192 - DNA, 9479 bp, Homo sapiens
  SIMILAR (6770)..(8026): 941254mologous to Homo sapiens putative p150,accession number U93569,Smith-Waterman Score=2039.
  misc_feature (1)...(9479): n = a,t,c or g
ttacattttggcatgattttgcagcggctggtactggttgttcctttccatgtttagtgcttccttcaggagctcttttagggcaggcctagtggtgacaaaatctctcagcatttgcttgtctgtaaagtattttatttctccttcacttatgaagcttagtttggctggatatgaaattctggtttgaaaattcttttctttaagaatgttgaatattggcccccactctcttctggcttgtagggtttctgccaagagatccgctgttagtgtgatgggcttccctttgagggtaacccgacctttctctctggctgcccttaacattttttccttcatttcaactttggtgaatctgacaattatgtgtcttggagttgctcttttcgaggagtatctttgtggtattctctgtatttcctgaatctgaacgttggcctgccttgctagattggggaagttctcctggataatatcctgcagagtgttttccaacttgtttccattctccccatcacttttaggtacaccaatcagacgtagatttggtcttttcacatagtcccatgtttcttggaggctttgctcatttctttttattcttttttctctaaactttccttctcgcttcatttcattcatttcgtcttccattactgataccctttcttccagttgatcacattggctcctgaggcttctgcattcttcacgtagttcttgagccttgattttcagctccatcagctcctttaagcacttctctgtattgtttattctagttatatattcttctaaatttttttcaaagttttcaacttctttgcctttggtttgaatgtcctcccgtaactcagagtcatttgatcgtctgaagccttcttctctcagctcgtcaaagtcattctccatccagctttgttccattgctggtgaggaactgcgttcctcagatggaaatgcagaaatcacccgtcttctgcgtcgctcacgctgggagctgtagaccggagctgttcctattcggccatcttggctcctccgactggcagcattttgcacctgctctagagacctgtggaactttgaaataatatggtttgtctctgtgtccccaccaaaatctcctctcgaattgtaatcctcaggtgtcaagggaggaaccatctctgtgtagtgaggaaaacttatgtaaaactggaacgggtgaaggggtgaaactaggaaggtttcatagctgttagaagagggggagcaggattgggtgggtaaagccttcagctgtgaggcctgttgacattttttgatggggttgtttgtttttttcttgtaaatttgtttgagttcattgtagattctggatattagccctttgtcagatgagtagcttgtgaaaattttctcccattttgtaggttgcctgttcattctgatggtagtttcttttgctgtgcagaagctctttagtttaattagatcccatttgtcaattgtgtcttttgttgccattgcttttggtgttttggacatgaagtccttgcccatgcctaggtcctgaatggtgatgcctaggttttcttctagggtttttatggttttaggtctaacgtttaagtctttaatccatcttgaattgatttttgtataaggtgtaaggaagggatccagtttcagctttctacatatggctagccagttttcccagcaccatttattaaatagggaatcctttccccattgcttgtttttctcaggtttgtcaaagatcagatagctgtagatatgcggcattatttctgagggctctgttctgttccattgatctatatctctgttttggtaccagtaccatgctgttttggttactgtagccttgtagtatagtttgaagtcaggtagtgtgatgcctccagctttgttcttttggcttaggattgacttggcgatgcgggctcttttttggttccatatgaactttaaagtagttttttccaattctgtgaagaaaggcattggtagcttgatggggatggcattgaatctgtaaattaccttgggcagtatggccattttcacgatattgattcttcctacccatgagcatggaatattcttccatttgtttgtatcctcttttatttccttgagcagtggtttgtagttctgcttgaagaggtccttcacatcccttgtaagttggattcctaggtattttattctctttgaagcaattgtgaatgggagttcactcatgatttggctctctgtttgtctgttgttggtgtataagaatgcttgtgatttttgtacattgattttgtatcctgagactttgctgaagttgcttatcagcttaaggagattttgggctgagacaatggggttttctagatatacaatcattttgtctgcaaacagggacaatttcgcttcctcttttcctaattgaatactctttatttccttctcctgcctaattgccctggccagaacttccaacactatgttgaataggagtggtgagagagggcatccctgtcttgtgccagttttcaaagggaatgcttccagtttttgcccattcagtatgatattggctgtgggttggtcatagatagctcttattattttgaaatacgtcccatcaatacctaatttattgagagtttttagcatgaagggttgttgaattttgtcaaaggctttttctgcatctattgagataatcatgtggtttttgtctttggctcccagtattttattgaggatttttgcatcaatgttcatcaaggatattggtctaaaattctctggtcctggactctttttggttggtaaactattgattattgccacaacttcagctcctgttattggtctattcagagattcaacttcttcctggtttagtcttgggagggtgtatgtgtcgaggaatttatccatttcttctagattttctagtttatttgcgtagaggtgtttgtagtattctctgatgctagtttgtatttctgtgggatcagtggtgatatcccctttatcattttttatcgtgtctatttgattcttctctctttttttctttattagtcttgctagcggtctatcaattttgttgatcctttcaaaaaaccagctcctggattcattgattttttgaagggttttttgtgtctctatttccttcagttctgctctgattttagttatttcttgcctcctgctagcttttgaatgtgtttgctcttgcttttctagttcttttaattgtgatgctagggtgtcaattttggatctttcctgctttctcttgtgggcatttagtgctataaatttccctctacacactgctttgaatgtgtcccagagattctggtatgttgtgtctttgttctcgttggtttcaaagaacatctttatttctgccttcatttcgttatgtacccagtagtcattcaggggcaggttgttcagtttccatgtagttgagcggctttgagtgggattcttaatcctgagttctagtttgattgcactgtggtctgagagatagtttgttataatttctgttattttacatttgctgaggagagctttacttccaactatgtggtcaattttggaataggtgtggtgtggtgctgaaaaaaatgtatattctgttgatttcgggtggagagttctgtagatgtctattaggtctgcttggtgcagagctgagttcaattcctgggtatccttgttgactttctgtctcgttgatctgtctaatgttgacagtggggtgttaaagtctcccattattaatgtgtgggagtctaagtctctttgtaggtcactcaggacttgctttatgaatctgggtgctcctgtattgggtgcatatatatttaggatagttagttcttcttgttgaattgatccctttaccattatgtaatggccttctttgtctcttttgatcgttgttggtttaaagtctgttttatcagagactaggattgcaacccctgcctttttttgttttccatttgcttggtagatcttcctccatccttttattttgagcctatgtgtgtctctgcacatgagatgggtttcctgaatacagcacactgatgggtcttgactctttatccaacttgccagtctgtgtcttttaattggagaatttagtccatttacatttaaagttaatattgttatgtgtgaatttgatcctgtcattatgatgttagctggtgattttgctcgttagttgatgcagtttcttcctagtctcgatggtctttacattttggcatgattttgcagtggctggtaccggttgttcctttccatgtttagcgcttccttcaggagctcttttagggcaggcctgctggtgacaaaatcggtcagcatttgcttgtctgtaaagtattttatttctccttcacttatgaagcttagtttggctggatatgaaattctgggttgaaaattcttttctttaagaatgttcaatattggcccccactctcttctggcttgtagggtttctgccgagagatccgctgttagtctgatgggcttccctttgagggtaactcgacctttctctctggctgcccttaacattttttccttcatttcaactttggtgaatctgacaattatgtgtcttggagttgctcttctcgaggagtatctttgtggcgttctctgtatttcctgaatctgaacgttggcctgccttgctagattggggaaagtctcctggataatatcctgcagagtgttttccaacttggttccattctccgcatcactttcaggtacaccaatcagacgtagatttggtcttttcacatagtcccatatttcttggaggctttgctcgtttctttttattcttttttctctaaacttcccttcttgcttcatttcattcatttcatcttccattgctgataccctttcttccagttgatcgcattggctcctgaggcttctgcattcttcacgtagttctcgagccttggttttcagctccatcagctcctttaagcacttctctgtattggttattctagttatacattcttctaaattttttttcaaagttttcaaattctttgcctttggtttgaatgtcctcccgtagctcggagtaatttgatcatctcaagccttcttctctcagctcgtcaaagtcattctccatccagctttgttccgttgctggtgaggaactgcgttcctttggaggaggagaggcgctctgctttttagagtttccagtttttctgctctgtttttttccccatctttgtggttttatctacttttggtctttgatgatggcaatgtacagatgggtttttggtgtggatgtcctttctgtttgttagttttccttctaacagacgggaccctcagctgcaggtttgttggagtaccctgccgtgtgtgaggtgtcagtgtgcccctgctggggggtgcctcccagttaggctgctcagggggtcaggggtcagggacccacttgaggaggcagtctgcccgttctcagatctccagctgcgtgctgggagaaccactgctctcttcaaagctgtcagacagggacatttaagtctgcagaggttactgctgtctttttgtttgtctgtgccctgcccccagaggtggagcctacagaggcaggcaggcctccttgagctgtggtgggctgcacccagttcgagcttccccggctgctttgtttacctaagcaagcctgggcaatggcgggcgcccctcccccagccttgctgcggccttgcagtttgatctcagaccgctgtgctagcaatcagcgagattccgtgggcgtaggaccctccgaaggccaggtgtgggatatagtctcgtggtgcgccgttttttaagccggtctgaaaagcgcaatattcgggtgggagtgacccgattttccagatggaaatgcagaaatcacccgtcttctgcgtcgctcacgctgggagctgtagaccggagctgttcctattcggccatcttggcaaagatggggaaaaaacagaacagaaaaacgggaaacttctaaaaatcagagcgcctctcctcctccaaaggaatgcagcttcctcaccagcaatggaacaaagctggacggagaatgactttgaagagctgagagaagaaggcttcagacgatcaaattacttctgagctacgggaggacattcaaaccaaaggcaaagaagtcaaaaactttgaaaaaaatatagaagaatgtacaactataataaccaatacagagaggtgcttaaaggagctgatggagctgaaaaccaaggctcgagaactacgtgaagaatgcagaagcctcaggagccgatgtgatcaactggaagaaagggtatcagcaatggaagatgaaatgaatgaaatgaagggagaaggaaagtttagagaaaaaagaataaaaagaaatgaacaaagcctccaagaaacatgggactatgtgaaaagaccaaatctacgtctgattgatgtacctgaaagtgacggggagaatggaaccaagctggaaaacactgtgcaggatattatccaggagaacttccccaatctagcaaggcaggccaacattcacattcaggaaatacagagaacgtcacaaagatactcctcaagaagagcaactccaagacatataattgtcagattcaccaaagttgaaatgaaggaaaaaatgttaagggcagccagagagaaagacagatcaacgagacagaaagttaacaaggatacccaggaattcaactcagctctgcaccaagtggacctaatagacatctacagaattctccaccccaaatcaacagaatatacatttttttcagcaccacaccacacctattccaaaattgaccacatagttcgaagtaaagctctcctcagcacatgtaaaagaacagaaattataacaaactatctctcagaccacagtgcaatcaaactagaactcagtattaagaaactcactcaaaaccactcaactacatggaaactgaacaacctgctcctgaatgactactgggtacataacgaaatgaaggcagaaataaagatgttctttgaaaccaacgagaacaaagacacaacataccagaatctctggaacacattcaaagcagtgtgtagacggaaatttatagcactaaatgcccacaagagaaagcaggaaagatccaaaattgacatcctaacatcacaattaaaagaattagaaaagcaagagcaaacacattcaaaagctagcagaaggcaagaaataactaaaatcagagcagaactgaaggaaatagagacacaaaaaacccttcaaaaaattaatgaatccaggagcttgttttttgaaaggatcaacaaaattgatagaccgctagcaagactaataaagaagaaaagagagaagaatcaaatagacgcaataaaaaatgataaaggggatatcaccaccaatcccacagaaatacaaactaccatcagagaatactacaaacacctctacacaagtaaactagaaaatctagaagaaatggataaattcctcgacacatacaccctcccaagactaaaccaggaagaagttgaatctctgaatagaccaataacaggctctgaaattgtggcaataatcaatagcttaccaaccaaaaagagtccaggaccagatggattcacagctgaattctaccagaggtacaaggaggagctggtaccattccttctgaaactattccaatcaatagaaaaagagggaatcctccctaactcattttatgaggccagcatcatcctgataccaaagccaggcagagacacaaccaaaaaaaagaattttagaccaatatccttgatgaacattgatgcaaaaatcctcaataaaatactggcaaaccgaatccagcagcacatcaaaaaccttatccaccatgatcaagtgggcttcatccctgggatgcaagggctggttcaatatacgcaaatcaataaatgtaatccagcatataaacagaaccaaagacaaaaaccacatgattatctcaatagatgcagaaaaggcctttgacaaaattcaacaacccttcatgctaaaatctctcaataaattaggtattgatgggacgtatctcaaaataataagagctatctatgacaaacccacagccaatatcatgctgaatgggcaaaaactggaagcattccctttgaaaaccggcacaagacagggatgccctctctcaccgctcctattcaacatagtgttggaagttctggccagggcaatcaggcaggagaaggaaataaaggctattcaattaggaaaagaggaagtcaaattgtccctgtttgcagacgacatgattgtttatctagaaaaccccatcgtctcagcccaaaatctccttaagctgataagcaacttcagcnaactctcaggatacaaaatcaatgtacaaaaatcacaagcattcttatacaccaacaacagacaaacagagagccaaatcatgggtgaactcccattcacaattgcttcaaagagaataaaatacctaggaatccaacttacaagggatgtgaaggacctcttcaaggagaactacaaaccactgctcaaggaaataaaagaggagacaaacaaatggaagaacattccatgctcatgggtaggaagaatcaatatcgtgaaaatggccatactgcccaaggtaatttacagattcaatgccatccccatcaagctaccaatgactttcttcacagaattggaaaaaactactttaaagttcatatggaaccaaaaaagagcccgcattgccaagtcaatcctaagccaaaagaacaaagctggaggcatcacactacctgacttcaaactatactacaaggctacagtaaccaaaacagcatgtgggtaccagaagcagggagcagacacctcggagcctgcaggggcagtgaggggaaaccttccgaacttcccaagcccccaagagtgcagagatgccaggtccacagccatggcttggctggctgcagctgtgcctaagaagggaaagactcacattctcttgcctaatagtacaaggctagcctcagacattctgggagctggactggagaagcgatgttggggattcaccattcaatatgaactttgtgttcagtacagtctctctccttctttgtgtctggtgtctcagtgtcagactgctgttgtccaagcccccaagcaccgtggacatgttcagtggtgtctgatcccatcggcacagagcttggcttctcaggaggctcctcagagtcgcgtaaatagggtttccgatgcccggcctcaccagcttacagacgtgtctgaatctccttttcactcaggccacacttatattcactcttccctcctgaacattcgttag

SEQ ID NO: 2193 - DNA, 4903 bp, Homo sapiens
  SIMILAR (2147)..(4732): 951254mologous to Homo sapiens putative p150,accession number U93563,Smith-Waterman Score=4223.
atggctttatacacagaagagcctaaaaacaaaaaggaaggagaaatatcgcctgccttatcacctccttttccctcagtcctactattaccgggccaaaataacaaagaggaaatggagagttttcctgacctccctcttactataagtagaaaaaaaggcaagaaacatacttcagctatgggaccttgtcttaaacaagcggcattagaaggggagcttttagcatatctggtaatgcaagaccaacatggtcatcaagcacatgaacctgtttcctttcactcttacgaagaactaagaaaaagcattaaagaaaacagagccactagaccatctgcaaaaagaatgattgaggccttagcagaccacttctgtatggcccaatgggactggtcaatgctgcctaaagcaactctggagactagcccatacctcctctggacggtagaatatgatgaactgtgcgaacaacaagacaaccagaatcaggcagccaggcaaaatacaactgttgataagctccaggggaggtattctcatgctgatgtacaacaacaactaaattttgagccccaggcctatgctcaaagcagcctctactgggagtgcaggactcgatttactctgcccggacaaattagtgctaaaagagggagaagccctaaaagggttgcaactgggatctgtggcctgctgcctccaggaacagcaggattagtcctggggcagtctagcctatccagtaaaggaattaatgtgctccctgggttaattgacagcgattaccaaggtccctcagctgcagggctgttggcatttgctggaggtctatgccagaccctgtttgcctgggtatcagcagcagaggctgcagaacagcggatactgcatgtatgtttgaacaatatgaaatctaggcaccttgaaaaagaacaggataacagcaattttcagggaacaagggagataaccattggatctgactgcctgggagctgggcaggaaagatccatacttctcttactgccggaaacgggatctctccaggctagagaaaatctggcctgcattccaggtcctgggaggtgcagtgggactatgcggctgagctacaggaaatcttggcaaccagttccttctcagcttgacggtccccttttgaggagtctagaggtaccaacctatgagcttattgatggagactcaatggattttgatttttctgtccttcaccaggacagggccagcagtgtttccactgcagaacgtggtggggaatgcagttccctcaagagccaacggaacaaagcctggatggagaatcactttgactttgacgagctgagagcagaaggcttcaaacgatcaaaattactctgagcctacggggggacattcaaacccaagggccaaggaagtttgaaaactttggaaaaaaattttagcaagaatgtataactaggattacccattaccagggaagtgcttaaaggagcagctgatggagcttgaaagccaaggcctcgagaacttcgtgaagacatgcagaagccctcaggatgccgatgcgatcaacttggaagaaagggtattcagcaatggaagatgaaatgaatgaaatgaagccgagaaggaaagtttagagaaaaaaagaataaaaagaaatgagcaaagccttgaaggaattatgggactatgtggaaaagaccaaaatctacgtctgattgggtgtacctgaaagtgatgagtgatggggagaatggaaccaagttggaaaacactcctgcaggatattattccaggagaacttccgccaatcttagcaagggcaggcccaacggttcagattcaggaaatacagagaacgccacaaagatactcctcgaggaagagcaactccaaggacacattaattgtcagattcaccaaagttggaaatggaagggaaaaaatgtttaaggggcagccagagagagaaaggtctggttacccctcaaaggggaagcccatcacacttaacagcgggatctctcggcagaaaaccttcagcccagaagagagtgggggccaaatattcaacattcttaaagaaaagaattttcaacccagaatttcatatctagccaaactaagcttcataagtgaaggagaaataaataagatcctttacagacaagcaaatgccgagagatttttgtcaccactaggccctgccctaaaagagctcctgaaggaagcgctaaacatggaaaggaacaaccggagaaagcaggaaagatccaaaattgacaccctaacatcacaattaaaagaactagaaaagcaagagcaaacacattcaaaagctagcagaaggcaagaaataactaaaatcagagcagaactgaaggaaatagagacacaaaaaacccttcaaaaaatcaatgaatccaggagctggttttttgaaaggatcaacaaaattgatagaccgctagcaagactaataaagaaaaaaagagagaagaatcaaatagacacaataaaaaatgataaaggggatatcaccactgatcccacagaaatacaaactaccatcagagaatactacaaacacctctacgcaaataaactagaaaatctagaagaaatggatacattcctcgacacatacactctcccaagactaaaccaggaagaagttgaatctctgaatagaccaataacaggctctgaaattgtggcaataatcaatagtttaccaaccaaaaagagtccaggaccagatggattcacagccgaattctaccagaggtacaaggaggaactggtaccattccttctgaaactattccaatcaatagaaaaagagggaatcctccctaactcattttatgaggccagcatcattctgataccaaagccgggcagagacacaaccaaaaaagagaattttagaccaatatccttgatgaacattgatgcaaaaatcctcaataaaatactggcaaaccgaatccagcagcacatcaaaaagcttatccaccatgatcaagtgggcttcatccctgggatgcaaggctggttcaatatacgcaaatcaataaatgtaatccagcatataaacagagccaaagacaaaaaccacatgattatctcaatagatgcagaaaaagcctttgacaaaattcaacaacccttcatgctaaaaactctcaataaattaggtattgatgggaagtatttcaaaataataagagctatctatgacaaacccacagccaatatcatactgaatgggcaaaaactggaagcattccctttgaaaactggcacaagacagggatgccctctctcaccgctcctattcaacatagtgttggaagttctggccagggcaatcaagcaggagaaggaaataaagggtattcagttaggaaaagaggaagtcaaattgtccgtgtttgcagacgacatgattgtttatctagaaaaccccatcgtctcagcccaaaatctccttaagctgataagcaacttcagcaaagtctcaggatacaaaatcaatgtacaaaaatcacaagcattcttatacaccaacaaccgacaaacagagagccaaatcatgagtgaactcccattcacaattgcttcaaagagaataaaatacctaggaatccaacttacaagggatgtgaaggacctcttcaaggagaactacaaaccactgctcaaggaaataaaagaggacacaaacaaatggaagaacattccatgctcatgggtaggaagaatcaatatcgtgaaaatggccatactgcccaaggtaatttacagattcaatgccatccccatcaagctaccaatgactttcttcacagaattggaaaaaactactttaaagttcatatggaaccaaaaaagagcccgcatcgccaagtcaatcctaagccaaaagaacaaagctggaggcatcacactacctgacttcaaactatactacaaggctacagtaaccaaaacagcatggtactggtaccaaaacagagatatagatcaatggaacagaacagagccctcagaaataatgccgcatatctacaactatctgatctttgacaaacctgagaaaaacaagcaatggggaaaggattccctatttaataaatggtgctgggaaaactggctagccatatgtagaaagctgaaactggatcccttccttacaccttatacaaaaatcaattcaagatggattaaagatttaaacgttagacttaaaaccataaaaaccctagaagaaaacctaggcattaccattcaggacataggcgtaggcaaggacttcatgtccaaaacaccaaaagcaatggcaacaaaagccaaaattgacaaatgggatctaattaaactaaagagcttctgcacagcaaaagaaactaccatcagagtgaacaggcaacctacaacatgggagaaaattttcgcaacctactcatctgacaaagggctaatatccagaatctacaatgaactcaaacaaatttacaagaaaaaaacaaacaaccccatcaaaaagtgggcaaaggacatgaacagacacttctcaaaagaagacatttatgcagccaaaaaacacatgaagaaatgctcatcatcactggccatcagagaaatgcaaatcaaaaccactatgagatatcatctcacaccagttagaatggcaatcattaaaaagtcaggaaacaacagcagccagatgccactgactagctcagataacactgctgtcaactgtaaaaaattaagatccaaaccagatgaaattgccaaagagtcagaagctcctccaggcttagccagctttcacctttgctcatcatacatctatggggctcctcttaactcacagatgggctag

SEQ ID NO: 2194 - DNA, 516 bp, Homo sapiens
  SIMILAR (421)..(269): 391254mologous to Mus musculus acetyl-CoA carboxylase 280,accession number AF290178,Smith-Waterman Score=74.
ttacagccgtgagccactgcgccctgccaaaagagggctttagggcaccccagaacgcgagatccccctcatctgtaatctttaaagaggaggaagtgtactccaaatcaagcgatagtccattcgtccttggcacggtgactgccgggaggccaggaccaaatgtgtctccttccggcttttgcaccacactaactaaccggcgccaggccgcagagccgccctggccttcggcgagaactcaggcgagcgcggcgcacgctgctccggagtcccaccgcggaagttgaggccgcggattccgagggcggggtggagaggaatctggaaggacctggacccggtggaacgcactgcgcggacggcgcctgcgtccgcactcagctgttcagccctctttcttcaggctctcccctgaaagccgtccccatgccggtctcttttttctgccttcttgtttccctccggcgagtcagcgcgactgtgaatttccgtttccggcggtgtccatgctga

SEQ ID NO: 2195 - DNA, 428 bp, Homo sapiens
  SIMILAR (117)..(88): 601254mologous to Homo sapiens Human normal bladder tissue EST encoded protein 211,accession number Y60539,Smith-Waterman Score=40.
ctttgactttgaaagccgatctgagattgcaaacctcatcttggctgagaactgcgaggctgccctggctcttcatctctataggggaggcaggcttttgcaaggccaccgaatcccttttggagtcatctttggtggaactgatgtaaatgaagatgccaaccaggcggaaaaaaacacagtcatgggcagagttcttgaggaagccagatttgctgtcgctttcacagagtcaatgaaggaaatggcacaagcgcagtgggttcgatccagtgtttacaagggaagttgaaagccaaagtgaaaagagcccgctggggtaccgattgattggagagatgcctcaagaagatctgcacgcggtggtgaagaattgcttcgcggtggtgaatagctctgtctctgaaggcatgtcagctgcaattttg

SEQ ID NO: 2196 - DNA, 811 bp, Homo sapiens
  SIMILAR (734)..(805): 361254mologous to Rattus norvegicus metallothionein- III,accession number X89603,Smith-Waterman Score=42.
atgggggtacagttcagctcagtcactgatgaggcaaagattgagattttgaaggggctgtatctggccttgtcacaggatgtaaatacactgaaaagtaaaattgcaaaggttgcaaaagatgcaggatttgctgaaattggtgaaatcgatgttggagaattacttggaccacaggcaccaggccctcctgggacagctgacacctcttctgtcaggagcgaggaggacactgatggccagaggcagcctggactctgggaccagacgtcacctttgatgtgtcctcctcagtgtgctccggctgagttacagttctcattttcagcggaaaggggtatccctgatccagagcagaggtcacaggctggcagcaaatctccccacgaatgtgtaagcagctcccctgactgcaccattgaaactgtgctcaaggtcactaaggacctccatgttggccaccgaatcccttttggagtcatctttggtggaactgatgtaaatgaagatgccaaccaggcggaaaaaaacacagtcatgggcagagttcttgaggaagccagatttgctgtcgctttcacagagtcaatgaaggaaatggcacaagcgcagtggagattaaccaaagtgctgataatttgcacatatttcttctgatatgtggacttcgacaagttaaggatcctctctatctggtggacgcattttcagcctggcatcaggaggagcccaatgtgcacctggtgattgtgggtcctgaagtcgatccagtgtttacaagggaagtgaaagccaaagtgaaaagagccgc

SEQ ID NO: 2197 - DNA, 1011 bp, Homo sapiens
  SIMILAR (731)..(660): 331254mologous to Arabidopsis thaliana F24O1.6,accession number AC003113,Smith-Waterman Score=40.
atgaggaacactgtctttgtgtcacctcatagtagtaccaccttacaacttactaattattaccgaaaggtaattacatttaggcatgctcagtccctggctgcgctgcaggcttactctcactggttagcacagtattgcagtgaagttcaccggcagaacacgcagcagttcgtgacactcatctctactaccatggatgcaatcacacctctaatcagcaccaaggtccaagacaagctgctgctatctgcgtgccacttactggtctcactggccaccaccgtgcggcccgtctttctgatcagcatccctgcagtgcagaaagtattcaacagaatcactgatgcctctgccctgcgacttgtcgataaggcccaggtgttggtgtgccgagccctctctaacatcttgctgcttccgtggccaaaccttccagagaatgagcagcagtggcccgtgcgctccatcaaccacgccagcctcatctctgcactctcccgggactatcgcaacctgaagcccagtgctgttgccccacagagaaagatgccactggatgacaactcaggtggcctaagtgcctgccagcccctctgggccacgcagggaacagcacacgggcagtggctcagaggctatgtgccaatgcggccggccggctgtgggtcgtacacagcagatctacccatcttccatggcacctctggtggtggagactgttttgtgggatcaatgaccctccttgaatgtgaaaacaggaccatccgccggtccctccgagctcctccaaagccttctgctgttgcagaaacgtcacttgctattccatctggactaggctgcgtttctgttcctcccaactgtcctccctttttcttctttctgtttcaagaaagccccttctgcaagctctgggtggaggcagtgagggtgggggccctgggctgggatcccggcactgtgccctactccctaagtgacccagtgcaagtcatctcagtgtcctaa

SEQ ID NO: 2198 - DNA, 1303 bp, Homo sapiens
  SIMILAR (7)..(75): 391254mologous to Homo sapiens PRO1992,accession number AF118086,Smith-Waterman Score=45.
atgggccctcctagggttctgctgtttgggatctcagactcaggtggcctaagtgcctgccagcccctctgggccacgcagggaacagcacacgggcagtggctcagaggctatgtgccaatgcggccggccggctgtgggtcgtacacagcagatctacccatcttccatggcacctctggtggtggagactgttttgtgggatcaatgaccctccttgaatgtgaaaacaggaccatccgccggtccctccgagctcctccaaagccttctgctgttgcagaaacgtcgcagctgggcttggggatcaaaggcaattcagagcatccctcaagcctctatggagaaaacagacatgtctcagcacttcatgtgggggcggcatgttatgggctccggtttccaggtgacttactgagtaacctgttgcagagtcccagttcagccaaactgttgaatcagccaattcccatccttgatgtggagagtgagtatatctgttccctggctttggagtgcctggcccatctcttcagttggattcctctgtctgccagcatcaccccatccctccttaccaccatcttccactttgcacgatttggctgtgacatccgggccagaaagatggcgtcagttaacggcagcaagccagaactgtgtctcgggtcaggagcgcggccggctgggggtcctggccatgtcctgcatcaatgaactcatgtccaagaactgtgtgcctatggaatttgaggagtatttactgcgtatgttccagcagactttctacctcctgcagaaaatcaccaaggataacaatgcccacacagtgaagagcaggctagaagagctcgatgagaggtctgaggtggtgcagggactgagactgctgctcctgcgtagccaagaacaggagaagaggtccgtggagtcctgcctcatgacagccgccactgcccgagagagcctcccagcccagccgcctgcagggcatcctccgccctgggttgggggctgtgagctcacatgctttggggactacagggtcatgaaactgagcaaaggggctggtgtaagaggattgagcaatggacacactgcctcggcggtcagggacaaaagggagtgtgaggaccgtgatgaactggagcacatgggcccatccgaaagaggcagacatggtccagatcgagtcagtcgtggccatgtgtggcccagtcctgctagatccttcctgtcgtccaagagaagtcagaaccctggtttttgggtggaatcacctgatgtttcaagtttgaagtga

SEQ ID NO: 2199 - DNA, 415 bp, Homo sapiens
  SIMILAR (201)..(10): 431254mologous to Caenorhabditis elegans weak similarity to collagens; glycine- and proline-rich,accession number AF000298,Smith-Waterman Score=86.
gcctctgacagagctcaattcggtggtttttcctctacttctcctccaggggcctccaatccaaactgatggatcgctgcctcccattggctccgcgtctctttcacaagatcagatttcgggctgtcaatcaggcggcttgctgccccttcccgcgggtctccctcgcccctctgccctagggggtgctcgcccggtaggcgctgggtcctcagcctgaaagcgccacggagagactcgatttcctctgtaacccgctgcttattgttaaggcgcctggggatactgaaaccgtgtgtttcgagtcgccagttcccattattggggtgttaggtccactattgggctggtttccttaaagtactgttgagcggttctggtatacccttagagccgcgatccacaaagcacgaaa

SEQ ID NO: 2200 - DNA, 321 bp, Homo sapiens
  SIMILAR (172)..(252): 461254mologous to Mus musculus SPR2D protein,accession number AJ005562,Smith-Waterman Score=66.
atgccccccagcacacacatgaagggcgaggctgccagtggggcagggaggattctcaggggcgactcggggcactgctcctcagatgaggataacaaggcctttgaagtgtggcagcagctgccggtctctggctcccagctgactttaaaaagcggaaaagaatatctgtgccatgagcttgttgccaagattaagtgcccagagccttcttctctacctgccccccaccccatcccttcagagaaatgtgagaaactcattcttaccaagtgccaggcattgacggcatgtcgaggagtgatccttccagatggctag

SEQ ID NO: 2201 - DNA, 522 bp, Homo sapiens
  SIMILAR (214)..(2): 351254mologous to Mycobacterium tuberculosis SEQ ID NO 42A,accession number AX005609,Smith-Waterman Score=77.
gaggacggctcgcgagagtccacgtgaaaacggggcggacccagcactggcggagactgacgcagttcttctacctgctttcccaagggcgacactcggctccactccagttgggccgctggacgccctaggggcccggcagttgctaggcaacgccggaagccctcaggaacgtagttccacgggcgacgtaggatggcggatccggatggggcggaccccaaagctggctcccaactccgctcaccccctcctatacagggctcttggttcacggtctcttggttcgtcctgctgcaagttgggaagaaagataataggaatgctaattccttcttgatgaaacgaccacaacacgctggagccggccttggaccctacgtttcaagattggcctgcttccagcgtctgccagctccactgcacaagctgcggcagccgctgtccccgttcgcttccacgggagtcccagcaagactatgcgacccagttcaaataccatcttccatgtaccgttcgtga

SEQ ID NO: 2202 - DNA, 1343 bp, Homo sapiens
  SIMILAR (452)..(607): 841254mologous to Homo sapiens sodium/hydrogen exchanger isoform 5,accession number AF111173,Smith-Waterman Score=222.
agatcatcccaagggaccaatggggataagatcagttacccttcgggacgatgagatggagcggacatcttccagaactgagcggggaggagacagcctcttcaagggaaggggatgggcagagggcctgttctcgcggagatgacagggcagctatcttctggggccgatagggaaggggaggacggtcccccaagctaaagggacagagtggcccaaaggaggaaccgttacccagagctagaaggggcagcgactccgccatcgcatccctgcgcctccgcccccactgcgcaaggctttctgggaaatgtagtctcgccttttggggcggggcttgggaaggaagtgagacctatttccgtcgcaaaagtgacgacttcggtctgcgccggaagtgcatgagctgccgatgtggtgctagtgattgcggtttcggtcgctctcccgtgtttcccgggctgggtatttcctcgcaccatggcggtgggagcagtttgacaagaaatacctgagtcagctgctgatgcgacgatcagcctaccgcatccgggaccagatctgggatgtgtactacaggcttaacatccgggatgccatcagcttttggaccaggtgggccagcagcttccagggctggcccctgcagcaaggctgtcagcagggccatggccttggtttgcagctgcggttcatcctatggcaagaagagggctcagtggaacattcaggctccagcctgctccctgcatctggaccccagccccagaggcttacaccttatctggagcccattacggctgatgacctccctgcaaagatcatgtccgaggccagcggaacaaggcgcctcagggcttcccgcgcccttcaggactgttactctgcagcccacccaagagctgctcagcctaaggtcctggcaggaacggagcaggagcagagcctgctaagcggcttacacagtgtggggaacccctggcggtacacccccctacagggccaccccttctcccctgccatgcctttaacgcgcagcaacacctgccggacccgtagccccccagcctgtacccccgagactcgactccctggacacaccaccagcccgcggccccggaactggcatcacatcctgctcagtgggcctctgtaccaccctgtgggttttcttggacacctggccagtgctgaagggctgttgtgatgttctgaggttgggctcaggctgggtgctctgccatgggctgagtggcccagatattcttctgtccatctttggcctgctggtgccagcaggggacacagactgcaaagagaagcacaaagtttgagccttgatt

SEQ ID NO: 2203 - DNA, 514 bp, Homo sapiens
  SIMILAR (281)..(463): 521254mologous to Homo sapiens HSPC171,accession number AF161519,Smith-Waterman Score=133.
  misc_feature (1)...(514): n = a,t,c or g
caaaagcatgacgacttcggtctgcgccggaagtgcatgagctgccgatgtggtgcttagtgattgcggtttcggtcgctctcccgtgtttcccgggctgggtatttgcctcgcaccatggcgcccaagggcaaagtgggcacgagagggaagaagcagatatttgaagagaacagagagactctgaagttctacctgcggatcatactgggggccaatgccatttactgccttgtgacgttggtcttcttttactcatctgcctcattttgggcctggttggccctgggctttagtctggcagtgtatggggccagcttaccactctatgagctcgatggcacgagcagcgtttctctgaggatggggccctgatgggatggtggcatgggacctcaacattggaagcagggcaatggcagagcaccttaaggatgtgatcctactgacagccatcgtgcaggtgctcagctgcttctctctctatgtctggncctttctgcttctggctcct

SEQ ID NO: 2204 - DNA, 620 bp, Homo sapiens
  SIMILAR (5)..(121): 691254mologous to Homo sapiens Human secreted protein, SEQ ID NO: 7888,accession number G03807,Smith-Waterman Score=130.
tttttttttgaggcaaggtctagctttgttgcccaggctggggtgcagtagcgcgatcgcagttcactgcaacctccgcctccctgactcgagcgattctcccacctcagcctctggagtgctgcgaccccaggcgccgccacctaattaatagacgcgttgcctccgtttttcaaatgtccctttcaggacgccgtccccttcctggtacgcgaagcgctgggagcgaaagggacttccgggagatctaggaagtcgcttctttttctggtagaaggcggggttctcctctgtacgctgcggagtctctgcggggtgtagaccggaatcctgctgacgggcagagtggatcagggagggagggtcgagacacggtggctgcaggtctgagacaaggctgctccgaggtagtagctctcttgcctggaggtggccattcattcctggagtgctgctgaggagcgagggcccatctgggggtctctggaagtcggtgcccaggcctgaaggatagccccccttgcgcttcccctgggctgccggccggccttctcagaacgaaaggcgtccttccaccccgcggcgcaggaaaccgctgccaaggcctcgtgccccattgg

SEQ ID NO: 2205 - DNA, 1121 bp, Homo sapiens
  SIMILAR (867)..(1103): 271254mologous to Homo sapiens tyrosine hydroxylase,accession number M23597,Smith-Waterman Score=74.
tttttttttgccagtattattattttacctacaaaatgagcaaagatgtttagaagtacaatagaattcagccctgctgagggtaacaaaaggagggtacttttccggtgaggctttgtgcaaaaggcaaattaataaagggagcattcagtaattacacctctaggaatcagccgtacgaaaatgcaggatgcatttataaatacatacatacacaaagatttatgtatgaagatattcagcccagccttatcttttaaattatcatctaaatatcaatagcagaatgggcgagatatctacacaccaggattcatgccaccatgccaccatgaatcactgggaaaaaacggtgatatataagcatttagggatgtaacatgttcatcgaggaaaggaggctacaaaagtaatgtctattttgagttttaaatttttcatgtaacgatttagaaactcatctaatttgataacgtgacttaggcaaatcattcaaatctttttgcgtttcctctgcaatggcgattgtggaggttaaatgggataactggcgttgaaacgttccaggcccatgagcaggactcaatgttccttcccttcccctttagtgtatggcttcttacatctggggaagagtcccaccaaagatcgattccaagcttcgcttcttggatgagcgagggaaactaggcgctaacttacctattcacccccgcgcccgttcccggcagccgggactcagggaagccaggccctgctcgcgagtccccaccccgattgcgcacccgcgacttcagcccgaggggcggggattttcttggagcgacgggacgcgacgccaatcgcgacgaggcttcgccccgtggcgcggtttgaaattttgcggggctcaacggctcgcggagcggctacgcggagtgacatcgccggtgtttgcgggattccggtctacaccccgcagagactccgcagcgtacgaggagaaccccgccttctaccagaaaaagaagcgacttcctagatctcccggaagtccctttcgctcccagcgcttcgcgtaccaggaaggggacggcgtcctgaaagggacatttgaaaaacggaggcaacgcgtctattaa

SEQ ID NO: 2206 - DNA, 1500 bp, Homo sapiens
  SIMILAR (286)..(227): 401254mologous to Conus abbreviatus four-loop conotoxin ABVIM,accession number AF090072,Smith-Waterman Score=44.
atgcaggaactacaagaaaaaaagaggaatggaggtactacccatgatattaaaaagaggtccgtggaagatttcaaaaggtcactcacgaagccacatctggtggctcaacaaaagccagttggtctgaaacactctttttcacagggctggtggtcggtgctggctgtgacagctagaaagaaaccacaggaccggataaacagcccctcccaaagtgctgagaaaagcaaacagtggatgtacagcagtgacctgagcacatcgagacggacacagcacaaacgtgggggtcgtagacagcagcaggatgaaggattgccagtcagggagcacacagaagtgtatcctcagatgggcagcatcagtagcttggggaagcttgttaggttctctgtggatatagcccaagaatcaatgcaaactctcccagggatccttatgcctgctgaaggacccactgatttaatgggcatggaacttgcacaaaaagagttgcacaggaaatccatttatccagcactttctgcaggctccctggtcaacctgatattgggttgcaatgcaaaaacacttgctgtaaaagaaaatggaacactatggaaaattctccagggtgtgctaagtgaaaggagcagattactacctgggcagcctctttccaagggaagtgctgctggatgcctggacagcccatctcatgaccatgacgagacagccaacacaatcagagtgaagcgatcccagcagcctcacattgctgagctgccagaatgcgctgagcacaccaggcttggatgtctccccgagcagcagccatggagcaagccactgtgcactgtgaacaaggtgcttctggagatgctggtgaagttcatattccaggtgcaccaggggcacatggttaagagtggaggctctggagccagaatgcctgatttgaattctagttttgccaattattggctgtgtaacactgagcagttcagatggagttggagtgactgtagaatagtttgcaaagagaaactccttgtacaaggagccagagctagggctcctgaccagatgctacatctaccttccctgaagaaagagctgagcagcaggaatgggtggaagcatagtgcagtagaagggcacatggatctcagggatttagagtttatgaaatccacagcagcatgttatcgtgtgtttgaatgcacaactgcagaaccacatgaggtggaagttggctgttttcggaaagatttggtaaaacctgcagtttatgctggctggcaaagtgtgtgcagaacacgcaaaatcaccaggacccaggaaagcagagtgggcaggaggaaacctagagaggtgagcctggccaaggggaatatcggatccacttgggaaaggtcattattttctgggaatgcaaactctcagattgattatgaaaatgcagctgcctctggccaccttcctcggttgcctaaagaaactttgtatgaagtgtga

SEQ ID NO: 2207 - DNA, 417 bp, Homo sapiens
  SIMILAR (235)..(20): 391254mologous to Oryza sativa zhb0005.1,accession number AL117265,Smith-Waterman Score=104.
ccctgtgctagagccggagccgcagcctcagcattagccgggagaactgcagcgcccggaggctggcctggggtctgacatcaacgacacaggcggggagtggaagtccttccgcacaacatggtgtggggctgcgggggtgtggacgcgcccagctgtgtccccgggagggagtgggtgcttttcggggtgccgggggagggctgggcgtgcttcgcggttttttgtcgtagaggctcaaagatgctgcaaatcaaatcccaaacgggagccgcaacagcgcagactggatcggaagtcgtttgctccggttcacttgcctggctctgacgcgacgggtcccaggcccccggctccgcttcccactcagagctctcctcccctctcttccccgccacccgtttctacgcagatctg

SEQ ID NO: 2208 - DNA, 591 bp, Homo sapiens
  SIMILAR (301)..(375): 401254mologous to Drosophila subobscura Sex-Peptide,accession number AJ224765,Smith-Waterman Score=39.
atggtggtggtggagtctcaagagttggcaatatttagccatgtgcaggtcattaccacccaccacaagagtggtagaagcaagagcctggttacagtggccttaagagaaaaagggaagaaagaagtggaggcagggagtacggacaccattttgagtcttaatgtaaagagagccacgatgaaagattactgtcttacctttgaacccaaggatgtctcttatggctccagtttgctgactactgtgaagggaaggatggtttggaatcatactatagagtcatgggctctaaagtacgtgttattgctaatgattggtgttgctgtgaggcacatcttcctactagatcgtgatacttcaacaagtatcacttcaactgctctccaggccagctgccactctggtactacctaccacctggggcctaccctccataagtgtgcagcagccatgcaggcatggcaagttctgggggtggaaagaatgtcattcagagaatataatggtttttgtacttcaaagcaagtgaaccggagcaaacgacttccgatccagtctgcgctgttgcggctcccgtttgggatttga

SEQ ID NO: 2209 - DNA, 479 bp, Homo sapiens
  SIMILAR (143)..(478): 431254mologous to Halocynthia roretzi HrPET-1,accession number AB029334,Smith-Waterman Score=266.
gggcgggagcagcggcggcggcggcacaggctcggggccagccgggcgcgcatccccgggcgccctgcgcggtggagagcttggcgggctgcgggtgccgcaggacaggagtggacaaagcaagatggcagggatcttagcctggttctggaacgagaggttttggctcccgcacaatgtcacctgggcggacctgaagaacacggaggaggccaccttcccgcaggctgaggacctctatctcgcttttcccctggccttctgtatcttcatggtgcggctcatcttcgagagatttgtagccaaaccgtgcgccatagccctcaacattcaggccaatggaccacaaattgctccgcccaatgccattctggaaaaggtcttcactgcaattacaaagcatcctgatgaaaagagattggaaggcctctccaagcaactggactgggatgttcgaagcattcagcgctggtttcgaa

SEQ ID NO: 2210 - DNA, 1137 bp, Homo sapiens
  SIMILAR (427)..(621): 301254mologous to Homo sapiens Human secreted protein encoded by gene 25,accession number Y36248,Smith-Waterman Score=77.
atggtaatcccgcttcatctggttgagggaggattaaatgagattgtgcacagggctctggagatgtggacttcgttaaggcctggtcctgctctcttgggggccccacacacaggagagggatgcacctgttacaccaactcttctgtgggaagtgtggccacagcattctgggggtcattgggttggataggggagctggaaaggtttgggcccttagagaaggccagatttgtagccaaaccgtgcgccatagccctcaacattcaggccaatggaccacaaattgctccgcccaatgccattctggaaaaggtcttcactgcaattacaaagataatgtcgtttgaagcagggataatgggatcaagaggtgacaagcttaaggacaaaacccaaaatggtagagcagagaggcagaaaggctctacgtctctatggctttgtaaagctagtgcagcaaaaccagaacaactgacctacatgcttctgttatacaagatcatcagttttcacctagtcagtatcaatcagggcctgaaggtttctaaaggctattccatttctaatttagatctttccactgttcctgtcagaaatgaaggctctctcttggctcgcagaccttgggaaatctttgcaggggaagctccccagagcctcagcacctttggcttgctactgtgtagcgatgtgacagaagtggatgaagaaaggaagagagagggcaagtctcttatgtccctcagtcagtctgtagcttttgaagatactgaggatgtaaaaccaacctatggagcctactttgcatatgaccaccttgaaggaaaacgttaccatgttcataaagtacttttgtgtcttttagttcattatccactcctctcgctgcgtgtcagtgatgtcaaggtgctctctgcttgctgggctcgttcctgcctcttggcctttgcgcttgctttcccatcatcctggaacgttctgctccacattttcaactttctgcatctccctagtgccccccaatccatagtccccttgataatcacaacgccacttttccgcccaagaaatatactctatgccaacttctgcgctaatcattgtcttagtttgactcacatccttgccatttaa

SEQ ID NO: 2211 - DNA, 579 bp, Homo sapiens
  SIMILAR (226)..(393): 401254mologous to Homo sapiens TGR-CL3C,accession number A27282,Smith-Waterman Score=71.
atgccagtaataatgacacatgaagatgctagctatagaataccagaagaccggaaggccatggttcagtgttgccttcaacatatagctagactggaagctctaattggtattcgaacagttatggatttatcgcggggggacagaagaaagaaacaagaaaggctcgaatgtcaagtgagggtgcgaaatgaagaacagaccctaattccaagtcagctggatggacaggcaagctcgtcagctgctagtaaaccgccgcgggcccgcgggctccgcacgaaccgaccagaccccaacaccgggcaaggggcagccccggaggcaagccgggccagaaccacaccctccacggagctggctcgtacccggacccgcccacagagtcgccccgcccagactgcgcagtgtatcctgggtgctgtagtctttgttcggtttggtggttggccggtgggccggagacgcaccgtagaaaccgaaccctcttacccaattgggcgccgtccccagtacgctttgcgtagtttgtggtggcgtcgtaccgcttcggtgaaagttaatttgacgggcatctga

SEQ ID NO: 2212 - DNA, 531 bp, Homo sapiens
  SIMILAR (158)..(319): 371254mologous to Homo sapiens Human bcl2 proto-oncogene mutant protein fragment 14,accession number Y21166,Smith-Waterman Score=75.
tcagcttattgtcttaacagcaaggacaaaccacttaactgtctgggctttggtttccacaactggaaagagatagttcacattatgttgcctcttctgtacctcacaaggtcgggtcttagctgccttcctgcgaggcacggctcgggacctgcagcccgccatgcctgagcctccccctgttccgtgggctcctgtgcggcccgagcctccccgataagcgccgccccctgctccacggcgcccagtcccatcgaccacccaagggctgaggagtgctgggcgcacggcacggaactggcaggcagctccacctgcagccccggtgcggatccactgggtgaagccagctgggctcctgagtctggtggggacctggagaacctttatgtctatctcagggattgtaaacacaccaatcagcaccctgtgtctagctcagggattgtaaatacaccaatcggcactctgtatctagctcaaggtttgcaaacaccaatcagcatcctgcgtctagctcagggtttgtga

SEQ ID NO: 2213 - DNA, 928 bp, Homo sapiens
  SIMILAR (145)..(201): 631254mologous to Mus musculus CIP7,accession number AF038507,Smith-Waterman Score=62.
atagtcgctttgcatgacagtaatttaaccactcaagttgtctttcaccttgggggctgcactacgaatgatcagcaaggtgggaggaatcaagcaacgccactagatggaccgatatcaagaacacacctccagggctttgacccagaaagcaggaagccaggattacgaagctgttgccagccccccggctgcccttgtacatctctgtcatgaagcagtttctcatcacctccagtgttctgatgagacgtgggtcttcctgcttcaccctctcttaatagagtggcagaacacaaaaccaccgagctgcattacccaactcgcattgcaatctccaagtccctttggtttcagtgtcattctttttgatgagcagaacaatgacctcaaggagttggcacatttggctagtcttccttttgtcatctatgtaatgaataaacggtctgattctaaaaaagtgtccttgcatctttaccagtcgaatcagtcaggactttaccttagccatgccttgtctcatgtgtgcttgacagaaactaagtggagctgtgggaccaacatggtagtcgtaggccgagtctcccctcaacctcatccccactccatagataaaaggcagaagagtgggagggaggtttacagggagatgaacaaaagtaacaattatattgagaggagagtattgtttagtcttactcttttggttacccccagttctcggcctctcaatccactccttctgacccacattggaagttacctcactgcgcccagtcccatcaaccacccaagggctgaggagtgtgggctcacggcggcggactggcaagcagctccacctgtagccctagtgcgtgatccactgggtgaagccagctgggctcctgagtctggtgcggacgtggagaacctttacgtctag

SEQ ID NO: 2214 - DNA, 337 bp, Homo sapiens
  SIMILAR (3)..(335): 1001254mologous to Homo sapiens tripartite motif protein TRIM7,accession number AF220032,Smith-Waterman Score=594.
ccggaaccggcgccgaggctctagcgctggcggcagagctgcagggcgaggcgacgtgctccatctgcctagagctctttcgtgagccggtgtccgtcgagtgcggccacagcttctgccgcgcctgcatagggcgctgctgggagcgcccgggcgcggggtctgttggggccgccacccgcgcgccccccttcccactgccctgtccgcagtgccgcgagcccgcgcgccccagtcagctgcggcccaaccggcagctggcggcagtggccacgctcctgcggcgcttcagcctgcccgcggctgccccgggagagcacgggtctcaggcggccgc

SEQ ID NO: 2215 - DNA, 441 bp, Homo sapiens
  SIMILAR (83)..(3): 961254mologous to Homo sapiens tripartite motif protein TRIM7,accession number AF220032,Smith-Waterman Score=128.
cctttcttttccgtggaccggaacacctcacagtcctccagttccttcttcaagaccctcagcctggactccaagagctcctgtagatgaagggaaacaatgtaaggtgggggtgaggggcttctggaaacccccacctctgccttcctggagccagccaggagaaagggaaggccctgctcactgagggggaggccgggtagaagtcatctctacaggctacaggttacactgcgaggtgactctgaaggtctcgggatcttgcttccccaaaagcatctgctggaccagccagactgaaacacaagctccggcagccctacccctagtcgtctcctctactctccgcccccccaccaaaaagcaccgtggatgggagagttggagcaggatgggccagcaaggagagactggggactgccgcccgagcctccccgcccc

SEQ ID NO: 2216 - DNA, 2723 bp, Homo sapiens
  SIMILAR (63)..(860): 331254mologous to Caenorhabditis elegans similar to S. pombe phosphoprotein (GB:X86179),accession number AF016672,Smith-Waterman Score=430.
atcttgacaggcactggacggggcctgcaggggtctccacagagaccatcaggatgtcgtattttggggagcatttttggggcgagaaaaatcatggctttgaggtcctgtaccacagcgtgaagcaggggcccatctccaccaaggagctggcggacttcatccgggagagggccaccatcgaggagacctactcgaaggcgatggcgaaactctccaagctggccagcaacgggacccccatggggaccttcgccccgctctgggaggtcttccgcgtctcctcggacaagctggcgctgtgccacctggaactgacacggaagttacaggatctcatcaaggacgttctccgctacggcgaggaacagctcaagacccacaagaagtgcaaggaggaagtggtgagcaccttggatgctgtgcaggtactctcgggcgtcagccagctcctgcccaagtcccgcgagaactacctgaaccgttgcatggaccaggagcggctgcggagggagagtaccagccagaaggagatggacaaggcggagactaaaaccaagaaggcggcagagagcctgcggcgctcagtggaaaaatacaactcagcccgagctgactttgagcagaagatgctggactcagccctgcgcttccaagccatggaggagacacacctgaggcacatgaaggcactgctgggctcatatgctcactcggtggaggacacgcacgtgcagattgggcaggtgcatgaggaatttaagcagaacatcgagaacgtcagcgtggagatgctactcaggaagtttgcagagagtaagggcacaggccgggagaagcctggacctctggacttcgaggcatacagtgcggctgccctgcaggaagcgatgaaacgtttgcggggagccaaggcctttcgccttccaggactaagccggcgggagcgggagccagagccacctgcagctgtagatttcctggagcctgattcagggacatgtccagaggtggatgaagaaggtttcactgtccggcctgatgtgacccagaacagcacggccgagccctcccgtttctcgtccagcgactccgacttcgacgatgaagagccccgcaagttctatgtgcacatcaagcctgccccggcccgggctccagcctgcagccccgaggcagcagcggcacagctcagggccaccgcgggcagcctcatccttcctcctggcccagggggcaccatgaaacgccattcttcacgggacgctgctgggaaaccccagagacctcggtctgcccccagaaccagcagctgtgcagagagattgcagtcagaggagcaggtgtccaagaacctctttgggccgcccctggagtcagcctttgaccacgaagattttacaggctctagcagcctgggcttcacctccagcccctcccctttctcctcctcgtcgcccgaaaacgtggaggattccggcctggactctccgtcccacgcggcacctggcccctccccagattcctgggtcccccgcccaggcaccccgcagagcccgcccagctgtagggcgccacccccagaggccaggggtatccgggcaccgcctctgccagactcgccgcagcccctcgcctcgtctccaggcccctgggggctggaggccttggccggaggagacctgatgcctgcacctgctgaccccacagccagggagggcctggcagccccacccaggagacttcgctctaggaaggtgtcctgccctctcacacgtagcaatggggacctgtctcgttccctgagcccctccccactgggctcttcagccgccagcactgccttggaacggcccagcttcttatcccagacaggacacggagtctcccggggtccgagccctgtggtcctgggctcccaggatgccctgcccatagccacagccttcacggagtatgtccacgcctacttccgtggccacagccccagctgcctggctcgagtaactggggagctgaccatgaccttccctgctggcatcgtgcgtgtgttcagcgggaccccaccaccacctgtcctcagcttccggcttgtacacacaaccgctattgagcacttccagcccaacgccgatctgctgttcagtgacccctcccagagtgaccctgagaccaaagacttctggctcaacatggcagctctgaccgaagccctgcagcgccaggcagagcagaaccccactgcctcctactacaacgtggtgctgctgcgataccagttctcccgcccgggtccccagtctgtgcctctgcagctcagtgcccactggcagtgtggagccaccctcacccaggtctcagtggagtacggctaccggcccggtgccacggctgtgcccacaccactcacgaacgtccagatcctgctgcctgtgggggagcctgtgaccaacgtccgcttgcagccggctgccacctggaacctggaggagaagcggctcacttggaggcttccagatgtgtccgaggcaggcggttctggccgcctctctgccagctgggagccgctctcagggcccagcacacccagccccgtggctgcacagttcaccagcgaggggaccactctgtcgggcgtggacttggaactggtgggcagcggttaccgcatgtcgctggtgaagaggaggtttgccacagggatgtacctggtgagctgctga

SEQ ID NO: 2217 - DNA, 541 bp, Homo sapiens
  SIMILAR (3)..(539): 761254mologous to Rattus norvegicus Munc13-1,accession number U24070,Smith-Waterman Score=673.
cgaggcgtcgagagttcccagcgaaggagcgcgagagcgcgtcgatgtcaagccccgaagagtaaccaacatggccaagggtgccccaccaagccagccgccgccgaacagtgtgcctgcagattgagcagatccgtaaggctgagccacccaaggacgaggagagtttcaggccgagagaggatgaggaaggccaggaggggcaggactccatgtccagggccaaggccaactggctgcgtgccttcaacaaggtgcggatgcagctgcaggaggcccggggagaaggagagatgtctaaatccctatggttcaaaggcggcccagggggcggtctcatcatcatcgacagcatgccagacatccgcaagaggaaacctatcccactcgtgagcgacttggccatgtccctggtccagtccaggaaagcgggcatcacctcggccttggcctccagcacgttgaacaacgaggagctgaaaaaccacgtttacaagaagaccctgcaagccttaatctaccccatctcgtgcacgacgcc

SEQ ID NO: 2218 - DNA, 546 bp, Homo sapiens
  SIMILAR (3)..(305): 1001254mologous to Homo sapiens tripartite motif protein TRIM7,accession number AF220032,Smith-Waterman Score=526.
cggccgcggcccgggcagcggctgcccgctgcgggcagcatggcgaacccttcaagctctactgccaggacgacggacgcgccatctgcgtggtgtgcgaccgcgcccgcgagcaccgcgagcacgccgtgctgccgctggacgaggcggtgcaggaggccaaggagctcttggagtccaggctgagggtcttgaagaaggaactggaggactgtgaggtgttccggtccacggaaaagaaggagagcaaggagctgctggtgagccaggcacccgcaggccccccgtgggacattacagaggcctgagaactcagcaccagggctcggtgtgtgtggtgttggagtgtgtgctatggaaccgcagaatcgatttcagaaagataatagagtccatattatataggggtgtccacataattgttgtacaaaccagagctttttaaagtgaaaagcagtgctaaaataattattgcaaaacaactggcttaaactggagctgtcccagcgaatcaggacgctcagtcactctgatattacgtaacat

SEQ ID NO: 2219 - DNA, 1972 bp, Homo sapiens
  SIMILAR (1344)..(1721): 461254mologous to Homo sapiens tripartite motif protein TRIM7,accession number AF220032,Smith-Waterman Score=195.
ttacggggtgcattgatgttcctggcactgtgcaaagctccatggagtagacggataccgagagacgtcaatttgttcagccagcgtttgctggtgccatctggatgctggaactaagcttgtcaccaggttctgccaggcgacattgtccctagcatggaagtgggaatgaacaagcaggcagaggaagtcaaggacgattatgagggatgggaagggtctgcccaatctgcacgtgcgtgtcctccaccgagtgagatatgagcccagcagtgccttcatgtgcctcaggtgtgtctcctccatgcttggaagcgagcagcccctcgcctcgtagcagtaggtgggcgtggtggccgtccacacttcgaagttgtgtgcgtcgtgcacgagatggggtagattaaggcttgcagggtcttcttgtaacgtggtttttgagtgggataggtttcctttgcggatgtctggcatgctgtcgatgatgatgagaccgccccctgactgcaaggggtcacggctccctctggcagcttcgggagtgagggcagaaaccagagactggggggcaaccagggaggcaagtaggcgatgggggtaagggtggcagtgggagagcaggtggaaaggtcgctgtccctctaactggcaggtgtcacctggttggccgcagaagggcctgccagccgaggaccacatcagtgtaagaagcagcttccacaggagctcagccaggatccttggaaaacgtcggaccttgccaggccatggtcaggtttgggatgccctccaggcaagtgacccaagctgctccgggcacaaaggcggcaagcgtcaacagtcggagaagcacgacacacacatgaacctgggtgccgccagtgcaaaggagattggcagcgtccagttcagcacatggtctcgtaaggaaggcgtccatggattgggccacctggaggcccgtggtgaccttgaccgagaatcagacgcacacaagaagggctcccgccctgcgccgaaaggagcggccttcggggtcacagaggcagcaaggatccctgatcagcaggactgccctcgcttccaagcaatccagggtcttcctgaaagtcccggcggatcaaatacagtcagccgccggggaatgccacggaagacagatgaacgattaaaaagtgcaagaaggctcgggttggaaatccttgtggaagttcacgccgtggaaggtgtgcaccggcgggccaatagtgatgcggtaactacaacgtgtaccacacatcaagtagtctgcagctcgtcggcttcgggccgtgggacgcggcgggtgattgggagcccgatccccaggggcctcttcagcaatctcagggaaaatgcgcaaaggcttcagagaagaagccggagggtgccgcgagcccgcgcgcccagtcagctgcggcccaaccggcagctggcggcagtggccacgctccgcggcgcttcagcctgcccgcggctgccccgggagagcacgggtctcagcggccgcggcccgggcagcggctgcccgctgcgggcagcatggcgaaccttcaagctctactgccaggacgacggacgcgccatctgcgtggtgtgcgccgcgcccgcgagcaccgcgagcacgccgtgctgccgctggacgaggcgtgcaggaggccaaggagctcttggagtccaggctgagggtcttgaagaaggactggaggactgtgaggtgttccggtccacggaaaagaaggagagcaagagctgctggaattcaaaagcacctgagcagcccctcggaggtgcttcacatgccctcagtgccgaaagagcttcctcggcggagcttccgccccaacctgcagctggccaatatggtccagtgattcggcagatgcacccaacccctggtcgagggagccgcgtgaccgacagggcatctgtcccaaacaccaagaagccctga

SEQ ID NO: 2220 - DNA, 1417 bp, Homo sapiens
  SIMILAR (918)..(1037): 451254mologous to Homo sapiens PRO2289,accession number AF116698,Smith-Waterman Score=76.
atggacagtctccaaggtcacattggaaagggcgtgcatacaggaagcagcggagagctgcagtcatttttgcaaccaacgtcacaggacttccacatctggtgtctgaatattgtcacttcaacaactactaaactttctgctgaaacatggagaacctgctcaggcaagctgggaatctacgtccaggatctggacctgccaacgaggctgagggactctaatcaggcagtgaggctggccttagcaatgcagctgggcttcgaaggcccgaggttcagtggggagaaatccaggcaagaagggtgctgggaagtgtgccaggcccagctgagcaaggagagattctttgaggaaaccactaatgggaatgcgatgatgccgtgtttccgaggatggctgctgctagggagggaagcaggctcgtacctggagggtcaaggtattggagattataaaagtacatttttgcaaattgatgcattccagccctactggaaacatactacttttgagggaggctaccctgtgcaccacatcctgttccagacccccatcttcacagccctggcactacgtgtagcagagtcggtctcccagcccagtgctcccgtgacccacatgtggtacttctccctcccggcctgctgtgagattcttataaaattgtctctgattaatcaccctgtacagcttttaaaagttacttttattacccaaaacaacacttcagaaactaagctgacggttgaatcattgaaggagtcacagcattctttcatcccagagagaaaaaagggaattggtttcttgcctccaggaaatggcagtaacatcggggacagcagcagttgcaggacgacagacgtgtcactgagggtgcagggtgctatggctggagctgctgctgttctccctatcactcgtggggaagccaggcctggcgaggtgcaggcacttgctgaggtcacggcggccagactggagcccagaactctgtctgcacctaagcacagtgtcccttacctccagcatctgagtcccatcgtctaagagaacctgctcaggcaagctgggaatctacgtccaggatctggacctgccaacgaggctgagggactctaatcaggcagtgaggctggccttagcaatgcagctgggcttcgaaggcccgaggttcagtggggagaaatccaggcaagaagggtgctgggaagtgtgccaggcccagctgagcaaggagagattctttgaggaaaccactaatgggaatgcgatgatgccgtgtttccgaggatggctgctgctagggagggaagcaggctcgtacctggagggtcaaggtattggagattataaaagtacatttttgcaaattgatgcattccagccctactggaaacatactacttttgag

SEQ ID NO: 2221 - DNA, 399 bp, Homo sapiens
  SIMILAR (134)..(15): 521254mologous to Homo sapiens FLJ00047 protein,accession number AK024455,Smith-Waterman Score=67.
  misc_feature (1)...(399): n = a,t,c or g
tccccttgnaactccacaaggcggaggttgcagtgnagcccgagatggcacccacttgcactcccctcccaccctggctgacagaggcaagactcccatcttaaaaaaaaaaaagttagaagacatggaaagagatcccccaagtttcaacatggatcccaggaattccagaaagcatcaagagaatggagaaaaggtatgctgaacaaataacagctgagaatttccaaaaccaaaaatatgaattgtcagacttaaagggcccaacagtttatgttttcaaaactcacatccagaaatattacagtaagtttcagtatattaagagtttctattataggacttaaagtttgtaacatgtgaaacaatttatattacaggatatattataagaaaacc

SEQ ID NO: 2222 - DNA, 578 bp, Homo sapiens
  SIMILAR (578)..(519): 951254mologous to Rattus norvegicus unr protein (AA 1- 798),accession number X52311,Smith-Waterman Score=93.
tttaaaatggttttcttaaatttatttatttttttaaacataacacgaggaaggtgttaaaactggtgtaatagctcaatagaataagtattccagatttcgggagggatgaagagggagatattcagaacccttcaccagattccccccaacttgatcatagtggattaatggtgtgctttgtggatgtggttagtcaatgacaccagcttgacggatctttctttctgcaccaaaccccattgagttatctggtccccttggctgacgaagaaccattaggcgaggagcactggcatcatccagagtgatattcttcaagcgattgaccaaccgatcaggtcgaggagctgcaacagccttggggccctcacagactcgccaaacattacaggcgctgcacttgccagtgcgctgattaagaatcactgagaactccacctcatctcctgcctgtagctcaatgccatcctgaacttctttcacatggaaaaagagcttgacgttctgaacactggaataaatccgtaagaggttaacagtttttcaataaccccagtttcacgcatggctgctga

SEQ ID NO: 2223 - DNA, 5442 bp, Homo sapiens
  SIMILAR (3403)..(5439): 921254mologous to Homo sapiens myodenlate deaminase,accession number M60092,Smith-Waterman Score=3318.
atggagaacgtttttactgtgtcatcagatcctcatccctctcctgcagcccctccttcactttctttacccttatcttcatcttctacctcatctgggactaaaaaacaaaagaggaccccaacttatcagagatctatgagctttgatccaaaccttctccacaacaatggacataatgggtaccctaatggtacttcagcagcactgcgtgaaactggggttattgaaaaactgttaacctcttacggatttattcagtgttcagaacgtcaagctagacttttcttccactgttcacagtataatggcaacctgcaagacttaaaagtaggagatgatgttgaatttgaagtatcatcggaccgacggactgggaaacccattgctgttaaactggtgaagataaaacaagaaatcctccctgaagaacgaatgaatggacaagaagtgttttatctgacttacacccctgaagatgtcgaagggaacgttcagctggaaactggagataaaataaactttgtaattgataacaataaacatactggtgctgtaagtgctcgcaacattatgctgttgaaaaagaaacaagcccgctgtcagggagtagtttgtgccatgaaggaggcatttggctttattgaaagaggtgatgttgtaaaagagatattctttcactatagtgaatttaagggtgacttagaaaccttacagcctggcgatgatgtggaattcacaatcaaggacagaaatggtaaagaagttgcaacagatgtcagactattgcctcaaggaacagtcatttttgaagatatcagcattgaacattttgaaggaactgtaaccaaagttatcccaaaagtacccagtaaaaaccagaatgacccattgccaggacgcatcaaagttgactttgtgatccctaaagaacttccctttggagacaaagatacgaaatccaaggtgaccctgctggaaggtgaccatgttaggtttaatatttcaacagaccgacgtgacaaattagagcgagcaaccaatatagaagttctgtcaaatacatttcagttcactaatgaagcccgagaaatgggtgtgattgctgccatgagagatggttttggtttcatcaagtgtgtggatcgtgatgttcgtatgttcttccacttcagtgaaattctggatgggaaccagctccatattgcagatgaagtagagtttactgtggttcctgttgaatttagtattagtgacaaacagaggcctggacagcaggttgcaacttgtgtgcgacttttaggtcgtaattctaactccaagaggctcttgggttatgtggcaactctgaaggataattttggatttattgaaacagccaatcatgataaggaaatctttttccattacagtgagttctctggtgatgttgatagcctggaactgggggacatggtcgagtatagcttgtccaaaggcaaaggcaacaaagtcagtgcagaaaaagtgaacaaaacacactcagtgaatggcattactgaggaagctgatcccaccatttactctggcaaagtaattcgccccctgaggagtgttgatccaacacagactgagtaccaaggaatgattgagattgtggaggagggcgatatgaaaggtgaggtctatccatttggcatcgttgggatggccaacaaaggggattgcctgcagaaaggggagagcgtcaagttccaattgtgtgtcctgggccaaaatgcacaaactatggcttacaacatcacacccctgcgcagggccacagtggaatgtgtgaaagatcagtttggcttcattaactatgaagtaggagatagcaagaagctctttttccatgtgaaagaagttcaggatggcattgagctacaggcaggagatgaggtggagttctcagtgattcttaatcagcgcactggcaagtgcagcgcctgtaatgtttggcgagtctgtgagggccccaaggctgttgcagctcctcgacctgatcggttggtcaatcgcttgaagaatatcactctggatgatgccagtgctcctcgcctaatggttcttcgtcagccaaggggaccagataactcaatgttttctgttaatggcgaaagaatggaagcgaataaagttttactgatttttgagacactagcacctagcgctttcattattgaaacgtcccgtgtgggaggggcgggtctgggttcttgctggtgtgaaatgactgagtacaaactggtggtggttggagcaggtggtgttgggaaaagcgcactgacaatccagctaatccagaaccactttgtagatgaatatgatcccaccatagaggattcttacagaaaacaagtggttatagatggtgaaacctgtttgttggacatactggatacagctggacaagaagagtacagtgccatgagagaccaatacatgaggacaggcgaaggcttcctctgtgtatttgccatcaataatagcaagtcatttgcggatattaacctctacagggagcagattaagcgagtaaaagactcggatgatgtacctatggtgctagtgggaaacaagtgtgatttgccaacaaggacagttgatacaaaacaagcccacgaactggccaagagttacgggattccattcattgaaacctcagccaagaccagacagggtgttgaagatgctttttacacactggtaagagaaatacgccagtaccgaatgaaaaaactcaacagcagtgatgatgggactcagggttgtatgggattgccatgtgtgtccttggagtgtaaagaagactttgcagagaggctgaacggctgtggttctgctcctcctcccttgtcccccaacttcaaggaaggaggaggagaaattgatgatgcaatgcgcaactttgctgaaaaagtgtttgcctctgaagtcaaagatgaaggaggtcgtcaggagatttccccctttgatgtggatgagatctgtccgatttctcatcatgagatgcaagcacacatattccatctggagactctgtccacctccacagaagccaggagaaaaaagcgtttccaaggacggaagactgttaatttgtccattccactaagtgaaacatcttccaccaaactgtcccacattgatgaatacatttcctcatctccaacctaccagaccgtgcctgattttcagagagtgcagattactggtgactatgcctctgggaaaagggagcctctggggaggcacggagtctctggggaaaagaaggacccaagcagacctaggatagtgagaagggttgcagatagcataaaccaaccaaagaaaacagatccagagaaagagagagggaagagaaaaaagaaggaaccagagaaaagaaggaagatgagagagagaacagttggtcaattaataaatctctgccacatggacttgcagaatcagcatcatattggtgaaactgctgtgcagccgtccgtcgatgctccaaatatagttttaatgaccagtgctgggtccccttctcatgtaactgacccacttagggttacagttgaagattttgaaattgtttgcaaaggtctgtatcgggcactatgcatacgtgagaaatacatgcagaagtcgtttcagaggttccctaaaaccccttccaaatacttgcggaacattgatggtgaggcttgggtagcaaatgagagcttctatccagtctttactcctcctgtgaagaagggagaggaccccttccgaacagacaaccttcctgaaaacctgggctatcacctcaaaatgaaggacggtgtagtttacgtctatcctaatgaagcagcagtcagcaaagatgagcctaagccacttccttacccaaatctggacaccttcttagacgatatgaattttttacttgctttaattgctcaaggacctgttaagacctatacccaccggcgcctgaagttcctctcctccaagttccaggtccatcagatgcttaacgagatggacgagttaaaggagctgaaaaacaacccccaccgagatttttataactgcaggaaggtggacacccatatccatgcagccgcttgcatgaaccagaaacatctgctgcgttttattaagaaatcttaccaaattgatgctgacagagtggtctatagcaccaaagagaagaatctgaccctaaaggaactttttgctaaattaaaaatgcatccttatgacctgactgttgattctctggatgttcatgctggacgccagaccttccagcgttttgataagttcaatgacaaatataatcctgtaggagcaagtgagctacgggacctctacttgaagacagacaattacattaatggggaatattttgccactatcatcaaggaggtaggtgcggacctggtggaggccaagtaccagcatgctgagccccgcctgtccatctatggccgcagtcctgatgagtggagcaaactctcctcctggttcgtctgcaatcgcatccactgccccaacatgacatggatgatccaggttcccaggatctatgatgtgttccgttccaagaatttccttccacattttggaaaaatgctggagaatattttcatgccagtgtttgaggccaccatcaacccccaggctgacccagaactcagtgtcttcctcaagcatatcactggctttgacagtgtggatgatgagtccaaacacagtggccacatgttctcctccaagagtcccaagccccaggagtggacattggaaaagaatccatcttacacttactatgcctactacatgtatgcaaacatcatggtgctcaacagcctgagaaaggaacgaggcatgaatacgtttctgttccgacctcactgtggagaagctggagccctcacccatctcatgacagcattcatgatagcagatgatatctctcatggcctaaatttaaaaaagagtcccgtgctacagtacttgtttttcttagcccaaattcccatcgccatgtcaccactaagtaacaatagcctatttctagagtatgccaaaaatccttttttggatttccttcagaaagggctaatgatctcactgtctacagatgacccaatgcaattccactttaccaaggagcccctaatggaagaatatgctattgctgcacaagtcttcaagctgagcacctgtgatatgtgcgaagtggcaaggaacagtgtcttgcagtgtggaatttctcatgaggagaaagtaaagtttctgggcgacaattaccttgaggaaggccctgctggaaatgatatccggaggacaaatgtagcccaaatccgcatggcctatcgctatgaaacctggtgttatgaactcaatttaattgctgagggtcttaaatcaacagaataa

SEQ ID NO: 2224 - DNA, 4076 bp, Homo sapiens
  SIMILAR (428)..(2821): 981254mologous to Rattus norvegicus unr protein (AA 1- 798),accession number X52311,Smith-Waterman Score=4102.
gcttatggcggcgctggagagggggcgctgagctgttgggtatgaagtgtaacagaacagactttaccacctgaaactgctgcttcaagttcagatcaggcaaggaacaaacctcgtaacaactaacaagaccaaagaagagtacacttaagttgaagacacaacacttgatctgaaacaagaagtttgtgcctactcaacagctttgaaagagcacttcccaacgctgctagtagtctttgttttcttcagtgctgtactgtgagattgcccggtacagcagcagttgtattctttattagcttggtagatcattttctctcgctcttttttttaatactagcaactttcatcctttgaaacgtgtgctgaaaaagaagaatcagcaaatactactgaaagtgcaatatttgagtatcactgcgagatgagctttgatccaaaccttctccacaacaatggacataatgggtaccctaatggtacttcagcagcactgcgtgaaactggggttattgaaaaactgttaacctcttacggatttattcagtgttcagaacgtcaagctagacttttcttccactgttcacagtataatggcaacctgcaagacttaaaagtaggagatgatgttgaatttgaagtatcatcggaccgacggactgggaaacccattgctgttaaactggtgaagataaaacaagaaatcctccctgaagaacgaatgaatggacaagttgtgtgcgctgttcctcacaacttagagagtaaatctccagctgccccgggtcagagtccaacagggagtgtatgctacgaacgtaatggggaagtgttttatctgacttacacccctgaagatgtcgaagggaacgttcagctggaaactggagataaaataaactttgtaattgataacaataaacatactggtgctgtaagtgctcgcaacattatgctgttgaaaaagaaacaagcccgctgtcagggagtagtttgtgccatgaaggaggcatttggctttattgaaagaggtgatgttgtaaaagagatattctttcactatagtgaatttaagggtgacttagaaaccttacagcctggcgatgatgtggaattcacaatcaaggacagaaatggtaaagaagttgcaacagatgtcagactattgcctcaaggaacagtcatttttgaagatatcagcattgaacattttgaaggaactgtaaccaaagttatcccaaaagtacccagtaaaaaccagaatgacccattgccaggacgcatcaaagttgactttgtgatccctaaagaacttccctttggagacaaagatacgaaatccaaggtgaccctgctggaaggtgaccatgttaggtttaatatttcaacagaccgacgtgacaaattagagcgagcaaccaatatagaagttctgtcaaatacatttcagttcactaatgaagcccgagaaatgggtgtgattgctgccatgagagatggttttggtttcatcaagtgtgtggatcgtgatgttcgtatgttcttccacttcagtgaaattctggatgggaaccagctccatattgcagatgaagtagagtttactgtggttcctgatatgctctctgctcaaagaaatcatgctattaggattaaaaaacttcccaagggcacggtttcatttcattcccattcagatcaccgttttctgggcacggtagaaaaagaagccactttttccaatcctaaaaccactagcccaaataaaggcaaagagaaggaggctgaggatggcattattgcttatgatgactgtggggtgaaactgactattgcttttcaagccaaggatgtggaaggatctacttctcctcaaataggagataaggttgaatttagtattagtgacaaacagaggcctggacagcaggttgcaacttgtgtgcgacttttaggtcgtaattctaactccaagaggctcttgggttatgtggcaactctgaaggataattttggatttattgaaacagccaatcatgataaggaaatctttttccattacagtgagttctctggtgatgttgatagcctggaactgggggacatggtcgagtatagcttgtccaaaggcaaaggcaacaaagtcagtgcagaaaaagtgaacaaaacacactcagtgaatggcattactgaggaagctgatcccaccatttactctggcaaagtaattcgccccctgaggagtgttgatccaacacagactgagtaccaaggaatgattgagattgtggaggagggcgatatgaaaggtgaggtctatccatttggcatcgttgggatggccaacaaaggggattgcctgcagaaaggggagagcgtcaagttccaattgtgtgtcctgggccaaaatgcacaaactatggcttacaacatcacacccctgcgcagggccacagtggaatgtgtgaaagatcagtttggcttcattaactatgaagtaggagatagcaagaagctctttttccatgtgaaagaagttcaggatggcattgagctacaggcaggagatgaggtggagttctcagtgattcttaatcagcgcactggcaagtgcagcgcctgtaatgtttggcgagtctgtgagggccccaaggctgttgcagctcctcgacctgatcggttggtcaatcgcttgaagaatatcactctggatgatgccagtgctcctcgcctaatggttcttcgtcagccaaggggaccagataactcaatggggtttggtgcagaaagaaagatccgtcaagctggtgtcattgactaaccacatccacaaagcacaccattaatccactatgatcaagttggggggaatctggtgaagggttctgaatatctccctcttcatccctcccgaaatctggaatacttattctattgagctattacaccagttttaacaccttcctcgtgttatgtttaaaaaaataaataaatttaagaaaaccattttaaataatgcacagttgcagcctggaaaaacttaaggtggcgccttatagtatcaattttaggagctttatttggtgcatttaacgcaactggtaattgcagaatccactttgcctgtgtaagtgaaaaatatagactgttatcttgttggccctatgaaattctgcacttttcattatatactctaccttcattaattacttctggcaagatgttctgccttagcactcagttgcattcttttcctttttcttcctgttcattatgctttaattctgaggaccatatgagggtagaatatattatcttttaaaaattacaaaaatttgtataggcaaaccatttcttaaagttgatggccaaattttaaaatgttatttttcatatcatttataatcttgtcacaatccacttaaagaagtttggttatatttcagtgaaaattttcttccagagtaggttttttttcgtgggttggggggtaactttactacaattagtaagtatggtgcagaatttcatgcaaatgaggagtgccagcagtgtgataatttaaacatatttaaacaaaaacaaaaaaaatgaatgcacaaacttgctgctgcttagatcactgcagcttctaggacccggtttcttttactgatttaaaaacaaaacaaaaaaaaataaaaaagttgtgcctgaaatgaatcttgtttttttttataagtagccgcctggttactgtgtcctgtaaaatacagacacttgacccttggtgtagcttctgttcaactttatatcacgggaatggatgggtctgatttcttggccctcttcttgaattggccatatacagggtccctggccagtggactgaaggctttgtctaagatgacaagggtcagctcaggggatgtgggggagggcggttttatcttcccccttgtcgtttgaggttttgatctctgggtaaagaggccgtttatctttgtaaacacgaaacatttttgctttctccagttttctgttaatggcgaaagaatggaagcgaataaagttttactgatttttgagacact

SEQ ID NO: 2225 - DNA, 974 bp, Homo sapiens
  SIMILAR (590)..(441): 661254mologous to Rattus norvegicus unr protein (AA 1- 798),accession number X52311,Smith-Waterman Score=168.
atatttattttaaaatggttttcttaaatttattttttttaacagcttcctcgtgttatgtttaaaactggtgtaatagctcaaaagaattaagtattccagatttcgggagggatgaagagggagatattcagaaaccttcaccagattcctcccaacttgatcatagtggattaatgacgtgctttgtggatgtggttagtcaatgacaccagcttgacggatctttctttctgcaccaaaccccattgagttatctggtccccttggctgacgaagagccattaggcgaggatcactggcatcatccagggtgatgttcttcaagcgactgaccaaccgatcaggtcgaggagctgcaacagccttggggccctcacagactcgccaaaccattcccaggccactgcacttgccagtgccgctgatgaagaatcaccggagaactccacctcatctcctgcctggagctcaaggccatcctcaacttctttcatatggaaaaagagcttcttgctatcccctacttcatagtttaatgaaagccaaactgatcttgcacacattccagtgggccctacgcagggggtgtgatgttgtaagccatagtttgtgcattttggccctggtctggacttttcaaaaagcaaatgtagtaaaacaaaaagtggtctctgctagattaagacaagagacataaccaaatggaaagtgtgatcctttattagcttctgattcataaaaaaacctataagagacatttggggggatatttggggaaataggaagatggaatgggtagtagataatgtggtatatttgatttttctagaagtgataattgagttacgtaggataatgttctaattcttaggagatgcatgcagaagttttttttttaagttttgaaaagtcatgatgttgacagcatattttcaaataaatatgtacaaaatcaaaaaaaaaaaaaaaag

SEQ ID NO: 2226 - DNA, 3609 bp, Homo sapiens
  SIMILAR (421)..(2631): 891254mologous to Homo sapiens unr protein,accession number AF077054,Smith-Waterman Score=3340.
gcggcgctggagagggggcgctgagctgttgggtatgaagtgtaacagaacagactttaccacctgaaactgctgcttcaagttcagatcaggcaaggaacaaacctcgtaacaactaacaagaccaaagaagagtacacttaagttgaagacacaacacttgatctgaaacaagaagtttgtgcctactcaacagctttgaaagagcacttcccaacgctgctagtagtctttgttttcttcagtgctgtactgtgagattgcccggtacagcagcagttgtattctttattagcttggtagatcattttctctcgctcttttttttaatactagcaactttcatcctttgaaacgtgtgctgaaaaagaagaatcagcaaatactactgaaagtgcaatatttgagtatcactgcgagatgagctttgatccaaaccttctccacaacaatggacataatgggtaccctaatggtacttcagcagcactgcgtgaaactggggttattggaaaactgttaacctcttacggatttattcagtgttcagaacgtcaagctagacttttcttccactgttcacagtataatggcaacctgcaagacttaaaagtaggagatgatgttgaatttgaagtatcatcggaccgacggactgggaaacccattgctgttaaactggtgaagataaaaacaagaaatcctcccgaagaacgaatgaatggacaagaagtgttttatctgacttacacccctgaagatgtcgaagggaacgttcagctggaaactggagataaaataaactttgtaattgataacaataaacatactggtgctgtaagtgctcgcaacattatgctgttgaaaaagaaacaagcccgctgtcagggagtagtttgtgccatgaaggaggcatttggctttattgaaagaggtgatgttgtaaaagagatattctttcactatagtgaatttaagggtgacttagaaaccttacagcctggcgatgatgtggaattcacaatcaaggacagaaatggtaaagaagttgcaccagatgtcagactattgcctcaaggaacagtcatttttgaagatatcagcattgaacattttgaaggaactgtaaccaaagttatcccaaaagtacccagtaaaaaccagaatgacccattgccaggacgcatcaaagttgactttgtgatccctaaagaacttccctttggagacaaagatacgaaatccaaggtgaccctgctggaaggtgaccatgttaggtttaatatttcaacagaccgacgtgacaaattagagcgagcaaccaatatagaagttctgtcaaatacatttcagttcactaatgaagcccgagaaatgggtgtgattgctgccatgagagatggttttggtttccatccaagtgtgtggatccgtgaatgttccgtatgttccttcccacttccagtgaaattctggatgggaaccagctcccatattgcagatgaagtagagtttactgtggttcctgatatgctctctgctcaaagaaatcatgctattaggattaaaaaacttcccaagggcacggtttcatttcattcccattcagatcaccgttttctgggcacggtagaaaaagaagccactttttccaatcctaaaaccactagcccaaataaaggcaaagagaaggaggctgaggatggcattattgcttatgatgactgtggggtgaaactgactattgcttttcaagccaaggatgtggaaggatctacttctcctcaaataggagataaggttgaatttagtattagtgacaaacagaggcctggacagcaggttgcaacttgtgtgcgacttttaggtcgtaattctaactccaagaggctcttgggttatgtggcaactctgaaggataattttggatttattgaaacagccaatcatgataaggaaatctttttccattacagtgagttctctggtgatgttgatagcctggaactgggggacatggtcgagtatagcttgtccaaaggcaaaggcaacaaagtcagtgcagaaaaagtgaacaaaacacactcagtgaatggcattactgaggaagctgatcccaccatttactctggcaaagtaattcgccccctgaggagtgttgatccaacacagactgagtaccaaggaatgattgagattgtggaggagggcgatatgaaaggtgaggtctatccatttggcatcgttgggatggccaacaaaggggattgccctgcaagaaaggggagagcgtcaagttccagttgtgtgtcctgggccaaaatgcacaaactatggcttacaacatcacaccccctgcgcagggcagcagtggaatgtgtgaaagatcagtttggcttcatttaactatgaagtaggggatagcaagaagctcttttcccatgtgaaagaagttcaggatggcattgagctacaggcaggagatgaggtggagttctccagtgattcttaatccagcgcactggcaagtgcagcgccctgtaatgtttggcgagtctgtgaggggccccaaggctgttgcagctcctcgacctgaatcggttggtcaatcgcttgaagaatatcactctgggatgatgccagtgctcctcgcctaatggttcttcgtcagccaagggggaccagataacttcaatgggggttttggtgcaggaaaggaaagatcccttcaagctggtggtcattgactaaccacatccacaaagcacaccatttaatccactatgattcaagttggggggaatctggtgaagggttctgaatatctccctcttcatccctcccgaaatctgggattacttattctattgaggctattacaccagttttacacacctctcctcggtgttatggttttaaaaaaataaataaattttagaaaacccttttaaataatgcacagttgcagcctggaaaaacttaaggtggcgccttatagtatcaattttaggagctttatttggtgcatttaacgcaactggtaattgcagaatccactttgcctgtgtaagtgaaaaatatagactgttatcttgttggccctatgaaattctgcacttttcattatatactctaccttcattaattacttctggcaagatgttctgccttagcactcagttgcattcttttcctttttcttcctgttcattatgctttaattctgaggaccatatgagggtagaatatattatcttttaaaaattacaaaaatttgtataggcaaaccatttcttaaagttgatgggccaaattttaaaatgttatttttcatatcatttataatcttgtcacaatccacttaaagaagtttggttatatttcagtgaaaattttcttccagagtaggttttttttcgtgggttgggggggtaactttactacaattaggtaagtatggtgcagaatttcatgcaaatgaggagtgccagcagtgtgataatttaaacatatttaaacaaaaacaaaaaaatgaatgcacaaacttgctgctgcttagatcactgcagcttctaggacccggtttcttttactgatttaaaaaaaaaa

SEQ ID NO: 2227 - DNA, 598 bp, Homo sapiens
  SIMILAR (323)..(532): 231254mologous to Pisum sativum ribosomal protein S21,accession number Y17134,Smith-Waterman Score=68.
cacaattacagggtgctatgtaagatgctaaggggtggataaatctcagaataaataaataaaagtaactttccatggactgagggagacggtcaccatgcagtacgccacagttccagggcatgtctgtagagcagggaaaagtactgcaaaggccccaatctttctttgatgtgtgtccctttcttccctttgagttgggttcctgctgatcctgagggaacccctcttgctgctcctcggcttgaccatctcagcgcctccttagagctccagctgactctcatcctgctcccccatgcagggctggttacatgatttgtggatcccagtgcacaatgaaacaagtataaaaataggtcggatgcaggaggtggagcttgcagacaagcaccataaggagtatcagttaattgaaaaagtctttactagatgccaggagctgtgtcagttggataaaacacaagggcgaaacaatgcagagagattggaaaggaacttggcagtcaccaagtacctaatttacatgtcaggatttcgagctgaagtaggcattctcttcctgcattccaactctccccttcctgcttacttctga

SEQ ID NO: 2228 - DNA, 891 bp, Homo sapiens
  SIMILAR (516)..(319): 321254mologous to rat cytomegalovirus Maastricht pr121.1,accession number AF232689,Smith-Waterman Score=85.
atgggaagtcacagaaaaggtcattcaagctgtagtaccaagagcagtaggggagactgggccagactagagcagacctggactgtggctgtggttcagctgaatgatggagttgggccttggagcccaaggagcactcagatgaagtttcagaaaggaagaggaggactcctaactcttatcaatggagaaggcagccttaataccactggtcatcagggaggaccagagcagtcagaagcagcaacagcagcacagagaatgctgatgaggtatctgcaggacacgagaagcatgccggaaggtggagcccagaagagaaggtgtccactgtggggcccagccctgccccagtaccacctggccagggaccccaggaccctctggcagggaacaatagggaacctagtggaactgaagtctgatcctgatgctgtctccttcccaaatttgtcttcctccatcccctcccacccatccgcagttgcatcctctgctgcactccatcttccagaccatagttcttccacagctttcatcactcgctcagctacagtctgcagaacaggttacaaggagagagactggcttacccgatggggtgagcggtctgctgggttaggtgccagagacggcagcgcaggcaccggcctctccttgatgcacaatggctctgcttcgccccacgatgctgaggttaacagaacccgcagtagcttcgctctgctggttcggggatgcagtagcgaagacgagcgtcctagcgtgtttgtgtgtgcgaaagataatacactctatggtactgaccagaacaaattcacagtaactttaagaaacgtcaggggaaccaacccgccagaggtggacgaaatccccaagcctgagaaatga

SEQ ID NO: 2229 - DNA, 744 bp, Homo sapiens
  SIMILAR (345)..(64): 751254mologous to Homo sapiens Human normal uterus tissue derived protein 26,accession number Y59863,Smith-Waterman Score= 350.
atggaactgaagttcacagagtttgctgacttgctcacggttgcacaggaaggtgaagatggaggtctcttcgtgctctccctcactgccttcaagattctggagaatcttgtgtttggcaaaggatcccaagcaaagaccttccctgagattctcctgtgcctcctgttggctctctttgcatctggcctcatccaccgagtctgtgtcaccacctgcttcatcttctccgtggttggtctgtgctacatcaacaagatctccactctgtatcaggcagcagctgcagtcctcacaggaccttggctcttgccaagtttcactgcaaatccacagaagcaggtttgcgagctcgaatacctttgctccactgccacacgcagcaccgggactgggcgtctggagcttaagtctgggggtctgagcctgggaccggcaaatccgcgcagcgcatcgcgcccagtctcggagactgcaaccaccgccaaggagtacgcgcggcaggaaacttctgcggcccaatttcttccccagctttggcatctccgaaggcacgtacccgccctcggcacaagctctctcgtcttccacttcgacctcgaggtggagaaagaggctggcaagggctgtgcgcgtcgctggtgtggggagggcagcaggctgcccctccccgcttctgcagcgagttttcccagccaggaaaagggagggagctgtttcaggaatttcagtgccttcacctag

SEQ ID NO: 2230 - DNA, 551 bp, Homo sapiens
  SIMILAR (287)..(364): 1001254mologous to Homo sapiens Human normal uterus tissue derived protein 25,accession number Y59862,Smith-Waterman Score= 131.
acggaattcccgggttgacgatttcgtatgcgcatagctaaccgcacccggttcagctcgccgtttcttggccagaggcgcctggttggactcacgggcggggcatgatggtggtgtgtgacgggcacctcgctggccgcttctcctccctcctgtccctgctgctctttgctgggatgcagatgtacagccgtcagctggcctccaccgagtggctcaccatccagggcggcctgcttggttcgggtctcttcgtgttctcgctcactgccttcaataatctaggagaatcttgtctttggcaaaggattccaagcaaagatcttccctgagattctcctgtgcctcctgttggctctctttgcaatctggcctcatccaccgagtctgtgtcaccacctgcttcatcttctccatggttggtctgtactacatcaacaagatctcctccaccctgtaccaggcagcagctccagtcctcacacccagccaaggtcacaggcaagagcaagaagagaaactgaccctgaatgttcaataaagttgattct

SEQ ID NO: 2231 - DNA, 507 bp, Homo sapiens
  SIMILAR (114)..(392): 321254mologous to Thermotoga maritima 2-keto-3-deoxygluconate kinase,accession number AE001693,Smith-Waterman Score=96.
tttcgtggctgcggaggtggcggccgggctgggatagcgcgagtgtccgcggccgagcagcagagatttttgctgtgagaattaattaccagtaacagttcaatatgggggacattctggctcatgaatctgaattacttggactagtgaaagagtatttagattttgctgaatttgaagacaccttgaaaacattttcaaaagaatgcaaaataaaaggaaaaccattgtgtaaaacagtaggcggatctttcagagactccaaatcattgacaattcagaaggatcttgtcgctgcatttgacaacggagaccagaaggtgttcttcgatctgtgggaggagcacatttcaagttccatccgagatggggactcctttgcccagaagctggaattctatctccacatccattttgccatctatcttttgaagtactctgtggggagaccggacaaagaggagctggatgaaaagatttcctacttcaaaacctacctggagacca

SEQ ID NO: 2232 - DNA, 1140 bp, Homo sapiens
  SIMILAR (176)..(21): 461254mologous to Mus musculus Pro-Pol-dUTPase polyprotein,accession number Y12713,Smith-Waterman Score=104.
tcaacatctgtgttcccagcagggacgcagtgttcctctagatttgctattttgttgaagggactggggagggtccaagggcttccctttgctccctctgtcataatagcccttactttttgggtcacagagccagtgtggagattccacctgtagcttaggggatctattccaactctttgttactttgtccattctccttctgggatgaaaaagaagttcaggaaaacaggcattcagggaacggtacttggggtatcggacatcctggaagagttctttaaatgaggggtgcaccatagggttgggaaacaaaaaggaagggcatagaaagggaaagaaactctgtggtctggctcaaggctgcccctttggtctcccaggtaggttttgaagtaggaaaatcttttcatccagctcctctttgtccggtctcccccacagagtacttcaaaagatagatggcaaaatggatgtggaagatagaattccagcttctgggcaaaggagtccccatctcggatggaaacttgaaatgtgctcctcccacagatcgaagaacaccttctggtctccgttgtcaaatgcagcgacaagatccttctgaatagcatcgtcgcccctggatctgactttgatggcgaaatcagggacttcaagcctgaacctaatgttgtcacagaaagatactttggaagttctgtttttgcctttagggatgacccttagttgggactctgtagggtttgctggtgctccctctctcctcagttgggactctgtagggtttgctggtgctctctctctcctcagttgggactccctgtaggatttgctggtgctccctctctcctcagttgggactccctgtaggatttcctggtgctcccctctctcccaagttgggactccctgtagggtttgctggtgctccctttggcccatccctggatcatctttgctctgaattgtcaatgatttggagtctctgaaagatccgcctactgttttacacaatggttttccttttattttgcattcttttgaaaatgttttcaaggtgtcttcaaattcagcaaaatctaaatactctttcactagtccaagtaattcagattcatgagccagaatgtcccccat

SEQ ID NO: 2233 - DNA, 645 bp, Homo sapiens
  SIMILAR (1)..(321): 301254mologous to Suberites domuncula LAGL protein,accession number AJ250580,Smith-Waterman Score=102.
atggcggaaggtgaaaggcatgtcccatatggtggcagacaaaagagaacttgtgcagggaaattcccctttttaaaaccatcagatcttgtgagacttattcacaatcatgagaacagcacaggaaagatctgcccccatgatttagtacctcccccgctgggtcctgtgggaattcaagatgagatttggcatcctgatgaaaagagattggaaggcctctccaagcaactggactgggatgttcgaagcattcagcgctggtttcgacaaagacgcaatcaggagaagccaagcacgctgacgaggttctgtgagagcataaccagcctcatcagagtgcctgaagacggctgtagaaaggttatgttttatgcttcatcttcaggatcttatttctggcagacaaaatcagatataagcaaatatgaaatccgtgttaggctcacattagaagacattcacacttttaccacaagcctggtagcaggaccagtgggtcagtatggtggtgaaggcagtgggctgtggagcctgggagtctgcattggagtcttctctctgataaaaacctctcgggtatttgggagggttgctggccactggattcgtaaaatgggcacattaatagtgtctgcttcatag

SEQ ID NO: 2234 - DNA, 716 bp, Homo sapiens
  SIMILAR (304)..(50): 361254mologous to Bos taurus fibrinogen A-alpha chain,accession number AF095463,Smith-Waterman Score=98.
tcaccaaccaagtactgaattggttcgcttcctcctgcaccttacagcctttccttccattccctccaacggatccccaagccacaaaccacgaccgggagcttctccatcgatgagccgctgtttgctcaaataaactcttgcggccgagggaactcgggtcccagaccccggagtcgccgcagggaggcctaggtccctccacagccggttccggccggttccaaccagcccctcccccaggtctggggacgcctgacccctcacacgcaccatttctcggcttccaggtgtcccggcgtcctccctacgactcccgcgacctgtacaggtcacggcgcgacagaggctgcggcggagacaccttgggcctctcggagaaacggagacgcgagcccgggtggggacggtcgccagaaacaaaggcttcgactctagaggatccccttctcgtatgttgaccaggctgggatatcgtccaccccctaacctgctcactgaagggctcagtgaccacccttccaagagacactgcattttgcctccatctgcctgaagtacattttgcttttcaagttcttgcatcacctcagtgggatgggttttcctgtccttgggataagttttctcacttcaccagtctaaaagaatccagagggcaagaatcatatctgtttttcccctcaataccatcatccatttggctggacaccaat

SEQ ID NO: 2235 - DNA, 496 bp, Homo sapiens
  SIMILAR (190)..(492): 591254mologous to Homo sapiens Human secreted protein, SEQ ID NO: 4884,accession number G00803,Smith-Waterman Score=277.
cccggcagaggagggcagggcctgcgcctccctacggagcctttgtttctggcgaccgtccccacccgggctcgcgtcttcgtttctccgataggcccaaggtgtctccgccgcagcctctgtcgcgccgtgacctgtacaggtcgcgggagtcgtatggaggacgccgggacacctggaagccgagaaatggattcagtggcctttgaggatgtggctgtgaacttcaccctggaggagtggactttgctggatccttcccagaataatctctacagggatgtgatgcgggaaaccttcaggaacctggcttctgtaggaaaacagtgggaagaccagaacatttgaagaccccattcaaaattcccaggagaaatattaagtcatattccagagagactctgtgaaagtaaagaaggtggttcaaggtgaagaaaaccttcagccagattccagatggtattctgaacaagaaaacttcctggggtaaaaccgt

SEQ ID NO: 2236 - DNA, 426 bp, Homo sapiens
cttgttctcctacccctcgcaggagggggagcgcaggtgagagagtgcagtggttgggcgactgcttttgggtgtcagcaagagcaaactccatactagctccgagacaccatctagggtagggtgctcatgacccttgaagcccgaggggaaacattacagcacccttttaactttgccatccgcagacggcttaagagttaacagctcagtggagggtcagcgtgacagccttttgcacccacattcgtggcatctgaattcttgcccagcacccaggaggaatgaggtcacacgaacaaacaggaaatgataaatgcgggagattttattgccgatgaaagtggctctcagtgtgaagaggagctgaaaaggagacagagcaggaaggtattcttcccctggagtccagccaaccagacgaaa

SEQ ID NO: 2237 - DNA, 1344 bp, Homo sapiens
  SIMILAR (198)..(431): 461254mologous to Escherichia coli K12 putative endoglucanase,accession number AE000380,Smith-Waterman Score=142.
atgacacatatacagaatgaagttcatctagtgtcatatcgcgactctagaggatccccttccggacgatgtagcaaggtctttgccgaatatcccaacgtgatcaacgagattatcaatcttcgttatccaacggtgcgacgctgggggaagctgtggggcgtggatacgaactacaaatctgtcagcaagttccattattccatgactccaccaacttctatggcagcacgggtaatgcgcgcggcaggcggtggtgaatatctccaacgcggccttcccgattctgatggcgctaatgataaaaactactggctggccttcggcgaaaaacgcgcctgggataaaacgagctggcgtacattacggaagcgccttctcttgttgagccggaaacgttacgcgctgagagatcccctcataatttccccaaaacgcctagtccgtaggcaggacttttcaagtctcgaaggtttcttcaatctgcattcgcttcgaatagatattaacaagttgttgggtgttcgaatttcaacagtgcgactgaactcgcaataccataagccgtttttgctcacggatatcagaccagtcaacagtacaatgggcatcgtattgcccgaacagataaagctagcatgccaacgtatacagcgagtcgctctttgtggaggtgacgattacctaacaatcggcgattcgtttgatgttatgttttgttctcgctttggttggcaggttacgccaagttcgccgcttaatgccgccgcttggaaatccttgccggaatttgcccgatttgtccccggaaaaagttgccaaatcacagccccgaccctccgtgaccaaacacttaacgtcatcaaacggttcctgcatgaagccagcgaaatcgttcacgcggggacccggatcgtgaaggcaagtgcgctgtgtctcgataggtctctgtcgttttacgggggtgtgtgctcagccagtgtggttgtctacgggctcgtcttggtgtactttctgcgttggtattgtgattgtgtcacgctttcccgtagtgagtcctatccggaggccccaaaaggagacccaagaagagcaaagtggcccaagaggccgcccccaaggaccccgaccactgtacctcccaaatccccccaaaggaggggcccaaagccacatgctaagaaaggagtccaccagacatcaaaccagccaactagcctccaaaatgaaggagaaaaaaatctgtcacgacaagcaaatgcggagaattttgtcaacaccaggcccgcccctaaaaggctcctgaaggaaccactaaacatggaaaggaacaagcagtactag

SEQ ID NO: 2238 - DNA, 2834 bp, Homo sapiens
  SIMILAR (723)..(1232): 921254mologous to Cloning vector pZC320 SopB,accession number U26464,Smith-Waterman Score=789.
  misc_feature (1)...(2834): n = a,t,c or g
gatccccagccattactattgctgtatttggtaagcaaaatacgtacatcaggctcgaaccctttaagatcaacgttcttgagcagatcacgaagcatatcgaaaaactgcagtgcggaggtgtagtcaaacaactcagcaggcgtgggaacaatcagcacatcagcagcacatacgacattaatcgtgccgatacccaggttaggcgcgctgtcaataactatgacatcatagtcatgagcaacagtttcaatggccagctcggagcatcagatagaaaggcaggagagtgtcttctgcatgaatatgaagatctggtacccatccgtgatacattgaggctgttccctgggggtcgttaccttccacgagcaaaacacgtagccccttcagagccagatcctgagcaagatgaacagaaactgaggttttgtaaacgccacctttatgggcagcaaccccgatcaccggtggaaatacgtcttcagcacgtcgcaatcgcgtctgcatattgtacttttcctcttactcgacttaaccagtaccaacccagcttctcaacggatttataccatggcactttaaagccagcatcactgacaatgagcggtgtggtgttactcggtagaatgctcgcaagaccagtcaacaagtacaatgggcatcgtattgcccgaacagataaagctagcatgccaacggtatacagcgagtcgctctttgtggagaacaccccgttatcgacaccagctgccccgatggtggattcgttaattgcgcgcgtaggagtaatggctcgcggtaatgccattactttgcctgtatgtggtcgggatgtgaagtttactcttgaagtgctccggggtgatagtgttgagaagacctctcgggtatggtcaggtaatgaacgtgaccaggagctgcttactgaggacgcactggatgatctcatcccttcttttctactgactggtcaacagacaccggcgttgcggtcgaagaaaattgccgatgggagtcgccgtcgtaaagctgctgcacttaccgaaagtgattatcgtgttctggttggcgagctggatgatgagcagatggctgcattatccagattgggtaacgattatcgcccaacaagtgcttatgaacgtggtcagcgttatgcaagccgattgcagaatgaatttgctggaaatatttctgcgctggctgatgcggaaaatatttcacataaagaggaattacttaagcagcaagcatctaaccttcatgagcagaaaaaagctggggtggatattggagctgaagaacattattattcctatagtacagatgaagagaaagattcagagaagttaagcaacttgcccatgtcgactctagaggacccccttgactggtctgatatccgtgagcaaaaacggcttatggtattgcgagcttcagtcgcactacacggtcgttctgttactctttatgagaaagcgttcccgctttcagagcaatgttcaaagaaagctcatgaccaatttctagccgaccttgcgagcattctaccgagtaacaccacaccgctcattgtcagtgatgctggctttaaagtgccatggtataaatccgttgagaagctggcgtcggcaaaggagccatggattctagcaactaacttacctgttgaaattcgaacacccaaacaacttgttaatatctattcgaagcgaatgcagattgaagaaaccttccgagacttgaaaacactttcaggctacacagtcagggatcgaaacgtactctccacagttcgcttaggcatgggagtttgcggcattctggctacacataacaggggagacttagaattcggcttgaatccctttggtgcgactctaaaggcccccacatcggtcgattcgtttgatgttatgttttgttctcgctttggttggcaggttacggccaagttcgaaaataaccaaaaagcatacaaagaaacgtacggcgtctctcatattacacgccatgatatgctgcagatccctaaacagcagcaaaacgaaaaataccaagtgcctcaattcgatcaatcaacgattaaaaatattgagtctgcaaaaggacttgatgtgtgggacagctggccgctgcaaaacgctgacggaacagtagctgaatacaacggctatcacgttgtgtttgctcttgcgggaagcccgaaagacgctgatgacacatcaatctacatgttttatcaaaagatccctaaacagcagcaaaacgaaaaataccaagtgcctcaattcgatcaatcaacgattaaaaatattgagtctgcaaaaggacttgatgtgtgggacagctggccgctgcaaaacgctgacggaacagtagctgaatacaacggctatcacgttgtgtttgctcttgcgggaagcccgaaagacgctgatgacacatcaatctacatgttttatcaaaaggtcggcgacaactcaatcgacagctggaaaaacgcgggccgtgtctttaaagacagcgataagttcgacgccaacgatccgatcctgaaagatcagacgcaagaatggtccggttctgcaacctttacatctgacggaaaaatccgtttattctacactgactattncgagaaagaagagccacgatggccagctaaaaggagggaggaagagcttctcccatcgagagaacagaccatcaagatcaccagtaaacttcaagcaaatctttgggaggaaggcattgagagtgaacagagaaaggacgcagaccctgggctgaaggaggaggaagctgggaactcaacacagggttactga

SEQ ID NO: 2239 - DNA, 2922 bp, Homo sapiens
  SIMILAR (2182)..(2889): 991254mologous to Escherichia coli yejP,accession number U00008,Smith-Waterman Score=1203.
atgctgttagcaactgctctgaggggctttctaaagaatggggaccgaggccatgtagacacagaggaatggagaagctacccttgggcggcaagttttggccaactcaggagcagtcagaactgtccgggcgcgtctgcaagcggacggacgggcgttccaaccgtgctggtggcccgtaccgatgctgatgcgtcggatctgatcacctccgattgcgacccgtatgacagcgaatttatgaccggcgagcgtaccagtgaaggcttcttccgtactcatgcgggcattgagcaagcgatcagccgtggcctggcgtatgcgccatatgctgacctggtctggtgtgaaacctccacgccggatctggaactggcgcgtcgctttgcacaagctatccacgcgaaatatccgggcaaactgctggcttataactgctcgccgtcgttcaactggcagaaaaacctcgacgacaaaactattgccagcttccagcagcagctgtcggatatgggctacaagttccagttcatcaccctggcaggtatccacagcatgtggttcaacatgtttgacctggcaaacgcctatgcccagggcgagggtatgaagcactacgttgagaaagtgcagcagccggaatttgccgccgcgaaagatggctataccttcgtatctcaccagcaggaagtgggtacaggttacttcgataaagtgacgactattattcagggcggcacgccggataaggcgttcacgccgcatccggcaagcaaaccagctcataagccgggagaacaacctatgaaaaacaatccgctgatctcaatctatatgccgacctggaaccgccaacaactggcgattcgggcaataaaatcggttttgcgccaggactacagcaactgggagatgatcatcgtggatgattgctccacctcctgggaacaactgcaacagtacgtcaccgccctcaacgatccgcgtatcacttacattcacaacgacattaacagcggggcgtgcgcggtacgtaaccaggcgattatgctggcgcaaggggaatatatcaccgggattgatgacgatgacgaatggacacccaaccgtctgagcgtcttcctcgcccataaacagcaactggtcacacacgcctttttgtacgctaacgactacgtttgccagggcgaagtctattcccaaccggcaagcttgccgctgtatcccaaatcgccgtattcacgccgcctgttctacaaacgcaatatcattggcaaccaggtctttacctgggcatggcgtttcaaagagtgtttgttcgataccgaactgaaagcggcacaggattacgacatcttcctgcggatggtggtggagtacggcgaaccgtggaaagtagaagaggcgacgcagatcctggctatcaatcacggtgaaatgccgattcactcgtcacgagaacatttccgggtacttcccttttgccgaagcacaagaccatttcgacaggccaggaaaatatcgagggtaatcgtcacctccacaaagagcgactcgctgtataccgttggcatgctagctttatctgttcgggcaatacgatgcccattgtacttgttgactggtctgatatccgtgagcaaaaacggcttatggtattgcgagcttcaggtcgcactacacggtcgttctgttactctttatgagaaagcgttcccgctttcagagcaatgttcaaagaaagctcatgaccaatttctagccgaccttgcgagcattctaccgagtaacaccacaccgctcattgtcagtgatgctggctttaaagtgccatggtataaatccgttgagaagctgggttggtactggttaagtcgacgaatgcagattgaagaaaccttccgagacttgaaaagtcctgcctacggactaggcctacgccatagccgaacgagcagctcagagcgttttgatatcatgctgctaatcgccctgatgcttcaactaacatgttggcttgcgggcgttcatgctcagaaacaagggctggatctcggtgtctatggcgcgccagaaacgtttcttattgacggcaacggcatcattcgctatcgccatgcgggcgatctgaatcctcgcgtctgggaagaagagatcaagccgctgtgggagaaatacacgctggcgaccatcgatgtgttgcagtttaaagatgaagcacaggaacaacagttccgtcagctcactgaagaactgcgctgcccgaaatgccagaacaacagcattgccgattccaactcgatgattgccaccgacctgcgtcagaaagtgtatgaactgatgcaggaaggtaaaagtaaaaaagagattgtcgattatatggtggcgcgttacggcaacttcgtcacttacgatccgccgttaacgccgctgaccgtgctgctgtgggtgctgccagtagtggctattggcattggcggttgggtcatatacgcccgctcgcggcgtcgggtacgcgtggtgccggaagcgtttcctgaacaaagcgtgccggaaggtaagcgtgccggatatgttgtttatctgccgggtattgtggtggcgttaattgtggctggcgtcagctactaccagactggcaattatcagcaggtgaaaatctggcagcaggccacggcacaggctccggcgttgctggacagggcgctggatccgaaagccgatccgctcaacgaagaagagatgtcgcgtcttgcgctggggatgcgtactcaactgcaaaaaaatccgggagatatagaaggctggattatgttgggccgcgttggcatggcgctgggtaacgccagtatcgccaccgattgctacgccactgggtatcggctcgatcggacaacagtgatgctggatggggataggtga

SEQ ID NO: 2240 - DNA, 3499 bp, Homo sapiens
  SIMILAR (1604)..(1900): 981254mologous to Methylomonas aminofaciens transposase,accession number AB026428,Smith-Waterman Score=516.
  misc_feature (1)...(3499): n = a,t,c or g
aaaaaagaaatttccggttggtgaaagcgagtcgaaatttaatcagattaacattatcaatcacggggaagacgttgcccaaatcgatgctttcgttgcaaaaaccaggctggatcgcgttaaagacaaagattatatcaatgtcaatctcacctacgaacttgataagttaacaaaagggaatcagcaactcggtagtggtgagtggtcattgattgctgaatctattgatccctcagcagtgcgccaatttatcatccagtataacattgcgatgcagaagcagcttgctgcacaccctgagttagcaaacgatgaagttgctctgcaagaagtgaatgctgcattgttcaaagagtatttaccgttattacaaaaaagctcccgtttcacgcaagaaaaacatcagcaaacccactccacttttcaaaacttgttgccaccaaaggcggcaggcattgcgatggcgctaaatgtactgggtaaacaattcgataaactgcttaatgttacgctgtgttatccggacaataaccgtcagccgttcttcgatatgttaagcggtaaactgacgcggattgtcgtacatgtggatttacagcctattgccgatgagttacatggcgactacatcaatgacaaaagctttaagcgccattttcagcaatggctgaactcattgtggcaggaaaaagaccggcttctgacgtctctcatgtcatcacagcgtcagaataacagtaaaaattctgactatacctggaggttttcatggcgtgtcgctgccaacaaacgttcggtaatgacgctgttttccggtcctactgacatctatagccatcaggtccgcattgtgctggctgagaaaggtgtaagtttcgagatcgaacacgtggaaaaggacaatccgcctcaggatctgattgacctcaacccgaatcagagcgttccgaccctggtggatcgtgagctgaccctgtgggaatctcgcatcattatggaatatctggatgagcgtttcccgcatccgccactgatgcctgtttacccggtagctcgcggtgaaagccgtctgtacatgcatcgcatcgaaaaagactggtacacgctgatgaacaccatcatcaacggttcagcttctgaagcagatgccgcacgtaagcaactgcgcgaagaactgctggcgattgcgccggtcttcggtcagaagccgtacttcctgagcgatgagttcagcctggtcgattgctatcttgctccgctgctgtggcgtctgccgcaatgggcatcgagttcagcggccgggtgcgaaaagagcttgaaaggggctatattgacccgcgtctttgagcctcacgccgacctggtggcggatgtgaagctcctggacgtgcagttcctatggaatttgcgcgtgcgggcaaatcggtcttcacattgcgcacttgtgtcgcaactggaactgcgatggaaaaccagctatggacacactaggctgttttcctacgggacaacagacctactgccatcgtatagcgccgattttggccgaaggcgcgcctttaagccgtcgagctacggcttgatggaagttaaactgggctttatctgttcgggcaatacgatgcccattgtacttgttgactggtctgatattcgtgagcaaaaacgacttatggtattgcgagcttcagtcgcactacacggtcgttctgttactctttatgagaaagcgttcccgctttcagagcaatgttcaaagaaagctcatgaccaatttctagccgaccttgcgagcattctaccgagtaacaccacaccgctcattgtcagtgatgctggctttaaagtgccatggtataaatccgttgagaatctgggttggtactggttaagtcgacgctcgacacggactcattgtcaccacccgtcacctaaaatctactcagcgtcggcaaaggagccatgggttctagcaactaacttacctgttgaaattcgaacacccaaacaacttgttaatatctattcgaagcgaatgcagattgaagtaaccttccgagacttgaaaagtcctgcctacggactaggcctacgccatagccgaacgagcagctcagagcgttttgatatcatgctgctaatcgccctgatgcttcactacatagtgacggcgtccagtatcgaacgcacttctgcaattcgaggaacccctgtgcctctgtccaccactcctgtctacgacgatgtagcccgacaagatctatatcgtgatcggtccaccatgactagtgtcggcatttatgcaactaacatgagtacgggctataggtgggggagagagagagagagagacagaaaagagaaagaaagaaagaaaaagaaagcagacgacaacgacatcccacctgacgaacagaaacgacaacgactacgacgaacacgagcacaacacntgcaacaacgaaacgaaacagcgacaccaaccgactggacagcgaccaacgacaaaggaacgcaaccgacacgcgacgacgacaccagcggtggatcacgacggacagatggcaggtcacgggacgagcacaggagggaccgggaccgacacagacccggcagcagaggaacgcgaacgcgaacggacaccacgaacagcggaccacgacacggcgacgaccactctcgcgacaccggacaccaacggagacgacgcgacgaccgccccggcacgcgaccggcccctcgtcggacgccgtcaacgccccacgccagggtaccgacatgggcaagcgaatgcgacagcagaggccaacgcaagtcacaagaagaaaccacccaagaccgaaacaaccacagaacagaaagaaaggcacagcacccaaccaaggacaggaacgacaccgagaacaaactcagctcgggcacaaggcaacatcagaccaggacaggcacgaccacgaacgaacacgcacaaaccacaccacacaacacatcacagcacacaccaaatctccactcctctcctccttgtctgtgctatcatcaccagggacagcaggagagcaaacatagagacgcacaatacagcgtcgagcacaacgaaactgacaagaaagtaaacaaacgagaacgagaagacaaaatcatcagaacaagaaagtacaagcaagaaagactttatatcaagtcctgtattatagactgctttgaaaaacaaagtattcctgggatttctcgcaaggacagtgtaagcctggagctgctggggctacaactggaagaacacttgcaggataacgaagccaatataatgaaaagcaaagcccaggaagaggtggggtgtggaaagaacgaaaacgaacacgcaacagcagcagcagcaacggaaggggaactgagcaactgggaacggggaacggggaacgcgagcaagcgagagcgcaacaccacgcgaacacgcgaacaggaacgaacggaaccaacggaacgcgaaaggtga

SEQ ID NO: 2241 - DNA, 1611 bp, Homo sapiens
  SIMILAR (475)..(1608): 1001254mologous to Methylomonas aminofaciens transposase,accession number AB026428,Smith-Waterman Score=1980.
atgaacatgaacatcaaaaaaattgtaaaacaagccacagttctgacttttacgactgcacttctggcaggaggagcgactcaagccttcgcgaaagaaaataaccaaaaagcatacaaagaaacgtacggcgtctctcatattacacgccatgatatgctgcagatccctaaacagcagcaaaacgaaaaataccaagtgcctcaattcgatcaatcaacgattaaaaatattgagtctgcaaaaggacttgatgtgtgggacagctggccgctgcaaaacgctgacggaacagtagctgaatacaacggctatcacgttgtgtttgctcttgcgggaagcccgaaagacgctgatgacacatcaatctacatgttttatcaaaaggtcggcgacaactcaatcgacagctggaaaaacgcgggccgtgtcctgatgaatcccctaatgattttggtaaaaatcattaagttaagcttaacgttggcttgccacgcattacttgactgtaaaactctcactcttaccgaacttggccgtaacctgccaaccaaagcgagaacaaaacataacatcaaacgaatcgaccgattgttaggtaatcgtcacctccacaaagagcgactcgctgtataccgttggcatgctagctttatctgttcgggcaatacgatgcccattgtacttgttgactggtctgatattcgtgagcaaaaacgacttatggtattgcgagcttcagtcgcactacacggtcgttctgttactctttatgagaaagcgttcccgctttcagagcaatgttcaaagaaagctcatgaccaatttctagccgaccttgcgagcattctaccgagtaacaccacaccgctcattgtcagtgatgctggctttaaagtgccatggtataaatccgttgagaagctgggttggtactggttaagtcgagtaagaggaaaagtacaatatgcagacctaggagcggaaaactggaaacctatcagcaacttacatgatatgtcatctagtcactcaaagactttaggctataagaggctgactaaaagcaatccaatctcatgccaaattctattgtataaatctcgctctaaaggccgaaaaaatcagcgctcgacacggactcattgtcaccacccgtcacctaaaatctactcagcgtcggcaaaggagccatgggttctagcaactaacttacctgttgaaattcgaacacccaaacaacttgttaatatctattcgaagcgaatgcagattgaagaaaccttccgagacttgaaaagtcctgcctacggactaggcctacgccatagccgaacgagcagctcagagcgttttgatatcatgctgctaatcgccctgatgcttcaactaacatgttggcttgcgggcgttcatgctcagaaacaaggttgggacaagcacttccaggctaacacagtcagaaatcgaaacgtactctcaacagttcgcttaggcatggaagttttgcggcattctggctacacaataacaagggaagacttactcgtggctgcaaccctactagctcaaaatttattcacacatggttacgctttggggaaattatga

SEQ ID NO: 2242 - DNA, 1575 bp, Homo sapiens
  SIMILAR (1025)..(1144): 671254mologous to Methylomonas aminofaciens transposase,accession number AB026428,Smith-Waterman Score=124.
atgtgcgaactcgatattttacacgactctctttaccaattctgccccgaattacacttaaaacgactcaacagcttaacgttggcttgccacgcattacttgactgtaaaactctcactcttaccgaacttggccgtaacctgccaaccaaagcgagaacaaaacataacatcaaacgaatcgaccgattgttaggtaatcgtcacctccacaaagagcgactcgctgtataccgttggcatgctagctttatctgttcgggcaatacgatgcccattgtacttgttgactggtctgatattcgtgagcaaaaacgacttatggtattgcgagcttcagtcgcactacacggtcgttctgttactctttatgagaaagcgttcccgctttcagagcaatgttcaaagaaagctcatgaccaatttctagccgaccttgcgagcattctaccgagtaacaccacaccgctcattgtcagtgatgctggctttaaagtgccatggtataaatccgttgagaagctgggttggtactggttaagtcgagtaagaggaaaagtacaatatgcagacctaggagcggaaaactggaaacctatcagcaacttacatgatatgtcatctagtcactcaaagactttaggctataagaggctgactaaaagcaatccaatctcatgccaaattctattgtataaatctcgctctaaaggccgaaaaaatcagcgctcgacacggactcattgtcaccacccgtcacctaaaatctactcagcgtcggcaaaggagccatgggttctagcaactaacttacctgttgaaattcgaacacccaaacaacttgttaatatctattcgaagcgaatgcagattgaagaaaccttccgagacttgaaaagtcctgcctacggactaagcctacgccatagccgaacgagcagctcagagcgttttgatatcatgctgctaatcgccctgatgcttcaactaacatgttggcttgcgggcgttcatgctcagaaacaaggttgggacaagcacttccaggctaacacagtcagaaatcgaaacggaagacttactcgtggctgcaaccctactagctcaaaatttattcacacatggttacgctttggggaaattatgaggggatctctcagtaaacagcagcaaaacgaaaaataccaagtgcctcaattcgatcaatcaacgattaaaaatattgagtctgcaaaaggacttgatgtgtgggacagctggccgctgcaaaacgctgacggaacagtagctgaatacaacggctatcacgttgtgtttgctcttgcgggaagcccgaaagacgctgatgacacatcaatctacatgttttatcaaaaggtcggcgacaactcaatcgacagctggaaaaacgcgggccgtgtctttaaagacagcgataagttcgacgccaacgatccgatcctgaaagatcagacgcaagaatggtccggttctgcaacctttacatctgacggaaaaatccgtttattcctaacactgactattccggtaaacattacggcaaacaaagcctga

SEQ ID NO: 2243 - DNA, 1314 bp, Homo sapiens
  SIMILAR (1)..(1026): 1001254mologous to Escherichia coli, LBB84, plasmid pXT107, IS10L/R-1, Peptide PlasmidTransposonInsertionMutant, 402 aa transposase,accession number S67119,Smith-Waterman Score=1805.
atgtgcgaactcgatattttacacgactctctttaccaattctgccccgaattacacttaaaacgactcaacagcttaacgttggcttgccacgccttacttgactgtaaaactctcactcttaccgaacttggccgtaacctgccaaccaaagcgagaacaaaacataacatcaaacgaatcgaccgattgttaggtaatcgtcacctccacaaagagcgactcgctgtataccgttggcatgctagctttatctgttcgggcaatacgatgcccattgtacttgttgactggtctgatatccgtgagcaaaaacggcttatggtattgcgagcttcagtcgcactacacggtcgttctgttactctttatgagaaagcgttcccgctttcagagcaatgttcaaagaaagctcatgaccaatttctagccgaccttgcgagcattctaccgagtaacaccacaccgctcattgtcagtgatgctggctttaaagtgccatggtataaatccgttgagaagctgggttggtactggttaagtcgagtaagaggaaaagtacaatatgcagacctaggagcggaaaactggaaacctatcagcaacttacatgatatgtcatctagtcactcaaagactttaggctataagaggctgactaaaagcaatccaatctcatgccaaattctattgtataaatctcgctctaaaggccgaaaaaatcagcgctcgacacggactcattgtcaccacccgtcacctaaaatctactcagcgtcggcaaaggagccatggattctagcaactaacttacctgttgaaattcgaacacccaaacaacttgttaatatctattcgaagcgaatgcagattgaagaaaccttccgagacttgaaaagtcctgcctacggactaggcctacgccatagccgaacgagcagctcagagcgttttgatatcatgctgctaatcgccctgatgcttcaactaacatgttggcttgcgggcgttcatgctcagaaacaagagcaagccaccccctaccaccttcttgattctaccatctttctagaaaattctgtgtgggcttacatggtgaacacgttccatcaaagagggaattccaaggaatgggaggagaacacagccactccccatgacagcttgaagttcaacaccatgggaatgcggaagcacgtgaagaagggttataatgatacaggagttaaaaagaaattatttaggcaggaaacccttgctacaactccagatgacaatgggtttgatgttgcattcccccacaccaacacctag

SEQ ID NO: 2244 - DNA, 1312 bp, Homo sapiens
atgtgcgaactcgatattttacacgactctctttaccaattctgccccgaattacacttaaaacgactcaacagcttaacgttggcttgccacgcattacttgactgtaaaactctcactcttaccgaacttggccgtaacctgccaaccaaagcgagaacaaaacataacatcaaacgaatcgaccgattgttaggtaatcgtcacctccacaaagagcgactcgctgtataccgttggcatgctagctttatctgttcgggcaatacgatgcccattgtacttgttgactggtctgatattcgtgagcaaaaacgacttatggtattgcgagcttcagtcgcactacacggtcgttctgttactctttatgagaaagcgttcccgctttcagagcaatgttcaaagaaagctcatgaccaatttctagccgaccttgcgagcattctaccgagtaacaccacaccgctcattgtcagtgatgctggctttaaagtgccatggtataaatccgttgagaagctgggttggtactggttaagtcgaccgggcggtgaatccatacagatatttcataatcctcgagtgctggtggaaccggaaccaaaaagcatgcgtaatctgccatccggagtcgttcctgccgttcgccagccgctggcggaagacaaaacattgctgccgttttttagtaacgaacgggtgattcgtgctgctggcggcgttggcgcattgtccgactggctattacgtcatgttacatcctgccagtggcctaatggcgattaccatcacactgaaacagtcattcaccgttatggtaccggcgcaatggtgttgtgctggcactgcgacaaccaactgcgtgaccagacatcggaatcactggagctgcttgctcaacaaaatctgacagcatgggtgattgacgtcatccgtcacgcaataagcggtacgcaggagcgggaattatctttggctgaattatcctggtgggcggtctgcaatcaggtggtggatgcactacctgaggctgtatcgcgtcgttcgctgggattaccagcggaaaaaatctgctcggtgtaccgcgaaagcgacatcgtaccgggagagcagaccgccaccagcatattgaaacaacgcacaaaaaatcttgcaccgttgccttacgcccaccagcaacaaaaatcaccacaggaaaagacggtggtaagcatcaccgttgatccagagtctccggaatctttcatgaagctgcctaaacgtcgccgctgggttaaggagaaatacacacgttgggttaagacacagc

SEQ ID NO: 2245 - DNA, 2022 bp, Homo sapiens
  SIMILAR (1)..(1119): 811254mologous to Methylomonas aminofaciens transposase,accession number AB026428,Smith-Waterman Score=1541.
atgtgcgaactcgatatttacacgactctctttaccaattctgccccggaattacacttaaaacgactcaacagcttaacgttggcttgccacgccttacttgactgtcaaactctcactcttaccgaacttggccgtaacctgccaaccaaagcgagaacaaaacataacatcaaacgaatcgaccgattgttaggtaatcgtcacctccacaaagagcgactcgctgtataccgttggcatgctagctttatctgttcgggcaatacgatgcccattgtacttgttgactggtctgatatccgtgagcaaaaacggcttatggtattgcgagcttcagtcgcactacacggtcgtactgttactctttatgagaaagcgttcccgctttcagagcaatgttcaaagaaagctcatgaccaatttctagccgaccttgcgagcattctaccgagtaacaccacaccgctcattgtcagtgatgctggctttaaagtgccatggtataaatccgttgagaagctgggttggtactggttaagtcgagtaagaggtaaagtacaatatgcagacctaggagcggaaaactggaaacctatcagcaacttacatgatatgtcatctagtcactcaaagactttaggctataagagactgactaaaagcaacccaatctcatgccaaattctattgtataaatctcgctctaaaggccgaaaaaatcagcgctcgacacggactcattgtcaccacccgtcacctaaaatctactcagcgtcggcaaaggagccatgggttctagcaactaacttacctgttgaaattcgaacacccaaacaacttgttaatatctattcgaagcgaatgcagattgaagaaaccttccgagacttgaaaattcgcttaggcatggaagttttgcggcattctggctacacaataacaagggaagacttactcgtggctgcaaccctactagctcaaatttattcacacatggttacgctttggggaaattatgaggggatctctcagcgctttggtgggaaggttatcaacgttatcaatggcaaaacggatacgttgttagaaatctctgtattaccgttggatagctatgcgaagcctgatattgaagccaactatcagggccgactgctcgccagacaaagcggcttccttgatccagtgaactatcgtaatcactttgttaccatcctcggcaccattcagggtgaacaacctggctttatcaataaagtcccgtataacttcctggaagtgaatatgcagggcatccaggtgtggcatttgagagaagtggttaataccacctataacctgtgggattacggctatggtgcattctggccggaaccgggctggggtgcgccttactacaccaatgcgctggctaaagaactagcaataagttccaagaactgggccagccgcttgtcgcttgctgcgccgctgcgtgcggcgcgtgccgccaccggcgacgtcgttatcccgcctctcccgtcggcatcgctctactgtcactactcctgtgcgtgtggagtcctggacgaatctgaaagatgtgacaaagagcggaccgtgaacactttgctgcggtctcactgcttgcaggattccgccccgatcccgtccttccatatcgggactggcaacgacacctacgtgagggaattcgccaggcagggaaccttctggatccaatccgagcctcctttggtacaccgctggatgggccgtttcctttcctcatcgccgcataacggtgttagcttcctatttggtccgctacaaaccagtgtcgggcatagcggctctgccggggcgctgttccagaaaaacgccagtgatgcgcagttatgtaccacacttaaactttcaggccgcaagatgttactggtccgtcagcgggaagaggccgcgcaggcgctgttcgcacttaatgatgttcgcactgagcgtctgcgcgatcgcataacgcaatggcaattatttcactga

SEQ ID NO: 2246 - DNA, 1938 bp, Homo sapiens
  SIMILAR (1)..(1059): 981254mologous to Methylomonas aminofaciens transposase,accession number AB026428,Smith-Waterman Score=1837.
atgtgcgaactcgatattttacacgactctctttaccaattctgccccgaattacacttaaaacgactcaacagcttaacgttggcttgccacgccttacttgactgtaaaactctcactcttaccgaacttggccgtaacctgccaaccaaagcgagaacaaaacataacatcaaacgaatcgaccgattgttaggtaatcgtcacctccacaaagagcgactcgctgtataccgttggcatgctagctttatctgttcgggcaatacgatgcccattgtacttgttgactggtctgatatccgtgagcaaaaacggcttatggtattgcgagcttcagtcgcactacacggtcgttctgttactctttatgagaaagcgttcccgctttcagagcaatgttcaaagaaagctcatgaccaatttctagccgaccttgcgagcattctaccgagtaacaccacaccgctcattgtcagtgatgctggctttaaagtgccatggtataaatccgttgagaagctgggttggtactggttaagtcgagtaagaggaaaagtacaatatgcagacctaggagcggaaaactggaaacctatcagcaacttacatgatatgtcatctagtcactcaaagactttaggctataagaggctgactaaaagcaatccaatctcatgccaaattctattgtataaatctcgctctaaaggccgaaaaaatcagcgctcgacacggactcattgtcaccacccgtcacctaaaatctactcagcgtcggcaaaggagccatgggttctagcaactaacttacctgttgaaattcgaacacccaaacaacttgttaatatctattcgaagcgaatgcagattgaagaaaccttccgagacttgaaaagtcctgcctacggactaggcctacgccatagccgaacgagcagctcagagcgttttgatatcatgctgctaatcgccctgatgcttcaactaacatgttggcttgcgggcgttcatgctcagaaaccaggttgggacaagcattccagggttaaagaagtcgaaatcgaaacgcccggcgacctggaacacggcgtatttatcggtgcggcgggcgatggcaaaatcgcctcagcatcgcgggcagattatgcgggagctgctgcacgcgtgattagcgaagccggtcacgaaggcaaggtttacgaactggcgggcgatagtgcctggacgttgacacagttagcggcagagctgaccaaacagagcggcaaacaggttacctatcaaaatctgagcgaagccgatttcgccgcggcactgaaaagcgtcggactgcccgacggactggcggatatgctggcggattctgacgttggcgcatcgaaaggcgatcaatggatgccagtaatgattagcggcgtgctgtacgccctgttagcagggttgatgtgggggcttatttttgtcgggccgttgatcgtgccggaatacccggcgatgttgcagtcgatggggcgttatctggcgttagggttaattgcgctgcccattgcctggctgggacgcgtgcgtctgcgtcagttggcgcgtcgcgactggcttaccgccttgatgctcactatgatgggcaacctcatctattacttctgccttgccagtgccattcaacgtacggtgccgagcggggcgacgcggtgtgttagaggagttcttgtggtgatcacactgtgctatgaagaagttgagtgtgagggggaggccgatgtcgcgcgggggagagggacgcccccgacggtaaaggtcctgtgtgggacagtcaccggatcggtgttaatagaggcacggcttggaaaggaggggcgtaaccactgctggtattatatctgtgaaaagcactcacatcagatccaagagaagtgggaagaagttgtccattga

SEQ ID NO: 2247 - DNA, 1806 bp, Homo sapiens
  SIMILAR (1)..(1035): 991254mologous to Methylomonas aminofaciens transposase,accession number AB026428,Smith-Waterman Score=1815.
atgtgcgaactcgatattttacacgactctctttaccaattctgccccgaattacacttaaaacgactcaacagcttaacgttggcttgccacgcattacttgactgtaaaactctcactcttaccgaacttggccgtaacctgccaaccaaagcgagaacaaaacataacatcaaacgaatcgaccgattgttaggtaatcgtcacctccacaaagagcgactcgctgtataccgttggcatgctagctttatctgttcgggcaatacgatgcccattgtacttgttgactggtctgatattcgtgagcaaaaacgacttatggtattgcgagcttcagtcgcactacacggtcgttctgttactctttatgagaaagcgttcccgctttcagagcaatgttcaaagaaagctcatgaccaatttctagccgaccttgcgagcattctaccgagtaacaccacaccgctcattgtcagtgatgctggctttaaagtgccatggtataaatccgttgagaagctgggttggtactggttaagtcgagtaagaggaaaagtacaatatgcagacctaggagcggaaaactggaaacctatcagcaacttacatgatatgtcatctagtcactcaaagactttaggctataagaggctgactaaaagcaatccaatctcatgccaaattctattgtataaatctcgctctaaaggccgaaaaaatcagcgctcgacacggactcattgtcaccacccgtcacctaaaatctactcagcgtcggcaaaggagccatgggttctagcaactaacttacctgttgaaattcgaacacccaaacaacttgttaatatctattcgaagcgaatgcagattgaagaaaccttccgagacttgaaaagtcctgcctacggactaggcctacgccatagccgaacgagcagctcagagcgttttgatatcatgctgctaatcgccctgatgcttcaactaacatgttggcttgcgggcgttcatgctcagaaacaaggacttgatgtgtgggacagctggccgctgcaaaacgctgacggaacagtagctgaatacaacggctatcacgttgtgtttgctcttgcgggaagcccgaaagacgctgatgacacatcaatctacatgttttatcaaaaggtcggcgacaactcaatcgacagctggaaaaacgcgggccgtgtctttaaagacagcgataagttcgacgccaacgatccgatcctgaaagatcagacgcaagaatggtccggttctgcaacctttacatctgacggaaaaatccgtttattctacactgactattccggtaaacattacggcaaacaaagcctgacaacagcgcaggtaaatgtgtcaaaatctgatgacacactcaaaatcaacggagtggaagatcacaaaacgattttagacggcgacggaaaaacatatcagaacgttcagcagtttatcgatgaaggcagtataacatccggccctcctgatagctatgaggatgatgaggatgatgatggaggaagaggaggggaaggagaagaaagaaaaggagaaggaagagaaggagaagaaagaggagtaggagaagaagaaggaggaggagaaggaggaggaggagacaaagaagatgatgttggtgatgataaagatgttggtggtgatgacaatgttgatgatgatgatgaaagaggaagaggggaggggaaaaaggagcaggagaaaagggggaagatgatgtcagtggctgtaatgatgttgttgacgatgatgataaaatga

SEQ ID NO: 2248 - DNA, 2361 bp, Homo sapiens
  SIMILAR (1126)..(2358): 991254mologous to Cloning vector pBACe3.6 levansucrase,accession number U80929,Smith-Waterman Score=2170.
atgtgcgaactcgatattttacacgactctctttaccaattctgccccgaattacacttaaaacgactcaacagcttaacgttggcttgccacgcattacttgactgtaaaactctcactcttaccgaacttggccgtaacctgccaaccaaagcgagaacaaaacataacatcaaacgaatcgaccgattgttaggtaatcgtcacctccacaaagagcgactcgctgtataccgttggcatgctagctttatctgttcgggcaatacgatgcccattgtacttgttgactggtctgatattcgtgagcaaaaacgacttatggtattgcgagcttcagtcgcactacacggtcgttctgttactctttatgagaaagcgttcccgctttcagagcaatgttcaaagaaagctcatgaccaatttctagccgaccttgcgagcattctaccgagtaacaccacaccgctcattgtcagtgatgctggctttaaagtgccatggtataaatccgttgagaagctgggttggtactggttaagtcgagtaagaggaaaagtacaatatgcagacctaggagcggaaaactggaaacctatcagcaacttacatgatatgtcatctagtcactcaaagactttaggctataagaggctgactaaaagcaatccaatctcatgccaaattctattgtataaatctcgctctaaaggccgaaaaaatcagcgctcgacacggactcattgtcaccacccgtcacctaaaatctactcagcgtcggcaaaggagccatgggttctagcaactaacttacctgttgaaattcgaacacccaaacaacttgttaatatctattcgaagcgaatgcagattgaagaaaccttccgagacttgaaaagtcctgcctacggactaggcctacgccatagccgaacgagcagctcagagcgttttgatatcatgctgctaatcgccctgatgcttcaactaacatgttggcttgcgggcgttcatgctcagaaacaaggttgggacaagcacttccaggctaacacagtcagaaatcgaaacctcaaaatttattcacacatggttacgctttggggaaattatgaggggatctctcagtaccaagtgcctcaattcgatcaatcaacgattaaaaatattgagtctgcaaaaggacttgatgtgtgggacagctggccgctgcaaaacgctgacggaacagtagctgaatacaacggctatcacgttgtgtttgctcttgcgggaagcccgaaagacgctgatgacacatcaatctacatgttttatcaaaaggtcggcgacaactcaatcgacagctggaaaaacgcgggccgtgtctttaaagacagcgataagttcgacgccaacgatccgatcctgaaagatcagacgcaagaatggtccggttctgcaacctttacatctgacggaaaaatccgtttattctacactgactattccggtaaacattacggcaaacaaagcctgacaacagcgcaggtaaatgtgtcaaaatctgatgacacactcaaaatcaacggagtggaagatcacaaaacgatttttgacggagacggaaaaacatatcagaacgttcagcagtttatcgatgaaggcaattatacatccggcgacaaccatacgctgagagaccctcactacgttgaagacaaaggccataaataccttgtattcgaagccaacacgggaacagaaaacggataccaaggcgaagaatctttatttaacaaagcgtactacggcggcggcacgaacttcttccgtaaagaaagccagaagcttcagcagagcgctaaaaaacgcgatgctgagttagcgaacggcgccctcggtatcatagagttaaataatgattacacattgaaaaaagtaatgaagccgctgatcacttcaaacacggtaactgatgaaatcgagcgcgcgaatgttttcaaaatgaacggcaaatggtacttgttcactgattcacgcggttcaaaaatgacgatcgatggtattaactcaaacgatatttacatgcttggttatgtatcaaactctttaaccggcccttacaagccgctgaacaaaacagggcttgtgctgcaaatgggtcttgatccaaacgatgtgacattcacttactctcacttcgcagtgccgcaagccaaaggcaacaatgtggttatcacaagctacatgacaaacagaggcttcttcgaggataaaaaggcaacatttgcgccaagcttcttaatgaacatcaaaggcaataaaacatccgttgtcaaaaacagcatcctggagcaaggacagctgacagtcaactaa

SEQ ID NO: 2249 - DNA, 5860 bp, Homo sapiens
  SIMILAR (4489)..(3092): 871254mologous to Homo sapiens putative p150,accession number U93568,Smith-Waterman Score=2125.
atgtgcgaactcgatattttacacgactctctttaccaattctgccccgaattacacttaaaacgactcaacagcttaacgttggcttgccacgcattacttgactgtaaaactctcactcttaccgaacttggccgtaacctgccaaccaaagcgagaacaaaacataacatcaaacgaatcgaccgattgttaggtaatcgtcacctccacaaagagcgactcgctgtataccgttggcatgctagctttatctgttcgggcaatacgatgcccattgtacttgttgactggtctgatattcgtgagcaaaaacgacttatggtattgcgagcttcagtcgcactacacggtcgttctgttactctttatgagaaagctagttcatatggggcggagcagtatgctctggtcgtcggttccgatgtactggcgcgcacctgcgatccaaccgatcgtgggactattattatttttggcgatggcgcgggcgctgcggtgctggctgcctctgaagagccgggaatcatttccacccatctgcatgccgacggtagttatggtgaattgctgacgctgccaaactttttccgcgtgaatccagagaattcaattcatctgacgatggcgggcaacgaagtcttcaaggttgcggtaacggaactggcgcacatcgttgatgagacgctggcggcgaataatcttgaccgttctcaactggactggctggttccgcatcaggctaacctgcgtattatcagtgcaacggcgaaaaaactcggtatgtctatggataatgtcgtggtgacgctggatcgccacggtaatacctctgcggcctctgtcccgtgcgcgctggatgaagctgtacgcgacgggcgcattaagcccgggcagttgggttctcaaaccgttggaatgctggctgatatggcggcgagctatccaattgtcgaagaaacgtttgctgaagcttctgcggcgctgggctacgacctgtgggcgctgacccagcaggggccagctgaagaactgaataaaacctggcaaactcagcctgcgctgttgactgcatctgttgcgctgtatcgcgtatggcagcagcagggcggtaaagcaccggcaatgatggccggtcacagcctgggggaatactccgcgctggtttgcgctggtgtgattgatttcgctgatgcggtgcgtctggttgagatgcgcggcaagttcatgcaagaagcgtaccggaaggcacgggcgctatggcggcaatcatcggtctggatgatgcgtctattgcgaaagcgtgtgaagaagctgcagaaggtggttattgccggtcataaagaagcggttgagcgtgtggcgctgcctgtaaagcggcggcgcaaaacgcgcgctgccgttaccatgagcgtaccgtctcactgtgcgctgatgaaaccagcagccgacaaactggcagtagaattagcgaaaatcacctttaacgcaccaacagttcctgttgtgaataacgttgatgtgaaatgcgaaaccaatggtgatgccatccgtgacgcactgttcattattgaaggcgcgctggttgtcgtttcgcacgaccgtcatttgctgcgttccaccactgacgatctctacctggttcacgatcgtaaagtcgaaccgttcgacggcgatctggaagattatcaacagtggttgagcgacgtacaaaagcaggaaaaccagaccgacgaagcgccaaaagagaatgcgaacagcgcccaggctcgtaaagatcagaagcgtcgggaagctgagctgcgtgcgcaaacccagccactgcgtaaagagattgcccgtctggaaaaagagatggagaagctgaacgcgcaactggcgcaggcggaagagaaactcggcgacagcgaactgtatgaccagagccgtaaagcggagttgaccgcctgcctgcaacagcaagccagcgccaaatccggcctggaagagccaaagcaactgatggcgcagataacgacgaccgatgccaatgaattcagcagcagtgctgaattcatccccatgcgcggctttagcaattgtcatctgcaaaccatgctgccgcgtctgtttcgtcgtcaggtgaaattcaccccgtactggcagcggctggagttgcccgacgggcgatttgtcgatctgcgtggagtgaaaaccctgcacagggcgcacataaacctcgtctgcggtgacccaaaccgtatgcaccgcatttaccattcgggcgaaaccgaagacgccagttggtttttacgctggctgcaacgcgaatttggtcatgcgccaacggctgccgtcggctattcgctcggcggtaatatgctggcctgtttgctggcaaaggaaggcaatgatctcccggttgatgcggcggtgattgtctctgcgccgtttatgctggaagcctgtagctatcatatggaaaagggcttttcccgcgtttatcagcgttacttgctgaacctgttaaaagccaatgccgcgcgcaagctggcagcctaccccggaacgctgccgattaatctcgcgcagttaaaatcggtacgtcgcatccgtgaatttgacgatctcatcaccgccagaattcacggctacgccgacgctatcgactattatcgtcagtgtagcgccatgccgatgctgaaccggatcgccaaaccgacgctgattattcacgccaaagacgatccgtttatggatcatcaggtgatcccgaaaccggaaagtctccccccgcaggtggagtatcaactgactgaacatggcggtcatgaggctgtattggagtggctccaagtagcgaagcgagcaggcctggtcgtcggccaaatcggtcggacagtgctccgagaacgggtgcgcatagaaattgcatcaacgcatatagcgctagcagcacgccatagtgactggcgatgctgtcggaatggacgatatcccgcaagaggcccggcagtaccggcataaccaagcctatgcctacagcatccagggtgacggtgccgaggatgacgatgagcgcattgttagatttcatacacggtgcctgactctggtagaattcggctgtaaatccatctggtcctggactctttttggttggtaagctattgattattgccacaatttcagatcctgttattggtctattcagagattcaacttcttcctggtttagtcttgggagggtgtatgtgtcgaggaatttatccatttcttctagattttctagtttatttgtgtagtggtgtttgtagtattctctgatggtagtttgtatttctgtgggatcggtggtgatatcccctttataattttttattacgtctattagattcttctctctttttttctttattagtcttgctagcggtttatcaattttcttgatcctttcaaaaaaccagctcctggattcattaattttttgaaggtttttttgtgtctctatttcctccatttctgctctgattttagttatttcttgccttctgctagcttttgaatgtgtttgctcttgcttttctagttcttttaactgtgatgttagggtgtcaattttggatctttcctgctttctcttgtgggcatttagtgctataaatttccctctacacactgctttgaatgcatcccagagattctggtatgttgtgtctttgttctcgttggtttcaaagaacatctttatttctgccttcatttcgttatgtacccagtagtcattcaggagcaggttgttcagtttccatgtagttgagcggttttgagtgagtttcttaaccctgagttctagtttgattgccctgtggtctgagagatagtttgttataatttctgttcttttacatttgctgaggagagctttacttccaagtatgtggtcaattttggaataggtgtggtgtggtgctgaaaaaaatgtatattctgttgatttggggtggagagttctgtagatgtctattaggtctgcttggtgcagagctgattttaattcctgggtatccttgttgactttctgtctcgttgatctgtctaatgttgacagtggggtgttaaagtctcccattattaatgtgtgggagtctaagtctctttgtaggtcactcaggacttgctttatgaatctgggtgctcctgtattgggtgcatatatatttaggatagttagttcttcttgttgaattgatccttttaccattatgaaatagccttctttgtctcttttgatctttgttggtttaaagtctgttttatcagagactaggattgcaacccctgcctttttgtgttttccatttgcttggtagatcttcctccatccttttattttgagcctatgtgtgtctccagagttgtattctttaagccagttcagaagggcatctttgttgaaggctgctgcagcagccacattgctactgttcagctgaatgtcagcaattgtttcagaggtgctcacaacttcaatgaggccagagcgatctcctgttgctaaacagccataaggcaacatccaatgtggccaaccaggcccataaaaaaggaggctcaaacactcattaagcccttgtttctgttcatgaacgcccgcaagccaacatgttagttgaagcatcagggcgattagcagcatgatatcaaaacgctctgagctgctcgttcggctatggcgtaggcctagtccgtaggcaggacttttcaagtctcggaaggtttcttcaatctgcattcgcttcgaatagatattaacaagttgtttgggtgttcgaatttcaacaggtaagttagttgctagaacccatggctcctttgccgacgccagcttctcaacggatttataccatggcactttaaagccagcatcactgacaatgagcggtgtggtgttactcggtagaatgctcgcaaggtcggctagaaattggtcatgagctttctttgaacattgctctgaaagcgggaacgctttctcataaagagtaacagaacgaccgtgtagtgcgactgaagctcgcaataccataagtcgtttttgctcacgaatatcagaccagtcaacaagtacaatgggcatcgtattgcccgaacagataaagctagcatgccaacggtatacagcgagtcgctctttgtggaggtgacgattacctaacaatcggtcgattcgtttgatgttatgttttgttctcgctttggttggcaggttacggccaagttcggtaagagtgagagttttacagtcaagtaatgcgtggcaagccaacgttaagctgttgagtcgttttaagtgtaattcggggcagaattggtaaagagagtcgtgtaaaatatcgagttcgcacatcttgttgtcttgtgatccacccaccttatcctcccaaagtgctgggattacaggtgtaagccaccacgcctggccattaatgccttctttcaccttgccaaagaccatatgcttgccatccaaccactcagtcttggcagtgcagatgaaaaactgggaactgtttgtgttggatccagcctttgccatggacaagatgccaggacctgtatgcattaggatgaagttctcatcatcaaatttctccctgtagatggacttgctaccagtgccattatggcgtgtgaagtcaccaccctgacacataaaccctggaataattatctgaaagcaggaacccttataaccaaatcctttctctccaatgctcagagcatgaaagttttctgctgtctttggaaacttgtctgcaaaaggctcaaaggagacacacctcaagggctcaccatcgacggcgatgtcgaagaacat

SEQ ID NO: 2250 - DNA, 4786 bp, Homo sapiens
  SIMILAR (1202)..(1789): 971254mologous to Methylomonas aminofaciens transposase,accession number AB026428,Smith-Waterman Score=986.
atgagccgcctgctctggaggaaggtggccggcgccaccgtcgggccagggccggttccagctccggggcgctgggtctccagctccgtccccgcgtccgaccccagcgacgggcagcggcggcggcagcagcagcagcagcagcagcagcagcagcaacagcagcctcagcagccgcaagtgctatcctcggagggcgggcagctgcggcacaacccattggacatccagatgctctcgagagggctgcacgagcaaatcttcgggcaaggaggggagatgcctggcgaggccgcggtgcgccgcagcgtcgagcacctgcagaagcacgggctctgggggcagccagccgtgcccttgcccgacgtggagctgcgcctgccgcccctctacggggacaacctggaccagcacttccgcctcctggcccagaagcagagcctgccctacctggaggcggccaacttgctgttgcaggcccagctgcccccgaagcccccggcttgggcctgggcggagggctggacccggtacggccccgagggggaggccgtacccgtggccatccccgaggagcgggccctggtgttcgacgtggaggtctgcttggcagagggaacttgccccacattggcggtggccatatccccctcggcctgcttaacgttggcttgccacgcattacttgactgtaaaactctcactcttaccgaacttggccgtaacctgccaaccaaagcgagaacaaaacataacatcaaacgaatcgaccgattgttaggtaatcgtcacctccacaaagagcgactcgctgtataccgttggcatgctagctttatctgttcgggcaatacgatgcccattgtacttgttgactggtctgatatccgtgagcaaaaacggcttatggtattgcgagcttcagtcgcactacacggtcgttctgttactctttatgagaaagcgttcccgctttcagagcaatgttcaaagaaagctcatgaccaatttctagccgaccttgcgagcattctaccgagtaacaccacaccgctcattgtcagtgatgctggctttaaagtgccatggtataaatccgttgagaagctgggttggtactggttaagtcgagtaagaggaaaagtacaatatgcagacctaggagcggaaaactggaaacctatcagcaacttacatgactatgtcatctagtcactcaaagactttaggctataagaggctgactaaaagcaatccaatctcatgccaaattctattgtataaatctcgctctaaaggccgaaaaaatcagcgctcgacacggactcattgtcaccacccgtcacctaaaatctactcagcgtcggcaaaggagccatgggttctagcaactaacttacctgttgaaattcgaacacccaaacaacttgttaatatctattcgaagcgaatgcagattgaagaaaccttccgagacttgaaaagtcctgcctacggactaggcctacgccatagccgaacgagcagctcagagcgttttgatatcatgctgctaatcgccctgatgcttcaactaacatgttggcttgcgggcgttcatgctcagaaacaaggttgggacaagcacttccaggctaacacagtcagaaatcgaaacgtactctcaacagttcgcttaggcatggaagttttgcggcattctggctacacaataacaagggaagacttactcgtggctgcaaccctactagctcaaaatttattcacacatgtcggtgagggcaaactgatggttatcggtaacccacactacaacagcattttgcgttgcccgaacggttacagctggaacgggggcgttaataaagatgggcagtgtacgctcaacagcgacccggatgacatgaagaacttcatggagaacgtgctgcgctatctgtccgacgataaatggaagccggacgcgaaagccagcatgaccgtaggcaccaacctggatactgtctattttaaacgtcatggtcaggttacaggaaacagcgctgcgttcgacttccatccggattttgcgggcatctctgttgagcatttaagtagctatggcgatctcgatccgcaggaaatgccgctgctgatccttaacggctttgaatatgtgactcaggtgggtaacgatccttatgcaatcccgctgcgtgcagataccagcaaaccgaagctgactcagcaggatgtgaccgatctgatcgcctatctgaacaaaggtggatcggtgctgatcatggaaaacgtgatgagcaatcttaaggaagagagcgcgtctggttttgtgcgtctgttggatgccgcaggtctgtcgatggcactgaacaagtcggtagtaaataacgatccgcaagggtatccgaaccgcgttcgtcagcagcgcgcaacgggcatttgggtctatgaacgttatcctgccgtagatggtgcgctgccgtacaccatcgatagtaagacaggggaagttaagtggaaatatcaggtagaaaacaaacctgatgacaaaccgaagctggaagttgccagctggctggaagatgtagatggcaaacaggaaacgcgttatgcctttattgatgaggccgatcataaaacagaggattctctgaaggctgcgaaggagaaaattttcgccgcgttcccggggctgaaagagtgtactaatccggcatatcactatgaggtcaactgcctggaatatcgtcctggcacgggggttccggttactggtggcatgtatgttccacagtatacgcaactaagccttaacgccgacactgcaaaagcgatggtgcaggctgcggatttaggcaccaacattcagcgtctgtatcagcatgagctctacttccggaccaatggtcgcaaaggtgagcgtctgagcagcgtcgatctggaacgtctgtaccagaacatgtcggtctggctgtggaacgatacgagctatcgttatgaagaaggcaaaaatgacgagctgggctttaaaacgttcaccgagttcctgaactgctacgccaatgatgcctatgcaggcggcaccaagtgttctgcagatctgaaaaaatcgctggtcgataacaacatgatctacggtgacggtagcagcaaagcgggcatgatgaacccgagctacccgctcaactatatggaaaaaccgctgacacgcctgatgctgggccgttcctggtgggatctgaacatcaaagttgatgtcgagaagtatccgggagcagtatcggaagagggacagaacgttactaaaggaccagtcaacaagtacaatgggcatcgtattgcccgaacagataaagctagcatgccaacggtatacagcgagtcgctctttgtggaggtgacgattaccttcatcaaatttgcccattaactcagtttcaatcgggtgcagagccagacaggaaggaaaaatgtcaagccccggccagcaagtgggctttattgcataagtgacatcgtccttttccccaagatagaaaggcaggagagtgtcttctgcatgaatatgaagatctggtacccatccgtgatacattgaggctgttccctgggggtcgttaccttccacgagcaaaacacgtagccccttcagagccagatcctgagcaagatgaacagaaactgaggttttgtaaacgccacctttatgggcagcaaccccgatcaccggtggaaatacgtcttcagcacgtcgcaatcgcgtaccaaacacatcacgcatatgattaatttgttcaatggtataaccaacacgggggatcagcatgatatcaaaacgctctgagctgctcgttcggctatggcgtaggcctagtccgtaggcaggacttttcaagtctcggaaggtttcttcaatctgcattcgcttcgaatagatattaacaagttgtttgggtgttcgaatttcaacaggtaagttagttgctagaacccatggctcctttgccgacgctgagtagattttaggtgacgggtggtgacaatgagtccgtgtcgagcgctgattttttcggcctttagagcgagatttatacaatagaatttggcatgagattggattgcttttagtcagcctcttatagcctaaagtctttgagtgactagatgacatatcatgtaagttgctgataggtttccagttttccgctcctaggtctgcatattgtacttttcctcttactcgacttaaccagtaccaacccagcttctcaacggatttataccatggcactttaaagccagcatcactgacaatgagcggtgtggtgttactcggtagaatgctcgcaaggtcggctagaaattggtcatgagctttctttgaacattgctctgaaagcgggaacgctttctcataaagagtaacagaacgaccgtgtagtgcgactgaagctcgcaataccataagtcgtttttgctcacgaatatcagaccagtcaacaagtacaatgggcatcgtattgcccgaacagataaagctagcatgccaacggtatacagcgagtcgctctttgtggaggtgacgattacctaacaatcggtcgattcgtttgatgttatgttttgttctcgctttggttggcaggttacggccaagttcggtaagagtgagagttttacagtcaagtaatgcgtggcaagccaacgttaagctgttgagtcgttttaagtgtaattcggggcagaattggtaaagagagtcgtgtaaaatatcgagttcgcacat

SEQ ID NO: 2251 - DNA, 507 bp, Homo sapiens
  SIMILAR (163)..(29): 351254mologous to Pyxicephalus adspersus reverse transcriptase,accession number X74338,Smith-Waterman Score=61.
atgcctcttactcatccgaaccacggaccagacactctacagcgatggacatcctcccagactccaacatcactgagttccaaattaaatcctgaacccgaagcagacgccgcatcgatcctaatcgccacctccatcctttacaagcagagtgatccataccttgacatcctcgcacgggtttatggtccacctacggcggccgaggagaacctaaaatgtttaaaagagcaaggacaagcgcatttacggcatttcctactctgtaaaatggccgcgcccatagccgtggtcctgacggcagccatgtttgaaaattggacgcacagaaggcagtggcaggtttttgagccaggagccagggaagaagagaagtcactgaaatcgcctcgtttcctggcacttaaagtcttgcgaaagggggcagattttcagagactcaggctttatcaggcaaatatggggcaagctaaattgcctttagcgcttttccatccactttgttaa

SEQ ID NO: 2252 - DNA, 430 bp, Homo sapiens
  SIMILAR (155)..(394): 271254mologous to Cavia porcellus decay accelerating factor,accession number AB003311,Smith-Waterman Score=80.
cgccacaccgcaggccacgttactgcagacgccaccacaccaggccacgctgccttttccagccacagtcccagttaagcccaccctgagtgccgctcccacctttccttccttcagctgctgcagaaagggctgcaggtatgaggatgcccacctcagccccgtgtgtgggaccaccacccagtggcaggggtgggctcggagcagccccacagtcaagtcacacacagagcagaggccagggggcaagacgcccaagcgtcaccgaagcaacatccgcgtcagcatcccagcagctgagctggcatgccgttaacgtgagaaccacatcggcatcccagcagttgagctggcgtgccgttaacatgagaactacattggcgtcccagcagccgaggtggcaagccattaacgtgagaaccacacgaaa

SEQ ID NO: 2253 - DNA, 352 bp, Homo sapiens
  SIMILAR (202)..(225): 1001254mologous to Homo sapiens Human secreted protein encoded from gene 7,accession number Y45263,Smith-Waterman Score= 43.
atggcccttccctggtttaatagtcgtagagccatagcaaggagacattgctgcttgctgaagtttctcaccttaatgtcaaagctaactggcagtgaacgtgctgaagaagcagaagaaaataaacctgacacacccacctatggagactccttcccatatgcacactccagtagtgaactggtgcagtcatgccaagaggtgttcggcgtccacctgaacaaagtggcagctggacaagaagctgggctgtgggtgcctcctcctgtatggtgtgttcctgtgcttctccatcatgactgagttcaacgtgttcacctttgtgaacctgcccatgtgcggggaccactga

SEQ ID NO: 2254 - DNA, 579 bp, Homo sapiens
  SIMILAR (37)..(195): 841254mologous to Homo sapiens Human secreted protein, SEQ ID NO: 6278,accession number G02197,Smith-Waterman Score=222.
ctgcgctgccggaggaaacggaagaaggagcaagctatggaggggaacagggatgaggctgagaaatgtgtcgagatcgcccgggaggccctgaacgccggcaaccgcgagaaggcccagcgcttcctgcagaaggccgagaagctctacccactgccctcggcccgcgaatcacctggggagcttctgaaaaatgctgatgcccagctccagattgatttaaatgagcagaaaatgattcctaggggtgtcactcacatccgccatgatgaacccccttctctcgcaggatcaatctccacgcctggaagagaaactcccggtgactcttccctctttggcttcctcgtcctccccacccacaacttaatacgcgagatcagccctggtcagaaccagggcttggcccagcgagcccagtgggagtcggagtgccccagcacccccacaggacactttaagacagttcctctcagcccccgcacagaacatgacctctttgccctcaggagcactttaccttggttgcataccctgcgttcgactctagtagaatccccgctagcaatgaaattttaa

SEQ ID NO: 2255 - DNA, 660 bp, Homo sapiens
  SIMILAR (654)..(451): 691254mologous to Homo sapiens AMMECR2 protein,accession number AJ012743,Smith-Waterman Score=198.
atgaacggattgttgaacagccagagaagccagcttagacagcacacattggcagagaacgcaatgcagggtttttccaacaagccaagagtggaaacagccaccttcaaggggtcactcagggctgcatattggaaggacaagaatgggacgaaaggcaactggaagctggagctgctgcagtcggcctggcaagcccgttggctctgcagagtgagcagtccctggcagcccctggagcagctgccagttagacggcccagagttctgatagaatgcattgcttcagttcagtgccaagtgttggacgtgttggattcagttcccagagggctggagcgtgctatgaggcgaaccctggaagggagttgggggtggaaggtgggaggcgcgcccagggatgagcgagatgaggagggcgcgaaccagcaatctggggctgtggttttagacccgctcagcgccctgggcgagggcaggcagcccctcggaggcaagctggcggcggcctcggctgggagcccgcggcgcctcggcgtcggcggtcaggcgctcccggggcccattcgtgctcggcgcaagcctgggacgctcgtctttggcctcgacgagcttacgggagcgggtgtagcagatgaggcctccggccaagcagcgtag

SEQ ID NO: 2256 - DNA, 740 bp, Homo sapiens
  SIMILAR (471)..(731): 341254mologous to Homo sapiens GGF segment E,accession number R46912,Smith-Waterman Score=91.
tttattggttaaacaaccgtttattacctgcctctgacatttccccagggttacagagcagggggcatctgagcctcaagttccacggatgaagcagacactgcaataacaactgaatcaatagaggagaggcatttggaagtactcggggtgatacacccagtaatggtaatcctcagcagaagatggcatagctaccaaaaatcaggcgttaccactgggatgaaaactggggaggcaagaaaatcatacagttggagtcatagatcatttccctccccgttgagcactcctcccccttccggtcccccattaagttcattctatcccacagactggtcctagtgtcctgctagctccctgctgaaagagagagggagggaaaagatgtctgaggtctctttcatttcctttgtctctgtcccctaaggcaactggaagctggagctgctgcagtcggcctggcaagcccgttggctctgcagagtgagcagtccctggcagcccctggagcagctgccagttagacggcccagagttctgatagaatgcattgcttcagttcagtgccaagtgttggacgtgttggattcagttcccagagggctggagcgtgctgtcagggctgtctgaagacaagagagcagaggcagtttagtgcagttggatgtgcggggtaggggtggaggcgcaggggtgaagagggagaaactggcccgaatgggtaaggtggtgcttct

SEQ ID NO: 2257 - DNA, 1032 bp, Homo sapiens
  SIMILAR (355)..(639): 931254mologous to Homo sapiens similar to (NP_034322.1|) sex- determination protein homolog Fem1a,accession number AL365415,Smith -Waterman Score=466.
atgacggtgtttggaggtggacatttaggaggtatgcctgggttgaccttagtcgaatcccgacttattgcgcattaccgcaacatcccccattcgccagactggagtaatagacggaagaggactcgcaacgatctgacccgtgccggacaagtgcccaagcccagaacggcgaaaggcgcagaaagcggtatggtcgccggaagcatacagcgttaccccaccacgcagatgggaaccaccgccacagccaagctagaagccccacagttcagactacaacgacgatcccccgggacccgagcccgattgcgccaactagcaagagaacaagcatgcactgccgtcgttccccccccagattttcttggctcaggacatctgaaggtggtccagtccttgttaaatcatggagcatctgtcaacaacacgactttaaccaattcaactcctcttcgagctgcgtgtttcgatggccatttggaaatagtgaagtaccttgtagaacacaaagctgatttggaagtgtcaaaccgacatgggcatacgtgcttgatgatttcatgttacaaaggacataaagagattgctcagtatttacttgaaaagggggcagatgttaatagaaaaagtgtcaaagtgactttggaactgggtaacaggcagaggttggaagagtttggagggcttagaagaagacaggaagatgaaggaagtttggaacttcctagagactggttaaatggttgtgaccaaaatgctgatagtgatatggacagtgaaatccaggcttatcaggtctcagatggaaatgaggaacttattgggaactggagcaaaggttactcttatgccttagcaaagaacttggctatattgtgtccatgtcctagggatctgtggaaatttgaacttgagaacaataacctagggtatctggcagaagaaatttctaagaagcaaagtattcaagatgctcatggctgcttcaaacaacgtatgctcagatgcagaaggaaagaaataacttaa

SEQ ID NO: 2258 - DNA, 1227 bp, Homo sapiens
  SIMILAR (286)..(420): 1001254mologous to Homo sapiens Human T1-receptor ligand III splice variant 1,accession number W70458,Smith-Waterman Score=235.
atgactgagttcagggctgggatatggacaagacatattggaactgccaattggcagcaggagaaagaagccaaaaacaggcctgcaggacagcgaggctgcgaaattgtcgtccagagccaacgcctcgcgggcttccacgtacgcactccaacgcgtgttcccggagaagaacgcatccgggtcacgggagccggtgtctcaggctccgccccttcaccccccgaaaggctaatccccacttccgaccctctcaggccttttccgcttctcttttacctccccaggctgctcgcactgctgctactggtgcctggacccggcggcgcctctgagatcaccttcgagcttcctgacaacgccaagcagtgcttctacgaggacatcgctcagggcaccaagtgcaccctggagttccagtgtaggaagccatcagagggttataagcagttcagtgatatgacgagaatattcttggtagctgcattaataataacttgtgcaggtagcttcagaacctcttttattcacacccttactcgttctatgttcctaaaataccagactaccagaaattctctgaacaagtctttgctttacatctgcactgacacgtgcgagttcaatcacgggcttgtgcgtaatagcaatcacacggatcaaaatgacagtgtttgcaaatctacagtttattactgtaggcagaggttggaagagtttggagggcttagaagaagacaggaagatgaaggaagtttggaacttcctagagactggttaaatggttgtgaccaaaatgctgatagtgatatggacagtgaaatccaggcttatcaggtctcagatggaaatgaggaacttattgggaactggagcaaaggttactcttatgccttagcaaagaacttggctatattgtgtccatgtcctagggatctgtggaaatttgaacttgagaacaataacctagggtatctggcagaagaaatttctaagaagcaaagtattcaagatgctcatggctgcttcaaacaacccttggctcaaaggaccccagatatagttcatgctgctgcttcagagggtgcacgatgtaagccttggcagcttccatgtggtgttaagcctgtgggtacacagaatgcaagagtgaaggcttggcagcttctgcctagatttcagaggatgtatgaaaaagcctggtgtctaggcagaagccggctgtag

SEQ ID NO: 2259 - DNA, 391 bp, Homo sapiens
  misc_feature (1)...(391): n = a,t,c or g
ncaagtctccagcacagttgtagtccatgtggctgctcaagttttcaagtgttttgatctgttggcagcctcttcatctcaacacaggcttccatggtcgctccagtcaaggaagacagcaagggaaattcttgcttaaatgtttttgtccacaagtgacatatgccatttctgttcacatttcattggccaaagtgggtcacacagccatacctaacgtcttgatggtaactcccaagatgagaagtaaaaccagaatcttgctgagtagtagtaataccaccacaacaacctgagaactgggcagcctcgtcctgagaatgacggagaaggggacctggggctagggaatccctgattcaatcatgccgctccccaggagacgttcgga

SEQ ID NO: 2260 - DNA, 499 bp, Homo sapiens
  SIMILAR (7)..(264): 441254mologous to Rattus norvegicus small rec,accession number AF228917,Smith-Waterman Score=179.
tttcgtgtgtttacaagtggcccagagaaaaatgggttcaaccttggcttcatcaagaatatccagcaggtgtttggagataagaagaagttctggttaatacctattggttccagccctggtgatggacactccttccctatgaggtctatgaatgagtcacagaacccactgctagcaaatgaagaaacctgggaagacaacgaggatgacaaccaagattatccagaaggctcatcatctcttgctgtggaaacggaaacatagcagttttcacatttcctgcatctctcagacaggactcaccatctctgcctcccatgaggcttacagagttcaatgttggaaatcattgtaatcttcaaaataagtcaccgtgttggattgaaagcttcaaaatttgaaagaattccatcaaatacttgctgtgtaaatgtttctggactttatgttatttaatttactgactgaaatccaatttggaatttggtagcagtta

SEQ ID NO: 2261 - DNA, 1275 bp, Homo sapiens
  SIMILAR (639)..(695): 551254mologous to Apis mellifera elongation factor-1alpha F2,accession number AF015267,Smith-Waterman Score=48.
atgagcaaagagaaggcctttatcaatatcatcatcattggccatgtggactctggcaagtccaccaccactgggcctctcacaaatgtgggcgagggctccttcaagtatgcctgggtgttggacaagctgagggcagaaagagaacgcaggatcaccattgatatctccctgtggaagttcaagactagcacatactacagcattatcatcgatgctccaggccacagagacttcatcatgaccatgatcaggggcacttcccaggccgactgcgcggtgctcttcgtggcaggcggctgggcggaggccggcatcttcaagaacccgcagacccacgagctcgcgctgctggccaactggcgggacgtcacgcagctcatcgtgatcttcaacgaaattgactccaccgagcccgcctacagcggctcgcgcctccaggtgatcaccaaggaagtaagcgcctgcatcaagaagatcggctacaactggctgcctggccttcagtccatctcgagctggcacggcgacagcatgctggagcccagcactgacgcgagtgtggcgcgggtcggcagggacagccggggtggaggcgagcggaccacaccccggactcacctcccctcgacatcccgaagatgccctggttcaagtgctggaagggtttgttcaaggaagtgtctgaaggaagaaccaggactcctttcctctggtttgaagagaaggagaataaagaagcaggatgaggaggtgacacacatctgtcctaatccagatgttaatgattcagagttgactacatcaatcagactccaagttcttcagttttggaacttggactggctctccttgctccttagcctgcagatggcctattgtgggaccttgtcatcatgtgacatcatgtgggaccttgtcaattcatgggaaagccactcatatggagcaaaaagtgaccctagaagaagtttcacaaacaagtacagcatttcagaagtggacaaaggggactgggaagaaatgagtggatgctcctggtttatcaccaaaaacctatggatccaagaaaaaattccaattagtggattgtcagtgccgaaccctggcaaaccaggtaacagctatgggcccaggaaactgaagacagccttcaatccatatttactgagcacgtgccatgcattcaactcagcactgaaagatagggataaggagaggaagtgtggacatgctgttgccaagaaattgatgcctccttctcctccaaattag

SEQ ID NO: 2262 - DNA, 1299 bp, Homo sapiens
  SIMILAR (811)..(1281): 471254mologous to Mus musculus Pro-Pol-dUTPase polyprotein,accession number Y12713,Smith-Waterman Score=327.
atgcgcctgcactcctcagcccttgggtggtcgatgggactgggcgccgtgaagcgggggcggcgatcgtcggggaggctccctcccgcacaggagcccacggaggagggcggggaggctcagtcatggcgggctgcaggtcctgacccctgccccgcgggaaggcagctaaggcctggcgagaaatcgagggcagcgcccgtgattgattttgaaagggtaaagaacgcacagggtaatactctggatctgagggagaatattcaaaaatatatgaacttgaagaagtatctccctcaaggttggaattcagacctggaaagagaaggtcataggatggaggagaaattcactgagttttccaaccataactggttcaaagtctgctggtcaagattggcacacaagaatctacaggccaggactgataaactcaaagcctctcatagcagaacctgtgggtttaggctgcttcaaaagcagatactgagcctcaaatttgctaggcttgccctgaatgagggtcttatctccagtagagaaacaactgaaagtgtggaaaatcagacacaggctcttatcatgacagtggctgagctgcaacaaaaggtgcaccttgccagacctcttccatcacggaaaaggcagaggtttgtcctcactgaaatagacacttactccaggtatgggcttgcctactcttcatgcaatgcttctgccaagactaccatctgtggactcacggaatgccttatccaccatcatggtattccacacagcattgccccgaccaatgcactcactttacgactaaagaagattcacaggtccaggagtcaaggggtggatgtggaagtggcaccaatcaccaacaccccaagtgatccactagcaaagtttttgcttcctgttcctgcgacattacattctggtgggctagaggtcttagttccagaaggacgtacactgcaactaggagacacaacagttttgttaaactggaagttaggattgccacctggacagtttgggctcctcctacctttggatcaaccggctaagaaggaagttactgtgttggctggggtgtctgacctggactatcaagatgaaatcagtctactactccagaacagagactctaagttcttcagttttggaacttggactggctctccttgctcctcagtctgcagttggcctattgtgggaccttgtgatcatgttccaaccactagaatggatgatttgtctctggccaagattggtctaaatgctccttctctggacgccagctga

SEQ ID NO: 2263 - DNA, 613 bp, Homo sapiens
  SIMILAR (506)..(613): 721254mologous to Homo sapiens calcium channel alpha12.2 subunit,accession number AF238295,Smith-Waterman Score=121.
tttttttttttttttttaaggaagacagacacattttttatttgacaacttgttcgcttgattttaaccttttaaatatttagatagtgggcctccatttgtactattgccccaagcctcaccagtgttaggtggtcagcctgccagatgccacctctggaatcatagctacagctgccccaagcctgctgtgggtccaggcaagtctccagcacagttgtagtccatgtggctgctcaagttttcaagtgttttgatctggttggagcctcttcatctcaacacaggcttccatggtcgctccagtcaaggaagacagcaagggaaattcttgcttaaatgtttttgtccacacgtgacatatgccatttctgttcacatttcattggccaaagtgggtcacacagccatacctaacgtcttgatggtaactcccaagatgagaagtaaaaccagaatcttgctgagtagtagtaataccaccacaacaacacgatcacaaggtcccacaataggccgtctgcaggctgaggagcaaggagagacagtccgagttccaaaactgaagaacttggagtccaacattcaagggcaggaaacatccaggatggga

SEQ ID NO: 2264 - DNA, 717 bp, Homo sapiens
  SIMILAR (79)..(210): 651254mologous to Homo sapiens reduced expression in cancer,accession number AB023584,Smith-Waterman Score=161.
atgaggtctatgaatgagtcacagaacccactgctagcaaatgaagaaacctgggaagacaacgaggatgacaaccaagaggccttctgcactccagtgtttacaagtggcccagagaaaaatgggttcaaccttggcttcatcaagaatatccagcaggtgtttggagataagaagaagttctggttaatacctattggttccagcgtagaggcagcagaggaggagatcttagtagtggttgtgaccaagggtcgtttacttgactcctggaggctttactccagagagatacaggtcagcaattgctcagtgcagtcagcccaaggtgaagggtttatgcccaagccaggggttccctgtctggtgatgagccatgggtggtgtttaggacctgtgggagatggactggcctcctctccttgggtcaactacagcttgttggaggaagtggctggagaccacagttgggaggtcccggccagtgaagatgaacaggattgggaactgcttaaaaagcagtctgatcctgttttgatagagcagctgcgttgtgctgggggtccacttcagcccttggtcacctcacactctgaagcccaaaggctggaatggtgctggatgctttctgtccttgaatgttggactccaagttcttcagttttggatctcggactggctctccttgctcctcagcctgcagacagcctattttga

SEQ ID NO: 2265 - DNA, 318 bp, Homo sapiens
  SIMILAR (213)..(52): 331254mologous to Bordetella bronchiseptica pertactin (P.68),accession number AJ250092,Smith-Waterman Score=88.
tcaaatgggctctgcgctggccaccgaatcctgaatgaggcggggctcctctgccccaactccagcagcgggaacttggttcccctgggcagccgggggcagggggcgccaaggccgtggcgataatgaaggctgagacggccaaggccagcgggtcggcgcggggcactcccgggccggagtggccatcggccggagttcaggaggtaactgaatttataagcggttcttagagctttctagctcgaggatttttatttacctctactgcttctccatttcactaagctcgttctttgaattccaccacagggacta

SEQ ID NO: 2266 - DNA, 387 bp, Homo sapiens
atggaggctgttaataagctgagcttgaggcttcaaaggactcttgtagcctgtgctggatctagcagtgaccagtatgccagtggccatggatgcccaggcccatgttcagtagtgaagcaggtgctagcagcagaagcaatagaaatggaaactgggagatctgctgtggatgaatctcattatcttctttctctgaccctctttggactaaataaactcccagtattcttgaccaacagaggtagggttggaacagaacctcaaaagtcatcattagacttcctactaatagggcattggaagttcaagcgactaactaggaaacagttcctttacgcggaaagctatttacagcagccacagtctctgtttggtttggcatga

SEQ ID NO: 2267 - DNA, 279 bp, Homo sapiens
  SIMILAR (37)..(192): 421254mologous to Abelson murine leukemia virus p120-gag-abl polyprotein,accession number J02009,Smith-Waterman Score=69.
gatcctggagcactgagcatgctggtgctgttgccggaagaacggagagaaccccggaggcacggctgcagcagctctaacctagctctagatcctaaaggcttaagaaagcagaaagcagctccccctcttcctcaggcagcagatttgaggactagatggagctgccggccggcgcagaacccccaggagcacaggtctctccgggccgctgtcctgcgtaactgttctccagagcgccagccagccacgggcctgattccagaggagccgaactga

SEQ ID NO: 2268 - DNA, 612 bp, Homo sapiens; identical to SEQ ID NO: 2051
  SIMILAR (64)..(210): 371254mologous to Homo sapiens Human secreted protein encoded by gene 78,accession number Y36301,Smith-Waterman Score=64.

SEQ ID NO: 2269 - DNA, 571 bp, Homo sapiens
  SIMILAR (392)..(228): 371254mologous to Drosophila melanogaster CG9016 gene product,accession number AE003611,Smith-Waterman Score=72.
cctttttatatgatgcgttttattaaacaggacccaccgggctcttttagtttcctcccaccttggtaggttgattgccgatgtgcagggttagtgtcgatcgtttctttaaattttcacaggcatatgatagatttgtcccacataaatgtgtttcctttcgtggagtgagtcctaacaagagagcctgaccttaggctgtacacacactgtggaatttcttcaagggagctgccggccggcgcagaacccccaggagcacaggtctctccgggccgctgtcctgcgtaactgttctccagagcgccagccagccacgggcctgattccagaggagccgaactgacaggacacagcaggctggagttggtgttagattgcttcacattctgttgtcaccaccaagaactccaagtttttcgttttgttttgttttcaaagtgcttacaatgcatgtagacattgttctttgtggtctgactctatgatcgatcacagtgacttagattcaggaaagaacattaacgtcacaagttctaagtagttttcacagcaaaaaaaaaaaaaaaaa

SEQ ID NO: 2270 - DNA, 341 bp, Homo sapiens
  SIMILAR (220)..(336): 941254mologous to Homo sapiens semaphorin Rs,accession number AF216389,Smith-Waterman Score=194.
ctcggagcttgcccaatacttcccagaaggacgaggctgctgaacttctcattcggggctccgggacctggactgtacccctttctggcgtcacctcctcctgtcgcctggccctcgccatgcagaccccgcgagcagcccctccccgcccggccctcctgcttctgctgctgctactgaggggcgcccacggcctctttcctgaggagccgccgccgcttatgcgtggcccccagggactacctgaaccactatcccgtgtttgtgggcagcgggcccggacgcctgacccccgcagaaagtgctgacgacctcaacatccagcgagtcctgcggggcat

SEQ ID NO: 2271 - DNA, 2145 bp, Homo sapiens
  SIMILAR (1365)..(1541): 891254mologous to Homo sapiens semaphorin Z,accession number AB022433,Smith-Waterman Score=291.
atgacgggaagcggtgtccggcagccgcaggtggcaggtgttggggccgcttctgagcaggcaggcgccgagcggctgcggcagaggctcctcgagtttcacggagagaagcagatggtcttggggatgggggaggcgcacaggcgtcgggtaaccccagatcgagggggaaaatgggctcggagcttgcccaatacttcccagaaggacgagctgctgaacttctcattcggggctccgggacctggactgtaccccttttggtattgctggggacagcaaggaggcctgtgtgacgagcagaatagcgagggggagagagagaggaggcgagggcagggaggggatggagcagtcgtgcagggcctgttgggccattgggaggacttaggctttgacccggagaaggtgggagccacggagggttttagggacaacctctaccgcgtagagctggagccccccacgtccaggagctgcggtaccagaggctataaccgtgcccacacgccccagttagttctggtcacgaccatgccccaccccaatcggccgtaccacacccagggcggatccttctcctccatcccagggcgagtgtcgaaacttcgtaaaggtgctgctccttcgggacgagtccacgctctttgtgtgcggttccaacgccttcaacccggtccaacctccaggcctctgctcgcccacctccgctggccatggcttttccccaggccgtgtcacctcctccaggagccttcctggatatactctccctgcctcctccccctgagctcaagaggatcagcgctgtccaaacgaggcctgtacagggggccggggaagccgtagcacttagagccttactttgtccatgcggtggagtggggcagccatgtctactcttcttccgggagattgcgatggagtttaactacctggagaaggtggtgggtcccgcgtggcccgagtgtgcaagaacgacgtgggaggctccccccgctgctggagaagcagtggacgtccttcctgaaggcgcggctcaactgctcgtacccggagactcccatttctacttcaacgtgctgcaggctgtcacggcgtgcaacaggtcagcgcccaccaatgggagcaaactgggagcatttgggggcatggaacgggccaaagatatcctcatcctctgcctttggggagaggagcagggaggcttcctggaggaggggacattggagctggactttgggtgtggcagcgtgtttgaaggccgcttccgagagcagaagtcccccgagtccatctggacgccggtgccggaggatcaggtgcctcgaccccggcccctttatgagaacctttacgttcgtcctgaccacacccttgtcacccccaggcccgggtgctgcgcagcccccgggatgcagtacaatgcctccagcgccttgccggatgacatcctcaactttgtcaagacccaccctctgatggacgaggcggtgccctcgctgggccatgcgccctggatcctgcggaccctgatgaggtgtggacggcccggcggtggcgagacagggcagcggctgctgagcttggagctggacgcagcttcggggggcctgctggctgccttccccgctgcgtggtccgagtgcctgtggctcgctgccagcagtactcggggtgatgaagaactgtatcggcagtcaggacccctactgcgggtgggcccccgacggctcctgcatcttcctcagcccgggcaccaggtactgcggagagggagagccgcctttgagcaggacgtgtccggggccagcacctcaggttaggggactgcacagctctgggtgcacatctcccccggggctgccaacctctgggctccacactcccactctcctgcggcacccccctctctgctacttccagatcccccaccgctcctgcctcccaggctccgcggggagacttgggcctggagacccgccccgcacgcagatcccgcccgccccggccgcgggttccggggaacgaaggcgccgccagcccgggctgtgggcagagcgcgccctctgccgggatgatcggaaacggcgcggcggcgactcccggaccctcgggactccggaccgactcccacccggctga

SEQ ID NO: 2272 - DNA, 416 bp, Homo sapiens
  SIMILAR (270)..(413): 781254mologous to Homo sapiens acidic ribosomal phosphoprotein (P1),accession number M17886,Smith-Waterman Score= 195.
  misc_feature (1)...(416): n = a,t,c or g
nnnnnnnnnnnnnnnnnnnnnnnnnnnnnnnnnnnnnnnnnnnnnnnnnnnnnnnnnnnnnnnnnnnnnnnnnnnnnnnnnnnnnnnnnnnnnnnnnnnnnnnnnnnnnnnataaatttttaaagaaccttaaaaactgccctttcctcagctgctgccaaggtgcttggtcattccaaggaagctaaggccacattggggtgagagcctcacttcatccggcgattagcacctcatccagcagcgccagccccacacacacccgtgccatggcctccctctccgagctcgcctacatctactcggccctcattctgcataatgataaaatcaatgccctcattaaagcagctggtgtaaatgttgaacctttctggcctggcgtgtttgcaaaggccctagccaatgtcagcatn

SEQ ID NO: 2273 - DNA, 627 bp, Homo sapiens
  SIMILAR (285)..(199): 721254mologous to Homo sapiens acidic ribosomal phosphoprotein (P1),accession number M17886,Smith-Waterman Score= 113.
atgctgcacagaattatgagtgacaacaacatgggttatgccacaaagaatcagctgtcaaaaagaagaggaaacaaatatatcaaagtaggccagaaaatttgctcatcagtgctgtctgctagaactttctgtgataacagaaatgtgctggagcagcagcagcagaggcgggcagaagctcctgctggtacagatagagccagctgctggaccaggtccaccagcccctacattgcagaggaggctccccatgttgactttggccaggcctttgcaaacaagccaggccaaaagggttcaacatttacaccggctgctttaatgagggcattgatcttattctccgtgacggtcacctcatcatcgtgcggaatgagggccagctacacttcaagtgctcattacccacatgcagctagtgaccaccttactggacactgcagatatagaacccttacatcattaagaaactcttggacagcattggttcaggtggactttcttccacctctgccacgaaagatagcaagaccaacccctcctcttcatcctcctcctcagcctactcaacctgaaaataataatgaagccctttatgatgatcagctcctacttaatgcatag

SEQ ID NO: 2274 - DNA, 519 bp, Homo sapiens
  SIMILAR (216)..(470): 1001254mologous to Homo sapiens acidic ribosomal phosphoprotein (P1),accession number M17886,Smith-Waterman Score= 438.
ggcacgaggctgccgccaaggtgctcggtccttccgaggaagctaaggcggcgttggggtgaggccctcacttcatccggcgactagcaccgcgtccggcagcgccagccctacactcgcccgcgccatggcctctgtctccgagctcgcctgcatctactcggccctcattctgcacgacgatgaggtgacagtcacggaggataagatcatatgccctcattaaagcagccggtgtaaatgttgagcctttttggcctggcttgtttgcaaaggccctggccaacgtcaacattgggagcctcatctgcaatgtaggggccggtggacctgctccagcagctggtgctgcaccagcaggaggtcctgccccctccactgctgctgctccagctgaggagaagaaagtggaagcaaagaaagaagaatccgaggagtctgatgatgacatgggctttggtctttttgactaaacctcttttataacatgttcaataaaaagctgaacttcaaaaaaaa

SEQ ID NO: 2275 - DNA, 600 bp, Homo sapiens
  SIMILAR (342)..(163): 981254mologous to Homo sapiens ubiquitin-conjugating enzyme E2 UbcH-ben,accession number D83004,Smith-Waterman Score=306.
tttagatttgctaatgtgcatttaatcaccaaaggactgaagatgtctgggcttttttattctgtaatgtttctaagactgtgtccattaaatgcaaacaaagaggaggaagtcttggcagaacaggagaagtgatgcacacttgatgatcgtatcaatttaaatattattcatggcatatagcctagtccatgctctagctgtttctatggcttgggcttcgttggtcttccactgctccgctacatcatttgctaatggatcatctggattgggagcacttaacaaggcctggatcgatagcagaactgtgcggatctgcagtgctggggaccacttattttaggggctgccattgggtattcttctggaaggaataggtccaagttacagagtccctccctcaaagggggaatcctgagggccagcaatgaccacatgaaaataacgggcgttgctctcatctggttcggctttgatgccaggaactggttctgccagcaaacgctgggtttccttgatgatcctgcggggcagcccggccatcttgtcagaacccgagttcggcctctggtctcgtctccggctcctctcgcctca

SEQ ID NO: 2276 - DNA, 2344 bp, Homo sapiens
  SIMILAR (2243)..(1791): 441254mologous to Homo sapiens dJ526F5.1 (novel protein similar to UBE2N (ubiquitin-conjugating enzyme E2N (homologous to yeast UBC13))),accession number AL109622,Smith-Waterman Score=180.
ttttttttttttttttttatggggaaaatgtaattttgatagttaattcttcatcttacataggagcacaataaaatacaccacaatctgaagaaactccagaattacgagaataagagtgaagaaaattcaaatgggctacaatatccattaccttaaactgcaagagacaaggttgcaacccgaaggttaacatttatgtatttatgactggctacatttatgacttaaaaataacaagaatcaggaattagatatggagtagagctgggacagtaacagttttgtgaggggaggaattcgtcaataaagaagaaaaattactgaattccaaattaaagaataaaacgagctcccacagcaaatactggagggatgaaagcaagaatcattaactgaggacttgatactctcaaagggataaacctttctgatgacacacaagctagatagttgagatctgctcatcaggtttataaggaagactcacaaatgcctcagcaaatcccaaatgatcagatcagtgtttcttaacacacatgaaaggttacagatgaaattttcagataagaaccaagaaaaatgtcataacccaaattttaggcaaaaatgtggcacaactgtgaaagtcctacatgtcagtcacaactgctatctttgctgtgactttcctgtacagtaatttttaaacattgtggcaagacaccaatgatcatctaatcagacaacacaaacacatttatttcaaattcctagaaggttaaaaaaaggtcagatactgatgctttatgcatgctcagggccagtttataaatactccattcagtactatcttaacacaaatctgcatcagtgaaaagaaactggcaaaatccacctctttgccattcaatttgtcagatggtgaagaccaagaaagaatgttccatcagtttcaattttaaaatacggattgtcaaattgggaaaatgaaataaacacagtaaaataaactgtacaaaggcaaagtagaataacaaaaaatattttacttaaaacataaggatttacagaagtttccagacaagccatacaaaatggtcacaagcttttttttggagggggggaatctacacttgacagcaatgttattagtgagggctgtgatgtttgtttaatgttcccattttgggttccaacaatcaagcttgtccatctacagcgtctaaataaagttaggacttggctagagcatatttctaaaggacctgggttaggctgcttttaaccaatggcaattaggatcacccaaaaaaggggggaaagggagcccattaaaattaaactacctcccccctccaaaaataaaattaaaattaaaattaaaattaaaaacaccccacacccctggcaggcttaacctggacaacttaccttcattccacagtgccttttatacttaaaacccggatggggggggaatggaataaaagcagggagggggccactgctttttaaacgttttcacaacaatcccagatgaatacttcctagcctctgctcatgctttatgaacagtgaaatcaggacaagacataagatttgctaatgtgccatttaatcaccaaaggactgaagatgtctgggcttttttattctgtaatgtttctaaagactgtgtccattaaatgcaaacaaagaggagggaagtcttggcagaacaggagaagtgatgcacacttgatgatcgtatcaattttaaatattattcatggcatatagcccagctccatgctctagctgtttctatggctttgggcttcgttggtcttcccaactgctccgctacaatcatttgcctaaatggatcatctggaattgggaagcaacttaaacaaagccctggaacgaatagcaagaactgtgcgggatctgacagctgctggcggaccggcttatctttcaaagatatctaaacgtatttcttccccagcttgtgtaaaattaggaatggaaaaattttggggtcaatgaaagcgtaactttaggggggcctgccatttggggaattccttccggaatggaatagttccaggtttaaagagtcccctccctcaaagaggggaatcctttgattccccagcaatgaccacatgaaaataacgggcgttgctttcatctggttcggcttttgatgccaggaactggttctgccagcaaaacgctgggtttccttgatgaatcctgcggggcagcccggccatcttgtcagaacccgagttcggcctctggtctcgtctccggctcctctcgcctcacgcacgagtggaagtcccgggctccacttccgggggaccctcgtgcc

SEQ ID NO: 2277 - DNA, 669 bp, Homo sapiens
  SIMILAR (669)..(616): 611254mologous to Homo sapiens Human secreted protein fragment encoded from gene 29,accession number Y07880,Smith- Waterman Score=67.
tcgcggacgcgtgggcagcttaagcgattcaggcttgcatattcttcttggtgtctgtgcttttggccccctcagaatggtttctaaacaacacaaatgttgatgctaaaatttaattttactgtagtatggagcaaggaggagagtgctatggggtaagattagataaagggagctagattacctggtaagtcatggtaatgaccttgtattttactctgagatgataactcattgcagggttttcaacagagtggagttacatgctccaaactttatttaaaaggatcattttggcttctgggaagagagagacaggataagcagatggcaaggatagaagcaggggctgttacaatagttaaaaacaataatgaaaactcgagtcagggtagtaatggcaagaaatggttagaatcagcatgtgttttgaaagtagaactgacagaatttgctgatagattagatgaggattatgaaagtaagaaagtagtcaaaggagattcggaggtttttgccttgagcaactacaagattagaattgccacttatagagttgggaaacagtgggaggagcagtgtgagaacgagctaatacaccagtacagcatcattgttattacagatatagtaactaaggaccagagagggaaagcagcttatccatga

SEQ ID NO: 2278 - DNA, 426 bp, Homo sapiens
  SIMILAR (203)..(409): 351254mologous to Felis catus fibrinogen A-alpha chain,accession number AF095461,Smith-Waterman Score=97.
atggcttttgacacattctcaattgggtctgtggtccaggagatcgagaacccctgcagaagggcactggaccccagccacctgggctgggagcctttctctgggctgtgctggggcagctgtgggagcccccagaatgaggacagcctgcagtgggacctgggcatggagtcgacctcgctagacgacgttctgtatccgtacgccagcttccggaacctggtggaccccatcacacacgacctcatcatcagcctggcacgctacatccactgtcccaagccggtagggtggctgtggtccgagccagccaggtcccggggtgtgcggtgggtgcctttctgggcagagcagctgtatgcccaaggaggactggcagacaggcccaaggaggacaagcccgtcctccaggcaccaagagcttga

SEQ ID NO: 2279 - DNA, 560 bp, Homo sapiens
ccaccgtgccctgacaaaatatttttcttgatggggtaaattacactttgagagtttaagcaagaaattacagtaacagcttttgtgggaatatatacatacactctttaacatgacacttgattaagaaacaatcatgtcatcaggctacgtacgggactgcaaacaagttacattcaaaacttgtaagacacgtcattttgatgcagagttaatatttgatatgaaaaaggtattttcaattgccatagagcaagaatacacctataggtatttgggtctaggaaggcatttcaatcctctccaggtatttacttacattttggaaagacttgttctgatatatcttgcttcttctattatcgactgcagcacataaaagaaaatgatctatgtttggaaatattaccactaccttaagaaataaagaataaagagcaaagatcgttttccttttttaaatcactcgttgaacatctttatggccctctgaagcatttctcacatgcagaaaagtttctctgctcataattctaaatttattagcactaacttaagaa

SEQ ID NO: 2280 - DNA, 458 bp, Homo sapiens
  SIMILAR (285)..(377): 551254mologous to Homo sapiens Human neurofilament-M mutant protein fragment 54,accession number Y20772,Smith-Waterman Score= 83.
tttcttcaaacattttattcccaaaagcaatgttacaagaaataagaaggccatgctatacagaactctaggagtaagaaaagcctaacttaggaattagatggagatagaatctgcctacttagtataacacacctttggggctggtcttccacagcaggccctgaatgaacgtagacttcatcagcaggacagaaatgaaatctctcagagccctcttgtatgttgtttgtctccccagcttgaatatgagctttccaaaagcatcagcactgtttgtcttatgttggatccttatctcccagcatggtgcctcggcctctcaaagtgctgggattacaggcatgaaccaccacgtctagccttttctaagtgaaagcactattttatagcttgcaaacactgttagaaaaatcttctggaagcaccggatcaggtatctgcttgaggaatgtgag

SEQ ID NO: 2281 - DNA, 432 bp, Homo sapiens
  SIMILAR (2)..(55): 721254mologous to Homo sapiens Human breast cancer related protein BCRB2,accession number W48351,Smith-Waterman Score=69.
aatagagatgcggtttcgccatgttggccgggctggtcttgaagtcctgacctcaggtgattcacctacctcagcttcccgacgtactgggtttacaggcatgagccaccgttcccggccaaggagggctctgagagatttcatttctgtcctgctgatgaagtctacgttcattcagggcctgctgtggaagaccagccccaaaggagaagttttgctctgttgcccaggctggagtgcagtggtgcaatctcagcttactgcagcctctgcctcccaggttcaagcaattctcctgcctcagccacctgagcagctgggattacagttgctgaacagaagacttttgagagtcagcagaaatcttccactttgcatggttctcttgatgtgaaatcatctatatagccccagaattggaaaagaaaaaaa

SEQ ID NO: 2282 - DNA, 489 bp, Homo sapiens
  SIMILAR (103)..(294): 341254mologous to Homo sapiens HSPC331,accession number AF161449,Smith-Waterman Score=86.
atgaggacagctgatgtggctggcctgaaaaataaggagggctctgagagatttcatttctgtcctgctgatgaagtctacgttcattcagggcctgctgtggaagaccagccccaaaggttaagattggcatttgagaaacagatttgggaattaataaatgaagctatgagaatagataaggccatcaaggaagcacactggagaaaaaggaagaggtccaaggaaagcagtgcaacatctaaaggcagcgagaaagcccaaaataagaattatcggagtgacgggaaaatggcatttgagaagatcacagaagagagagcatcaaggcatgcagtaggttatatagcgcagagagagaatctgtgcattttggggagtaagagcgcagtgattttgggactttgcattggtactcagtacagccctatcacagtggaaaacaacactgggcagaactcagctggcacccaacaagggagcatctag

SEQ ID NO: 2283 - DNA, 204 bp, Homo sapiens
  SIMILAR (71)..(199): 391254mologous to Homo sapiens Human prostate cancer- associated protein 72,accession number Y48286,Smith-Waterman Score= 70.
atgaagcagcaggctgcttcagcccaggaatttgaggttacgggaacaagggcagagccagaatgtcaacggaggagtgtgcaccctttcaactacactctgtgcgcaatgtttaaccggagcctcgtgtattcatttggcactagcagctttgtttcaccccaggccctgatcatggggcccacagagaggggtcccaggtag

SEQ ID NO: 2284 - DNA, 2361 bp, Homo sapiens
  SIMILAR (610)..(2346): 931254mologous to Homo sapiens putative p150,accession number U93563,Smith-Waterman Score=2784.
atgaggaggagaggagaaggtgatgcaggaggaggagaaaaggaaaaagaagaggagagaaggggcatagatgaagctgtaagccatcattctcagcaaactaacacaggaggagaaaaccaaatgccacatgttctcactcataagtggcagctgaacagaaactctgcctgtgacaagctgcacaagcctcactcagtgcctggcggggttgcagctggagacgtgggaggaaaaacaatttctaatcctggtgtttgtgcaatagagtatcaggtggacggttcacctcacatttgggaagatgtgaacaaaggtgtctacattgaagaggacagagctcctctcatggaacgcagttcctcaccagcaatggaacaaagctggatggagaatgactttgacgagctgagagaagaaggcttcagacgatcaaattactctgagctacgggaggacattcaaaccaaaggcaaagaagttgaaaactttgaaaaaagttcagaagaatatataactagaatagccaatacacagaagtgcttaaaggagctgatggagctgaaaaccaaggctccagaactacgtgaagaatgcagaagcctcaggagccaatgcgatcaactggaagaaagggcatcagtgatagacacacatagtctcaaaataaaaggatggaggaagatctaccaagcaaatggaaaacaaaaaaaggcaggggttgcaatcctagtctctgataaaacagactttaaaccaacaaagatcaaaagagacaaagaaggccattacataatggtaaagggatcaaatcaacaagaagagctaactatcctaaataaatatgcacccaatacaggagcacccagattcataaagcaagtcctgagtgacctacaaagagacttagactcccatacattaataatgggagactttaacaccccactgtcaacattagacagatcaacaagacagaaagtcaacaaggatacccaggaattgaactcagctctgcaccaagcggacctaatagacatctacagaactctccaccccaaatcaacagaatatacatttttttcagcaccacaccacacctatttcaaaactgaccacatagttggaagtaaagttctcctcagcaaatgtaaaagaacagaaattataacaaactgtctctcagaccacagtgcaatcaaactagaactcaggattaagaaactcactcaaaaccactcaactacatggaaactgaacaacttgctcctgaatgactactgcgtacataacgaaatgaaggcagaaataaagatgttttttgaaaccaacgagaacaaagacacaacataccagaatctctgggacgcattcaaagcagtgtgtagagggaaatttatagcactaaatgcccacaagagaaagcaggaaagatccaaaattgacaccctaacatcacaattaaaaaaactagaaaagcaagagcaaacacattcaaaagctagcagaaggcaagaaataactaaaatcagagcagaactgaaggaaatagagacacaaaaaacccttcaaaaaattaatgaatccaggagctggttttttgaaaggatcagcaaaactgataaaccgctagcaagactaataaagaagaaaagagagaagaatcaaatagatgcaataaaaaatgataaaggggatatcaccaccgatcccacagaaatacaaactaccatcagagaatactacaaacacctctacgcaaataaactagaaaatctagaagaaatggataaattcctcgacatatacactctcccaagactaaaccaggaagaagttgaatctctgaatagaccaataacaggagctgaaattgtggcaataatcaatagcttaccaaccaaaaagagtccaggaccagatggattcacagccgaattctaccagaggtacaaggaggaactggtaccattccttctgaaactattccaatcaatagaaaaagagggaatcctccctaactcattttatgaggccagcatcatcctgataccaaagccaggcagagacacaacaaaaaaagagaattttagaccaatatccttgatgaacattgatggaaaaatcctcaataaaatactggcaaaccgaatccagcagcacatcaaaaagcttatccaccatgatcaagtgggcttcatccctgggatacaaggctggttcaatatacgcaaatcaatcaatgtaatccagcatataaacagaaccaaagacaaacaccacatgattatctcaatagatgcagaaaaggcctttgacaaaattcaacagcccttcatgcaaaaactctcaataaattag

SEQ ID NO: 2285 - DNA, 2265 bp, Homo sapiens
  SIMILAR (946)..(2256): 951254mologous to Homo sapiens putative p150,accession number U93574,Smith-Waterman Score=2181.
atgggagactttaacaccccactgtcaacattagacagatcaacgagacagaaagtcaacaaggatacccaggaattgaactcagctctgcaccaagcagacctaatagacatctacagaactctccaccccaaatcaacagaatatacatttttttcagcaccacaccacacctgctccaaaactgaccacatagttggaaaaaagcaagagcaaacacattcaaaagctagcagaaggcaagaaataactaaaatcagagcagaactgaaggaaatagagacacaaaaaacccttcaaaaaattaatgaatccaggagctggttttttgaaaggatcaacaaaattgatagaccgctagcaagactaataaagaagaaaagagagaagaatcaaatagacgcaataaaaaatgataaaggggatatcactaccagtcccacagaaatacaaacaaccatcagagaatactacaaacacctctacgcaaataaactagaagatctagaagaactggataaattcctcgaaacatacaccctcccaagactaaaccaggaagaaggtgactctctgaatagaccaataacaggatctgaaattgtggcaataatcaatagcttgccaaccaaaaagagtccaggaccagatggattcacagccgaattctaccagaggtacaaggaggaactggtaccattccttctgaaacgattccaatcaatagaaaaagagggaatcctccctaactcattttatgaggccaacatcatcctgataccaaagtcggccagagacacaaccaaaaaagataattttaggccaatatccttgatgaaccttgatgcaaaagcctcaataaaatactggcaaaccgaatccagcagcatatcaaaaagcttatccaccatgatcaagtgggcttcatccctgggatgcaaggctgtgttggaagttctggccagggcaattaggcaggagaaggaaataaagggtattcaattaggaaaagaggaagtcaaattgtccctgtttgcagatgacatgattgtatatctagaaaaccccattgtctcagcccaaaatctccttaagctgataagcaacttcagcaaagtctcaggatacaaaatcaatgtacagaaatcacaagcattcttatacaccaataacagacaaacagagagccaaatcatgagtgaactcccattcacaattgcttcaaagagaataaaatacctaggaatccaacttacaagggatgtgaaggacctcttcaaggagaactacaaaccactgctcaatgaaataaaagaggatacaaacaaatggaagaacattccatgctcatgggtaggaagaatcaatatcgtgaaaatggccatactgcccaaggtaatttatagattcaatgccatccccatcaagctaccaatgactttcttcacagaattggaaaaaactactttaaagttcatatggaaccaaaaaagatcctgcatcgccaagtcaatcctaagccaaaagaacaaagctggaggcatcacactacctgacttcaaactatactacaaggctacagtaaccaaaacagcatggtactggtaccaaaacggagatatagatcaatggaacagaacagagccctcagaaataacgccgcacatctacaactatctgatctttgacaaacctgagaaaaacaagcaatggggaaaggattccctatttaataaatggtgctgtgaaaactggctagccatatatagaaagctgaaactggatcccttctttacaccttatacaaaaatcaattcaagatggactaaagacttaaatgttagacctaaaaccataaaaaccctagaagaaaacctaggcattaccattcaggacataggcatgggcaaggacttcatgtctaaaacaccaaaagcaacggcagcaaaagcccaaattgacaaatgggatctaattaaactaaagagcttctgcacagcaaaagaaactaccatcagagtgaataggcaacctacaaaatgggaggaaattttcgcaacctactcatctgacaaagggctgatatccagaatctacaatgaactcaaacaaatttacaagaaaaaaacaaacaaccccatcaaaaagtgggcaaaggacatgaacagacacttctcaaaacaagacatttatgcagccaaaaaacacatgaaaaaatgctcatcatcactggccatcagagaatgcaaatcaaaaccacaatga

SEQ ID NO: 2286 - DNA, 2268 bp, Homo sapiens
  SIMILAR (1)..(1737): 911254mologous to Homo sapiens putative p150,accession number U93572,Smith-Waterman Score=2698.
atgggagactttaacaccccactgtcaacattagacagatcaacgagacagaaagccaacaaggatacccaggaattgaactcagctctgcaccaagtggacctaatagacatctacagaactctccaccccaaatcaacagaatatacattcttttcagcaccacaccacacctattccacaactgaccacatacttggaagtaaagctctcctcagcaaatgtagaagaacagaaattataacaaactatctctcagaccacagtgcaatcaaactagaactcagaattaagaatctcactcaaaaccgctcaactacatggaaactgaacaacctcctcctgaatgactacggggtgcataatgaaatgaaggcagaaataaagatgttctttgaaaccaatgagaacaaagacacaacataccagaatctctgggacacattcaaagcagtgtgtagagggaaatttatagcactaaatgcccacaagagaaagcaggaaagatccaaaattgacaccctaacatcacaattaaaagaactagaaaagcaagagcaaacacattcaaaagctagcagaagacaagaaataactaaaatcagagcagaactgaaggaaatagagacacaaaaaacccttcaaaaaattaatgaatccaggagctggttttttgaaaggatcaacaaaatagatagactgctagcaagactaataaagaaaaaaagagagaagaatcaaatagatgcaataaaaaatgataaaggggatatcaccactgatcccacagaaatacaaactaccatcagagaatactacaaacacctctacgcaaataaactagaaaatctagaagaaatggataaattcctgcacacatacactctcccaagactaaaccaggaagaagttgaatctctgaatagaccaataacaggatctgaaattgtggcaataatcaatagcttaccaaccaaaaagagtccaggaccagatggattcacagccgaattcgaccagaggtacaaggaggaactggtaccattccttctgaaactattccaatcaatagaaaaagagggaatcctccctaactcattttatgaggccagcatcatcctgatacgaaagcctggcagagacacaaccaaaaaagagaattttagaccaatatccttgatgaacactgatgcaaaaatcctcaataaaatactggcaaaacgaatccagcagcacatcaaaaagcttatccaccatgatcaagtgggcttcatccctgggatgcaaggctggttcaatatacacaaatcaataaatgtaatccagcatataaacagagccaaagacaaaaaccacatgattatctccatagatgcagaaaaggcctttgacaaaattcaacaacccttcatgctaaaaactctcagtaaattaggtattgacgggacatatttcaaaataataagagctatctatgacaaacccacagccaatatcatactgaatgggcaaaaactggaagcattccctttgaaaactggcacaagacagggatgccctctctcaccactcctattcaacatagtgttggaagttctggccagggcaattaggcaggagaaggaaataaaggggaacttcagcaaagtctcaggatacaaaatcaatgtacaaaaatcacaagcattcttatacaccaacaacagacaagcagagagccaaatcatgagtgaactcccattcacaattgcttcaaagagaataaaatacctaggaatccaacttacaagggatgtgaaggacctcttcgaggagaactacaaaccactgctcaatgaaataaaagaggatacaaacaaatggaagaacattccatgctcatgggtaggaagaatcaatatcgtgaaaatggccatactgcccaagtgtttgccaagccataagctgatattttattttaccttcagttctctgtacattacagcttctctgcctgcaacatccttttcatctggctcctttacatgtcaggtccacccagtagatttccatgtggaatcaaagtcagatgccataaatgactggagtggcagagtctgtcagtggagttacataaactgtgtgtatggcgagtgcagctccagactgaacagtaatgtgcccgctttgagggaggagagtagcactcctcagtactaccaggatggtgccattgcagaatgttgccccagagctgctagatctgctaacagaaacccaaatctgtag

SEQ ID NO: 2287 - DNA, 2337 bp, Homo sapiens
  SIMILAR (2292)..(2336): 601254mologous to Homo sapiens putative p150,accession number U93565,Smith-Waterman Score=55.
atggagctgaaagccaaggctcgaggactacgtgaagaatgcagaagcctcaggagccgacgcgatcaactggaagaaagggtatcagtgatggaagatgaaatgaatgaaatgaagcgagaagggaagtttagagaaaaaagaataaaaagaaacgaacaaagcctccaagaaatatgggactatgtgaaaagaccaaatcgacgtctgattggtgtacctgaagaactagaaaagcaagagcaaacacattcaaaagctaacagaaggcaagaaataactaaaatcagagcagaactgaaggaaatagagacacaaaaaaccctgcaaaaaattaatgaatccaggagctggttttttgaaaggatcaacaaaattgatagaccgttagcaagactaataaagaagaaaagagagaagaatcaaatagacgcaataaaaaatgataaaggggatatcaccaccgatcccacggaaatacaaactaccatcagagaataccacaaacacctctacgcaaagaaactagaaaatctagaagaaatggatgaattcctcgacacatacaccctcccaagactaaacaaggaagaagttgaatccctgaatagaccaataacaggctctgaaattgtggcaataataaatagcttaccaaccaaaaagagtccaggaccagatggattcacagccgaattctaccagaggtacaaggaggaactggtaccattccttctgaaactattccaatcaatagaaaaagagggaatcctccctaactcattttatgaggccagcatcatcctgataccaaagccgggcagagacacaacaaaaaaagagaattttagaccaatatccttgatgaacattgatgcaaaattcctcaataaaatactggcaaaccgaatccagcagcacatcaaaaagcttatccaccatgatcaagtgggcttcatccctgggatgcaaggctggctcaatatatgcaaatcaatcaatgtaatccagtatataaacagaaccaaagacaaaaaccacatgattatctcaatagatgcagagaaggcctttgaaaaaattcaacaacccttcatgctaaaaactctcaataaattagtgttggaagttctggccagggcaattaggcagaagaaggaaataaagggtattcaattaggaaaagaggaagtcaaattgtccctgtttgcacatgacatgattgtatatctagaaaagcccattgtctcagcccaaaatcttcttaagctgataagcaacttcagcaaagtctcaggatacaaaatcaatgtacaaaaatcacaagcattcttatacaccaatcacagagaaacagagagacaaatcatgagtgaactcccattcacaattgcttcaaagagaatcaaatacctaggaatccaacttacaagggacgtgaaggacctcttcaaggagaactacaaaccactgctcaaggaaataaaagaggatacaaacaaatggaagaacattccatgcttatgggtaggaagaatcaatattgtgaaaatggccatactgcccaaagtaatttatagattcaatgccatccccatcaagctaccaatgactttcttcacagaattggaaaaaactactttaaagttcatatggcaccaaaaaagagcccgcatcgccaagtcaatcctaagccaaaagaataaagctggaggcatcacactacctgacttcaaactatactacaaggaaacagtaaccaaaacagcatggtactggtaccaaaacagagatatagatcaatggaacagaacagagccctcagaagtaatgccgcctatctacaactatctgatctttgacaaacctgagacaaacaagcaatggggaaaggattccctatttaataaatggtgctgggaaaactggctagccatatgtagaaagctgaaactggatcctttccttacaccttatacaaaaattaattcaagatggattaaagacttaaacgttagacttaaaaccataaaaaccctagaaggaaacttaggcattaccattcaggacataggcatgggcaaggacttcgtgtctaaaacaccaaaagcaatggcaacaaaagccaaaattgacaaatgggatctgattaaactaaagagcttctgtacagcaaaagaaactaccaacagagtgaacaggcaacctacaaaattggggaaaattttcacaacctactcatctgacaaagggttaatatccagaatctacaatgaactccaacaaatttacaagaaaaaaacaaacaacctatcaaaaagtgggtggaggacatga

SEQ ID NO: 2288 - DNA, 2196 bp, Homo sapiens
  SIMILAR (487)..(2178): 881254mologous to Homo sapiens putative p150,accession number U93564,Smith-Waterman Score=2564.
atgggagactttaacaccccactgtcaacattagacagatcaacaagacagaaagtcaacaaggatacccaggaattgaactcagctctgcaccaagtggacctaatagacatctacagaactctccaccccaaatcaacagaatatacatttttttcagcaccacacaacacctattccaaaattgaccacatagttggaagtaaagctctcctcagcaaatgtaaaagaacagaaattataacaaactatctctcagaccacagtgcaatcaaactagaactcagaattaagaatctcactcaaagccactcaactacatggaaactgaacaacctgctcctgaatgactactgggtacataaggaaatgaaggcagaaataaagatgttctttgaaaccaacaagaacaaagacacaacataccagaatctctgggacgcattcaaagcagtgtgtagagggaaatttatagcactaaatgcccacaagacaaagcaggaaagatccaaaattgacaccctaacatcacaattaaaagaactagaaaagcaagagcaaacacattcaaaagctagcagaaggcaagaaataactaaaatcagagcagaactgaaggaactagagacacaaaaacccttcaaaaaatcaatgaatccaggagctgaaatacaaactaccatcagagaatactacaaacacctctacgcaaataaactagaaaatctagaagaaatggatacattcctcgacacatacactctgccaagactaaaccaggaagaagttgaatctctgaatagaccaataacaggagctgaaattgtggcaataatcaatagtttaccaaccaaaaagagtccaggaccagatggattcacagccgaattctaccagaggtacaaggaggaactggtaccattccttctgaaactattccaatcaatagaaaaagagggaatcctccctaactcattttatgaggccagcatcattctgataccaaagccgggcagagacacaaccaaaaaagagaattttagaccaatatccttgatgaacattgatgcaaaaatcctcaataaaatactggcaaaccgaatccagcagcacatcaaaaagcttatccaccatgatcaagtgggcttcatccctgggatgcaaggctggttcaatatacacaaatcaataaatgtaatcccgcatataaacagagccaaagacaaaaaccacatgattatctcaatagatgcagaaaaagcctttgacaaaattcaacaacccttcatgctaaaaactctcaataaattaggtattgatgggacgtatttcaaaataataagagctatctatgacaaacccacagccaatatcatactgaatgggcaaaaactggaagcattccctttgaaaactggcacaagacagggatgccctctctcaccactcctattcaacatagtgttggaagttctggccagggcaatcaggcaggagaaggaaataaagggtattcaattaggaaaagaggaagtcaaattgtccctgtttgcagacgacatgattgtttatctagaaaaccccatcgtctcagcccaaaatctccttaagctgataagcaacttcagcaaagtctcaggatacaaaatcaatgtacaaaaatcacaagcattcttatacaccaacaacagacaaacagagagccaaatcatgagtgaactaccattcacaattgcttcaaagagaataaaatacctaggaatccaacttacaagggatgtgaaggacctcttcaaggagaactacaaaccactgctcaaggaaataaaagaggatacaaacaaatggaagaacattccatgctcatgggtaggaagaatcaatatcgtgaaaatggccatactgcccaaggtaatttacagattcaatgccatccccatcaagctaccaatgactttcttcacagaattggaaaaaactactttaaagttcatatggaaccaaaaaagagcccgcatcgccaagtcaatcttaagccaaaagaacaaagctggaggcatcacactacctgacttcaaactatactacaaggctacagtaaccaaaacagcatggtactggtaccaaaacagagatgtagatcaatggaacagaacagagccctcagaaataacgcccatacctacaactatctga

SEQ ID NO: 2289 - DNA, 2298 bp, Homo sapiens
  SIMILAR (1)..(1065): 961254mologous to Homo sapiens putative p150,accession number U93563,Smith-Waterman Score=1757.
atgaaggcagaaataaagatgttctttgaaaccagcaagaacaaagacacaacatatcagaatctctgggacgcattcaaagcagtgtgtagagggaaatttatagcactaaatgcccacaagagaaagcaggaaagatccaaaattgacaccgtaacatcacaattaaaagaactagaaaagcaagagcaaacacattcaaaagctagcagaaggcaagaaataactaaaatcagagaagaaatgaaagaaatagagacacaaaaaacccttcaaaaaattaatgaatccaggagctggttttttgaaaggatcaacaaaatagatagaccactagcaagactaataaagaaaaaaagagagaagaatcaaatagacgccataaaaaatgataaaggggatatcaccaccgatcccacagaaatacaaattaccatcagagaatactacaaacatctctatgcaaataaactagaaaatctagaagaaatggataaattcctcgacacatacactctcccaagactaaaccaggaagaagttgaatctctgaatagaccaataacaggatctgaaattgtggcaataatcaatagcttaccaaccaaaaagagtccaggaccagatggattcacagccgaattctaccagaggtacaaggaggaactggtaccattccttctgaaactattccaatcaatagaaaaagagggaatcctccctaactcattttatgaggccagcatcatcctgataccaaagctgggcagagacacaaccaaaaaagagaattttagaccaatatccttgatgaacattgatgcaaaaatcctcaataaaatactggcaaaccgaatccagcagtacatcaaaaagcttattcaccatgatcaagtgggcttcatccctgggatgcaaggctggttcaacatacgcaaatcaataaatgtaatccagcatataaacagaaccaaagacaaaaaccacatgattatctcaatagatgtagaaaaggcctttgacaaaattcaacaacccttcatgctaaaaactctcaataaattagagaataaaataactaggaatccaacttacaagggatgtgaagcacctcttcaaggagaactacaaaccactgctcaaggaaataaaagaggatacaaacaaatggaagaacattccatgctcatgggtaggaagaatcaatatcgtgaaaatggccatactgcccaagaattggaaaaaacgactttaaagttcatatggaaccaaaaaagagcctgcatcaccaagtcaatcctaagccaaatgaacaaagctggaggcatcacactacctgacttcaaactatcttacaaggctacagtaaccaaaacagcatggtactggtaccaaaatagagatatagatcaatggaacagaacagagccctcagaaataacgccacatatctacaactatctgatatttgacaaacctgagaaaaacaagcaatggggaaaggattccctatttaataaatggtgctgggaaaactggctagccatatgtagaaagctgaaactggatcccttccttacaccttatacaaaaatcaattcaagatggattaaagacttaaacattctacctaaaaccataaaaaccctagaagaaaacctaggcattaccattcaggacatagacatgggcaaggacttcatgtctaaaacaccaaaagcaatggcaacaaaagccaaaattgacaaatgggatctaattaaactaaagagcttctgcacagcaaaagaaactaccatcagagtgaacaggcaacctacaaaatgggagaaaattttcacaacctactcatctgacaaagggctaatatccagaatctacaatgaactcaaacaaatttacaagaaaaaaacaaacaaccccatcaaaaagtgggcaaaggacataaacagacacttctcaaaagaagacatctatgcagccaaaaaacacatgaaaaaatgttcatcatcactggccatcagagaaatgcaaatcaaaaccacaatgagataccatctcacaccagttagaatggcaatcattaaaaagtcaggaaacaacagaatcaaagttgtaaaactacaaattgttcttcaaatgaagccccagatgcagtccatgactaagatccaccgcggacccctggacaggcctgctagcccatgttccgatgctagtgacatcgaaggcacccctcccgaggaaatctcaactgcacgacccctactatgcgccagttcagcaggaaacagttag

SEQ ID NO: 2290 - DNA, 2880 bp, Homo sapiens
  SIMILAR (517)..(2844): 941254mologous to Homo sapiens unknown,accession number AF148856,Smith-Waterman Score=3821.
atggtaaagggatcaattcaacaagaggagctaactatcctaaatatttatgcacccaatacaggagcacccagattcataaagcaagtcctgagtgacctacaaagagacttagactcccacacattaataatgggagactttaacaccccactgtcaacattagacagatcaatgagacagaaagtccacaaggatacccaagaattgaactcagctctgcaccaagcagacctaatagacatctacagaactctccaccccaaatcaacagaatatacatttttttcagcaccacaccacacctattccaaaattgaccacatagttggaagtaaagctctcctcagcaaatgtaaaagaacagaaattataacaaactatctctcagaccacagtgcaatcaaactagaactcaggattaagaatctcactcaaagccgctcaactacatggaaactgaacaacctgctcctgaatgactactgggtacataacgaaatgaaggcagaaataaagatgttctttgaaaccaacgagaacaaagacaccacataccagaatctctgggacgcattcaaagcaaccactagcaagactaataaagaaaaaaagaagaatcaaatagacataataaaaaatgataaaggggatatcaccaccgatcccacagaaatacaaactaccatcagagaatactacaaacacctctacgcaaataaactagaaaatctagaagaaatggatacattcctcgacacatacactctcccaagactaaaccaggaagaagttgaatctctgaatagaccaataacaggctctgaaattgtggcaataatcaatagtttaccaaccaaaaagagtccaggaccagatggattcacagccgaattctaccagaggtacaaggaggaactggtaccattccttctgaaattattccaatcaatagaaaaagagggaatcctccctaactcattttatgaggccagcatcattctgataccaaagccgggcagagacacaaccaaaaaagagaattttagactaatatctttgacgaacattgatgcaaaaatcttcaataaaatactggcaaaccgaatccagcagcacatcaaaaagcttatccaccatgatcaagtgggcttcatccctgggatgcaagcctggttcaatatacgcaaatcaataaatgtaatccagcatataaacagagccaaagacaaaaaccacatgattatctcaatagatgcagaaaaagcctttgacaaaattcaacaacccttcatgctaaaaactctcaataaattaggtattgatgggacgtatttcaaaataataagagctatctatgacaaacccacagccaatatcatactgaatgggcaaaaactggaagcattccctttgaaaactggcacaagacagggatgccctctctcaccgctcctattcaacatagtgttggaagttctggccagggcaatcaggcaggagaaggaaataaagggtattgaattaggaaaagaggaagtcaaattgtccctgtttgcagacgacatgattgtttgtctagaaaaccccatcgtctcagcccaaaatctccttaagctgataagcaacttcagcaaagtctcaggatacaaaatcaatgtacaaaaatcacaagcattcttatacaccaacaacagacaaacagagagccaaatcatgagtgaactcccattcacaattgcttcaaagagaataaaatacctaggaatccaacttacaagggatgtgaaggacctcttcaaggagaactacaaaccactgctcaaggaaataaaagaggacacaaacaaatggaagaacattccatgctcatgggtaggaagaatcaatatcgtgaaaatggccatactgcccaaggtaatttacagattcaatgccatccccatcaagctaccaatgactttcttcacagaattggaaaaaactactttaaagttcatatggaaccaaaaaagagcccgcatcgccaagtcaatcctaagccaaaagaacaaagctggaggcatcacactacctgacttcaaactatactacaaggctacagtaaccaaaacagcatggtactggtaccaaaacagagatatagatcaatgcaacagaacagagccctcagaaataatgccgcatatctacaactatctgatctttgacaaacctgagagaaacaagcaatggggaaaggattccctatttaacaaatggtgctgggaaaactggctagccatatgtagaaagctgaaactggatcccttccttacaccttatacaaaaatcaattcaagatggattaaagatttaaacgttagacctaaaaccataaaaaccctagaagaaaacctaggcattaccattcaggacataggcgtgggcaaggacttcatgtccaaaacaccaaaagcaatggcaacaaaagacaaaattgacaaatgggatctaattaaactaaagagcttctgcacagcaaaagaaactaccatcagagtgaacaggcaacctacaacatgggagaaaattttcgcaacctactcatctgacaaagggctaatatccagaatctacaatgaactcaaacaaatttacaagaaaaaaacaaacaaccccatcaaaaagtgggcgaaggacatgaacagacacttctcaaaagaagacatttatgcagccaaaaaacacatgaagaaatgctcatcatcactggccatcagagaaaggcaaatcaaaaccactatgagatatcatctcacaccagttagaatggcaatcattaaaaagtcaggaaacaacagggacatggatgaaattggaaaccatcattctcagtaa

SEQ ID NO: 2291 - DNA, 2562 bp, Homo sapiens
  SIMILAR (1)..(1080): 961254mologous to Homo sapiens putative p150,accession number U93563,Smith-Waterman Score=1780.
atgaaggcagaaataaagacgttctttgaaaccaacgagaacaaagacacaacataccagaatctctgggatgcattcaaagcagtgtgtagagggaaatttatagcactaaatgcccacaagagaaagcaggaaagatccaaaattgacaccctaacatcacaattaaaagaactagaaaagcaagagcaaacacattcaaaagctagcagaaagcaagaaataactaaaatcagagcagaactgaaggaaatagagacacaaaacacccttcaaaaaattaatgaatccaggagctggttttttgaaaggatcaacaaaattgatagaccgctagcaagactaataaagaagaaaagagagaagaatcaaatagacactataaaaaatgataaaggggatatcaccacccatcccacagaaatacaaactaccatcagagaatactacaaacacctctacacaaataaactagaaaatctagaagaaatggataaattccttgacacatacactctcccaagactaaaccaggaagaagttgaatctctgaatagaccaataacaggagctgaaattctggcaataatcaatagtttaccaaccaaaaagagtccaggaccagatggattcacagccgaattctaccagaggtacaaggaggaactggtaccattccttctgaaactattccaatcaatagaaaaagagggaatcctccctaactcattttatgaggccagcatcattctgataccaaagccaggcagagacacaaccaaaaaagagaattttagaccaatatccttgatgaacattgatgcaaaaatcctcaataaaatactggcaaaccgaatccagcagcacatcaaaaagcttatccaccatgatcaagtgggcttcatccctgggatgcaaggctggttcaatatacgcaaatcaataaatgtaatccagcatataaacagagccaaagacaaaaaccacatgattatctcaatagatgcaggaaaagcctttgacaaaattcaacaatccttcatgctaaaagctctcaataaattagatattgatgggacggcaattaggcaggagaaggaaataaagggtattcaattaggaaaagaggaagtcaaattgtccctgtttgcagacgacatgattgtatatctagaaaaccccattgtctcagcccaaaatctccttaagctgataagcaacttcagcaaagtctcaggatacaaaatcaatgtgcaaaaatcacaagcattcttatacaccaacaacagacaaacagagagccaaatcatgagtgaactcccattcacaattgcttcaaagagaataaaatacttaggaatccaacttacaagggatgtgaaggacctcttcaaggagaactacaaaccactgctcaaggaaataaaagaggatataaacaaatggaagaacattccatgctcatgggtaggaagaatcaatatcgtgaaaatggccatactgcccaagaattggaaaaaaactactttaaagttcatatggaatcaaaaaagagcccgcatcaccaaggcaatcctaagccaaaagaacaaagctggaggcatcacactacctgacttcaaactatactacaaggctacagtaaccaaaacagcatggtactggtaccaaaacagagatatagatcaatggaacagaacagagccctcagaaataatgccacatatctgcaactatctgatctttgacaaacctgagaaaaacaagcaatggggaaaggattccctatttaataaatggtgctgggaaaactggctagccatatgtagaaagctgaaactggatcccttccttacaccctatacaaaaatcaattcaagatggattaaagacttaaacattagacctaaaaccataaaaaccctagaagaaaacctaggcattaccattcgggacataggcatgggcaaggacttcatgtccaaaacaccaaaagcattggcaacaaaagccaaaattgacaaatgggatctaattaaactaaagagcttctgcacagcaaaagaaactaccattagagtgaacaggcaacctacaaaatgggagaagattttcgcaacctactcatctgacaaagggctaatatccagaatctacaatgaactcaaacaaatttacaagaaaaaaacaaacaaccccatcaaaaagtgggtgaaggacatgaacagacacttctcaaaagaagacatttatgcagccaaaaaacacatgaaaaaatgctcatcatcactggccatcagagaaatgcaaatcaaaaccacacttcccactgggcggttaatagaaacattccaaagcaatgagcaccagtcagaagtaaagctcttaaaacaggacaagaagaaatgggtgggaagctggaatgagaacattcatcagcagctcaaagcacagacttctaagggaatctttcctcaccctctgcctctttgttgtgtcatgatttccaatggttctcaaagtgtggcctgcaaaatcttgtggttctccaataccccttag

SEQ ID NO: 2292 - DNA, 2835 bp, Homo sapiens
  SIMILAR (1159)..(2799): 951254mologous to Homo sapiens putative p150,accession number U93567,Smith-Waterman Score=2741.
atgcaccaagcggacctaatagacatctacagaactctccaccccaaatcaacagaatatacatttttttcagcaccacatcacacctattccaaaattgaccacatagttggaagtaaagctctcctcagcaaatgtaatagaacagaaattataacaaactgtctctcagaccacagtgcaatcaaactagaactcaggatcaagaatctcactcaaagccgctcaactacatggaaactgaacaacctgctcctgaatgactactgggtacataacgaaatgaaggcagaaataaagatgttctttgaaaccaacgagaacaaagacacaacataccagaatctctgggacgcattcaaagcagtgtgtagagggaaatttatagcactaaatgcccacaagagaaagcaggaaagatccaaaattgacaccctaacatcacaattaaaagaactagaaaagcaagagcaaacacattcaaaagctagcagaaggcaagaaataactaaaatcagagcagaactgaaggaaatagagacacaaaaaacccttcaaaaaatcaatgaatccaggagctggttttttgaaaggatcaacaaaattgatagaccgctagcaagactaataaagaaaaaaagagagaagaatcaaatagacacaataaaaaatgataaaggggatatcaccaccaatcccacagaaatacaaactaccatcagagaatactacaaacacctctacgcaaataaactagaaaatctagaagaaatggatacattcctcgacacatacactctcccaagactaaaccaggaagaagttgaatctctgaatagaccaataacaggagctgaaattgtggcaataatcaatagtttaccaaccaaaaagagtccaggaccagatggattcacagccgaattctaccagaggtacaaggaggaactggtaccattccttctgaaactattccaatcaatagaaaaagagggaatcctccctaactcattttatgaggccagcatcattctgacaccaaagccgggcagagacacaaccaaaaaagagaattttagaccaatatccttgatgaacattgatgcaaaaatcctcaataaaatactggcaaaccgaatccagcagcacatcaaaaagcttatcccccatgatcaaagccaaagacaaaagcacatgattatctcaatagatgcagaaaaagcctttgacaaaattcaacaacacttcatgctaaaaactctcaataaattaggtattgatgggacatatttcaaaataataagagctatctatgacaaacccacagccaatatcatactgaatgggcaaaaactggaagcattccctttgaaaactggcacaagacagggatgccctctctcaccgctcctattcaacatagtgttggaagttctggccagggcaatcaggcgggagaaggaaataaagggtattcaattaggaaaagaggaagtcaaattgtccctgtttgcagacgacatgattgtttatctagaaaaccccatcgtctcagcccaaaatctccttaagctgataagcaacttcagcaaagtctcaggatataaaatcaatgtacaaaaatcacaagcattcttatacaccaacaacagacaaacagagagccaaatcatgagtgaactcccagtcacaattgcttcaaagagaataaaatacctaggaatccaacttacaagggatgtgaaggacctcttcaaggagaactacaaaccactgctcaaggaaataaaagaggatacaaacaaatggaagaacattccatgctcatgggtaggaagaatcaatatcgtgaaaatggccatactgcccaaggtaatttacagattcaatgccatccccatcaagctaccaatgactttcttcacagaattggaaaaaactactttaaagttcatatggaaccaaaaaagagcccgcatcgccaagtcaatcctaagccaaaagaacaaaactggaggcatcacactacctgacttcaaactatactacaaggctacagtaaccaaaacagcatggtactggtaccaaaacagagatatagatcaatggaacagaacagagccctcagaaataacaccccatatctacaactatctgatctttgacaaacgtgagaaaaacaagcaatggggaaaggattccctatttaataaatggtgctgggaaaactggctagccatatgtagaaagctgaaactggatcccttccttacaccttatacaaaaatcaattcaagatggattaaagatttaaacgttagacctaaaaccataaaaaccctagaagaaaacctaggcattaccattcaggacataggcgtgggcaaggacttcatgtccaaaacaccaaaagcaatggcaacaaaagccaaaattgacaaatgggatctaattaaactgaagagcttctgcacagcaaaagaaactaccatcagagtgaacaggcaacctacaacgtgggagaaaattttcgcaacctactcatctgacaaagggctaatatccagaatctacaatgaactcaaacaaatttacaagaaaaaaacaaacaaccccatcaaaaagtgggcgaaggacatgaacagacagttttcaaaagaagacatttatgcagccaaaaaacacatgaaaaaatgctcatcatcactggccatcagagaaatgcaaatcaaaaccactatgagatatcatctcacaccagttagaatggcaatcattaaaaagtcaggaaacaacagggacatggatgaaattggaaaccatcattctcagtaa

SEQ ID NO: 2293 - DNA, 2241 bp, Homo sapiens
  SIMILAR (865)..(2085): 961254mologous to Homo sapiens unknown protein,accession number M22333,Smith-Waterman Score=2000.
atggaagatgaaatgaatgaaatgaagcaagaagagaagtttagagaaaaaagaataaaaagaaatgagcaaaccctccaagaaatatgggactatgtgaaaagaccaaatctacatctgattggtgtacctgaaagtgatggggagaatggaaccaagttggaaaacactctgcaggatattatccaggagaacttccccaatctagcaaggcaggccaacgttcagattcaggaaatacagagaatgccacaaagatactcctcgagaagagcaactccaagacacataattgtcagattcaccaaagttgaaatgaaggaaaaaatgttaagggcagccagagagaaagacagatcaatgagacaaaaagtcaacaaggatacccaggaattgaactcagctctgcaccaagcggacctaatagacatctacagaactctccaccccaaatcaacagaatatacatttttttcagcaccacaccacacctataccaaaattgaccacatacttggaagtaaagctctcctccgcaaatgtaaaagaacagagattataacaaactatctctcagaccacagtgcaatcaaactagaactcaggattaagaatctcactcaaaaccgctcaactacatggaaactgaacaacctgcttctgaatgactactgggtacataacaaaatgaaggcagaaataaagatgttctttgaaaccaacgagaacaaagacacaacataccagaatctctgggacgcattcaaagcaaaatacaaactaccatcaaggaatactacaaacacctctatgcaaataaactcgaaaatctggaagaaatggataaattcctggacacataacactctcccaagactaaaccaggaagaagttgaatctctgaatagaccaataacaggagctgaaattgtggcaataatcaatagtttaccaaccaaaaagagtccaggaccagatggattcacagccgaattctaccagaggtacaaggaggaactggtaccattccttctgaaactattccaatcaatagaaaaacagggaatcctccctaactcattttatgaggccagcaccattctgataccaaagccgggcagagacacaaccgaaaaagagaattttagaccaatatccttgatgaacattgatgcaaaaatcctcaataaaatactggcaaaacgaatccagcagcacatcaaaaagcttatccaccatgatcaagtgggcttcatccctgggatgcaaggctggttcaatatacacaaatcaataaatgtaatccagcatataaacagagccaaagacaaaaaccacatgattatctcaatagatgcagaaaaagcctttgacaaaattcaacaacgcttcatgctaaaaactctcaataaattaggtattgatgggacgtatttcaaaataataagagctatctatgacaaacccacagccaatatcatactgaatgggcaaaaactggaagcaatccctttgaaagctggcacaagacagggatgtcctctctcaccactcctattcaacatagtgttggaagttctggccagggtaattaggcaggagaaggaaataaagggtattcaattaggaaaagaggaagtcaaattgtccctgtttgcagatgacatgattgtatatctagaaaaccccattgtcacagcccaaaatctccttaagctgataagcaacttcagcaaagtctcaggatacaaaatcaatgtacaaaaatcacaagcattcttatacaccaacaacagacaaacagagagccaaatcatgagtgaactcccattcacaattgcttcaaagagaataaaatacctaggaatccaacttacaagggatgtgaaggacctcttcaaggagaactacaaaccactgctcaaggaaataaaagaggatacaaacaaatggaagaacattccatgctcatgggtaggaagaatcaatatcatgaaaatggccatactgcccaaggtaatttacagattcaatgccatccccatcaagctaccaatgactttcttcacagaattggaaaaaactaaagttcatatggaaccaaaaaagtgcccacatcaccaagggaatcctaagccaaaagaacaaagctggaggcatcacactacctgacttcaaactatactacaaggctacagtaaccaaaacagcatggtactggtaccaaaacagagatataga

SEQ ID NO: 2294 - DNA, 2568 bp, Homo sapiens
  SIMILAR (662)..(2341): 921254mologous to Homo sapiens putative p150,accession number U93563,Smith-Waterman Score=2683.
ctttgaaaccaatgagaacaaagacacaacataccagaatctctgggacacattcaaaacagtgtgtagagggaaatttatagcactaaatgcccacaagagaaagcaggaaagatccaacatcgacaccctaacatcacaattaaaagaactagaaaagcaagagcaaacacattcaaaagctagcagaaggcaagaagtaactaaaataagagcagaactgaaggaaatagagacaccaaaaacccttcaaaaaatcaatgaatccaggagctggttttttgaaaggatcaacaaaattgatagactgctagcaagacaaataaagaaaaaaagagagaagaatcaaagagacgcaataaaaaatgataaaggggatatcaccaccgatcccacagaaatacaaagtaccatcagagaatactacaaacacctctacgcaaataaactagaaaatctagaagaaatggataaattcctcgacacatacactctcccaagactaaaccaggaaaaagttgaatctctgaatagaccaataacaggctctgaaattatggcaataatcaatagcttaccaaccaaaaagagtccaggaccagatggattcacagccgaattctaccagaggtaaaaggaggaactggtaccataaaccacgattatctcaatagatgcagaaaaggcctttgacaaaattcaacagcccttcaagctaaaaactctcaataaattaggtattgatgggatgtatcgcaaaataataagagctatctatgacaaacccacagccaatatcatactgaatgggcaaaaactggaagcattccctttgaaaactggcacaagacagggatgccctctctcaccactcctattcaacatagtgttggaagtgctggccagcgcaattaggcaggagaaggaaataaagggtattcaattaggaaacgaggaagtcaaattgtccctgtttgcagatgacatgactgtatatctagaaaaccccattgtctcagcccaaaatgtccttaaggtgataagcaacttcagcaaagtctcaggatacaaaatcaatgtgcaaaaatcacaagcattcttatacaccaacaacagacaaacagagagccaaatcatgagtgaactcccattcacaattgcttcaaagagaataaaatacctaggaatccagcttacaaggaatgtgaaggacctcttccaggagaactacaaaccactgctcaaggaaataaaagaggatacaaacaaatggaagaacattccatgctcatgggtaggaagaatcaatatcgtgaaaatggccatactgcccaaggtaatttacagattcaatgccatccccatcaagctaccaatgactttcttcacagaattggaaaaaactactttaaagttcatatggaaccaaaaaagagcccgcattgccaagtcaatcctaagccaaaagaacaaagctggaggcatcacactacctgacttcaaactatgctacaaggctacagtaaccaaaacagcatggtactggtaccaaaacagagatatagatcaatggaacagaacagagccctcagaaataacgccacatatctacaactatctgatctttgacaaacctgacaaaaacaagaaatggggaaacgattccctatttaataaatggtgctgggaaaactggctagccatatgtagaaagctgaaactggatcccttccttacaccttatacaaaaatcaattcaagatggattaaagacttaaatgttagacctaaaaccataaaaaccctagaagaaaacctaggcattaccattcaggacataggcacgggcaaggacttcatgtctaaaacaccaaaagcaatggcaacaaaagccaaaattgacaaatgggatctaattaaactaaagagcttctgcacagcaaaagaaactaccatcagagtgaacaggcaacctaccaaatgggagaaaattttcacaacctactcatctgacaaagggctaatatccagaatctacaatgaactccaacaaatttacaagaaaaaaacaaacaaccccatcaaaaagtgggcgaaggacatgaaaagacacttctcaaaagaagacatttatgcagccaaaaaacacatgaaaaaatgctcaccatcactggccatcagagaaatgcaaatcaaaaccacaatgagataccatctcacaccagttagaatggtgatcattaaaaagtcaggaaatgaaaaggtgggagatgagaaagcttcggtccctggattgctacttagtcacccatggtatgaaactacagctgtgctgccattagataccaaaggtaaatgttaccagtggaatttaatggtcaggcgtaaggataatgcaaatctggccagtttactaaagagatacccacaagggacacagctctatggacacctgaaggatgcattaaagcagaacatgtcgacacccatcagaactcctttccatgttcataaggtgattacaatcaacaagcaaatttcctaagtaattgcttaacatggccacct

SEQ ID NO: 2295 - DNA, 2709 bp, Homo sapiens
  SIMILAR (712)..(2592): 981254mologous to Homo sapiens putative p150,accession number U93563,Smith-Waterman Score=3225.
atggggaaaaaacagaacagaaaaactggaaactctaaaaagcagagtgcctctcctcctccaaaggaatgcagttcctcaccagcaacggaacaaagctggacggagaatgactttgacgagctgagagaagaaggcttcagacgatcaaattactctgagctatgggaggacattcaaaccaaaggcaaagaagttgaaaactttgaaaaaaatttagaagaatgtataactagaataaccaatacagagaagtgcttaaaggagctgatggagctgaagaccaaggctcgagaactacgtgaagaatgtagaagcctcaggagccgatgcgatcaactggaagaaagggtatcagcaatggaagatgaaatgaatgaaatgaagcgagaagggaagtttagagaaaaaagaataaaaagaaatgagcaaagcctccaagaaatatgggactatgtgaaaagaccaaatctacgtctgattggtgtacctgaaagtgatgtggagaatggaaccaagttggaaaacactctgcaggatattatccaggagaacttccccaatctagcaaggcaggccaacgttcagattcaggaaatacagagaacgccacaaagatactcctcgagaagagcaactccaagacacataattgtcagattcaccaaagttgaaatgaaggaaaaaatgttaagggcagccagagagaaagaaatacaaactaccatcagagaatactacaaacacctctacgcaaataaactagaaaatctagaagaaatggatacattcctcgacacatacactctcccaagactaaaccaggaagaagttgaatctctgaatagaccaataacaggctctgaaattgtggcaataatcaatagtttaccaaccaaaaagagtccaggaccagatggattcacagccgaattctaccagaggtacaaggaggaactggtaccattccttctgaaactattccaatcaatagaaaaagagggaatcctccctaactcattttatgaggccagcatcattctgataccaaagccgggcagagacacaaccaaaaaagagaattttagaccaatatccttgatgaacattgatgcaaaaatcctcaataaaatactggcaaaccgaatccagcagcacatcaaaaagcttatccaccatgatcaagtgggcttcatccctgggatgcaaggctggttcaatatacgcaaatcaataaatgtaatccagcatataaacagagccaaagacaaaaaccacatgattatctcaatagatgcagaaaaagcctttgacaaaattcaacaacccttcatgctaaaaactctcaataaattaggtattgatgggacgtatttcaaaataataagagctatctatgacaaacccacagccaatatcatactgaatgggcaaaaactggaagcattccctttgaaaactggcacaagacagggatgccctctctcaccgctcctattcaacatagtattggaagttctggccagggcaatcaggcaggagaaggaaataaagggtattcaattaggaaaagaggaagtcaaattgtccctgtttgcagacgacatgattgtttatctagaaaaccccatcgtctcagcccaaaatctccttaagctgataagcaacttcagcaaagtctcaggatacaaaatcaatgtacaaaaatcacaagcattcttatacaccaacaacagacaaacagagagccaaatcatgggtgaactcccattcacaattgcttcaaagagaataaaatacctaggaatccaacttataagggatgtgaaggacctcttcaaggagaactacaaaccactgctcaaggaaataaaagaggacacaaacaaatggaagaacattccatgctcatgggtaggaagaatcaatatcgtgaaaatggccatactgcccaaggtaatttataggttcaatgccatccccatcaagctaccaatgactttcttcacagaattggaaaaaactactttaaagttcatatggaaccaaaaaagagcctgcatcgccaagtcaatcctaagccaaaagaacaaagctggaggcatcacactacctgacttcaaactatacgacaaggctacagtaaccaaaacagcacggtactggtaccaaaacagagatatagatcaatggaacagaacagagccctcagaaataacgccacatatctacaactatctgatctttgacaaacctgagaaaaacaagcaatggggaaaggattccctatttaataaatggtgctgggaaaactggctggccatatgtagaaagctgaaactggatcccttccttacaccttatacaaaaatcaattcaagatggattaaagacttaaatgttagacctaaaaccataaaaaccctagaagaaaacctaggcattaccattcaggacataggcatgggcaaggacttcatgtctaaaacaccaaaagcaatggcaacaaaagccaaaattgacaaatgggatctaattaaactaaagagcttctgcacagcaaaagaaactaccatcagagtgaacaggaagctactggaggatgtacttcagcaacatgagggagaaagagcaagacatggatttcaaaaagcaggaacttcaacacatgaggacaatgaagggaaatccagattgacagctatgtag

SEQ ID NO: 2296 - DNA, 2478 bp, Homo sapiens
  SIMILAR (1054)..(2475): 961254mologous to Homo sapiens putative p150,accession number U93564,Smith-Waterman Score=2419.
atgaaggcagaaataaagatgttctttgaaaccaacgagaacaaagacacagcataccagaatctctgggacgcattcaaagcagtgtgtagagggaaatgtatagcactaaatgcccacaagagaaagcaggaaagatccaaaattgacaccctaacatcacaattaaaagtactagaaaagcaagagcaaacacattcaaaagctagcagaaggcaagaaataactaaaatcagagcagaactgaaggaaatagagacacaaaaaacacttcaaaaaatcaatgaatccaggagctgtttttttgaaagcatcaacaaaattgatagaccactagcaagactaataaagaaaaaaagagagaagaatcaaatagacacaataaaaaatgataaaggggatatcaccaccgatcccacagacatacaaactaccatcagagaatactacaaacacctctacgcaaataaactagaaaatctagaagaaatggataaattcctcgacacatacactctcccaagactaaaccaggaagaagttgaatctctgaatagaccaataacaggagctgaaattgtggcaataatcaatagtttaccaaccaaaaagagtccaggaccagatggattcacagccgaattctaccagaggtacaaggaggaactggtaccattccttctgaaactattccaatcaatagaaaaagagggaatcctccctaactcattttatgaggccagcatcattctgataccaaagccgggtagagacacaaccaaaaaagagaattttagaccaatatccttgatgaacattgatgcaaaaatcctcaataaaatactggcaaaccgaatccagcagcacatcaaaaagcttatccaccatgatcaagtgggcttcatctctgggatgcaaggctggttcaatatacgcaaatcaataaatgtaatccagcatataaacagagccaaagacaaaaaccacatgattatctcaatagatgcagaaaaagcctttgacaaaattcaacaacccttcatgctaaaaactctcaataaattagtgttggaagttctggccagggcaatcaggcaggagaaggaaataaagggtattcaattaggaaaagaggaagtcaaattgtccctgtttgcagacgacatgattgtttatctagaaaagcccatcgtctcagcccaaaatctccttaagctgataagcaacttcagcatagtctcaggatacaaaatcaatgtacaaaaatcacaagcattcttatacaccaacaacagacaaacagagagccaaatcatgagtgaactcccattcacaattgcttcaaagagaataaaatacctaggaatccaacttacaagggatgtgaaggacctcttcaaggagaactacaaaccactgctcaaggaaataaaagaggacacaaacaaatggaagaacattccatgctcatgggtaggaagaatcaatgtcatgaaaatggccatactgcccaaggtaatttacagattcaatgccatccccatcaagctaccaatgactttcttcacagaattggaaaaaactactttaaagttcatatggaaccaaaaaagagcccgcatcgccaagtcaatcctaagccaaaagaacaaagctggaggcatcacactacctgacttcaaactatactacaagtctacagtaaccaaaacagcatggtactggtaccaaaacagagatatagatcaatggaacagaacagagccctcagaaataacgccacatacctacaactatctgatctttgacaaacctgagaaaaacaagcaatggggaaaggattccctatttaataaatggtgctgggaaaactggctagccatatgtagaaagctgaaactggatcccttccttacaccttatagaaaaatcaattcaagatggattaaagatttaaacgttagacctaaaaccataaaaaccctagaagaaaacctaggcattaccattcaggacataggcgtgggcaaggacttcatgtccaaaacaccaaaagcaatggcaaccaaagccaaaattgacaaatgggatctaattaaactaaagagcttctgcacagcaaaagaaactaccatcagagtgaacaggcaacctacaaaatgggagaacattttcgcaacctactcatctgacaaagggctaatatccagaatctacaatgaactcaaacaaatttacaagaaaaaaacaaacaaccccatcaaaaagtgggtgaaggacatgaacagacacttctcaaaagaagacatttatgcagccaaaaaatacatgaaaaaatgctcatcatcactggccatcagagaaatgcaaatcaaaaccactatgagatatcatctcacaccagttagaatggcaatcattaaaaagtcaggaaacaacaggtgctggagaggatgtggagaaataggaacactttga

SEQ ID NO: 2297 - DNA, 2748 bp, Homo sapiens
  SIMILAR (1)..(1464): 961254mologous to Homo sapiens putative p150,accession number U93563,Smith-Waterman Score=2438.
atgggagactttaacaccccactgtcaacattagacagatcaacgagacagaaagtcaacaaggatacccaggaattgaactcagctctgcaccaagcggacctaatagacatctacagaactctccaccccaaatcaacagaatatacatttttttcagcaccacaccacacctattccaaaattgaccacatagttggaagtaaagctctcctcagcaaatgtaaaagaacagaaattataacaaactatctctcagaccacagtgcaatcaaactagaactcaggattaagaatctcactcaaagccactcaactacatggaaactgaacaacctgctcctgaatgactactgggtacataacgaaatgaagtcagaaataaagatgttctttgaaaccaacgagaacaaagacacaacataccagaatctctgggatgcattcaaagcagtgtgtagagggaaatttatagcactaaatgcccacaagagaaagcaggaaagatccaaaattgacaccctaacatcacaattaaaagaactagaaaagcaagagcaaacacattcaaaagctagcagaaggcaagaaataactaaaatcagagcagaactgaaggaaatagagacacaaaaaacccttcaaaaaatcaatgaatccaggagctggttttttgaaaggatcaacaaaattgatagaccactagcaagactaataaagaaaaaaagagagaagaatcaaatagacacaataaaaaatgataaaggggatatcaccaccgatcccacagaaatacaaactaccatcagagaatactacaaacacctctacgcaaataaactagaaaatctagaagaaatggataaattcctcgacacatacactctcccaagactaaaccaggaagaagttgaatctcttaatagaccaataacaggagctgaaattgtggcaataatcaatagcttaccaaccaaaaagagtccaggaccagatggattcacagccgaattctaccagaggtacaaggaggaactggtaccattccttctgaaactattccaatcaatagaaaaagagggaatcctccctaactcattttatgaggccagcatcattctgataccaaagccgggcagagacacaacaaaaaaagagaattttagaccaatatccttgatgaacactgatgcaaaaatcctcaataaaatactggcaaaccgaatccagcagcacatcaaaaagcttatccaccatgatcaagtgggcttcatccctgggatgcaaggctggttcaatatacgcaaatcaataaatgtaatccagcacataaacagaaccaaagacaaaaaccacatgattatctcaatagatgcagaaaaagcctttgacaaaattcaacaacccttcatgctaaaaactctcaataaattagaattggaaaaaactactttaaacttcatatggaaccaaaaaagagcccgcattgccaagtcaatcctaagccaaaagaacaaagctggaggcatcacactacctgacttcaaactttactacaaggctacagtaaccaaaacagcatggtattggtaccaaaacagagatatagatcaatggaacagaacagagccctcagaaataacaccgcatacctacaactgtctgatctttgacaaacctgagaaaaacaagaaatggggaaaggattccctatttaataaatggtgctgggaaaactggctagccatatgtagaaagctgaaactggatcccttccttacaccttatacaaaaatcaattcaagatggattaaagatttaaacgttagacctaaaaccataaaaaccctagaagaaaacctaggcattaccattcaggacataggcatgggcaaggacttcatgtccaaaacaccaaaagcaatggcaacaaaagacaaaattgacaaatgggatctaattaaactaaagagcttctgcacagcaaaagaaactaccatcagagtgaacaggcaacctacaacatgggagaaaattttcgcaacctactcatctgacaaagggctaatatccagaatctacaatgaactcaaccaaatttacaagaaaaaaacaaacaaccccatcaaaaagtgggcgaaggacatgaacagacacttctcaaaagaagacatttatgcagccaaaaaacacatgaaaaaatgctcatcatcactggccatcagagaaatgcaaatcaaaaccacaatgagataccatctcacaccagttagaatggcaatcattaaaaagtcaggaaacaacaggtgctggagaggatgtggagaaatacgaacacttttacattgttggtgggactgtaaactagttcaaccattgtggaagtcagtgtggcgattcctcagggatctagaactagaaataccatttgacccagccatcccattactgggtatatacccaaatgactataaatcatgctgctataaagacacatgcacacgtatgtttattgcggcattattcacaatagcaaagacttggaaccaacccaaatgtccaacaatgatagactggattaagaaaatgtggcacatatacaccatggaatactatgcagccataaaaaatgatgagttcatgtcctttgtagggacatggatgaaattggaaatcatcattctcagtaaactatcacaagaacaaaaaaccaaacaccgcatattctcactcataggtgggaattga

SEQ ID NO: 2298 - DNA, 5984 bp, Homo sapiens
  SIMILAR (1957)..(4521): 961254mologous to Homo sapiens putative p150,accession number U93567,Smith-Waterman Score=4231.
cctccggtctacagctcccagcgtgagcgacgcagaagacgggtgatttctgcatttccatctgaggtaccgggttcatctcactagggagtgccagacagtgggcgcaggccagtgggtgcgcgcaccgtgcggagccgaagcagggcgaggcattgcctcacctgggaagcgcaaggggtcagggagttccctttccgagtcaaagaaaggggtgacggacgcacctggaaaatcgggtcactcccacccgaatattgcgcttttcagaccggcttaaaaaacggcgcaccacgagactatatcccacacctggccttcggagggtcctacgcccacggaatctcgctgattgctagcacagcggtctgagatcaaactgcaaggccgcagcaaggctgggggaggggcgcccgccattgcccaggcttgcttaggtaaacaaagcagccggggaagctcgaactgggtgcagcccaccacagctcaaggaggcctgcctgcctctgtaggctccacctctgggggcagggcacagacaaacaaaaagacagcagtaacctctgcagacttaaatgtccctgtctgacagctttgaagagagcagtggttctcccagcacgcagctggagatctgagaacgggcagactgcctcctcaagtgggtccctgacccctgacccccgagcagcctaactgggaggcaccccccagcaggggcacactgacacctcacacggcagggtattccaacagacctgcagctgagggtcctgtctgttagaaggaaaactaacaaacagaaaggacatccacaccgaaaacgcatctgtacatcaccatcatcaaagaccaaaagtagataaaaccacaaagatggggaaaaaacagaacagaaaaactggaaactctaaaacgcagagcacctctcctcctccaaaggaacgcagttcctcaccagcaacggaccaaagctggatggagaatgattttgacgagctgagagaagaaggcttcagacgctcaaattactctgagctacgggaggacattcaaaccaaaggcaaagaagttgaaaactttgaaaaaaatttagaagaatgtataactagaataaccaatacagagaagtgcttaaaggagctgatggagctgaaaaccaaggctcgagaactacgtgaagaatgcagaagcctcaggagccaatgcgatcaactggaagaaagggtatcagcaatggaagatgaaatgaatgaaatgaagcaagaagggaagtttagagaaaaaagaataaaaagaaacgagcaaagcctccaagaaatatgggactatgtgaaaagaccaaatctacgtctgattggtgtacctgaaagtgatgcggagaatggaaccaagttggaaaacactctgcaggatattatccaggagactttccccaatctagcaaggcaggccaacgttcagattcaggaaatacagagaacgccacaaagatactcctcgagaagagcaactccaagacacataattgtcagattcaccaaagttgaaatgaaggaaaaaatgttaagggcagccagagagaaaggtcgagttaccctcaaagggaagcccatcagactaacagcggatctctcggcagaaaccctacaagccagaagagagtgggggccaatattgaacattcttaaagaaaagaattttcaacccagaatttcatatccagccaaactaagcttcataagtgaaggagaaataaaatactttacagacaagcaaatgctgaccgattttgtcaccagcaggcctgccctaaaagagctcctgaaggaagcgctaaacatggaaaggaacaaccggtaccagccactgcaaaatcatgccaaaatgtaaagaccatcgagactaggaagaaactgcatcaactaacgagcaaaatcaccagctaacatcataatgacaggatcaaattcacacataacaatattaactttaaatgtaaatggactaaattctccaattaaaagacacagactggcaagttggataaagagtcaagacccatcagtgtgctgtattcaggaaacccatctcatgtgcagagacacacataggctcaaaataaaaggatggaggaagatctaccaagcaaatggaaaacaaaaaaaggcaggggttgcaatcctagtctctgataaaacagactttaaaccaacaaagatcaaaagagacaaagaaggccattacatgatggtaaagggatcaattcaacaagaggagctaactatcctaaatatgtatgcacccaatacaggagcacccagattcataaagcaagtcctgagtgacctacaaagagacttagactcccacacattaataatgggagactttaacaccccactgtcaacattagacagatcaacgagacagaaagtcaacaaggatacccaggaattgaactcagctctgcaccaagcagacctaatagacatctacagaactctccaccccaaatcaacagaatatacatttttttcagcaccacaccacagctattccaaaattgaccacatacttggaagtgaagctctcctcagcaaatgtaaaagaacagaaattataacaaactatctctcagaccacagtgcaatcaaactagaactcaggattaagaatctcactcaaagccgctcaactacatggaaactgaacaacctgctcctgaatgactactgggtacataacgaaatgaaggcagaaataaagatgttctttgaaaccaacgagaacaaagacacaacataccagaatctctaggacgcattcaaagcagtgtgtagagggaaatttatagcactaaatgcccacaagagaaagcaggaaagatccaaaattgacaccctaacatcacaattaaaagaactagaaaagcaagagcaaacacattcaaaagctagcagaaggcaagaaataactaaaatcagagcagaactgaaggaaatagagacacaaaaaacccttcaaaaaatcaatgaatccaggagctggttttttgaaaggatcaacaaaattgatagaccgctagcaagactaataaagaaaaaaagagagaagaatcaaatagacacaataaaaaatgataaaggggatatcaccaccgatcccacagaaatacaaactaccatcagagaatactacaaacacctctacgcaaataaactagaaaatctagaagaaatggatacattccttgacacatacactctcccaagactaaaccaggaagaagttgaatctctgaatagaccaataacaggagctgaaattgtggcaataatcaatagtttatcaaccaaaaagagtccaggaccagatggattcacagccgaattctaccagaggtacaaggaggaactggtaccattctttctgaaactattccaatcaatagaaaaagagggaatcctccctaactcattttatgaggccagcatcattctgataccaaagccgggcagagacacaaccaaaaaagagaattttagaccaatatccttgatgaacattgatgcaaaaatcctcaataaaatactggcaaaccaaatccagcagcacatcaaaaagcttatccaccatgatcaagtgggcttcatccctgggatgcaaggctggttcaatatacgcaaatcaataaatgtaatccagcatataaacagagccaaagacaaaaaccacatgattgtctcaatagatgcagaaaaagcctttgacaaaattcaacaacccttcatgctaaaaactatcaataaaataggtattgatgggatgtatttcaaaataataagagctatctatgacaaaaccacagccaatatcatactgaatgggcaaaaactggaagcattccctttgaaaaccggcacaagacagggatgccctctctcaccgctcctattcaacatagtgttggaatttctggccagggcaatcaggcaggagaaggaaataaagggtattcaattaggaaaagaggaagtcaaattgtccctgtttgcagatgacatgattgttgatctagaaaaccccatcgtctcagcccaaaatctccttaagctgataagcaacttcagcaaagtctcaggatacaaaatcaatgtacaaaaatcacaagcattcttatacaccaataacagacaaacagagagccaaatcatgagtgaactcccattcacaattgcttcaaagcgaataaaatacctaggaatccaacttacaagggatgtgaaggacctcttcaaggagaactacaaaccactgctcaatgaaataaaagaggatacaaacaaatggaagaacattccatgctcatgggtaggaagaatcaatatcatgaaaatggccatactgcccaaggtaatttatagattcaatgccatccccatcaagctaccaatgactttcttcacagaattggaaaaaactactttaaagttttcatatgggaaccaaaaaaagagcccgcatcgccaagtcaatcctaagccaaaagaacaaagctggaggcatcacactacctgacttcaaactatactacaaggctacagtaaccaaaacagcatggtactggtaccaaaacaaagatatagatgaatggaacagaacagagccctcagaaataacgccgcatatctacaactatctgatctttgacaaacctgagaaaaaacaagcaatggggaaaggattccctatttaataaatggtgctgggaaaactggctagccatatgtagaaagctgaaactggatcccttccttacaccttatacaaaaattaattcaagatggattaaagacttaaacgttagacctaaaaccataaaaaccctagaagaaaacctaggcaataccattcaggacataggcatgggcaaggacttcatgtctaaaacaccaaaagcaatggcaacaaaagccaaaattgacaaatgggatctaattaaactaaagagcttctgcacagcaaaagaaactaccatcagagtgaacaggcaacctacacaatgggagaaaattttcgcaacctactcatctgacaaagagctaatatccagaatctacaatgaactccaacaaatttacaagaaaaaaaacaaacaaccccatcaaaaagtgggcgaaggacatgaacagacacttctcaaaagaagacatttatgcagccgaaaaaacacatgaaaaaatgctcaccatcactggccatcaagagaaatgcaaatcaaaaccactatgagatatcatctcacaccagttagaatggcaatcattaaaaagtcaggaaacaacaggtgctggagaggatgtggagaaataggaacacttttacactgttggtgggactgtaaactagttcaaccattgtggaagtcagtgtggcgattccttagggatctagaactagaaataccatttgacccagccatcccattactgggtatatacccaaatgactataaatcatgctgctataaagacacatgcacacgtatgtttattgcggcattattcacaatagcaaagacttggaaccaacccaaatgtccaacaatgatagactggattaagaaaatgtggcacatatacaccatggaatactatgcagccataaaaaatgatgagttcatgtcctttgtagggacatggatgaaattggaaaccatcattctcagtaaactatcgcaagaacaaaaaaccaaacaccgcatattctcactcataggtgggaattgaacaatgagatcacatggacacaggaaggggaatatcacactctggggactatggtggggaggggggaggggggagggatagcattgggagatatacctaatgctagatgacgagttagtggtgcagtgcaccagcatggcacatgtatacatatgtaactaacctgcacaatgtgcacatgtaccctaaaac

SEQ ID NO: 2299 - DNA, 2927 bp, Homo sapiens
  SIMILAR (745)..(1347): 871254mologous to Homo sapiens dJ858B6.2 (novel protein),accession number AL118511,Smith-Waterman Score=868.
  misc_feature (1)...(2927): n = a,t,c or g
atggcgtccatggcggcggcgatcgcggcttcgcgctcggcggtcatgagcaggaaccggcctctgcacgaccgggagcgaaagcgcttcacttacttctcgtcgctgagccccatggccaggaagatcatgcaggacaaggagaagatccgcgagaagtacgggcccgagtgggcgcggctgccgcccgcgcagcaggacgagatcatcgaccggtgcctggtggggccgcgcgccccggcgccccgagaccccggggactcggaggagctcacgcgcttccccggcttgcgcgggcccacgggccagaaggtggtgcgcttcggggacgagccacccaaccccattttgtggagaatctggagctgctgctggaagaacgcttctcaaccagcaaaaggagaggagccggtggagccccatgtcctggattcttgtcctggccatgccagcagcaaggtgccacccctcttaaggggtagtttgcctctctgtgaagtctggtggcagaaccaatggctcacagagtttctttccaactcgctggtctggcttggagcaggcccagacactggggccgtgcactttgggtccagtattttggacttaaaggcttataagatcttcattggagagccacaaacaggaggtggctttagtgaagcgcccctgaagcagcccaggaaccactgtgactggcgtttccccccagcatccctggctctgcccactgctgccctccacagtcagatggagttcagtatctccgccctatccatccaggagccgagcaacggcaccgccgccagcgagcccagaccactgtccaaagcttcccagggctcccaggccctcaagtcctcccaaggcagcaggtcctccagcctggacgccctgggccccaccaggaaggaggaggaagcgtcattctggaagatcaatgctgagcggtcccgaggggaggggcctgaggcgaaggttccagtcgctgacccctagccagatcaagtccatggagaaggggggaaaagggtcttgcctccctgctaccgggcaggaacctgccccgaaggaccaggggaggccaaggtggaaaggcccagcaccctccgtcaggagcagcgtcctcttcccaacgtgagcaccgaacgtgagagaccccagcctgtccaggccttcagcagtgtactgcacgaggctgccccctcccagctcgaggggaagctgccatctcctgatgtcaggcaggacgatggggaagacaccctgttctcggaacccaagtttgcacaggtcagctcaagtaatgtcgtcttgaagacgggatttgattttctggacaattggtaaaatgtattagaaaaatacaatgaagaaccctaaaatgttttccaaagtggtgtggtggaggaggataaaaagggccaccttttcctatgtattttactggtttcttgacactcttttcttaatcatttggaaactggtcaatactgccagatttttttcttttttggtagaaccagatatatatgctattttcagtgatttgataacagaagttttccatttggaatttttaaggtctgttaaataattcaggagatcttgtaaataaaacttctgttcccaagctccacccaactttccccctcctcaaagggatgtgtttcaaccatgtcacaaaaatccatataagggatttccatctccttcttccattattccccttcccccctccgctttttaccgtaatgggttccttttggtgggtgattgagggtgatgttatcagccatgacatcagcatgctgggctgtgaccccggaaagactggcccccagcgacgttctcagccagcgctcgcagctgtccggggcttctctgggcagaagccatgtctctcacatcaatgtgcccagcctccaccctcaacgccatttccaggggaacagactgcgggtatgtaggcagtgtagtcttttaacctgctctggattacatatttcagagtatgggattgttgtttaaaaagagttgtatgtttaaaagaagttttgtactaagcttttcaattattttgtatctagattatcaacaatgggggctaccactttccttggttttatatccatttcctcttgggaagttcttgttgcttatgtgacctgttggttggttncccggactgggcacctgcaggagtcagggcagacgggcagatgttggctggaggtcagggctcttctgcttagttgtgttagagtcttccagcatgggactgatgggagcagtgggcattctttatcccaagggctagccaggttgcgtcatgacggaccttccccagccctgaccaccaccagaagtggaagagtggagtttgcggtcaactcagcagtgcccatggagacctgcgtggtgtcagagcagcagcatctcttggagctggtgcagacaccaaggctgcccagtggtacaacgtggtccacctcccctagggaagctgctgcactcagaggctgtcctgcccagtggcccctgagccgtgtgagcctgcaggaggcgtctgagcagagcctcaagcccggtatggcgccatctccatgttgccatcactgcgttctcacctgaagccttaatctttgcgacacctgccagtgagcgctcggtttcaataccaaagtgtgtcttcttcttttttttttttttttaaatgcctgtttcataggaccttctgaaatggatttccagaatattttatctgggctccaaaataaaggcacatagcaaatntacctcaancccctcatcaanctccagggaaagtttcttgccaaagctggtgggnattgccaaactttttgatttnggtccttgcccaattggttttatggnccccaaaaccncaatttggatcccttggg

SEQ ID NO: 2300 - DNA, 597 bp, Homo sapiens
  SIMILAR (490)..(437): 771254mologous to Homo sapiens Alzheimer's disease protein encoded by DNA from plasmid pGCS3282,accession number W21579,Smith- Waterman Score=72.
atgactaatacagtgcataagacacttggtacagaaccttacaaatactcaacacatgaatatcctgttttacccactactgtaattaccagtattatggttatactttctgttatccatttcaaggatgtcatagattatggtttatcaaatgctcccatgaacaagatctcatttggtcccaacaaaccctgtgagatagacagggcttctttgctcacgctgctttaccgagctccttcaaggaggccctgcaaagccaaagtcaagtgtgtgctgatcggcagagatgaggaaactgaggccaaaggattctgttacttgcctggcttcacagctcacctggagattctgaactggcatcttcctctctctgccatcaccccagaccctaccctctttcctctacaccagtggttctcaatcaagggcgattttgccttccaggggacatttgacaatgtctggaggcgtttttggttgtcacaattctgtgttgctgtcattcatggattgaggattttcgaaaaattgggatctaaacaacaaaatggatttggctgccacaattctttgaaattgttttgttgtggatga

SEQ ID NO: 2301 - DNA, 412 bp, Homo sapiens
  SIMILAR (237)..(10): 311254mologous to human herpesvirus 1 virion protein,accession number D10879,Smith-Waterman Score=79.
  misc_feature (1)...(412): n = a,t,c or g
tgttcaacttgcatcacagctgtgggaggctgcaagctggcccatcctgggtttcatgctccagggatgcatggcacgttggcctccctggatctggaggtagaggctggtctcaggagattgaagtaatacctcgactggcagaatctcagggcaacatcattgaggtacagccagttgcatttcactaggctcaagaggattgctgcctcaagcaggataaccaggcctgcctggagcagtgccgtagtccaggatcccagtgacctgagggcttgatgtgggggtccttatctcnnnnnnnnnnnnnnnnnnnnnnnnnnnnnnnnnnnnnnnnnnnnnnnnnnnnnnnnnnnnnnnnnnnnnnnnnnnnnnnnnnnnnnnnnnnnnnnnnnnnnnnnnnnnnnnnnnn

SEQ ID NO: 2302 - DNA, 1004 bp, Homo sapiens
  SIMILAR (389)..(490): 521254mologous to Homo sapiens Human secreted protein, SEQ ID NO: 7871,accession number G03790,Smith-Waterman Score=92.
gaaaaaaaaaaaagccagtaacttataaaaatagccataaacgacgtagtttttgttgttgttgttgttttgagacggcgtctccctctgtcccccaggcgggagtacagtggcaggcactcagctcgctgtaacctccgcctcctgggttcaagtgattctcttgccccagcctccagagtagccaccacgcccggtccaacttagttttttaatactttttaaaattttaagacagggtctctgccaccgaggctgaaatgcagtggcgcaatcatggctcactgcaaccttgacttcctggggtcctgggcaggtgaccccgtctcagcctgccgagtagctgtgagtaaaggcctgtgcctctccactgtgctaattttctactgtttgttgctttgtttttaatagagatgtagactggttttgttgcccaggctggtctccagcttctagcctcaggcagtcttcccatctgctcctaccaaagtgctcggattataggcatgaatcaccttgcatgggagataaggacccccacatcaagccctcaggttatttttgaaacacaaatacataaggcccacaagcaggcccattggctgcagacagtggggtcacctgaagaacttttctttgatctgagtaccaacttctcacctaggtcactgggatcctggactacggcactgctccaggcaggcctggttatcctgcttgaggcagcaatcctcttgagcctagtgaaatgcaactggctgtacctcaatgatgttgccctgagattctgccagtcgaggtattacttcaatctcctgagaccagcctctacctccagatccagggaggccaacgtgccatgcatccctggagcatgaaacccaggatgggccgccttccagcctcccacagctgtgatgcaagttgaacacatacagagagactgcatctgcactgggtggttttcctgagccttggggagcagaatgcatgaatcccaggta

SEQ ID NO: 2303 - DNA, 440 bp, Homo sapiens
  SIMILAR (200)..(325): 311254mologous to Homo sapiens Human secreted protein, SEQ ID NO: 6442,accession number G02361,Smith-Waterman Score=60.
atggcagaaatgtatgataatattagaacactaaaggctccaacaagttctggaagaggcaaacattttgatatgagtggagaggaaggtgcttatggcacaaggatggaagataaacccagagaagcaggcaatgccaaatcttgaaggcgattgtataccttgctcaggaatctgaccataaccatgaatctttgggaagcagctgaatgatttaaatcagcagaaagataaaatcagatccaaacttagtaaagaccacattggatacaatgtgaaaaggagcaaggaggacctccaggcagaaggcccagagaccagttggataggttggttccaaacctgagtgattgtgtaagtggttatgataataactgatatgggagtagaggaagaggagcaggctgaattagataaaataaggacatttcaacttaatt

SEQ ID NO: 2304 - DNA, 666 bp, Homo sapiens
  SIMILAR (1)..(660): 951254mologous to Homo sapiens selenoprotein N,accession number AF166125,Smith-Waterman Score=1100.
cagggagctgtggcctgcctgactgccatcagcgacttctactacactgtgatgttccggatccatgccgagttccagctcagtgagccgcccgacttccccttttggttctcccctgctcagttcaccggccacatcatcctctccaaagacgccacccacgtccgcgacttccggctcttcgtgcccaaccacaggtctctgaatgtggacatggagtggctttacggggccagtgaaagcagcaacatggaggtggacatcggctacataccccagatggagctggaggccacgggcccctctgtgccctccgtgatcctggatgaggatggcagcatgatcgacagccacctgccctcaggggagcccctgcagtttgtgtttgaggagatcaagtggcagcaggagctgagctgggaggaggctgcccggcgcctggaggtggccatgtaccccttcaagaaggtctcctacttgccgttcactgaggccttcgaccgagccaaggctgagaacaagctggtgcactcaatcctgctgtggggggccctggatgaccagtcctgctgaggttcagggcggactctccgggagactgtcctggaaagttcgccatcctcaccctgctcaacgagagctttcatcagcacctggtcccctggt

SEQ ID NO: 2305 - DNA, 446 bp, Homo sapiens
  SIMILAR (186)..(209): 871254mologous to Homo sapiens 1,2-alpha-mannosidase IC,accession number AF261655,Smith-Waterman Score=37.
cgtgcacttcccagccctccttgtggaaaccaacacagctcacctgggggcaaggcctggcactggcagatacagcagtggctgccccacctcacctgctgcccccggtcaactcccgcggccagctacgaggaggaggagttgccccctgaccctagcgaggagacgctcaccatagaagcccgattccagcctctgctcccggagaccatgaccaagagcaaagatggcttcctaggggcgatagagacctacttgctgaatgtctctcccggggggctgacctacattgccgagtggcgaggggggattctggaccacaagatggggcacctggcctgtttctccgggggcatgatcgcccttggcgccgaggatgccaaggaagaaaagagggcccactaccgagagctcgcagcccagatcaccaaggggattcttctaga

SEQ ID NO: 2306 - DNA, 2155 bp, Homo sapiens
  SIMILAR (257)..(571): 611254mologous to Homo sapiens selenoprotein N,accession number AF166125,Smith-Waterman Score=300.
atgggccgggcccggccgggccaacgcgggccgcccagccccggccccgccgcgcagcctcccgcgccaccgcgccgccgcgcccgttccctggcgctgctcggagccctgctggccgccgccgctgccgccgccgtccgggtctgcgcccgccacgccgaggcccaggcggccgcgcggcaggaactggcgctgaagacccttgggaacagatggcctttttctcttttcctccttggacactgacggggatatgtacatcagccctgaggagttcaaacccattgctgagaagctaacagggtcaactcccgcggccagctacgaggaggaggagttgcccccctgacccttagcgaggagacgctcaccatagaagcccgattcaaagctttctgctcccggagaccatgaccaagagcaaagatggcattccataggggtctcccgcctcgccctgtccggcctccgaaactggacagccgccgccctcaccaagtgcagtgtttggccacccgccactttccagcccttccttcccccgccaggccaggagctgggtgagccctgggtggatcatccccagtgagctgagcatgttcactggctagactgtccaacaaccgcttctatccaccgccgcccaagggcaaggaggtcatcatccaccggctcctgagcatgttccaccctcggccctttgtgaagacccgctttgcccctcaaggagctgtggcctgcctgactgccatcagcgacttctactacactgtgatgttccggatccatgccgagttccagctcagtgagccgcccgacttccccttttggttctcccctgctcagttcaccggccacatcatcctctccaaagacgccacccacgtccgcgacttccggctcttcgtgcccaaccacaggtctctgaatgtggacatggagtggctttacggcgccagtgaaagcaccaacatggaggtggacatcggctacataccccaggtgagcgcacaggaggctcccatccagatggagctggaggccacgggcccctctgtgccctccgtgatcctggatgaggatggcagcatgatcgacagccacctgccttcaggggagcccctgcagtttgtgtttgaggagatcaagtggcagcaggagctgagctgggaggaggctgcccggcgcctggaggtggccatgtaccccttcaagaagggctcctacttgccgttcactgaggccttcgaccgagccaaggctgagaacaagctggtgcactcaatcctgctgtggggggccctggatgaccagtcctgctgaggttcagggcggactctccgggagactgtcctggaaagttcgcccatcctcaccctgctcaacgagagcttcatcagcacctggtccctggtgaaggagctggaggaactgcaaaacaaacaggagaactcgtcccaccagaagctggctggcctgcacctggagaagtacagcttccccgtggagatgatgatctgcctgcccaatggcaccgtggtccatcacatcaatgccaactacttcttggatcatcacctccgtgaagcccgaggaaatcgagagcaattctcttcagcttctcatccacctctgaagacccgtccacggccacctacatgcagttcctgtatggagggactccgtccgtgggcttgccccatcctccagccctagagtgcctggacgggatcttattaaacagaccccacgcctcagagccagagtggtcctcagcccatttaagactgcagatgccgcccactcccacccggggctcactcagcctggcagaggaagaatgaaggcagacatctctgcagccactcctgggccttttatgtgccgagttaccccacttgccttgggcgtgtccactgagccttccccagccagacttgttctcaattttgttttttttttttttttttgagacggattttgctctgtcacccagggctggagtgctatggctcgatcttgggctcactgcaacctccacctcccagggttcaagcaattctcttgcctcagcctcccgagtagctggggattacaggtgcatgccaccatgggctgggctaatttttgtatttttagtaggagatggggtttc

SEQ ID NO: 2307 - DNA, 1100 bp, Homo sapiens
  SIMILAR (179)..(364): 931254mologous to Homo sapiens jdp2,accession number AC009363,Smith-Waterman Score=292.
ctatgtttttgaaaacgcttatgaaaagtcagaattcaaaatcacatctgggctgctgtttgtcacagtggaaatgccgcgccacctgcagacggggcctgagaaacacggaaatgggcagagcctctccccagagccagtccccgtgaaactcacagcgtgcttctgtgttggtatacaggaatccgagcggctggaactcatgaacgcagagctgaagacccagattgaggagctgaagcaggagcggcagcagctcatcctgatgctgaaccgacaccgccccacctgcatcgtccggaccgacagtgtcaagacccccgagtcagaaggcaacccactgctcgagcagcttcgagaagaagtgaccatgggctgggagacgtctgaggaggaggaagaggagaaggaaaagtgacgaagagagaggaggaggggggccccagatggcccttcctttggtgcatgaaaaactgtacaatgagggttcagcacagccagcaatcagccgagcttttttgtgaaactcagatcagccacccaggaggaagagcgggctgaggaaacccagagggaccaagcgctgagaccaaagttgaccctcgggtagggttgtcctgcctggggccccacttgaaggaggcaggacagaggcaccgaggccagggagacgcccaacgaggcagccctgggcttcttctctggcctcttcaccagggcacccatccaaggaacctccgaacagccaggaaaagccatgagttgcaaccaaaacgcggcttgaggatggaactcagaatgaaactgcaacccacctgcccccagccctgcccctcgccctgatgcgaagctggagaggggcgtgctgcggggccctgatgcccccacccaccttcggtccagcgcggccctgcccaggaggcggcagccgggcgcaccctcgccagccctgctggagtttgctgtgggcactgaggcgcgggcgcccttccaaagcacatactcaccgaatgtttacagactggctgtcctggcagggctttcaactgcacatgttttttatactttcctttttttttttttttttaatattttttaca

SEQ ID NO: 2308 - DNA, 2778 bp, Homo sapiens
  SIMILAR (1093)..(2775): 941254mologous to Homo sapiens putative p150,accession number U93574,Smith-Waterman Score=2858.
atgggagactttaacaccccactgtcaacagtagacagatcgatgagacagaaagttgacaaggatacccaggaattgaactcagctctgcaccaagcagacctcatagacatctacagaactctccaccccaaatcaacagaatatacatttttttcagcaccacaccacacctattccaaaattgacaacataattggaagtaaagctctcctcagcaaatgtaaaggaacagaaattataacaaactctctctcagaccacagtgcaatcaaactagaactcaggattaagaaactcactcaaaaccactcaactacagagaaactgaacaacctgctcctgaatgactactgggtacataacgaaatgaaggcagaaataaagatgttctctgaaaccaatgagaacaaagacacaacataccagaatctctgggacacattcaaagcagtgtgtagagggaaatttatagcactaaatgcccacaagagaaagcaggaaagatccaaaattgacaccctaacatcacaattaaaagaactagaaaaactaaaccaggaagaagttgaatctctgaatagaccaataacaggagctgaaattgtggcaataatcaatagcttaccaaccaaaaagagtccaggaccagatggattcacagccaaattctactggaggtacaaggaggaactggtaccattccttctgaaactattccaatcaatagaaaaagagggaatcctccctaactcatgttatgaggccagcatcatcctgataccaaagcctggcagagacacaacaaaaaaagagaattttagaccaatatccttgatgaacattgatgcaaaaatcctcaataaaatactggcaaaccgaatccagcagcacatcaaaaagcttatccaccatgatcaagtgggcttcatccctgggatgcaaggctggttcaatatatgcaaatcaataaatgtaatccagcatataaacagaaccaaagacaaaaaccacatgattatctcaatagatgcagaaaaggcctttgacaaaattcaacaacccttcatgctaaaaactctcaataaattagcccaaaatctccttaagctgataagcaacttcagcaaagtctcaggatacaaaatcaatgtacaaaaatcacaagcattcttatacaccaataacagacaaacagagagccaaatcatgagtgaactcccattcacaactgctttaaagagaataaaatacctaggaatccaacttacaagggatgtgaaggacctcttcaaggagaactacaaaccactgctcaaggaaataaaagaggatacaaacaaatggaagaacattccatgctcatgggtaggaagaatcaatatcttgaaaatggccacactgcccaaggtaatttatagattcaatgccatccccatcaagctactaatgactttcttcacagaattggaaaaaactactttaaagttcatatggaaccaaaaaagagcccgcatagccaagtcaatcctaaaccaaaagaacaaagctggaggcatcacactacctgacttcaaactatactacaaggctacagtaaccaaaacagcatggtactggcaccaaaacagagatagagaccaatggaacagaacagagccctcagaaacaatgctgcatatctacaactatctgatctttgacaaacctgacaaaaacaagcaatggggaacggattccctatttaataaatggtgctgggaaaactggctagccatatggagaaagctgaaactggatcccttccttacaccttatacaaaaattaattcaagatggattaaagacttacacattagagctaaaaccataaaaaccctagaagaaaacctaggcaataccattcagtacataggcatgggcaaggacttcatgtctgaaacaccaaaagcaatggcaacaaaagccaaaattgacgaatgggatctaattaaactaaagagcttctgcacagcgaaagaaactaccatcagagtgaacaggcaacccacaaaatgggagaaaattttcgcaacctactcatctgacaaagggctaatatccagaatctacaatgaactcaaacaaatttacaagaaaaaaacaaacaaccccatcaaaaaatgggcaaaggacatgaacagacacttctcaaaagaagacatttatgcagccaaaaaacacatgaaaaaatgctcatcatcactggccatcagagaaatgcaaatcaaaaccacaatgagataccatctcacaccagtcagaatggcgatcattaaaaagtcaggaaacaacaggtgctggagaggatgtggagaaataggaacacttttacactgttggtgggactgtaaactagttcaaccattgtggaagtcagtgtggcgattcctcagggatctagaactagaaataccatttgacccagccatcccattactgggtatatacccaaaggactataaatcatgctgctacaaagacacatgcacacgtatgtttattgcggcactattcacaatagcaaagacttggaaccaagccaaatgtccaacaatgatagaccggatcaagaaaatgtggcacatatacaccatggaatattatgcagccataaaaaatgatgagttcatgtcctttgtagggacatggatgaaattggaaatcatcattctcagtaaactatctcaagaacaaaaaaccaaacaccgcatattctcactcttaggtgggaactga

SEQ ID NO: 2309 - DNA, 1896 bp, Homo sapiens
  SIMILAR (577)..(1482): 951254mologous to Homo sapiens putative p150,accession number U93564,Smith-Waterman Score=1562.
atgggcaaggacttcatgtctaaaacaccaaaagcaatggcaacaaaagccaaaattgacaaatgggatctaattaaactaaagagcttctgcatggcaaaagaaactaccgtcagagtgaacaggcaacctacagaatgggagaaaatttgtgcaatctacccatctgacaaagggctaatatccagaatctacgaagagctcaaacaaatttacaagaaaaaagcaaacaaccccatcaaaaaggacatagatgaagctggaaaccatcattctcagaaaactatcacaaggacagaaaacaaaacaccacatgttctcactcataggtgggaattgaacaatgagatcacttggacacagggcagggaacgtcacacactggggcctgtcagagggtggggagctggaggagggataacattaggagaaatacctaatctcagagaggttaaggagcaaagctgtcaaccaaccttgaagccatgccttcggtggctgtccttgagtactgcagatgcatggattttcatcaacccctttctggttggggattacctattcctggaccaccccaccaaattggaaaaaactactttaaagttcatatggaaccaaaaaagagcccgcattgccaagtcaatcctaagccaaaagaacaaagctggaggcatcacactacctgacttcaaactatactacaaggctacagtaaccaaaacagcatggtactggtaccaaaacagagatatagatcaatggaacagatcagagccctcagaaataacgccgcatatctacgactgtctgatctttgacaaacctgagaaaaacaagcaatggggaaaggattccctatttaataaatggtgctgggaaaactggctagccatatgtagaaagctgaaactggatcccttccttacaccttatacaaaaatcaattcaagatggattaaagacttaaacgttagacctaaaaccataaaaaccctagaagaaaacctaggcattactattcaggacataggcatgggcaaggacttcatgtctaaaacaccaaaagcaatggcagcaaaagccaaaattgacaaatgggatctaattaaattaaagagcttctgcacagcaaaagaaactaccatcagagtgaacaggcaacctacaaaatgggagaaaattttcgcaacctactcatctgacaaagagctaatatccagaatctacaatgagctcaaacaaatttacaagaaaaaaacaaacaacctcatcaaaaagtgggcaaaggacatgaacagacacttctcaaaagaagacatttatgcagccaaaaaacacgtgaaaaaatgctcaccatcactggccatcagagaaatgcaaatcaaaaccacaatgagataccatctcacaccagttagaatggcgatcattaaaaagtcaggaaacaacaggtgctggagaggatgtggagaaataggaacattttacactgttgcctgccacaaagggctctgttctccctttggtgtctcctcagcacagagtcaagactgctccagggcaagggttaagaacagaagtccacagactggtactggtcagtggcctgttaggaacaaggctacacagcaggagccagatcccaaccacttggctttaacccagcagagatggagacggaaaagacacatttccttcgttcaaggaattcgcagtggacctaatagaaggggctgtaaagtggtgtcctatgagctgcctccagccttcaggaagtacatgctccaatgcccagctggatccctgcagaacttagaccttaccaaaggtgaaggggaccagctagctaaggaggcagggagtacattaaaagcacctagagagagatccaggtga

SEQ ID NO: 2310 - DNA, 1836 bp, Homo sapiens
  SIMILAR (1228)..(1833): 891254mologous to Homo sapiens putative p150,accession number U93563,Smith-Waterman Score=993.
atggataaattcctcgacacatacaccctcccaagactaaaccaggaagaagttgaatccctgaatagaccaataacaggctctgaaattgaggcaataattaatagcctaccaaccagaaaaagtccaggaccagatggattcaaagtcgaatcctatcagaggtacaaagaggagctggtaccattccttctgaaactattccaatcaatagaaaaagagggaatcctccctaactcattttatgaggccagcatcatcctgataccaaagcctggcagagacacaataaaaaaagagaattttagacgaatatccctgatgaacatcaatgtgaaaatcctcaataaaatactggcaaaccgaatccagcagcacatcaaaaagcttatccaccacgatcaagtcagcttcatccctgggaagcaaggctggttcaacatacacaaatcaataaacgtaatccatcacataaacagaaccaatgacaaagaccacatgattatctcaatagatgcaaaaaaggccttcaacaaaattcaacagcccttcatgctaaaaactctcaataaactagtgttgggagttctggccagggcaatcaggcaagagaaagaaataaagcgtattcaatcaggaaaagaggaagtcaaattgtccctgtttgcagatgacatgattgtatgtttagaaaaccccatcgtctcagcccaaaatctccttaagctgataagcaacttcagcaaagtctcagaatataaaatcaatgtgcaaaaatcacaagtattcctttatgccaataagagacaaactgagagccaaatcatgagtgaactcccattcacaattgctacaaagagaataaaatacctaggaatccaacttacaagggatgtgaaggacctcttcttcaaggagaactataaaccactgttcaacgaaataacagaggacacaaacaaatggaagaacattccatgctcatggataggaagaatcaatatcatgaaaatggccatactgcccaaggtaatttatagattcaatgccatccccatcaagctaccaatgactttcttcacagaattggaaaaaactactttaaagttcatatggaaccgaaaaagagcgcacattgccaagacaatcctaagcaaaaagaacaaatctagaggcatcacactacctgacttcaaactatactacaacgctaaccaaaacagcatgacaaaaattaattcaagatggattaaagacttaaatgttagacctaaaaccataaaaactctagaagaaaacctaggcaataccattcaggaactaggcgtgggcaaggacttcatgactaaaacaccaaaagcaatggcaacaaaagccaaaatagacaaatgggatctaattaaacgaaagagcttctgcacagcaaaagaaactaccatcagagtgaacaggcaacctacagaatgggagaaaatttttgcaatctacccatctgacaaagggctaatatccagaatctacaaagaacttaaacaaatttacaagaaaaaaacaagcaaccccatcaaaaagtgggcaaaggatatgaacagacactgctcaaaagaagacatttatgtagccaacggacacatgaaaaaatgctcatcatcactggtcgtaagagaaatgcaaatccaaaccacaatgcgataccatctcacaccagttagaatggcgatcattaaaaagtcaggaaacaacagatgctggagaggatgtggagaaataggaacgcttttacactgttggtgggaatgtaaactagtccaaccattgtggaagacagtgtggtga

SEQ ID NO: 2311 - DNA, 2463 bp, Homo sapiens
  SIMILAR (977)..(1039): 611254mologous to Mus musculus endonuclease/reverse transcriptase,accession number AF016099,Smith-Waterman Score=69.
atgggagactttaacatcccactgtcaacatcagacagatcaacgagacagaaagttaacaaggatacccaggaattgaactcagctctgcaccaagcggacctaatagacatctacagaactctccaccccaaatcaacagaatatacattcttttcagcaccacaccacacctactccaaaattgaccacatagttggaagtaaagcactcctcagcaaatgtagaagaacagaaattataacaaactgtctctcagaccacagtgcaatcaaactagaaatcaggattaagaaactcactcaaaactgctcaactacatggaaactgaacaacctgctcctgaatgactactgggtaaataatgaaatgaaggcagaaataaagatgttctttgaaatcaacgaggacaaagacacaacataccagaatcgctgggacacattcaaagcagtgtgtagagggaaatttatagcactaaatgcccacaagagaaagcaggagagatctaaaattgacaccctaacgtcacaattaaaagaactagaaaagcaagagcaaacacattcaaaagctagcagaaggcaagaaataaccgagatcagagcagaactgaaggaaatagagacacaaaaaacccttcaaaaaatgaatgaatccaggagctggttttttgaaaagatcaacaacattgatagactgctagcaagactaatcaagaagaaaagagagaagaatcaaatagacgcaataaaaaatcataaaggggatatcaccaccaatcccacagaaatacaaactaccatcagagaatatgataaacacctctacgcaaataaactagaaaatctagaagaaacggataaattcctcgacacatacatcctcccaagactaaaccaggaacaagttgaatctctgaatagaccaataacaggagctgaaattgaggcaataatcaatagcttacgaaccaaaaaaagtccaggaaccaggtggattcacagccgaattctaccagaggtacaaagaggagctgtgttggaagttctggccagggcaattaggcaggagaaggaaataaagggtattcaattaggaaaagaggaagtcaaattgtccctctttgcagatgacatgactgtatatctagaaaaccccactgtctcagcacaaaatctccttaagctgataagcaacttcagcaaagtctcaggatacaaaatcaatgtacaaaatccacaagcattcttatacaccaataacagacaaacagagagccaaatcatgagtgaactcccattcacaattgcttcaaagagaataaaatacctgggaatccaacttacaagggatatgaaggagctcttcaaggagaactacaaaccactgctcagtgaaataaaagaggatataaacaaatggaagaacattccatgctcatgggtaggaagaatcaatattgtgaaaatggccatactgcccaaggtaatttatagattcaatgccatccccatcaagctaccaatgactttcttcacagaactggaaaaaactactttcaagttcatatggaaccaaaaaagagcccgcatcgccaagtcaatcctaagccaaaagaacaaagctggaggcatcacactagctgacttcaaactatactacaaggctacagtaaccaaaacagcatggtactggtaccaagacagacatatagatcaatggaacagaacagagtcctcagaaataatgccgcatatctacaactatctgatctttgacaaacctgacaaaaacaagaaatggggaaaggattccctatttaataaatggtgctgggaaaactggttagccatatgtagaaagctgaaactggatcccttccttacaccttatacaaaaattaattcaagatggattaaagacttaaatgttagacctaaaaccataaaaaccctagaagaaaacttaggcattaccattcaggacacaggcatgggcaaggacttcatgtctgaaacaccaaaagcaatggcaacaaaagacaaaattgacaaatgggatctaattaaactaaagagcttctgcacagcaaaagaaactaccatcagagtgaacaggcaacctacagaacgggagaaaagttttgcaagctactcatctgacaaagggctaatatccagaatctacaatgaactccaacaaatttacaagaaaaaaacaaacaaccccatcaacaagtgggcaaaggatatgaacagacacttctcaaaagaagacatttatgcagccaaaagacacacgaaaaaatgctcatcatcactggccatcagaggaatacaaatcaaaaccacaaggagataccatctcaaaccagttagaatggcgatcattaaaaagtcaggaaacaacaggtgctggagaggatgtggagaaataggaacacttttacactgttggtag

SEQ ID NO: 2312 - DNA, 2227 bp, Homo sapiens
  SIMILAR (542)..(2224): 941254mologous to Homo sapiens putative p150,accession number U93574,Smith-Waterman Score=2858.
actaaaccaggaagaagttgaatctctgaatagaccaataacaggagctgaaattgtggcaataatcaatagcttaccaaccaaaaagagtccaggaccagatggattcacagccaaattctactggaggtacaaggaggaactggtaccattccttctgaaactattccaatcaatagaaaaagagggaatcctccctaactcatgttatgaggccagcatcatcctgataccaaagcctggcagagacacaacaaaaaaagagaattttagaccaatatccttgatgaacattgatgcaaaaatcctcaataaaatactggcaaaccgaatccagcagcacatcaaaaagcttatccaccatgatcaagtgggcttcatccctgggatgcaaggctggttcaatatatgcaaatcaataaatgtaatccagcatataaacagaaccaaagacaaaaaccacatgattatctcaatagatgcagaaaaggcctttgacaaaattcaacaacccttcatgctaaaaactctcaataaattagcccaaaatctccttaagctgataagcaacttcagcaaagtctcaggatacaaaatcaatgtacaaaaatcacaagcattcttatacaccaataacagacaaacagagagccaaatcatgagtgaactcccattcacaactgctttaaagagaataaaatacctaggaatccaacttacaagggatgtgaaggacctcttcaaggagaactacaaaccactgctcaaggaaataaaagaggatacaaacaaatggaagaacattccatgctcatgggtaggaagaatcaatatcttgaaaatggccacactgcccaaggtaatttatagattcaatgccatccccatcaagctactaatgactttcttcacagaattggaaaaaactactttaaagttcatatggaaccaaaaaagagcccgcatagccaagtcaatcctaaaccaaaagaacaaagctggaggcatcacactacctgacttcaaactatactacaaggctacagtaaccaaaacagcatggtactggcaccaaaacagagatagagaccaatggaacagaacagagccctcagaaacaatgctgcatatctacaactatctgatctttgacaaacctgacaaaaacaagcaatggggaacggattccctatttaataaatggtgctgggaaaactggctagccatatggagaaagctgaaactggatcccttccttacaccttatacaaaaattaattcaagatggattaaagacttacacattagagctaaaaccataaaaaccctagaagaaaacctaggcaataccattcagtacataggcatgggcaaggacttcatgtctgaaacaccaaaagcaatggcaacaaaagccaaaattgacgaatgggatctaattaaactaaagagcttctgcacagcgaaagaaactaccatcagagtgaacaggcaacccacaaaatgggagaaaattttcgcaacctactcatctgacaaagggctaatatccagaatctacaatgaactcaaacaaatttacaagaaaaaaacaaacaaccccatcaaaaaatgggcaaaggacatgaacagacacttctcaaaagaagacatttatgcagccaaaaaacacatgaaaaaatgctcatcatcactggccatcagagaaatgcaaatcaaaaccacaatgagataccatctcacaccagtcagaatggcgatcattaaaaagtcaggaaacaacaggtgctggagaggatgtggagaaataggaacacttttacactgttggtgggactgtaaactagttcaaccattgtggaagtcagtgtggcgattcctcagggatctagaactagaaataccatttgacccagccatcccattactgggtatatacccaaaggactataaatcatgctgctacaaagacacatgcacacgtatgtttattgcggcactattcacaatagcaaagacttggaaccaagccaaatgtccaacaatgatagaccggatcaagaaaatgtggcacatatacaccatggaatattatgcagccataaaaaatgatgagttcatgtcctttgtagggacatggatgaaattggaaatcatcattctcagtaaactatctcaagaacaaaaaaccaaacaccgcatattctcactcttaggtgggaactga

SEQ ID NO: 2313 - DNA, 2871 bp, Homo sapiens
  SIMILAR (1558)..(2868): 961254mologous to Homo sapiens unknown,accession number AF148856,Smith-Waterman Score=2330.
atgaaggcagaaataaaggtgttctttgaaaccaacgagaacaaagacacaacataccagaatctctgggacacattcaaagcagtgtgtagagggaaatttatagcactaaatgcccacaagagaaagcaggaaagatccaaaattgacaccctaacatcacaattaaaagaactagaaaagcaagagcaaacacattcaaaagctagcagaaggcaagaaataactaaaatcagagcagaactgaaggaaatacagacacaaaaaacccttcaaaaaatcaatgaatccaggagctggttttttgaaaggatcaacaaaattgatagatcgctagcaagactaataaagaaaaaaagagagaagaatcaaatagacacaataaaaaatgataaaggggatatcaccaccgatcccacagaaatacaaactaccatcagagaatactacaaacacctctatgcaaataaactagaaaatctagaagaaatggataaattcctcgacacatacactctcccaagactaaaccaggaagaagttgaatctctgaatagaccaataacaggagctgaaattgtggcaataatcaatagtttaccaaccaaaaagagtccaggaccagatggattcacagccgaattctaccagagctgggcagagacacaaccaaaaaaagagaattttagaccaatatccttgatgaacattgatgcaaaaatcctcaataaaatactggcaaaacgaatccagcagcacatcaaaaagcttatccaccatgatcaagtgggcttcatccctgggatgcaaggctggttcaatatacgcaaatcaataaatgtaacacagcatataaacagagccaaagacaaaaaccacatgattatctcaatagatgcagaaaaagcctttgacaaaattcaacaacccttcatgctaaaaactctcaataaattaggtattgatgggacgtatttcaaaataataagagctatctatgacaaccccacagccaatatcatactgaatgggcaaaaactggaagcattccctttgaaaactggcacaagacagggatgccctctctcaccactcctattcaacatagtgttggaagttctggccagggcaattaggcaggagaaggaaataaagggtattcaattaggaaaagaggaagtcaaattgtccctgtttgcagacaacatgattgtatatctagaaaaccccattgtctcagcccaaaatctccttaagctgataagcaacttcagcaaagtctcaggatacaaaatcaatgtacaaaaatcacaagcattcttatacaccaacaacagacaaacagagagccaaatcatgagtcaactcccattcacaattgcttcaaagagaataaaatacctaggaatccaacttacaagggatgtgaaggacctcttcaaggagaactacaaaccactgctcaaggaaataaaagaggatacaaacaaatggaaaaacattccatgctcagggggaaggaagaatcaatatcgtgaaaatggccatactgcccaagaattggaaaaaactactttaaagttcatatggaaccaaaaaagagctcacattgccaagtcaattctaaaccaaaagaacaaagctggaggcatcacactacctgacttcaaactatactacaaggctacagtaaccaaaacagcatggtactggtaccaaaacagagatatagatcaatggaacagaacagagccctcagaaataacgcagcatatctacagctatctgatctttgacaaacctgagaaaaacaagcaatggggaaaggattccctatttaataaatggtgctgggaaaactggctagccatatgtagaaagctgaaactggatcccttccttacaccttatacaaaaattaattcaagatggattaaagatttaaacgttagacctaaaaccataaaaaccctagaagaaaacctaggcattaccattcaggacataggcatgggcaaggacttcatgtccaaaacaccaaaagcaatggcaacaaaagacaaaattgacaaatgggacctagttaaactaaagagcttctgcacagcaaaagaaactaccatcagagtgaacaggcaacctacaaaatgggagaaaattttcgcaacctactcatctgacaaagggctaatatccagaatctacaatgaactcaaacaaatttacaagaaaaaaacaaacaaccccatcaaaaagtgggcaaaggacatgaacagacacttctcaaaagaagacatttatgcagccaaaaaacacatgaaaaaatgctcatcatcactggccatcagagaaatgcaaatcaaaaccactatgagataccatctcacaccagttagaatggcaatcattaaaaagtcaggaaacaacaggtgctggagaggatgtggagaaacaggaacgcttttacactgttggtgggactgtaaactagctcaaccattgtggaagtcagtgtggcgattcctcagggatctagaactagaaataccatttgacccagccatcccattactgggtatatacccaaatgactataaatcatgctgctataaagacacatgcacacgtatgtttattgcggcattattcacaatagcaaagacttggaaccaacccaaatgtccaacaattatagactggattaagaaaatgtggcacatatacaccatggaatactatgcagccataaaaaatgatgagttcgtgtcctttgtagggacatggatgaaattggaaatcatcattctcagtaaactatcacaagaacaaaaaaccacacaccgcatattctcactcataggtgggaattga

SEQ ID NO: 2314 - DNA, 1281 bp, Homo sapiens
  SIMILAR (1)..(624): 911254mologous to Homo sapiens putative p150,accession number U93565,Smith-Waterman Score=1024.
atgggcaaggacttcatgtctaaaacaccaaaagcaatggcaacaaaagccaaaattgacaaatgggatctaattaaactaaagagcttcttctgcacagcaaaagaaactaccatcagagtgaacaggcaacctacagaatgggagaaaattttcgcaacctactcatctgacaaagggctaatatccagaatctacaaagaactcaaacaaatttacaagaaaaaaacaaacaaccccatcaaaaagtgggtgaaggatatgaacagacacttctcaaaagaagacatttatgtagccaaaatgctcatcatcatgaaaaaatgctcatcatcactggccatcagagaaatgcaaatcaaaaccataatgagataccatctcacaccagttagaatggcgatcattaaaaagtcaggaaacaacaggtgctggagaggatgtggagaaataggaacacttttacactgttggtgggactataaactagttcaaccattgtggaagacagtgtggcgattcctcagggatctagaaccagaaataccacttgacccagccatcccatcactgggtgtatacccaaaggattataaatcatgctgctataaagacacatgcacatgtagatgggaccatgtgatgggtccttgccagtggagtgtaagcagaagtgatacgcatcacttccaggcagaagtggttaaggagcaagtgagtcttctcgctctcttcttctcttgctattgcctccatgcagacgaacttactgaccttgggaactctgtgttggaaatggtgaagccagaagatggaactagcctggtgcttcagacgctgcttggagaacagcctctgcccttcaggaacacctattttggtgttcatatgagcaagaagataccgtattttccatgtggaaaagtcatcatggtagaccaaaccacccagccacgcacacacctccagcgctccacatccaaagcagccatcgccagggctgaagacagatgccggtggatgtctcaagacagtctactgctgactccacacttagcaaccactcacttcaactcccgagaagactggcccttcagaagagacaggaaaatatctgtgaggggaatccctcaactccagataacaattgtgggtgttcagataacaactgtgggtgttcaacaagcagacacaggtttatacatgttgatgcgggaggcactcagtagctcaaatatgaaaatgggtcagcgtggagcggagtctccggagattttctag

SEQ ID NO: 2315 - DNA, 1176 bp, Homo sapiens
  SIMILAR (16)..(888): 871254mologous to Homo sapiens putative p150,accession number U93572,Smith-Waterman Score=1414.
atgggactggtaccgaacagagatacagaccaatggaacagaacagagccctcagaaataataccacacatctacaaccatctgatctttgacaaacctgacaaaaacaagaaatggggaaaggattccctatttaataaatggtgctgggaaaactggctagccatatgtagaaagctgaaactggatcccttccttacaccttgtacaaaaattaattcaagatggattaaagacttacatgttacacctaaaaccatcaaaaccctagaagaaaacctaggcaataccattcaggacataggcatggacaaggacttcatgactaaaacaccaaaagcattggcaaccaaagccaaaatagacaaatgggatctaattaaactaaagagcttctgcacagcaaaagaaactaccatcagagtgaacaggcaacctacagaatgggagaaaatttttacaatctactcatccgacaaagggctaatatccagaatctacaaagaacttaaacaaatttacaagaaaaaagcaaacaaccccatcaaaaagtgggcaaaggatatgatcagacacttctcaaaagaagacatttatgcagacaacggacacatgaaaaaatgctcatcatcactggtcatcagaggaatgcaaatcaaaaccacaatgagataccatctcacaccagttagaatggcgatcattaaaaagtcaggaaacaacaggtgctggagaggatgtggagaaataggaacacttttacactgttggtgggagtgtaaactagttcaaccattgtggaagacagtgtggcaattcctcaaggatatagaactagaaataccatttcacccagccatcccattacaggaatgcttgcctgtagaagttggcgttttgtatctactgcttctgcatcatgaattcatccaactgtggatcaaaaatattcagaagaaaaatttcacaaagccaaacaaaaacttgctgtgcactgagtacgtccagatggcacaagtgacctttagatcagaagattatccaggtgagcatgatctaatcacatgggtccttcaaagcagagagccttctctcgctgatggaaaaagaggtagtcatggaaatgtgaagaacaagggagattcaatgcacaattgctggcttgaagacggatga

SEQ ID NO: 2316 - DNA, 1431 bp, Homo sapiens
  SIMILAR (1)..(846): 871254mologous to Homo sapiens putative p150,accession number U93567,Smith-Waterman Score=1362.
atgggcaaggacttcatgactaaaacaccaaaagcaatggcaacaaaagccaaaatagacaaatgggatctaattaaactaaagagcttctgcacagcaaaagaaacgaccatcagagtgaacagccaacctaaagaatgggagaaaatttttgtaacctatccatctgacaaagggctaatatccagaatccacaaagaatgtaaacaaatttacaagaaaaaaacaaacaaccccatcaaaaagtgggcaaaagatataaacaaacacttctcaaaagaagacatttatgcagccaacaggcacatgaaaaaatgctcatcatcactggtcatcagagaaatgcaaatcaaaaccataatgagataccatctcacaccagttagaatggcgatcattaaaaagtcaggaaacaacagatgctggagaggatgtggagaaacaggaatgcttttacactgtgggtgggagtgtaaactagttcaaccattgtggaagacagtatggcaattcctcaaggatctagaactagaaataccatttgactcagccatcccattactgggtatatacccaaaggattataaatcatgctgctataaagacacatgcacacgtatgcttattgtggcagtattcacaatagcaaagacttggaaccaacccaaaggtccatcaatgatagactggattaagaaaatgtggcatgtatacaccatggaatactatgcagccataaaaaaggatgagttcatgtcctttgtggggacatggatgaagctggaaaccatcatgctgagcaaactatcacaaggacagaaaaccaaacaccgcatgttctcactcacagctgcacagaagaaattttacctgagagttcatcaggcgaatggtagtttttgtgcccacatcttgttggaagttggctgtgggtgccccattaaacctcaggactgcgtcatgatcatctataaaccacaaagaaacagaaaagaggtgatgagcactggcaatatgcagaaaaagagaaagacgagaggcgggggagggggcaagggaataatgcttccccatctttaccccatcatgatccacagggcgaaatggcagtatttgtgtggtgctcaggtaaagctcctaggcagagatgaccacctgtctgccagccactccattgtcagaaacaatgtactaaatccagtcaaaatcaaacaggccatcttgaaaaacctaaaagcttcctgggctagctccttgtctttgcaactgtttaagcagtgtttggaagacttggaaaagtttctctaccccacgttgacctatctgatgaaggagggaactgaagactttaaggagccatccaaatcctgtgatcctatgagaacttctttcaatcttactcggtcaagcaagtttggggctcaccactga

SEQ ID NO: 2317 - DNA, 2361 bp, Homo sapiens
  SIMILAR (490)..(2037): 841254mologous to Homo sapiens putative p150,accession number U93569,Smith-Waterman Score=2332.
atggataaattcctggacacatacactctcccaagactaaaccaggaagaagttgaatctctgaatagaccaataacaggagctgaaattgtggcaataatcaatagtttaccaaccaaaaagagtccaggaccagatggattcacagctgaattctaccagaggtacaaggaggaactggtaccattccttctgaaactattccaatcaatagaaaaagagggaatcctccctaactcattttatgaggccagcatcatcctgataccaaagccaggcagagacacaacaaaaaaagagaattttagaccaatatccttgatgaacattgatgcaaaaatcctcaataaaatactggcaaaacgaatccagcagcacatcaaaaagcttatccaccatgatcaagtgggcttcatccctgggatgcaaggctggttcaatatacgcaaatcaataaatgtaatccagcatataaacagagccaaagacaaaaaccacatgattatctcaatagatgcagaaaaagcctttgacaaaattcagcaacccttcatgctaaaaactctcaataaattagctgataagcaacttcagcaaagtttcaggatacaaaatcaatgtacaaaaatcacaagcattcttatacaccaacaacagacaaacagccaaatcgtgagtgaactcccattcacaattgcttcaaagagaataaaatacttaggaatccaacttacaagggatgtgaaggacctcttcgaggagaactacaaaccactgctcaaggaaataaaagaggatacaaacaaatggaagaacattccatgctcatgggtaggaagaatcaagatcgtgaaaatggccatactgcccaaggtaatttacagattcaatgccatccccatcaagctaccaatgactttcttcacagaattggaaaaaactactttaaagttcatatggaaccaaaaaagagcccgcatcgccaagtcaatcctacgccaaaagaacgaagctggaggcatcacactacctgacttcaaactatactacaaggctacagtaaccaaaacagcatggtactggtaccaaaacagagatatagatcaatggaacagaacagagccctcagaaataacgccgcatatctacaactatctgatctttgacaaacctgagaaaaacaagcaatggggaaaggattccctatttaataaatggtgctgggaaaactggctagccatatgtagaaagctgaaactggatcccttccttacaccttatacaaaaatcaattcaagatggattaaaggcttaaacgttagacctaaaaccataaaaaccctagaagaaaacctaggcattaccattcaggacataggcatgggcaaggacttcatgtctaaaacaccaaaagaaatggcaacaaaagacaaaattgacaaaagggatctaattaaactaaagagcttctgcacagcaaaagaaactaccatcagagtgaacaggcaacctacaaaatgggagaaaattttcgcaacttactcatctgacaaagggctaatatccagaatctacaatgaactcaaagaaattgacaagaaaaaaacaaacaaccccatcaaaaagtgggcgaaggacatgaacagacacttctcaaaagaagacatttatgcagccaaaaaacacatgaaaaaatgctcatcatcactggccatcagagaaatgcaaatcaaaaccacaatgagataccatctcacaccagttagaatggcgatcattaaaaagtcaggaaacaacaggtgctggagaggatgtggagaaagaggaacacttttacactgttggtgggactgtaaactagttcaaccattgtggaagtcagtgtggcgattcctcagggatctagaactggaaataccatttgacccagccatcccattactgggtatatacacaaaggactataaatcatgctgctataaagacacatgcacaccaatatctgactacatgaaggcgcttgaacaatggaagcaagtccatgcgctcctccgtccgtcctgctctgctgcacctgcgtatccgccggctctctccacagttccacgggcaggtgcacagttactcaaccgtcagcgcggcctggaatccagagcctttaggtcagcctcttacctacagttccagtctccaacctgtcaacctgtcaaacacattcattctccaacaaaacctaagtgcttccaattttctttatgccccactgtttctaaactcgatgcttttgtgcatgctgtttctgacatttggaatcacccaccccctggctgtgcccctgcagaattcatccttaaaaactga

SEQ ID NO: 2318 - DNA, 1815 bp, Homo sapiens
  SIMILAR (136)..(1227): 941254mologous to Homo sapiens putative p150,accession number U93564,Smith-Waterman Score=1878.
ctcagagaggttaaggagcaaagctgtcaaccaaccttgaagccatgccttcggtggctgtccttgagtactgcagatgcatggattttcatcaacccctttctggttggggattacctattcctggaccaccccaccaaattggaaaaaactactttaaagttcatatggaaccaaaaaagagcccgcattgccaagtcaatcctaagccaaaagaacaaagctggaggcatcacactacctgacttcaaactatactacaaggctacagtaaccaaaacagcatggtactggtaccaaaacagagatatagatcaatggaacagatcagagccctcagaaataacgccgcatatctacgactgtctgatctttgacaaacctgagaaaaacaagcaatggggaaaggattccctatttaataaatggtgctgggaaaactggctagccatatgtagaaagctgaaactggatcccttccttacaccttatacaaaaatcaattcaagatggattaaagacttaaacgttagacctaaaaccataaaaaccctagaagaaaacctaggcattactattcaggacataggcatgggcaaggacttcatgtctaaaacaccaaaagcaatggcagcaaaagccaaaattgacaaatgggatctaattaaattaaagagcttctgcacagcaaaagaaactaccatcagagtgaacaggcaacctacaaaatgggagaaaattttcgcaacctactcatctgacaaagagctaatatccagaatctacaatgagctcaaacaaatttacaagaaaaaaacaaacaacctcatcaaaaagtgggcaaaggacatgaacagacacttctcaaaagaagacatttatgcagccaaaaaacacgtgaaaaaatgctcaccatcactggccatcagagaaatgcaaatcaaaaccacaatgagataccatctcacaccagttagaatggcgatcattaaaaagtcaggaaacaacaggtgctggagaggatgtggagaaataggaacacttttacactgttggtgggactgtaaactagttcaaccattgtggaagtcagtgtggcgattcctcagggatctagaactagaaataccatctgacccagcaatcccattactggttatatacccaaaggattataaaccatgctgctataaagacacatgcacacgatcttttgaagaagctattcctgcgaggaagctgaagaatttttacccgggggtagcggagcacaaggatatttctaagttggtcctgctcctttcttcctctgtaaattccctaagaaaggcagctcatgaggccctgcaggactttcagaagtacaagactctctggacagaggaccgcgatgtgaaagtgaaggaatttttggctaacaacccctctctgactgaaatcagatcagaaattctacactatgctacttttgaacaggagattgatgagttgaagcctattattgttgtaggagcacttgaattacatacagagccgatgaaattggccttatccatcgaggccaaggcatggaagatgttactctgtcgatatctgaatgaagaatacaaaaagaaaatgtcatacatgatagcatttattaatgaatacttgaaaaagttatctagacctattcgtgatttagatgatgtcagatttgcaatggaagccttgtcttgcatacgtgataatgaaattcaaatggacatgactttgggaccaattgaaatgctctcctatgacctttctgagactgctggaaagctcatggcttaa

SEQ ID NO: 2319 - DNA, 2811 bp, Homo sapiens
  SIMILAR (1006)..(2508): 961254mologous to Homo sapiens putative p150,accession number U93563,Smith-Waterman Score=2579.
atgaagaagcagcacgccctcactcttcacacgaaacaggaacaccaaggtgtgtttgtgtgcacgcacatgcatgtgtctgaacacatgagtgtctactggaggctggagccagctgtaccaggttcacaggagccagttatgcacatctttttccagctccatgttcagcaacttcatgttggcagcttgaaactgactgtgatgagagtatttatgggactgacctttttttttaggaagtatttagagggcaaagctgaaagcaagatgttggagtgcagggagaagagatcagagcagcctactcactggcaggctaggctccaggaggaaagtcctcaggacctgggagaggtggaccctcatctccaggcccaggaacaggacaggtgctatccatgcttgatgggtttctcagatggtattttgaaaaatggtttgcttctgtgttcaaatgttttgcaaaagaagaagaaaaacaagcaatcctgctggtattttcgactagatgaggaagggaaatgggccctttatgcaggcctgccagaggtatttaaagataacaggaagggggaaaacagttggatgctgatttctcgttggtactatgcatataatagatgttcagtagatgcagttggaggaaggtgtaacaataaaagcaggacatcaagtctagccttcccgcggatcgtaatgaatggaactgcgggagctgtctccgctaaaattaactggaaacaacaacttgatgtggggatctcagggacagtcacacttcacgatgcctcactggcgacctcagggacagtcacacttcacgatgcctcactggcgacctcagggacagtcacacttcacgatgcctcactggcgatctcagggacaatcacgcttcatgataccgcacatcctgtgatggttgagttattacaaagcatcaagaaggcaacaaatttttcagcctctattgagtttgcaggtaacgtaaatgaaagttgggaagtcaaattgtcactgtttgcagatgacatgattgtatatctagaaaaccccattgtctcagcccaaaatctccttaagctgataagcaacttcagcaaagtctcaggatacaaaatcaatgtacaaaaatcacaagcattcttatacaccaatagcagacaaacagagagccaaatcatgagtgaactcccattcacaattgcttcaaagagaataaaatacctaggaatccaccttacaagggatgtgaaggacctcttcaaggagaactacaaaccactgctcaatgaaattaaagaggatacaaacaaatggaagaacattccatgctcgtgggtaggaagaatcaatatcgtgaaaatggccatactgcccaaggtaatttatagattcaatgccatccccatcaagctaccaatgactttcttcacagaattggaaaaaactactttaaagttcatatggaaccaaaaaagaacccgcatcgccaagtcaatcctaagccaaaagaacaaagctggaggcatcacgctgcctgacttcaaactatactacaaggctacagtaaccaaaacagcatggtactggtaccaaaacagagatatagatcaatggaacagaacagagccctcagaaataatgccacatatctacaactatctgatctttgacaaacctgagaaaaacaagcaatggggaaaggattccctatttaataaatggtgctgggaaaacagtctagccatatgtagaaagctgaaactggatcccttccttacaccttatacaaaaatcaattcaagatggattaaagacttaaacgttagacctaaaaccataaaaaccctagaagaaaacctaagcattaccattcaggacataggcacgggcaaggacttcatgtctaaaacaccaatagcaatggcaacaaaagccaaaattgacaaatgggatctcattaaactaaacagcttctgcacagcaaaagaaactaccatcagagtgaacaggcagcccacaaaatgggagaatatttttgcaacctactcatctgacaaagggctaatatccagaatctacaatgaactcaaacaaatttacaagaaaaaaacaaacaaccccatcaaagagtgggcaaaggacatgaacagacacttctcaaaagaagacatttatgcagccaaaaaacacatgaaaaaatgctcaccatcactggccatcagagaaatgcaaatcaaaaccacaatgagatatcatctcacaccagttagaatggcgatcattaaaaagtcaggaaacaacagatgcttgagaggatgtggagaaataggaacacttttacactgttggtgggactgtaaactagttcgaccattgtggaagtcagtgtggcgattcctcagggatctagaactagaaataccatttgacccagccatcccattactggatatacacccaaaggactataaatcatgctgctataaagacacatgcacaccttctaaactgaggcagagagccaccggaaatgttgcagcggcagctctcaagtccaaggggacctccacaagccttggaccctggaacagaggcaccagtgccatctccccagtagagactgcagtcacagtgcccaggagcagcaggattgttcccctccctccagccgccagccgcccctccaccctacacatgcacagggttcagcgccagcttccaggccagcagccccacgtatgcctgaacttagctggtgggcgcaaccacttgttccaggaaacatccctcagagagcagaca

SEQ ID NO: 2320 - DNA, 581 bp, Homo sapiens
  misc_feature (1)...(581): n = a,t,c or g
aggtctgcttgggttaaattcttgtctattctgtaacgccaactagagctcaaaccatgccaccttcttgctaacttcaaaagccaattttatctgtgcactgggaagcaaggtgctagaagtgctagatattttaggagagaggagactgtatgagtagtcatctagaggtatgggagagtaaatgggccggggaaacagaaaatgattcttgcgtagcataaaggactcaatgaggtaagggatcattaatttaaagtgaggctggtaaatatggttacnnnnnnnnnncctctaggtatgttcagatgtatgggtgtgggcaaggagttcagtgtacacaaggctatatcactaccatgattatgaaatttaagctggataaggaaagcccgtatgtgcgtctcgtgagcccgttttggaccaccgttcccgaatgtcggaagggcggatacctacacaatgagggtaaaacactggggccccccccacgggactggaagccgcagagtcatgtgctatgccgcgtggcctcgggagctcatgatgtcacagcagaccgccatagcaactttgaatag

SEQ ID NO: 2321 - DNA, 5619 bp, Homo sapiens
  SIMILAR (2352)..(3911): 781254mologous to Homo sapiens putative p150,accession number U93574,Smith-Waterman Score=2127.
tgttgggagttctggccagggcaatcaggcaagagaaagaaataaagcgtattcaatcaggaaaagaggaagtcaaattgtccctgtttgcagatgacatgattgtatgtttagaaaaccccatcgtctcagcccaaaatctccttaagctgataagcaacttcagcaaagtctcagaatataaaatcaatgtgcaaaaatcacaagtattcctttatgccaataagagacaaactgagagccaaatcatgagtgaactcccattcacaattgctacaaagagaataaaatacctaggaatccaacttacaagggatgtgaaggacctcttcttcaaggagaactataaaccactgttcaacgaaataacagaggacacaaacaaatggaagaacattccatgctcatggataggaagaatcaatatcatgaaaatggccatactgcccaaggtaatttatagattcaatgccatccccatcaagctaccaatgactttcttcacagaattggaaaaaactactttaaagttcatatggaaccgaaaaagagcgcacattgccaagacaatcctaagcaaaaagaacaaatctagaggcatcacactacctgacttcaaactatactacaacgctaaccaaaacagcatgacaaaaattaattcaagatggattaaagacttaaatgttagacctaaaaccataaaaactctagaagaaaacctaggcaataccattcaggaactaggcgtgggcaaggacttcatgactaaaacaccaaaagcaatggcaacaaaagccaaaatagacaaatgggatctaattaaacgaaagagcttctgcacagcaaaagaaactaccatcagagtgaacaggcaacctacagaatgggagaaaatttttgcaatctacccatctgacaaagggctaatatccagaatctacaaagaacttaaacaaatttacaagaaaaaaacaagcaaccccatcaaaaagtgggcaaaggatatgaacagacactgctcaaaagaagacatttatgtagccaacggacacatgaaaaaatgctcatcatcactggtcgtaagagaaatgcaaatccaaaccacaatgcgataccatctcacaccagttagaatggcgatcattaaaaagtcaggaaacaacagatgctggagaggatgtggagaaataggaacgcttttacactgttggtgggaatgtaaactagtccaaccattgtggaagtcggtgtggcgattcctcagggatctagaactagaaataccatttgatccagccatcccattactggacagatcaacaagacagaaaattaacaaggatattcaagacttaaactcagccctggatcaagtggacctaatagacatctacagaactctccattccaaatcaacagaatatacattcttctcggtgccagatggcacttattctaaaatcaaccacataattggaagtataacactcttcagcaaatacaaaataactgaaatcataacaaacagtctcacagaccacacagcaaccaaattagaaatcaccattaagaaactcactcaaaaccatacaattacatggaaattgaagaacctgctcctgcatgattcctgggaaaataatgaaattaaggcagaaatcaagaagttctttgacaccaatgagaacaaagagacaacataccagaatctctggtatgtcaaagataccagaatctctggtatgctctggtatgtgaaagcagtgtgtagagggaaatttatagcactaaatgcccacaagagaaagcaggaaagatctaaaattgacaccctaacatcacaattaaaagaactagagaagcaagagcaaacacattcaaaaactagcagaaggcaagaaataactaagatcagagcagaactgaaggaaatagagacacaaaaaacccttcaaaaaatcaatgaatgcaggagctggttttttgaaaagatcaacaaaattgatagaccgctagcaagactaattaagaagaaaagagagaagaatcaaatagatgcaataaaaaatgacaaaggggatatcatcaccgatcccacagaaatacaaactaccatcagagaatactataaacacctctacggaaataaactagaaaatctagaagaaatggataaattcctggacacatacaccctcccaagactaaaccaggaagaagttgaatctctgaatagaccaataacaggctctgaaattgaggcaataattaatagcttaccaaccaaaaaaagtccaggaccagatggattcacagccgaattctaccagaggtacaaggaggagctgagaataaaatacctaggaattcaacttacaagggacgtgaaggaccttttcaaggagaactacaaaccactgctcaatgaaataaaagaggatacaaacaaatggaagaacattccatgctcatgggtaggaagaatcaatatcatgaaaatggccatactgcccaaggtaatttatagattcaatgccatccccatcaagctaccaatgactttcttcacagaattggaaaaaactactttaaagttcatatggaaccaaaaaagagcccgcatcgccaagtcaatcctaagccaaaagaacaaagctggaggcatcacgctacctgacttcaaactatactacaaggctacagtaaccaaaacagcatggtactggtaccaaaacagagatacagatcaatggaacagaacagagccctcagaaataatgctgcatatctacaaccatctgatctttgacaaacctgacaaaaacaagcaatggggaaaggattccctatttaataaatggtgctgggaaaactggctagccatatgtagaaagctgaaactggatcccttccttataccttatacaaaaattaattcaagatggattaaagacttaaacgttagacctaaaaccataaaatccctagaagaagacctaggcaataccattcaggacataggcatgggcaaggacttcatgtctaaaacaccaaaagcaatggcaacaaaagccaaaattgacaaatgggatctaattaaactaaagagcttctgcacagcaaaagaaactaccatcagagtgaacaggcaacctacagaatgggagaagattttttgcaatctattcatctgacaaagggctaatatccagaatctataaagaacttaaacaaatttacaagaaaaaaacaaacaaccccatcaacaagtgggcgaaggacagtttttgatgaacagacacttctcaaaagaagacatttatgtagccaacagacacatatgcagccaacagacacatgaaaaaaagctcatcccatcacccactgggcattaaagaaatgcaaatcaaaaccacaatgagataccatctcacaccagttagaatggtgatcattaaaaagtcaggaaacaacagatactggagaggatgtggagaaaacaggaacaacttttacactgttggtgggactgtaaactagttcaaccattgcggaagtcagtgtggcaattcctcaggaatctagaactagaaataccatttgacccagccatcccattactgggtagatacccaaaggattataaatcatgctgctataaagacacatgcacacgtatgtttattgcagcactattcacaatagcaaagacttggaaccaacccaaatgtccaacaacgatagattggattaagaaaatgtggcacatatacaccatggaatactatgcagccataaaaaatgatgagttcatgtcctttgtagggacatggatgaagctggaaactatcattctcagcaaactatcacaaggacaaaaaaccaaacactgtatgttctcactcatagtattggaagttctggccagggcaatcaggcaagagaaagaaataaagggtattcaattaggaaaagaggaagtcaaattgtccctgtttgcagatgacatgattgtatatttagaaaaccccatcatgtcagccccaaatctccttaagctgataagcaacttcagcaaagtctcaggatacaaaatcaacgtgcaaaaatcacaagcattcctatataccaatatcagacaaatagagagccaaatcatgagtgaactcccattcacaattgctacaaagagaataaaatacctaggaatccaactttcaaggaatgtgaaagagctcttcaaggagaactacaaaccactgctcaaggaaataaaagaggacacaaacgattggaagaacattccatgctcatggataggaagagtcaacattgtgaaaatggccatgctgcccaaagtaatttatagattcagtgctatccccatcaagttaccaatgactttcttcacagaattggaaaaaactactttaaagttcatatggaaccaaaaaagagcctgcattgccaagacaatcctaagcaaaaagaacaaagctggaggcatcacgctacctgacttcaaactatactgcaaggctacagtaaccaaaacagcatggtactgggtaccaaaacagatatatagaccaatggaacagaacagagacctcagaaataataccacacatctacaaccatctgatctttcacaaacccgacaaaaacaagcaacgaggaaaggattccctatttaataaatggtgctgggaaaactggctagccatatgtggaaagctgaaactggatccgttccttacaccttatacaaaaattaattcaagatggattaaagacttaaatgttagacctaaaaccataaaaaccctagaagaaaacctaggcaataccattcaggacataggcatgggcaaggacttcatgtctaaaataccaaaagcaatggcaacaaaagccaaaattgacaaatggaatctaattgaactaaagagcttctgcacagcaaaagaaactaccatcagtgtgaacaggcaacctacagaatgggagaaaatttttgcaatctgcttatctgacaaagggctaatatccagaatctacaaagaactcaaacaaagacacaagaaaaaaacaaacaaccccatcaaaaagtgggcgaaggatatgaacagacacttctcaaaagaagacatttatgcagccaacagacacatgaaaaaatgctcatcatcactggccatcagagaaatgccaatcaaaaccacaatgagataccatctcacaccagttagaatggcgatcattaaaaagtcaggaaacaacagatgctggagaggatgtggagaaataggaacgctttcacactgttggtgggactgtaacctagttcaaccattgtggaaggcagtgtggcgattccttaaggatctagaactagaaataccatttgacccagccatctcattactgggttatacccaaaggattataaatcatgctgctataaagacacatgcacacaaagcactttcacatgcagacaacatcttccgctataattgcttcattgaccatctcttagaacttgccaatcaatcttccaaactgccacctctgtccctcaacagacaatgtgagaatatagatattttctga

SEQ ID NO: 2322 - DNA, 3213 bp, Homo sapiens
  SIMILAR (1)..(1821): 851254mologous to Homo sapiens putative p150,accession number U93563,Smith-Waterman Score=2589.
atggtaaagggatcaattcaacaagaagagctaactatcttaaatatatatgcacctaatacaggagcactcagattcataaagcaagtccttagagacctacaaagagacttagactcccacacaataataatgggagattttcacaccccactgtcaacattagacagatcaacaagacagaaggttaacaaggatatccaggaattgaactcagctctgcaccaagaggacctaatagacatctacagaactctccaccccaaatcaacagaatatacatttttttcagcaccacaccacacctattccaaaattgaccacatagttggaagtaaagctctcctcagcaaatgtaaaagaacagaaattataacaaactgtctctcagaccacagtgcaatcaaactagaactcaggattaagaatctcactcaaaaccgctcaactacatggaaactgaacaacctgctcctgaatgactactgggtacataacgaaatgaaggcagaaataaagatgttctttgaaaccaacgagaacaaagacactacataccagaatctctgggacacattcaaagcagtgtgtagagggaaatttatagcactaaatgcccacaagagaaagcaggaaagatctaaaattgacaccctaacatcacaattaaaagaactagagaagcaagagcaaacacattcaaaagctagcagaaggcaagaaataactaaaatcagagcagaactgaaggaaatagagacacaaaaaacccttcaaaacattaatgaatccaggagctggttttttgaaaggatcaacaaaattgatagaccactagcaagactaataaagaaaaaaagagagaagaatcaaatagatgcaataaaaaatgataaaggggatatcaccaccgatcccacagaaatacaaactaccatcagagaatactacaaacacctctatgcaaataaactagaaaatctagaagaaatggataaattcctcaacacatacactctcccaacactaaaccaggaagaagttgaatctctgaatagaccaataacaggagctgaaattgtggcaataatcaatagcttaccaaccaaaaagagtccaggaccagatggattcacagccgaattctaccagaggtacaaggaggaactggtaccattccttctgaaaccattccaatcaatagaaaaagagggaatcctccctaactcattttatgaggccagcatcattctgataccaaagccgggcagagacacaacaaaaaaagagaattttagaccaatatccttgatgaacattgatgcaaaaatcctcaataaaatactggcaaaacgaatccagcagcacatcaaaaatcttatccaccatgatcaagtgggcttcatccctgggatgcaaggctggttcaatatacgcaaatcaataaatgtaatccagcatataaacagagccaaagacaaaaaccacatgattatctcaatagatgcagaaaaagcctttgacaaaattcaacagcccttcatgctaaaaactctcaataaattagacgacatgattgtatatctagaaaaccccatcgtctcagcccaaaatctccttaagctgataagcaacttcagcaaagtctcaggatacaaaatcaatatacaaaaatcacaagcattcttatacaccaacaacagacaaacagagagccaaatcatgagtgaactcccattcacaattgcttcaaagagaataaaatacctaggaatccaacttacaagggatgtgaaggacctcttcaagggagaaccacaaaccactgctcaacgaaataaaagaggatacaaacaaatggaagaacattccatgctcatgggtaggaagaatcaatatcgtgaaaatggccatactgcccaaggtaatttacagatcaatgccatccccatcaagctaccaatgactttcttcacagaattggaaaaaactactttaaagttcatatggaaccaaaaaagagcccgcatcgccaagtcaatcctaagccaaaagaacaaagctggaggcatcacactacctgacttcaaactatactacaaggctacagtaaccaaaacagcatggtactggtaccaaaacagagatatagatcaatggaacagaacagagccctcagaaagaacgccgcatatctacaactatctgatctttgacaaacgtgagaaaaacaagcaatggggaaaggattccctgtttaataaatggtgctgggaaaactggctagccatatgtagaaagctgaaactggatcccttccttacaccttatacaaaaatcaattcaagatggattaaagacttaaacgttagacctaaaaccataaaaaccctagaagaaaacctaggctttaccattcaggacataggcatgggcaaggacttcatatctaaaacaccaaaagcaatggcaacaaaagccaaaattgacaaatgggatctaattaaactaaagagcttctgcacagcaaaagaaactaccatcagagtgaacaggcaacctacaaaatgggagaaaattttcgcaacctactcatctgacaaagggctaatatccagaatctacaatgaactcaaacaaatttacaagaaaaaaacaaacaaccccatcaaaaagtgggcgaaggacatgaacagacacttctcaaaagaagacatttatgcagccaaaaaacacatgaaaaaatgctcaccatcactggccatcagagaaatgcaaatcaaaaccacaatgagataccatctcacaccagttagaatggcaatcattaaaaagtcaggaaacaaccggtgctggagaggctgtggagaaataggaacacttttacactgttggtgggactgtaaactagttcaaccattgtggaaggcagtgtggcgattcctcagggatctagaactggaaataccatttgacccagccatcccattactgggtatatacccaaaggactataaatcatgctgctataaagacacatgcacacgcaggaaacagcttgactgtgcagagcccgtggagcccagaaaagtcggggatggggagtggtccctgaccaaatggacacgccctggctccagagctctgccctggcccccagagcaagccaagccttacccaccgaccctgccaactctagcccaggacttttag

SEQ ID NO: 2323 - DNA, 3235 bp, Homo sapiens
  SIMILAR (442)..(2988): 931254mologous to Homo sapiens putative p150,accession number U93563,Smith-Waterman Score=4078.
atggagctgaaaaccaaggctcgagaactacgtgaagaatgcagaagcctcaggagccgacgcaatcaactggaagaaagggtatcagcaatggaagatgaaatgaatgaaatgaagcgagaagggaagtttagagaaaaaagaataaaaagaaatgagcaaagcctccaagaaatatgggactatgtgaaaagaccaaatctacgtctgattggtgtacctgaaagtgatgcggagaatggaaccaagttggaaaacactctgcaggatattatccaggaggacttccccaatctagcaaggcaggccaacgttcagattcaggaaatacagagaacgccacaaagatactcctcgagaagagcaactccaagacacataattgtcagattcaccaaagttgaaatgaagcaaaaaatgttaagggcagccagagagaaagactttaaaccaacaaagatcaaaagagacaaagaaggccattacataatggtaaagggatcaattcaacaagaggagctaactatcctaaatatatatgcacccaatacaggagcacccagattcataaagcaagtcctgagtgacctacaaagagacttagactcccacacattaataatgggagactttaacaccccactgtcaacattagacagatcaacaagacagaaagtcaacaaggatacccaggaattgaactcagctctgcaccaagcagacctaatagacatctacagaactctccaccccaaatcaacagaatatacatttttttcagcaccacaccacacctattccaaaattgaccacatagttggaagtaaagctctcctcagcaaatgtaaaagaacacaaattataacaaactatctctcagaccacagtgcaatcaaactagaactcaggattaagaatctcactcaaagccgctcaactacatggaaactgaacaacctgctcctgaatgtctactgggtacataacgaaatgaaggcagaaataaagatgttctttgaaaccaatgagaacaaagacacaacataccagaatctctgggacacattcaaagcagtgtgtagagggaaatttatagcactaaatgcccacaagagaaagcaggaaagatccaaaattgacaccctaacatcacaattaaaagaactagagaagcaagagcaaacacattcaaaagctagcagaaggcaagaaataactaaaatcagagcagaactgaaggaaatagagacacaaaaaacccttcaaaaactcaatgaatccaggagctggttttttgaaaggatcaacaaaattgatagaccgctagcaagactaataaagaaaaaaagagagaagaatcaaatagacacaataaaaaatgataaaggggatatcaccaccgatcccacagaaatacaaactaccatcagagaatactacaaacacctctacgcatataaactagaaaatctagaagaaatggatacattcctcgacacatacactctcccaagactaaaccaggaagaagttgaatctctgaatagaccaataacaggatctgaaattgtggcaataatcaatagcttaccaaccaaaaagagtccaggaccagatggattcacagccaaattctaccagaggtacaaggaggagctggtaccattccttctgaaactattccaatcaatagaaaaagagggaatcctccctaactcattttatgatgccagcatcattctgataccaaagccgggcagagacacaaccaaaaaagagaattttagaccaatatccttgatgaatattgatgcaaaaatcctcaataaaatactggcaaaccgaatccagcagcacatcaaaaagcttatccaccatgatcaagtgggcttcatccctgggatgcaaggctggttcaatatacgcaaatcaataaatgtaatccagcatataaacagagccaaagacaaaaaccacatgattatctcaatagatgcagaaaaagcctttgacaaaattcaacaacccttcatgctaaaaactctcaataaattaggtattgatgggacgtatttcaaaataataagagctatctatgacaaacccacagccaatatcatactgaatgggcaaagactggaagcattccctttgaaaactggcacaagacagggatgccctctctcaccactcctattcaacatagtgttggaagttctggccagggcaatcaggcaggagaaggaaataaagggtattcaattaggaaaagaggaagtcaaattgtccctgtttgcagacgacatgattgtttatctagaaaaccccatcgtctcagcccaaaatctccttaagctgataagcaacttcagcaaagtctcaggatacaaaatcaatgtacaaaaatcacaagcattcctatacaccaacaacagacaaacagagagccaaatcatgagtgaactcccattcacaattgcttcaaagagaataaaatacctaggaatccaacttacaagggatgtgaagaacctcttcaaggagaactacaaaccactgctcaaggaaataaaagaggatacaaacaaatggaagaacattccatgctcatgggtaggaagaatcaatatcgtgaaaatggccatactgcccaaggtaatttacagattcaatgccatccccatcaagctaccaatgactttcttcacagaattggaaaaaactactttaaagttcatatggaaccaaaaaagagcccgcattgccaagtcaatcctaagccaaaagaacaaagctggaggcatcacactacctgacttcaaactatactacaaggctacagtaaccaaaacagcaagaccccatgactggtatagaactgaaagtaaatcaagctggacttatgaaggattcctctctccattcgtggatgaatttgagtggcactggaacaagctctggaggaaggtggcctctgtgttctcagagaacatcatcaatattgtgacactccaacatgtgtcagccactgggtttcccagggctccttctctggggatccttctgaagttggaaaattatcctccaatcctgggtgatctgagcgatggcctgcccagagtggctctcattggcccagttctgggctctacggcatgcaatcccttggcatttgtaaatcttagaagagtctgtatgctttcttctgaaagcatacctagcagagaagctgttg

SEQ ID NO: 2324 - DNA, 3291 bp, Homo sapiens
  SIMILAR (1099)..(2649): 961254mologous to Homo sapiens putative p150,accession number U93564,Smith-Waterman Score=2592.
atggtaaagggatcaattcaacaagaggagctaactatcctaaatatttatgcacccaatacaggagcacccagattcataaagcaagtcctgagtgacctacaaagagacttagactcccacacattaataatggaagactttaacaccccactgtcaacattagacagatcaacgagacagaaagtcaacaagaatacccaggaattgaactcagctctgcaccaagcagacctaatagacatctacagaactctccaccccaaatcaacagaatatacatttttttcagcaccacaccacacctattccaaaattgaccacatagttggaagtaaagctctcctcagcaaatgtaaaagaacagaaattataacaaactatctctcagaccacagtgcaatcaaactagaactcaggattaagaatctcactcaaagccgctcaactacatggaaactgaacaacctgctcctgaatgactactgggtacataacgaaatgaaggcagaaataaagatgttctttgaaaccaacgagaacaaagacaccacataccagaatctctgggacgcattcaaagcagtgtgtagagggaaatttatagcactaaatgcctacaagagaaagcaggaaagatccaaaattgacaccctaacatcacaattaaaagaactagaaaagcaagagcaaacacattcaaaagctagcagaaggcaagaaataactaaaatcagagcagaactgaaggaaatagagacacaaaaaacccttcaaaaaatcaatgaatccaggagctggttttttgaaaggatcaacaaaattgatagaccgctagcaagactaataaagaaaaaaagagagaagaatcaaatagacacaataaaaaatgataaaggggatatcaccaccgatcccacagaaatacaaactaccatcagagaatcctacaaacacctctacgcaaataaactagaaaatctagaagaaatggatacattcctggacacatacactctcccaagactaaaccaggaagaagttgaatctctgaatagaccaataacaggctctgaaattgtggcaataatcaatagtttaccaaccaaaaagagtccaggaccagatggattcacagccgaattctaccagagagctatctatgacaaacccacagacaatatcatactgaatgggcaaaaactgcaagcattccctttgaaaactggcacaagacagggatgccctctctcaccactcctattcaacatagtgttggaagttctggccagggcaatcagccaggagaaggaaataaagggtattcaattaggaaaagaggaagtcaaattgtccctgtttgcagacgacatgattgtttatctagaaaaccccatcgtctcagcccaaaatctccttaagctgataagcaacttcagcaaagtctcaggatacaaaatcaatgtacaaaaatcacaagcattcttatacaccaacaacagacaaacagagagccaaatcatgagtgaactcccattcacaattgcttcaaagagaataaaatacctaggaatccaacttacaagggatgtgaaggacctcttcaaggagaactacaaaccactgctcaaggaaataaaagaggacacaaacaaatggaagaacattccatgctcatgggtaggaagaatcaatatcgtgaaaatggccatactgcccaaggtaatttacagattcaatgccatccccatcaagctaccaatgactttcttcacagaattggaaaaaactactttaaagttcatatggaaccaaaaaagagcccgcatcgccaagtcaatcctaagccaaaagaacaaagctggaggcatcacactacctgacttcaaactatactacaaggctacagtaaccaaaacagcatggtactggtaccaaaacagagatatagatcaatggaacagaacagagccctcagaaataatgccgcatatctacaactatctgatctttgacaaacctgagaaaaacaagcaatggggaaaggattccctatttaataaatggtgctgggaaaactggctagccatatgtagaaagctgaaactggatcccttccttacaccttatacaaaaatcaattcaagatggattaaagatttaaacgttagacctaaaaccataaaaaccctagaagaaaacctaggcattaccattgaggacataggcgtgggcaaggacttcatgtccaaaacaccaaaagcaatggcaacaaaagccaaaattgacaaatgggatctaattaaactaaagagcttctgcacagcaaaagaaactaccatcagagtgaacaggcaacctacaacatgggagaaaattttcgcaacctactcatctgacaaagggctaatatccagaatctacaatgaactcaaacaaatttacaagaaaaaaacaaacaaccccatcaaaaagtgggcgaaggacatgaacagacacttctcaaaagaagacatttatgcagccaaaaaacacatgaagaaatgctcatcatcactggccatcagagaaatgcaaatcaaaaccactatgagatatcatctcacaccagttagaatggcaatcattaaaaagtcaggaaacaacaggagagacagaacagctgaggaaacagcagaacggtggaaaatttttgaaagtgttttgagcccacccaacctgaggagagcattcaaagaaaaacaggaagaagaagtcggcttcagaaggtgggttataacaaactcctccaagctaaaacagcatgttttaacccaatgcaaggaagctaagaaccttgaaaaaaggttagaggaatttctaactagaataaccagtttagagaagaacataaatgacctaatggacctgaaaaacacagcacgagaacttcttgacgcctacacaagtatcaatagccaaattaatcaagcggaagaaaggttatcagagactgaagatcaacttaatcaaataaagcatgaggacaagattagagggaaaaaaatgaaaaggaacaaacaaagcctccaagaaatatgggactatgtgaaaaggccaaatctacgtctgattggtgtagctgaaagtgacagggagaatggagccaagttagaaaacactcttcagtatattatccaggagaacttccccaacctagcaagacaggccaacactcaaattcaggaaacacagagaccaccacaaagatactccttgagaaaagcaaccccaagacacataatcatctga

SEQ ID NO: 2325 - DNA, 4374 bp, Homo sapiens
  SIMILAR (1)..(3291): 991254mologous to Homo sapiens unknown,accession number AF148856,Smith-Waterman Score=5719.
atggtaaagggatcaattcaacaagaggagctaactatcctaaatatttatgcacccaatacaggagcacccagattcataaagcaagtcctcagtgacctacaaagagacttagactcccacacattaataatgggagactttaacaccccactgtcaacattagacagatcaacgagacagaaagtcaacaaggatacccaggaattgaactcagctctgcaccaagcagacctaatagacatctacagaactctccaccccaaatcaacagaatatacatttttttcagcaccacaccacacctattccaaaattgaccacatacttggaagtaaagctctcctcagcaaatgtaaaagaacagaaattataacaaactatctctcagaccacagtgcaatcaaactagaactcaggattaagaatctcactcaaagccgctcaactacatggaaactgaacaacctgctcctgaatgactactgggtacataacgaaatgaaggcagaaataaagatgttctttgaaaccaacgagaacaaagacaccacataccagaatctctgggacgcattcaaagcagtgtgtagagggaaatttatagcactaaatgcctacaagagaaagcaggaaagatccaaaattgacaccctaacatcacaattaaaagaactagaaaagcaagagcaaacacattcaaaagctagcagaaggcaagaaataactaaaatcagagcagaactgaaggaaatagagacacaaaaaacccttcaaaaaatcaatgaatccaggagctggttttttgaaaggatcaacaaaattgatagaccgctagcaagactaataaagaaaaaaagagagaagaatcaaatagacacaataaaaaatgataaaggggatatcaccaccgatcccacagaaatacaaactaccatcagagaatactacaaacacctctacgcaaataaactagaaaatctagaagaaatggatacattcctcgacacatacactctcccaagactaaaccaggaagaagttgaatctctgaatagaccaataacaggctctgaaattgtggcaataatcaatagtttaccaaccaaaaagagtccaggaccagatggattcacagccgaattctaccagaggtacatggaggaactggtaccattccttctgaaactattccaatcaatagaaaaagagggaatcctccctaactcattttatgaggccagcatcattctgatgccaaagccgggcagagacacaaccaaaaaagagaattttagaccaatatccttgatgaacattgatgcaaaaatcctcaataaaatactggcaaaccgaatccagcagcacatcaaaaagcttatccaccatgatcaagtgggcttcatccctgggatgcaaggctggttcaatatacgcaaatcaataaatgtaatccagcatataaacagagccaaagacaaaaaccacatgattatctcaatagatgcagaaaaagcctttgacaaaattcaacaacccttcatgctaaaaactctcaataaattaggtattgatgggacgtatttcaaaataataagagctatctatgacaaacccacagccaatatcatactgaatgggcaaaaactggaagcattccctttgaaaaccggcacaagacagggatgccctctctcaccgctcctattcaacatagtgttggaagttctggacagggcaatcaggcaggagaaggaaataaagggtattcaattaggaaaagaggaagtcaaattgtccctgtttgcagacgacatgattgtttatctagaaaaccccatcgtctcagcccaaaatctccttaagctgataagcaacttcagcaaagtctcaggatacaaaatcaatgtacaaaaatcacaagcattcttatacaccaacaacagacaaacagagagccaaatcatgggtgaactcccattcacaattgcttcaaagagaataaaatacctaggaatccaacttacaagggatgtgaaggacctcttcaaggagaactacaaaccgctgctcaaggaaataaaagaggagacaaacaaatggaagaacattccatgctcatgggtaggaagaatcaatatcgtgaaaatggccatactgcccaaggtaatttacagattcaatgccatccccatcaagctaccaatgactttcttcacagaattggaaaaaactactttaaagttcatatggaaccaaaaaagaacccgcattgccaagtcaatcctaagccaaaagaacaaagctggaggcatcacactacctgacttcaaactatactacaaggctacagtaaccaaaacagcatggtactggtaccaaaacagagatatagatcaatggaacagaacagagccctcagaaataatgccgcatatctacaactatctgatctttgacaaacctgagaaaaacaagcaatggggaaaggattccctatttaataaatggtgctgggaaaactggctagccatatgtagaaagctgaaactggatcccttccttacaccttatacaaaaatcaattcaagatggattaaagatttaaacgttaaacctaaaaccataaaaaccctagaagaaaacctaggcattaccattcaggacataggcatgggcaaggacttcatgtccaaaacaccaaaagcaatggcaacaaaagccaaaattgacaaatgggatctaattaaactaaagagcttctgcacagcaaaagaaactaccatcagagtgaacaggcaacctacaacatgggagaaaattttcgcaacctactcatctgacaaagggctaatatccagaatctacaatgaactcaaacaaatttacaagaaaaaaacaaacaaccccatcaaaaagtgggcgaaggacatgaacagacacttctcaaaagaagacatttatgcagccaaaaaacacatgaagaaatgctcatcatcactggccatcagagaaatgcaaatcaaaaccactatgagatatcatctcacaccagttagaatggcaatcattaaaaagtcaggaaacaacaggtgctggagaggatgcggagaaataggaacacttttacactgttggtgggactgtaaactagttcaaccattgtggaagtcagtgtggcgattcctcagggatctagaactagaaataccatttgacccagccatcccattactggatatatacccaaatgagtataaatcatgctgctataaagacacatgcacacagaataaaatacctaggaatccaacttacaagggatgtgaaggacctcttcaaggagaactacaaactactgctcaacaaaataaaagaggacacaaacaaatggaagaacattccatgctcatgggtaggaagaatcaacatcgtgaaaatggccatactgcccaagccatatggaaaaagctgaaactggatcccttccttacaccttatacaaaaattcattcaagatggatcaaagacttcaatgttagacctaaaaccataaaaaccctagaagaaaacctaggcaataccattcaggacgtaggcctgggcaaggacttcatatctaaaacaccaaaagcaatggcaacaaaagccaaaactgacaaatgggatctcattaaactaaagagcttctgcacagcaaaagaaactaccatcagagtgaacaggcaacctacaaaatgggagaaaatttttgcaatctactcgtctgacaaagggctaatatccagaatctacaaagaactcaaacaaacttacaaggaaaaaacaaacaacctcatcaaaaagtgggtgaaggatatgaacagacacttctcaaaagaagacttttatgcagccaaaagggacatgaaaaaatgctcatcatcactggccatcagagaaatgcaaatcaaaactacaacgagataccatctcacagcagttagaatggccatcattaaaaagtcaggaaacaacaggtactggagaggatgtggagaaataggaacacttttacactgttggtgggactgtaaactagtacaatcattgtggaagacagtgtggcgattcctcagggatctagaactagaaataccatttgacccagcaatcccattactgggtatatacccaaaggattgtaaatcatgctgctataaagacacatgcacacgtatatttattgtggcactattcacaatagcaaagacttggaaccaagccaaatgtccaacaatgatagactggattaaggaaatgtggcacatacacaccatggaatactatgcagccataaaaaaggatgagttcatgtcctttgtagggacatag

SEQ ID NO: 2326 - DNA, 4110 bp, Homo sapiens
  SIMILAR (3172)..(4110): 1001254mologous to Homo sapiens NTII-1 nerve protein, facilitates regeneration of nerve cells,accession number R99800,Smith-Waterman Score=1681.
atggtaaagggatcaattcaacaagaagagctaactatcctaaatatatatgcacccaatacaggagcacccagattcataaagcaagtcctgagtgacctacaaagagacttagactcccacacatttataatgggagactttaacaccccactgtcaacattagacagatcaaggagacaggaagtcaacaaggatacccaggaattgaactcagctctgcaccaagcagacctaatagacatctacagaactctccaccccaaatcaacagaatatacatttttttcagcaacacaccacacctattccaaaattgaccacatagttggaagtaaagctgtcctcagcaaatgtaaaagaacagaaattataacaaactatctctcagaccacagtgcaatcaaactagaactcaggattaagaaactcactcaaaaccgctcaactacatggaaactgaacaacctgctcctgaatgactactgtgtacataacgaaatgaaggcagaaataaacatgttctttgaaaccaacgagaacaaagacacaacataccagaatctctgggacacattcaaagcaaaatacaagctaccatcagagaatactacaaacaacctctacacaaataaactagaaaatctagaagaaatggataaattccttgacacatacactctcccaagactaaaccaggaaaaagttgaatctctgaatagaccaataacaggatctgaaattgtggcaataatcaatagcttaccaaccaaaaagagtccaggaccagatggattcacagctgaattctaccagaggtacaaggaggagctggtaccattccttctgaaactattccaatcaatagaaaaagagggaatcctccctaactcattttatgaggccagcatcatcctgataccaaagccgggcagagacacaaccaaaaaagagaactttagaccaatatccttgatgaacattgatgcaaaaatcctcaataaaatactggcaaaccgaatccagcagcacatcaaaaagcttatccaccatgatcaggtgggcttcatccctgggatgcaaggctggttcaatatatgcaaatcaataaatgtcatccagcatataaacagaaccaaagacaaaaaccacatgattatctcaatagatgcagaaaaagcctttgacaaaattcaacaacccttcaggctaaaaactctcaataaattaggtgttgatgggacgtatctcaaaataataagagctatctatgacaaacccacagccaatatcatactgaatgggcaaaaactggaagcattccctttgaaaactggcacaagacagggatgccctctctcaccactcctattcaacatagtgttggaagttctggccagggcaattaggcaggagaaggaaataaagggatgtgaaggacctcttcaaggagaactacaaaccactgctcaaggaaataaaagaggatacaaacaaatggaagaacattccatgctcatgggtaggaagaatcaatatcatgaaaatggtcatactgcccaaggattcaacgtgggcagaagtgctggtgggagatcgacggtcagggagattaaccgagatgcttgtcattttcctggttttccagtccttcagtcattccttcctaaacacactaatgtccctgccctctattttctcctcatggccttgtttctgcagcagccagttagtgagctgcctgagaacctgcaggtcagtgtgcctgtcatcagctgccggagtaagcagggttgccagccttggcaatcagaagaagagggatcttggctccgagaatatcctgtgaccctgatgcagttcttcagatatttgtatcacaacgtgccagaccttgcctccatgtggatgagccctgacttcctgtgtgcattagcagccaccgtcttccccttcaatattcgcccttactcagagatggtgactgaccttgatgatgaagttggatctccagcagaagagtttaaagcgtttgcagcagacacagggatgaacaggagccaatcagagtactgcaatgtgggcaccaagacatatctgaccaatcacccggctaaaaagttcgtttttgacttcatgcgggtcttaatcatagacaacctctgtctcactcctgccagcaagcaaactccactaattgatcttttgttggagcgtcagcagaatgccctgaagtacgtgacagaagagtggtgtcagatcgagtgcgagctgttgagggagcgggggctgtggggccctcccatcggctcccacctcgacaagtggatgctggagatgacagaagggccctgcaggatgaggaaaaagatggtgcgaaatgatatgttttataaccattacccttacgtgccagaaactgagcaagagacaaatgtggcgtctgagatcccaagtaaacagcctgagacacccgatgatattcctcaaaagaaacctgctcgatatagaagagccgtaagttatgacagtaaagagtactacatgcgactggcctctggcaatcccgccattgtccaagacgccattgtggagagttcagaaggtgaagctgctcagcaagaaccagagcatggggaagacactattgctaaagtcaaaggtttggtcaagcctcctctaaaacgctcccgatctgcacctgatggaggagatgaggagaaccaggagcagctacaagaccagattgctgagggcagctccatagaagaggaggagaaaacagataatgctaccttactgcgcctgttagaggaaggagaaaagatccaacacatgtaccgctgtgctcgagtccagggcctagataccagtgaggggctccttctttttggtaaagagcatttttatgtgattgatggatttaccatgacagcaaccagggaaataagagatattgaaaccttacctccaaatatgcatgagcctattattcctagaggagccaggcaaggccctagtcaactcaagagaacatgcagcatttttgcatatgaagatatcaaggaagttcataaaaggagatatctcctgcagtacagtaatattacccgtgagcacctgggaaatgagggtggttcttcaaataaagggcctgtggatgttgattggtttttggctgtagtgccatctctaacggacagttcagaatctgtatctgggcaacgaccaaacacgagtgtggagcagggatctgggttacttagcactttggttggagagaagtctgtgactcagagatgggagagaggtgaaatcagcaacttccaatatttgatgcatttgaacactttggctggcagatcatataatgatctcatgcagtatcctgtcttcccctggatccttgcagattatgactcagaggaggtggatcttactaatcccaagacgtttagaaacctggctaagccaatgggagcacaaacagatgaacgattagctcagtataagaagcggtataaagactgggaggatcctaatggagaaactcctgcataccactatgggacccactattcatctgcaatgattgtggcctcataccttgtaaggatggagcctttcacacagatattcttaaggctacagggtggccactttgacctggctgaccggatgtttcacagtgtgcgcgaggcctggtattcagcgtcaaagcacaatatggcagatgtaaaagaacttatcccagagttcttttatttaccagaattcctgttcaattccaacaactttgatctaggctgtaaacaaaatggcaccaagcttggagatgttatccttccaccctgggcaaaaggggacccacgagaattcatcagagtccatcgtgaggctttggagtgtgattacgtgagtgcccatctacatgagtggattgacttaatcttcggttataaacagcaaggccctgctgcagtagaagctgtaaatgtcttccatcatcttttttatgagggtcaagtggatatctacaacatcaatgacccactaaaggagacagccacaattgggttcattaataacttcggtcagatccctaaacag

SEQ ID NO: 2327 - DNA, 3534 bp, Homo sapiens
  SIMILAR (1)..(1566): 941254mologous to Homo sapiens putative p150,accession number U93563,Smith-Waterman Score=2537.
atggtaaagggatcaattcaacaagaagagctaactatcctaaatacatatgcagcccatacaggagcaccaagactcataaagcaagtcctgagtgacctacaaagagacttagactcccacacaataataatgggagactttaacaccccactgtcaacattagacagatcaacgagacagaaagttaacaaggatacccaggaattgaagtcagctctgcaccaagcggacctaacagacatctacagaactctccaccacaaatcaacagaatatacatttttttcagcaccacaccacatctattccaaaattgaccacatactgggaagtaaagctctcctcagcaaatgtaaaagaacagaaattataacaaactatctctcagaccacagtgcaatcaaactagaactctggattaagaatctcactcaaaaccactcaactacatgggaactgaacaacctgctcctgaatgactactgggtacataacgaaatgaaggcagaaataaagatgttctttgaaaccaatgagaacaaagacacaacataccataatctctgggacacattcaaagcagtgtgtagagggaaatttataccactaaatgcccacaagagaaagcaggaaagatccaaaattgacaccctaacatcacaattaaaagaactagaaaagcaagagcaaacacattcaaaagctagcagaaggcaagaaataactaaaatcagagcagaactgaaggaaatagagacacaaaaaacccttcaaaaaattaatgaatccaggagctggttttttgaaaggatcaacaaaattgatagactgctagcaagactaataaagaaaaaaagagagaagaatcaaatagatgcaataaaaaatgataaaggagatatcaccaccgatcccacagaaatacaaactaccatcagagaatactgcaaacacctctatgcaaataaactagaaaatctagaagaaatggataaattcctggacacatacactctcccaagactaaaccaggaagaagttgaatctctgaatagaccaataacaggagctgaaattgtggcaataatcaatagcttaccaaccaaaaagagtccaggaccagatggattcacagccaaattctaccagaggtacaaggaggaactggtaccattccttctgaaactattccaatcaatagaaaaagagggaatcctccctaactcattttatgaggccagcatcattctgataccaaagccaggaagagacacaacaaaaaaagagaattttagaccaatatccttgatgaacattgatgcaaaaatcctcaataaaaaactggcaaaacgaatccagcaacacatcaaaaagcttatccaccatgatcaagtgggcttcatccctggaatgcaaggctggttcaatatacgcaaatcaataaatgtaatccagcatataaacagagccaaagacaaaaaccatatgattatctcaatagatgcagaaaaagcctttgacaaaattcaacaacccttcatgctaaaaactctcaataaattagagaataaaatacctaggaatccaccttacaagggatgtgaaggacctcttcaaggagaactacaaaccactgctcaaggaaataaaagaggatacaaacaaatggaagaacattccatgctcatgggtaggaagaatcaatatcgtgaaaatggccatactgcccaagaacattttgatcacccttcagcttcttttagttctcccagaactctccacattgatcccactctggctaccagcactagctggacagtaatgactctcagaggtgaacacaatatgcctcaacatgcctttctggaagttcacataggaactgcacagcacctgaattccagttctgcaaagctcttctctgaatactggagtatatccctttggagtgccccggggaaagccagggctgcaggcagttccagcaccaactcagaccgcatctgcccactgcctagcggggcacttctctaccaatccgaagggctgctcgcccggcctcacgggaaaggtagtttccaggtagggcgccaacagcatcaagctgtgcgcgtgggctctgcgcatgcctcgtccgccggctacgtctgcgtttccgcctttccttttgtttttctcaggttttgcgtgggaggcggtcccgggatttcaagggtctacgcgcttttctatggcgaatgcaacccgacgagggagtgggctgtatcttcagagttgtctccgtctttccaagaacagaacaaaatgaacaaggtagaacagaagtcccaggagtcagtatcatttaaagatgtgactgtgggcttcacccaggaggagtggcagcacctggaccctagtcagagggctctgtatagagatgtgatgctggagaactacagcaaccttgtctcagtggggtattgtgttcacaaaccagaggtgatcttcaggctgcaacaaggagaagagccatggaaacaggaggaagaattcccaagccaaagctttccagactatatgttcatgtctccccagaattcatatgttggagccctcaccccaagtgtggtggtgtttggagatatgcagcccttggcagtacatcagagaattcacacaggggagaaaccctatgaatgtaatcaatgtggaaaaaccttcataagcaactctgttctcacaatacatcgtaaaacatatacaggtgagaaaccctatgaatgtaatgaatgtgggaaatctttctctaggagttcatatcttacaatacatcagagaactcacccaggcgagaaaccctatgaatgtaaggtatgtagcaaaaccttttgccacaagtctgatgccactaaacatcagaagactcacctagggggaaaaccctatgaatgtactcaatgtgggaaaacttttagtcgtaactcaggcctaaaagtacatcagagaacacatgcaaaggagaaaccctatgaatatactgagtgtgggaaatccttctctgagaaatcagtcctcacagtacatcagagaatacacacaggggaaaaaccttataaatgtaatgcacgtggaaaaaccttctacaataaatcagacctaaccaaacatcagagaacacacacaggtgagaagccctgtgaatgtaaggaatgtgggaaattcttctctaggaattcataccttacaatacaccagagaatgcatacaggagacaaaccctatgtgtgtaaaaaatgtgggaaaaccttctaccataaggcagactatacagtacataagagaacacacagaggggagaaatcttattactgtaataaatgtgggaaaacctttatttgcaactcagtcctcaaatcacatcagagaacacacacaggggagaagccctatggatgtaatgagtgtgggaagtccttctctgagaaatcagtccttactgtacatcagagaatacacacaggggaaaaaccttataaatgtaatgaatga

SEQ ID NO: 2328 - DNA, 3405 bp, Homo sapiens
  SIMILAR (406)..(2223): 881254mologous to Homo sapiens putative p150,accession number U93563,Smith-Waterman Score=2743.
atggagctgaaagccaaggctcgagaactacatgaagaatgcagaagcctaaggagccaatgcaatcaactggaagaaagggtatcagtgatggaagatgaaatgaatgaaatgaagcgagaagggaagtttagagaaaaaagaataaaaagaaacaaacaaagcctccaagaaatatgggactatgtgaaaagaccaaatctacgtctgattggtgtacctgaaagtgacggggagaatggaaccaagttggaaaacactctgcaggatattatccaggagaacctccccagtctagcaaggcaggccaacattcagattcaggaaatacagagaatgccacaaagatactcctcgagtagagcaactccaagacacataattgtcagattcaccaaagttgaaatgaaggaaaaaaatgtaaagtgcagccggagagaaagagacacacataggctcaaaataaaaggatggaggaagatctaccaagcaaatggaaaacaaaaaaaggcaggggttgcaatcctagtctcggataaaacagactttaaaccaacaaagatcaaaagagacaaagaaggcctttacataatggtaaagggatcaattcaacaagaagagctaactatcctaaatatatatgcacccaatacaggagcacccagattcataaagcaagtccttagagacctagaaagagacttagactcccacacaataataatgggagactttaacaccccactgtcaacattggacagatcaacaagacggaaagttaacaaggatatccaggaattgaactcagctctgcaccaagaggacctaatagacacctacagaactctcctccccaaatcaacagaatatacattcttctcagcaccacaccacacctattccaaaattgaccacatagttggaagtaaagctctcctcaggaaatgtaaaagaacagaaattttaacaaactgtctctcagaccacagtgtaatcaaactagaactcaggattaagaaactcactcaaaaccgctcaactacatggaaaatgaacaacctgctcctgaatgactactgggtacataacgaaatgaaggcagaaataaagatgttctttgaaaccaatgagaacaaagacacaacataccagaatctctgggacacattcaaagcagtgtgtagagggaaatttatagcactaaatgcccacaagagaaagcaggaaagatccaaaattgacaccctaacatcacaattaaaagaactagaaaagcaagagcaaacacattcaaaagctagcagaaggcaagaaataactaagatcagagcagaactgaaggaaatagagacacagaaaacccttcaaaaaattaatgaatccaggagctggatcaacaaaattgatagaccgctggcaagactaataaagaaaaaaagagagaagaatcaaatggacgcaataaaaaatgataaaggggatatcaacaccgatcccacagaaatacaaactaccatcagagaatactacaaacaactctatgcaaataaactagaaaatctagaagaaatggataaattcctggacacatacactctcccaagactaaaccaggaagaagttgaatctctgaatagaccaataacaggctctgaaattgtgccaataattaatagtttaccaaccaaaaagagtccaggaccagatggattcacagccgaattctaccagaggtacaaggaggaactggtaccattccttctgaaactattccaatcaatagaaaaagagggaatcctccctaactcattttatgaggccagcatcatcctgataccaaagcctggcagagacacaaccaaaaaagagaattttagacaaatatccttggtgaacattgatgcaaaaatcctcaataaaatactggcaaaccgaatccagcagtacatcaaaaagcttatccaccatgatcaagtgggcttcatccctgggatgcaaggctggttcaatatacacaaatcaataaatgtaatccagcgtataaacagaaccaaagacaaaaaccacatgatgatctcaatagatgcagaaaaggcctttgataaaattcaacaacgcttcatgctaaaaaccctcaataaattagtgttggaagttctggccagggcaattaggcaggagaaggaaataaagggtattcaattaggaaaagaggaagtcaaattgtccctgtttgtggatgacatgattgtatatttagaaaaccccattgtctcagctcaaaatctccttaagctgataagcaacttcagcaaagtctcaggacacaaaatcagtgtacaaaaatcacaagcattcttatacgccgataacagacaaacagagagcgaaatcatgagtgaagtcccattcacaattgcttcaaagagaataaaatacctaggaatccaacttacaaaggacgtgaaggacctcttcaaggagaactacaaaccactgctcaatgaaataaaagaggatacaaacaaatggaagaacattccacgctcatgggtaggaaggatcaatatcgtgaaaatggccatactgcccaaggtaatttatagattcaatgccatccccatcaagcaaccaatgactttcttcacagaattggaaaaaactactttaaagttcatatggaaccaaaaaagagccagcatcaccaagtcaatcctaagcctaaagaacaaagctggaggcatcatgctacctgacttcaaactatactacaaggctacagtaaccaaaacagcatggtactggtaccaaaacagagatatagatcaatggaacagaatagagccctcagaaataatgccgcatatctacaagtatctgatctttgacaaacctgagaaaaacaagcaatggggaaaggattccctacttaataaatggtgctgggaaaactggctagccgtatgtagaaagctgaaactggatctcttccttacaccttatacaaaaattaattcaagatggattaaagacttaaacgttacacctaaaaccataaaaaccctagaagaaaacctaggcattaccattcaggacataggcaaggacttcatgtctgaaacaccaaaagcaatggcaacaaaagccaaaattgacaaatgggatctaattaaactaaagagcttctgcacagctaaagaaactaccatcagagtgaccaggcaacctacaaaatgggagaaaatttttgcaacctactcatctgacaaagggctaatatccagaatctacaatgaactccaacaaatttacaagaaaaaaacaaacaaccccatcaaaaagtgggcgaaggacatgaacagacacttctcaaaagaagacatttatgcagccaaatacacatga

SEQ ID NO: 2329 - DNA, 3555 bp, Homo sapiens
  SIMILAR (115)..(2046): 881254mologous to Homo sapiens putative p150,accession number U93563,Smith-Waterman Score=2887.
atggagctgaaaaccaaggctcgagaactacatgaagaatgcagaagcctcaggagccgatgcgatcaactggaagaaagggtatcagcaatggaagatgaaatgaatgaaatgaaagacacacataggctcaaaataaaaggatggaggaagatctaccaagccaatggaaaacaaaaaaaggcaggggttgcaatcctagtctctgataaaacagactttaaaccaacaaagatcaaaagagacaaagaaggccattacttaatggtaaagggatcaattcaacaagaagagctaactatcctaaatatatatgcacccaatacaggagcaccaagattcataaagcaagtcctgaccgacctacaaagagacttagactcccacacattaataatgggagactttaacaccccactgtcaacattagacagatcaacgagacagaaagtcaacaaggatacccaggaattgaactcagctctgcaccaagcggacctaatagacatctacagaactctccaccccaaatcaacagaatatacatttttttcagcaccacaccacacctattccaaaattgaccacatactgggaagtaaagctctcctcagcaaatgtcaaagaacagaaattataacaaactatctctcagaccacagtgcaatcaaactagaactcaggattaagaatctcactcaaaaccactcaactacatggaaactgaacaacctgctcctgaatgactactgggtacataacgaaatgaaggcagaaataaagatgttctttgaaaccaatgagaacaaagacacaacataccagaatctctgggacgcattcaaagcagtgtgtagagggaaatttgtagcactaaatgcccacaagagaaagcaggaaagatccaaaattgacaccctaacatcacaattaaaagaactagaaaagcaagagcaaacacattcaaaagctagcagaaggcaacaaataactaaaatcggagcagaactgaaggaaatagagacacaaaaaacccttcaaaaaattaatgaatccaggagctggttttttgaaaggatcaacaaaattgatagaccactagcaagactaataaagaaaaaaagagagaagaatcaaatagatgcaataaaaaatgataaaggggatatcaccaccgatcccacagaaatacaaactaccatcagagaatactacaaacacctctatgcaaataaactagaaaatctagaagaaatggataaattcctcaacacatacactctcccaagactaaaccaggaagaagttgaatctctgaatagaccaataacaggatctgaaattgtggcaataatcaatagcttacgaaccaaaaagagtccaggaccagatggattcacagccgaattctaccagaggtacaaggaggaactggtaccattccttctgaaacaattccaatcaatagaaaaagagggaatcctccctaactcattttatgaggccagcatcatcctgataccaaagcctggcagagacacaaccaaaaaagagaattttagaccaatgtccttgatgaacattgatgcaaaaatcctcaataaaatactggcaaacggaatccagcagcacatcaaaaagcttatccaccatgatcaagtgggcttcatccctgggatgcaaggctggttcaatatacgcaaatcaataaatgtaatccagcatataaacagagccaaagacaaaaaccacatgattatctcaatagatgcagaaaaagcctttgacaaaattcaacaacccttcatgctaaaaactctcaataaattagcccaaaatctccttaagctgataagcaacttcagcaaagtctcaggatacaaaatcaatgtgcaaaaatcacaggtattcttatacaccaataacagacaaacagagagccaaatcatgagtgatctcccattcacaattgcttcaaagagagtaaaatacctaggaatccaacttacaatggatgtgaaggacctctccaaggagaactacaaaccactgctcaaggaaataaaagaggatacaaacaaatggaagaacattccatgctcatgggtaggaagaatcagtatcgtgaaaatggccatactgcccaaggtaatttacagattcaatgccatccccatcaagctaccaatgactttcttcacagaattggaaaaaactactttaaagttcatatggaaccaaaaaagagcctgcatcgccaagtcaatcctaagccaaaagaacaaagctggaggcatcacactacctgacttcaaactatactacaaggctacagtaaccaaaacagcatggtactggtaccaaaacagagatatagatcaatggaacagaacagagccctcagaaataatgccacatatctgcaactatctgatctttgacaaacctgagaaaaacaagcaatggggaaaggattccctatttaataaatggtgctgggaaaactggctagccatatgtagaaagctgaaactggatcccttccttacaccttatacaaaaatcagttcaagatggattaaagacttaaacgttagacctaaaaccataaaaaccctagaagaaaacctaggcattaccattcaggacataggcatgggcaaggacttcatgtctaaaacaccaaaagcaatggcaacaaaagccaaaattgacaaatgggatctaattaaactaaagagcttctgcacaacaaaagaaactaccatcagagtgaacaggcaacctacaaaatgggagaaaattttcgcaacctactcatctgacaaagggctaatatccagaatctacaatgaactcaaacaaatttacaagaaaaaaacaaacaatcccatcaaaaagtgggcaaaggacatgaagagacacttctcaaaagaagacatttatgcagccaaaaaacacatgaaaaaatgctcatcatcactggccatcagagaaatgcaaatcaaaaccacaatgagataccatctcacaccagttagaatggcaatcattaaaaagtcaggaaacaacaggtgctggagaggatgtggagaaataggaacccttttacactgttggtgggactgtaaactagttcaaccattgtggaagtcagtgtggcgattcctccgggatctagaactggaaataccatttgacccagccatcccattactgggtatatacccaaaggactataaatcatgctgctataaagacacatgcacacgcagaccagattttttggaccatgaaaagggcctagaccctgtgttccagaaacaaagattattaagagataaaggaaaacactgtagaagaatggtcaccaaagatggccacaccctagtctctggaacttgtggatatgttgtcttacatggcaaaaggaactttagaggtggtgttaaaattattgacattaatatatggagattattgagtgggctcaatgtgaatgtgtgggcctttaaaagtggaagagaagggcagagcagcaagtcagaaagataa

SEQ ID NO: 2330 - DNA, 3786 bp, Homo sapiens
  SIMILAR (1018)..(2883): 951254mologous to Homo sapiens putative p150,accession number U93572,Smith-Waterman Score=3127.
atggtaaagggatcaattcaacaagaagagctaactatcctaaatatctatgcacccaatacaggagcacccagattcataaagcaagtcctgagtgacctacaaagagacttagactcccacacattaataatgggagactttaacaacccactgtcaacattagacagatcaatgagacagaaagtcaacaaggatacccaggaattgaactcagctctgcaccaagtggacctaatagacatctacagaactctccaccacaaatcaacagaatatagatttttttcagcaccacaccacacctattccaaaattgaccacatacttggaagtaaagctctcctcagcaaatgtaaaaggacagagattataacaaactatctctcaggccacagtgcaatcaaactagaactcaagattaagaatctcactcaaaaccgctcaactacatggaaactgaacaacctgctcctgaatgactactggatacataacgaaatgaaggcagaaataaagatgttctttgaaaccaatgagaacaaagacacaacataccagaatctctgggatgcattcaaagcagtgtgtagagggaaatttatagcactaaatgcccacaagagaaagcaggaaagatccaaaattgacaccctaacatcacaattaaaagaactagaaaagcaagagcaaacacattcaaaagctggcagaaagaaagaaataactaaaatcagagcacaactgaaggaaatagagacacaaaaaacccttaaaaaattaatgaatccaggagctgaaatacaaactaccatcagagaatactacaaacacctctatgcaaagaaactagaaaatctagaagaaatggataaattcctcgacacatacactctcccaagactaaaccaggaagaagttgaatctctgaatagaccaataacaggagctgaaattgtggcaataatcaatagtttaccaaccaaaaagtccaggaccagatggattcacagccgaattctaccagaggaggccagcatcattctgataccaaagccgggcagagacacaaccaaaaaagagaattttagaccaatatccttgatgaacattgatgcaaaaatcctcaataaaatactggcaaaacgaatccagcagcacatcaaaaagcttatccaccatgatcaagtgggcttcatccctgggatgcaaggctggttcaatatacacaaatcaataaatgtaatccagcatataaacagagccaaagacaaaaaccacataattatctcaatagatgcagaaaaagcctttgacaaaattcaacaacccttcatgctaaaaactctcaataaattaggtattgatgggacatatttcaaaataataagagctatctatgacaaacccacagccaatatcatactgaatgggcaaaaactggaagcattccctttgaaaactggcacaagacagggatgccctctctcaccactcctattcaacatagtgttggaagttctggccagggcaattaggcaggagaaggaaataaagggtattcaattaggaaaagaggaagtccaattgtccctgtttgcagatgagatgattgtatatctagaaaaccccattgtctcagcccaaaatctccttaagctgataagcaacttcagcaaagtctcaggatacaaaatcaatgtacaaaaatcacaagcattcttatacaccaacaacagacaaacagagagccaaatcatgagtgaactcccattcacaattgcttcaaagagaataaaatacctaggaatccaacttacaagggatgtgaaggacctcttcaaggagaactgcaaaccactgctcaatgagataaaagaggatacaaacaaatggaagaacattccatgctcatgggtaggaagaatcaatatcatgaaaatggccatactgcccaaggtaatttatagatttaatgccatccccaccaagccaccaatgactttcttcacagaattggaaaaaactactttaaagttcatatggaaccaaaaaagagcccgcatcgccaagtcaattctaagccaaaagaacaaagctggaggcatcacactacctgacttcaaactatactacaaggctacagtaaccaaaacagcatggtactggtaccaaaacagagatctagatcaatggaacagaacagagccctcagaaataacgccgcatatctacagctatctgatctttgacaaacctgagaaaaacaagcaatggggaaaggattccctatttaataaatggtgctgggaaaactggctacccatatgtagaaagctgaaactggatcccttccttacaccttatacaaaaatcaattcaagatggattaaagacttaaatgttagacctaaaaccataaaaaccctaaaagaaaacctaggcattaccattcaggacataggcatgggcaaggacttcatgtctaaaacaccaaaagcaatggcaacaaaagacaaaattgacaaatgggatctaattaaactaaagagcttctgcacagcaaaagaaactaccatcagagtgaacaggcaacctacaaaatgggagaaaattttcgcaacctactcatctgacaaagggctaatatcaagaatctacaatgaactcaaacaaatttacaagaaaaaaacaaacaaccccatcaacaagtgggtgaaggacatgaacagacacttctcaaaagaagacatttatgcagccaaaaaacacatgaaaaaatgctcatcatcactggccatcagagaaatgcaaatcaaaaccacaatgagataccatctcacaccacttagaatggcgatcattaaaaagtcaggaaacaacagtgccagccccactgccaggaacaagacagccaggaatcagaggaccaagatgatagcagtgacggccccccgaaacagggctccactggagctggagctgattctgtaccggcaaaacagacagagtaaaactcatattttggaaacaaacaatacatcagctgagcttctggttccatttgaagaagactacttaattgaaataagaacagtcagtgatggtggagatggaagcagcagtgaggaaattaggattccaaaaatgtcaatgattgatcacattctgcccaagtcaattccagaagaactgcagaatggggagggatttggatatatcatcatgttccggccagtgggctcgacaacctggtccaaggagaaagtgtcatctgtggaatcatcaaggtttgtctacagaaatgaaagcatcatcccactgtctccctttgaagtcaaagtgggtgtgtataataatgaaggagaaggatccctgagtactgtgaccattgtctactctggggaagatgatggttatgtctttctctggatggtagaacctcaactggccccaaggggaacttctctccagagtttttctgcttctgaaatggaggtttcatggaatgctattgcctggaatagaaacactggaagagtgctgggctatgaggtcttatactggacagatgactccaaagaatccatgataggtaaaattagagtcagtggaaatgtcacaaccaaaaacatcacggggctgaaagctaataccatctactttgcttccgtaagagcttacaacactgctgggacagggccctcaagccccccagtcaatgttaccaccaaaaagtctcgataccttattactacagcttacttggaagtccctgaaatctaa

SEQ ID NO: 2331 - DNA, 3414 bp, Homo sapiens
  SIMILAR (724)..(2931): 901254mologous to Homo sapiens unknown,accession number AF148856,Smith-Waterman Score=3475.
atggtaaagggatcaattcaacaagaagagctaactatcctaaatatctatgcacccaatacaggagcacccagattcataaagcaagtcctgagtgacctacaaagagacttagactcccacacattaataatgggagactttaacaacccactgtcaacattagacagatcaatgagacagaaagtcaacaaggatacccaggaattgaactcagctctgcaccaagtggacctaatagacatctacagaactctccaccacaaatcaacagaatatagatttttttcagcaccacaccacacctattccaaaattgaccacatacttggaagtaaagctctcctcagcaaatgtaaaaggacagagattataacaaactatctctcaggccacagtgcaatcaaactagaactcaagattaagaatctcactcaaaaccgctcaactacatggaaactgaacaacctgctcctgaatgactactggatacataacgaaatgaaggcagaaataaagatgttctttgaaaccaatgagaacaaagacacaacataccagaatctctgggatgcattcaaagcagtgtgtagagggaaatttatagcactaaatgcccacaagagaaagcaggaaagatccaaaattgacaccctaacatcacaattaaaagaactagaaaagcaagagcaaacacattcaaaagctggcagaaagaaagaaataactaaaatcagagcacaactgaaggaaatagagacacaaaaaacccttaaaaaattaatgaatccaggagctgaaatacaaactaccatcagagaatactacaaacacctctatgcaaagaaactagaaaatctagaagaaatggataaattcctcgacacatacactctcccaagactaaaccaggaagaagttgaatctctgaatagaccaataacaggagctgaaattgtggcaataatcaatagtttaccaaccaaaaagtccaggaccagatggattcacagccgaattctaccagaggtacaaggaggaactgaaaaagagggaatcctccctaactcattttatgaggccagcatcattctgataccaaagccgggcagagacacaaccaaaaaagagaattttagaccaatatccttgatgaacattgatgcaaaaatcctcaataaaatactggcaaaacgaatccagcagcacatcaaaaagcttatccaccatgatcaagtgggcttcatccctgggatgcaaggctggttcaatatacacaaatcaataaatgtaatccagcatataaacagagccaaagacaaaaaccacataattatctcaatagatgcagaaaaagcctttgacaaaattcaacaacccttcatgctaaaaactctcaataaattaggtattgatgggacatatttcaaaataataagagctatctatgacaaacccacagccaatatcatactgaatgggcaaaaactggaagcattccctttgaaaactggcacaagacagggatgccctctctcaccactcctattcaacatagtgttggaagttctggccagggcaattaggcaggagaaggaaataaagggtattcaattaggaaaacaggaagtccaattgtccctgtttgcagatgagatgattgtatatctagaaaaccccattgtctcagcccaaaatctccttaagctgataagcaacttcagcaaagtctcaggatacaaaatcaatgtacaaaaatcacaagcattcttatacaccaacaacagacaaacagagagccaaatcatgagtgaactcccattcacaattgcttcaaagagaataaaatacctaggaatccaacttacaagggatgtgaaggacctcttcaaggagaactgcaaaccactgctcaatgagataaaagaggatacaaacaaatggaagaacattccatgctcatgggtaggaagaatcaatatcatgaaaatggccatactgcccaaggtaatttatagatttaatgccatccccaccaagccaccaatgactttcttcacagaattggaaaaaactactttaaagttcatatggaaccaaaaaagagcccgcatcgccaagtcaattctaagccaaaagaacaaagctggaggcatcacactacctgacttcaaactatactacaaggctacagtaaccaaaacagcatggtactggtaccaaaacagagatctagatcaatggaacagaacagagccctcagaaataacgccgcatatctacagctatctgatctttgacaaacctgagaaaaacaagcaatggggaaaggattccctatttaataaatggtgctgggaaaactggctacccatatgtagaaagctgaaactggatcccttccttacaccttatacaaaaatcaattcaagatggattaaagacttaaatgttagacctaaaaccataaaaaccctaaaagaaaacctaggcattaccattcaggacataggcatgggcaaggacttcatgtctaaaacaccaaaagcaatggcaacaaaagacaaaattgacaaatgggatctaattaaactaaagagcttctgcacagcaaaagaaactaccatcagagtgaacaggcaacctacaaaatgggagaaaattttcgcaacctactcatctgacaaagggctaatatcaagaatctacaatgaactcaaacaaatttacaagaaaaaaacaaacaaccccatcaacaagtgggtgaaggacatgaacagacacttctcaaaagaagacatttatgcagccaaaaaacacatgaaaaaatgctcatcatcactggccatcagagaaatgcaaatcaaaaccacaatgagataccatctcacaccacttagaatggcgatcattaaaaagtcaggaaacaacagtgccagccccactgccaggaacaagacagccaggaatcagaggaccaagatgatagcagtgacggccccccgaaacagggctccactggagctggagctgattctgtaccggcaaaacagacagagtaaaactcatattttggaaacaaacaatacatcagctgagcttctggttccatttgaagaagactacttaattgaaataagaacagtcagtgatggtggagatggaagcagcagtgaggaaattaggattccaaaaatgtcaacagggggtgaggagggcatggctgctgtctttaaaaacaaatgcagatgttcatggtctcgggtggtcatagcctatcacagcagctcagggaaccagatgggaaccaaccctgaacaggaccctggacagcatgccatcccattggagggtacactcacacacacccgcactcactcagactgggaccatttggacacagcaatgaactga

SEQ ID NO: 2332 - DNA, 5130 bp, Homo sapiens
  SIMILAR (2614)..(4473): 941254mologous to Homo sapiens putative p150,accession number U93572,Smith-Waterman Score=3044.
atgctgttttgggcctttgacaaaattcaacagcccttcatgctaaaaactctcaataaattaggtattgatgggacgtatctcaaaataataagagctgtttatgacaaacccacagccaatatcatactgaatgggcaaaaactggaagcattccctttgaaaactggcacaagacagggatgccctctctcaccactcctattcaacatagtgttggaagttctggccagggcaatcaggcaggagaaggaaataaagggcattcaattaggaaaagaggaagtcaaattgtccctgtttgcagatgacatgattgtatatctagaaaaccccatcatctcaacccaaaatctccataagctgataagcaacttcagcaaagtctcaggatacaaaaacaatgtgcaaaaattacaagctttcttatacaccaataacagacaaacagagagccaaatcatgagtgaactcccattcacaattgcttcaaagagaataaaatacctaggaatccagcttacaagggatgtgaaggacctcttcaaggagaactacaaaccactgctcaaggaaataaaagaggatacaaacaaatggaagaacattccatgctcatggataagaagaatcaatattgtgaaaatggccatactccccaagaggactccattattatcgctgcctagtacattatatgaggagctgtggagacttaggtcctacttcccattgtgccctcaactttacaacatggagcagaataccacagactgggtaatttataaagaacagtgcatttggctcacagctctggagactggggagtccaagagcactgcaccagcatttggcaagggttatcccatggcagaatacatcatatggggcagattgacacctcacatggctggctactcctctgagacaaaacttccagaggaacgatcaggcagcaacatctgctgttcaccaatatccgctgttctgcagcctctgctgctgatacccaggcaaacagggtctggagtggacctccagcaaactccaacagacctgcagctgagggtcctgactgttagaaggaaaactaacaaacagaaaggacatccacaccaaaaccccatctgtacgtcaccatcatcaaagaccaaaggatcaaattcacacataacaatattaaccttaaatgtaaatgggctaaatgctccaattaaaagacacagactggcaaattggataaagagtcaagacccatcagtgtgctgtattcaggagacccatctcacgtgcagagacacacacaggatcaaaataaagggatggagggagatctaccaagcaaatggaaaacaaaaaaaggcaggggttgcaatcctagtctctgataaaacggactttaaaccaacaaagatcaaaagagacaaagaaggccattacatgatggtaaagggatcaattcaacaagaagagctaactaccctaaatatatatgcacccaatacaggagcacccagattcataaagcaagtccttagagacctacaaagagacttagactcccacacattaataatgggagactttaacaccccactgtcaacattagacagatcaacgagacagaaagttaacaaggatatccaggatttgaactcagctctgcaccaagtggacctaatagacatctacagaactctccaccccaaatcaacagaatatacattcttctcagcactacaccacatttattccaaaattgaccacatagttggaagtaaagcactcctcagcaaatataaaacaacagaaattataacaaactgtctctcagaccacagtgcaatcaaactcgaactcaggattaagaaactcactcaaaaccgctcaactacatggaaactgaacaacctgctcctgaatgactactgggtacataacaaaatgaaggcagaaataaatacattatttgaaaccaacgagaacaaagacacaacataccagaatctctgggacacattcaaagcagtgtgtagagggaaattcatagcactaaatgcccacaagagaaagcaggaaagatctaaaattgacaccctaacatcacaattaaaagaactagagaagcaagaacaaacacattcaaaagctagcagaaggcaagaaataactaagatcagagcaaaactgaaggaaatagagacacaaaaaatccttcaaaaaatcaatgaatccaggagctggttttttgaaaagatcaacaaaattgatagaccactagcaagaccaataaagaagaaaagagagaagaatcaaatagatgcaataaaaaatgataaaggggatatcaccactgatcccacagaaatacaaactaccatcagagaatactataaacacctctatgcaaataaactagaaaatctagaagaaatggataaattcctcaacacatacaccctcccaagactaaaccaggaagaagttgaatctctgaataaaccaataacaggctctgaaattgaggcaataattaatagcttaccaatcaaaaaaagtccaggaccagatggattcatagccaaattccaccagaggtacaaggaggagctggaggccagcatcatcctgataccaaagcctggcagagacacaaccaaaaaagagaattttagaccaatacccctgatgaatattgatgcaaaaatcctcaataaaatactggcaaaccgaatccagcagcacatcaagaagcttatccaccatgatcaagtgggcttcatccctgggatgcaaggctcgttcaacatatgcaaatcaataaacgtaatccaggatataaacagaacgaatgacaaaaaccatatgattatctcaatagatgcagaaaaggcctttgacaaaattcaacaacccttcattctaaaaactctcaataaattaggtattgatgggacgtatctcaaaataataagagctatctatgacaaacccacagccaatatcatactgaatgggcaaaaactggaagcattccctttgaaaactggcacaagacaggggtgccctctctcaccactcctattcaacatagtgttggaagttctggccagggcaatcaggcaggagaaggaaataaagggcattcaattaggacaagaggaagtcaaattgtccctgtttgcagatgacatgattgtatatcgagaaaaccccatcgtctcaacccaaaatctccataagctgataagcaacttcagcaaagtctcaggatacaaaatcaatgtgcaaaaatcacaagcatttttatacaccaataacagacaaacagagagccaaatcatgagtgaactcccattcacaattgcttcaaagagaataaaatacctaggaatccaacttacaagggatgtgaaggatctcttcaaggagaactacaaaccactgctcaaggaaataaaagaggatacaaacaaatggaagaacattccatgctcatgggtaggaagaatcaatatcgtgaaaatggccatactgcccaaggtaatttatagatttaatgccatccccatcaagctaccaatgactttcttcacagaattggaaaaaactactttaaagttcatatggaaccaaaaaagagcccgcattgccaagtcaatcctaagccaaaggaacaaagctggaggcatcacactacctgacttcaaactatactacaaggctacagtaaccaaaacagcatggtactggtaccaaaacagagatatagaccaatggaacagaacggagccctcagaaataatgccacatatctacaaccatctgatctttgacaaacctgacaaaaacaagaaatggggaaatgattccctatttaataaatggtgctgggaaaactggctagccatatgtaggagaaagctgaaactggatcccttccttacaccttatacaaaaattaattcaagatggattaaagacttaaatgttagacctaaaaccataaaaaccctagaagaaaacctaggcaataccattcaggacataggcatgggcaaggacttcatgtctacaacaccaaaagcaatggcaacaaaagccaaaattgacaaatgggatctaattaaactaaagagcttctgcacagcaaaagaaactaccatcacagtgaacaggcaacctacagaatgggagaaaatttttacaatctacccatctgacaaagggctaatatccagaatctacaaagaactcaaacaaatttacaagaaaagaacaaacaaccccatcaacaagtgggtgaaggatatgaacagacacttctcaaaagaagacatttatacagccaaaaggcacatgaaaaaatgctcatcatcactggccatcagagaaatgcaaatcaaaaccacattgagataccatctcataccagttagaatggcgatcattaaaaagtcaggaaacaacagaccaagctccaatgtcttctctgtgaaactttctgagatccaatccttggctctcatagagactaggtgcttaatgaatgctgatgaacagggtgtgccactgattcaagaaatgctggaatcttgggcaagtatttgcaaagttcccaagtatccaaatgccgaagcagtgcggccagaagagcaaacaccccacctgcacccaggtgaaataaacagccatgttgctcacacaaagcttgtttggtggtctcttcacacggacacgcatgaaatttggtgccgtgactcggatcgggggacctcccttgggagatcaatcccctgtcctcctgctctttgctccgtgagaaagatccacctacgacctcaggtcctcagaccgaccagcccaagaaacatctcaccaatttcaaatccgcacacaagaacttccaaacgcctgaaccgcagcggccaggcgttcctccagaacctccttccccaggagcttgctacaagtgccagaaatctgaccaccaggccaaggaatgcctgcagcccaggattcctcctaagccgtgtcccatctgtgcgggaccccactggaaattggactgttcagctcacctggcagccactctcagagcccctggaactctggcccaaggctctctga

SEQ ID NO: 2333 - DNA, 8244 bp, Homo sapiens
  SIMILAR (1)..(3045): 981254mologous to Homo sapiens unknown,accession number AF148856,Smith-Waterman Score=5206.
atggtaaagggatcaattcaacaagaggagctaactatcctaaatatttatgcacccaatacaggagcacccagattcataaagcaagtcctgagtgacatacaaagagacttagactcccacacattaataatgggagactttaacaccccactgtcaacattagacagatcaacgagacagaaagtcaacaaggatacccaggaattgaactcagctctgcaccaagcggacctaatagacatctacagaactctccaccccaaatcaacagaatatacatttttttcagcaccacaccacacctattccaaaattgaccacatagttggaagtaaagctctcctcagcaaatgtaaaagaacagaaattataacaaactgtctctcagaccacggtgcaatcaaactagaactcaggattaagaatctcactcaaagccgctcaactacatggaaactgaacaacctgctcctgaatgactactgggtacataacgaaatgaaggcagaaataaagatgttctttgaaaccaacgagaacaaagacaccacataccagaatctctgggacgcattcaaagcagtgtgtagagggaaatttatagcactaaatgcctacaagagaaagcaggaaagatccaaaatcgacaccctaacatcacaattaaaagaactagaaaagcaagagcaaacacattcaaatgctagcagaaggcaagaaataactaaaatcagagcagaactgaaggaaatagagacacaaaaaacccttcaaaaaatcaatgaatccaggagctggttttttgaaaggatcaacaaaattgatagaccgctagcaagactaataaagaaaaaaagagagaagaatcaaatagacacaataaaaaatgataaaggggatatcaccaccgatcccacagaaatacaaactaccatcagagaatactacaaacacctctacgcaaataaactagaaaatctagaagaaatggatacattcctcgacacatacactctcccaagactagaccaggaagaagttgaatctctgaatagaccaataacaggctctgaaattgtggcaataatcaatagtttaccaaccaaaaagagtccaggaccagatggattcacagccgaattctaccagaggtacaaggaggaactggtaccattccttctgaaactattccaatcaatagaaaaagagggaatcctccctaactcattttatgaggccagcatcattctgataccaaagccgggcagagacacaaccaaaaaagagaattttagaccaatatccttgatgaacattgatgcaaaaatcctcaataaaatactggcaaaacgaatccagcagcacatcaaaaagcttatccaccatgatcaagtgggcttcatccctgggatgcaaggctggttcaatatatgcaaatcaataaatgtaatccagcatataaacagagccaaagacaaaaaccacatgattatctcaatagatgcagaaaaagcctttgacaaaattcaacaacccttcatgctaaaaactctcaataaattaggtattgatgggacgtatttcaaaataataagagctatctatgacaaacccacagccaatatcatactgaatgggcaaaaactggaagcattccctttgaaaactggcacaagacagggatgccctctctcaccgctcctattcaacatagtgttggaagttctggccagggcaatcaggcaggagaaggaaataaagggtattcaattaggaaaagaggaagtcaaattgtccctgtttgcagacgacatgattgtttatctagaaaaccccatcgtctcagcccaaaatctccttaagctgataagcaacttcagcaaagtctcaggatacaaaatcaatgtacaaaaatcacaagcattcttatacaccaacaacagacaaacagagagccaaatcatgagtgaactcccattcacaattgcttcaaagagaataaaatacctaggaatccaacttacaagggatgtgaaggacctcttcaaggagaactacaaaccactgctcaaggaaataaaagaggacacaaacaaatggaagaacattccatgctcatgggtaggaagaatcaatattgtgaaaatggccatactgcccaaggtaatttacagattcaatgccatccccatcaagctaccaatgactttcttcacagaattggaaaaaactactttaaagttcatatggaaccaaaaaagagcccgcatcgccaagtcaatcctaagccaaaagaacaaagctggaggcatcacactacctgacttcaaactatattacaaggctacagtaaccaaaacagcatggtactggtaccaaaacagagatatagatgaatggaacagaacagagccctcagaaataatgccgcatatctacaactatctgatctttgacaaacctgagaaaaacaagcaatggggaaaggattccctatttaataaatggtgctgggaaaactggctagccatatgtagaaagctgaaactggatccctttcttacaccttatacaaaaatcaattcaagatggattaaagatttaaacgttagacctaaaaccataaaaaccctagaagaaaacctagacattaccattcaggacataggcgtgggcaaggacttcatgtccaaaacaccaaaagcaatggcaacaaaagacaaaattgacaaatgggatctaattaaactaaagagcttctgcacagcaaaagaaactaccatcagagtgaacaggcaacctacaacatgggagaaaattttcgcaacctactcatctgacaaagggctaatatccagaatctacaatgaactcaaacaaatttacaagaaaaaaacaaacaaccccatcaaaaagtgggtgaaggacatgaacagacacttctcaagagaagacatttatgcagccaaaaaacacatgaaaaaatgctcatcatcactggccatcagagaaatgcaaatcaaaaccactatgaggttttactgggatttaataatgcttataatgatggttggaaatctagtcatcataccagttggaatcacattctttacagagcaaacaacaacaccatggattattttcaatgtggcatcagatacagttttcctattggacctgatcatgaattttaggactgggactgtcaatgaagacagttctgaaatcatcctggaccccaaagtgatcaagatgaattatttaaaaagctggtttgtggttgacttcatctcatccatcccagtggattatatctttcttattgtagaaaaaggaatggattctgaagtttacaagacagccagggcacttcgcattgtgaggtttacaaaaattctcagtctcttgcgtttattacgactttcaaggttaattagatacatacatcaatgggaagaggaacgcagctcctcaccagcaacagaacaaagctggacggagaatgattttgacgagctgagagaagaaggcttcagacgctcaaattactctgagctacgggaggacattcaaaccaaaggcaaagaagttgaaaactttgaaaaaaatttagaagaatgtataactagaataaccaatacagagaagtgcttaaaggagctgatggagctgaaaaccaaggctcgagaactacgtgaagaatgcagaagcctcaggagccaatgcgatcaactggaagaaagggtatcagcaatggaagatgaaatgaatgaaatgaagcaagaagggaagtttagagaaaaaagaataaaaagaaacgagcaaagcctccaagaaatatgggactatgtgaaaagaccaaatctacgtctgattggtgtacctgaaagtgatgcggagaatggaaccaagttggaaaacactctgcaggatattatccaggagactttccccaatctagcaaggcaggccaacgttcagattcaggaaatacagagaacgccacaaagatactcctcgagaagagcaactccaagacacataattgtcagattcaccaaagttgaaatgaaggaaaaaatgttaagggcagccagagagaaaggtcgagttaccctcaaagggaagcccatcagactaacagcggatctctcggcagaaaccctacaagccagaagagagtgggggccaatattgaacattcttaaagaaaagaattttcaacccagaatttcatatccagccaaactaagcttcataagtgaaggagaaataaaatactttacagacaagcaaatgctgaccgattttgtcaccagcaggcctgccctaaaagagctcctgaaggaagcgctaaacatggaaaggaacaaccgagacacacataggctcaaaataaaaggatggaggaagatctaccaagcaaatggaaaacaaaaaaaggcaggggttgcaatcctagtctctgataaaacagactttaaaccaacaaagatcaaaagagacaaagaaggccattacatgatggtaaagggatcaattcaacaagaggagctaactatcctaaatatgtatgcacccaatacaggagcacccagattcataaagcaagtcctgagtgacctacaaagagacttagactcccacacattaataatgggagactttaacaccccactgtcaacattagacagatcaacgagacagaaagtcaacaaggatacccaggaattgaactcagctctgcaccaagcagacctaatagacatctacagaactctccaccccaaatcaacagaatatacatttttttcagcaccacaccacagctattccaaaattgaccacatacttggaagtgaagctctcctcagcaaatgtaaaagaacagaaattataacaaactatctctcagaccacagtgcaatcaaactagaactcaggattaagaatctcactcaaagccgctcaactacatggaaactgaacaacctgctcctgaatgactactgggtacataacgaaatgaaggcagaaataaagatgttctttgaaaccaacgagaacaaagacacaacataccagaatctctgggacgcattcaaagcagtgtgtagagggaaatttatagcactaaatgcccacaagagaaagcaggaaagatccaaaattgacaccctaacatcacaattaaaagaactagaaaagcaagagcaaacacattcaaaagctagcagaaggcaagaaataactaaaatcagagcagaactgaaggaaatagagacacaaaaaacccttcaaaaaatcaatgaatccaggagctggttttttgaaaggatcaacaaaattgatagaccgctagcaagactaataaagaaaaaaagagagaagaatcaaatagacacaataaaaaatgataaaggggatatcaccaccgatcccacagaaatacaaactaccatcagagaatactacaaacacctctacgcaaataaactagaaaatctagaagaaatggatacattccttgacacatacactctcccaagactaaaccaggaagaagttgaatctctgaatagaccaataacaggagctgaaattgtggcaataatcaatagtttatcaaccaaaaagagtccaggaccagatggattcacagccgaattctaccagaggtacaaggaggaactggtaccattctttctgaaactattccaatcaatagaaaaagagggaatcctccctaactcattttatgaggccagcatcattctgataccaaagccgggcagagacacaaccaaaaaagagaattttagaccaatatccttgatgaacattgatgcaaaaatcctcaataaaatactggcaaaccgaatccagcagcacatcaaaaagcttatccaccatgatcaagtgggcttcatccctgggatgcaaggctggttcaatatacgcaaatcaataaatgtaatccagcatataaacagagccaaagacaaaaaccacatgattgtctcaatagatgcagaaaaagcctttgacaaaattcagcaacccttcatgctaaaaactctcaataaattagtgttggaagttctggccagggcaattaggcaggagaaggaaataaagggtattcaattaggaaaagaggaagtcaaattgtccctgtttgcagacgacatgattgtatatctagaaaaccccattgtctcagcccaaaatctccttaagctgataagcaacttcagcaaagtctcaggatacaaaatcaatgtacaaaaatcacaagcattcttatacaccaacaacagacaaacagagagccaaatcatgagtgaactcccattcacaattgcttcaaagagaataaaatacctaggaatccaacttacaagggatgtgaaggacctcttcaaggagaactacaaaccactgctcaaggaaataaaagaggatacaaacaaatggaagaacattccatgctcatgggtaggaagaatcaatatcgtgaaaatggccatactgcccaaggtaatttatagattcaatgccatccccatcaagctaccaatgactttcttcacagaattgggaaaaactgctttaaagttcatatggaaccaaaaaagagcccgcatcaccaagtcaatcctgagccaaaagaacaaagctggaggcatcacactacctgacttccaactatactgcaaggctacagtaaccaagacagcatggtactggtaccaaaacagagatatagatcaatggaacagaacagagccctcagaaataacgccgcttacctacaactatctgatctttgacaaacttgagaaaaacaagcaatggggaaaggattccctatttaataaatggtgctgggaaaactggctagccatatgtagaaagctgaaagtggatcccttccttacaccttatacaaaaatcaattcaagatggattaaagacttaaacgttagacctaaaaccataaaaaccctagaagaaaacctaggcattaccattcaggacataggcgtgggcaaggacttcatgtccaaaacaccaaaagcaatggcaacaaaagccaaaattgacaaatgggatctaattaaactaaagagcttctgcacagcaaaagaaactaccatcagagtgaacaggcaacctacaacatgggagacaattttcgcaacctactcatctgacaaagggctaatatccagaatctacaatgaactcaaacaaatttacaagaaaaaaacaaacaaccccatcaaaaagtgggtgaaggacatgaacagacacttctcaaaagaagacatttatgcagccaaaaaccacatgaaaaaatgctcatcatcactggccatcagagaaatgcaaatcaaaaccactatgagatatcatctcacaccagttagaatggcaatcattaaaaagtcaggaaacaacaggtgctggagaggatgtggagaaataggaacacttttacactgttggtgggactgtaaactagttcaaccattgtggaagtcagtgtggcgattcctcagggatctagaactagaaataccatttgacccagccatcccattactgggtatatacccaaatgactataaatcatgctgctataaagacacatgcacacatcatgatggtgatggtgatgttgaagatggtgatggtgatgacagcaatgtcaatgatggtgatagtgatggtgatgttgaagacggtgatagtgatggtgattatggtgatgttgatgatggtggtgatggtgatgataatgttgaagatgatgatgatggtagtggtaatggtcatggtgatgttaaagatggtgatggtgatgacgatggtgatgttgaagatggtgatgttgatgttggtgatgttgatgatgatgatggtgatggtgatgttgaagatggtgatgttgatgttggagatgctgatggtgatgttgaagaggatgatggtgatgatgatggtgatgttgaagatggtgatggtgatgttgaagatggtgatgttgatgttggtgatgttgatgatgatgatggtgatggtgatgttaatatgctcatggtgatgttgaagaggatgatggtgatgttaatggtggtgatgttgaagatggtgatgttgatgttggaatgtatagcgcagccctattcacaatcacagagacatggaatccacctgaacgcctatcaatggtag

SEQ ID NO: 2334 - DNA, 7995 bp, Homo sapiens
  SIMILAR (4009)..(7284): 931254mologous to Homo sapiens putative p150,accession number U93563,Smith-Waterman Score=5295.
atggtaaagggatcaattcaacaagaggagctaactatcctaaatatttatgcacccaatacaggagcacccagattcataaagcaagtcctcagtgacctacaaagagacttagactcccacacattaataatgggagactttaacaccccactgtcaacattagacagatcaacgagacagaaagtcaacaaggatacccaggaattgaactcagctctgcaccaagcagacctaatagacatctacagaactctccaccccaaatcaacagaatatacatttttttcagcaccacaccacacctattccaaaattgaccacatagttggaagtaaagctctcctcagcaaatgtaaaagaacagaaattataacaaactatctctcagaccacagtgcaatcaaactagaactcaggattaagaatctcactcaaagccgctcaactacatggaaactgaacaacctgctcctgaatgactactgggtacataacgaaatgaaggcagaaataaagatgttctttgaaaccaacgagaacaaagacaccacataccagaatctctgggacgcattcaaagcagtgtgtagagggaaatttatagcactaaatgcctacaagagaaagcaggaaagatccaaaattgacaccctaacatcacaattaaaagaactagaaaagcaagagcaaacacattcaaaagctagcagaaggcaagaaataactaaaatcagagcagaactgaaggaaatagagacacaaaaaacccttcaaaaaatcaatgaatccaggagctggttttttgaaaggatcaacaaaattgatagaccgctagcaagactaataaagaaaaaaagagagatgaatcaaatagacacaataaaaaatgataaaggggatatcaccaccgatcccacagaaatacaaactaccatcagagaatactacaaacacctctacgcaaataaactagaaaatctagaagaaatggatacattcctcgacacatacactctcccaagactaaaccaggaagaagttgaatctctgaatagaccaataacaggctctgaaattgtggcaataatcaatagtttaccaaccaaaaagagtccaggaccagatggattcacagccgaattctaccagaggtacaaggaggaactggtaccattccttctgaaactattccaatcaatagaaaaagagggaatcctccctaactcattttatgaggccagcatcattctgataccaaagccgggcagagacacaaccaaaaaagagaattttagaccaatatccttgatgaacattgatgcaaaaatcctcaataaaatactggcaaaccgaatccagcagcacatcaaaaagcttatccaccatgatcaagtgggcttcatccctgggatgcaaggctggttcaatatacgcaaatcaataaatgtaatccagcatataaacagagccaaagacaaaaaccacatgattatctcaatagatgcagaaaaagcctttgacaaaattcaacaacgcttcatgctaaaaactctcaataaattaggtattgatgggacgtatttcaaaataataagagctatctatgacaaacccacagccaatatcatactgaatgggcaaaaactggaagcattccctttgaaaactggcacaagacagggatgccctctctcaccgctcctattcaacatagtgttggaagttctggccagggcaatcaggcaggagaaggaaataaagggtattcaattaggaaaagaggaagtcaaattgtccctgtttgcagacgacatgattgtttatctagaaaaccccatcgtctcagcccaaaatctccttaagctgataagcaacttcagcaaagtctcaggatacaaaatcaatgtacaaaaatcacaagcattcttatacaccaacaacagacaaacagagagccaaatcatgagtgaactcccattcacaattgcttcaaagagaataaaatacctaggaatccaacttacaagggatgtgaaggacctcttcaaggagaactacaaaccactgctcaaggaaataaaagaggacacaaacaaatggaagaacattccatgctcatgggtaggaagaatcaatatcgtgaaaatggccatactgcccaaggtaatttacagattcaatgccatccccatcaagctaccaatgactttcttcacagaattggaaaaaactactttaaagttcatatggaaccaaaaaagagcccgcatcgccaagtcaatcctaagccaaaagaacaaagctggaggcatcacactacctgacttcaaactatactacaaggctacagtaaccaaaacagcatggtactggtaccaaaacagagatatagatcaatggaacagaacagagccctcagaaataatgccacatatctacaactatctgatctttgacaaacctgagaaaaacaagcaatggggaaaggattccctatttaataaatggtgctgggaaaactggctagccatatgtagaaagctgaaactggatcccttccttacaccttatacaaaaatcaattcaagatggattaaagatttaaacgttagacctaaaacaataaaaaccctagaagaaaacctaggcattaccattcaggacataggcgtgggcaaggacttcatgtccaaaacaccaaaagcaatggcaacaaaagccaaaattgacaaatgggatctaattaaactaaagagcttctgcacagcaaaagaaactaccatcagagtgaacaggcaacctacaacatgggagaaaattttcgcaacctactcatctgacaaagggctaatatccagaatctacaatgaactcaaacaaatttacaagaaaaaaacaaacaaccccatcaaaaagtgggcgaaggacatgaacagacacttctcaaaagaagacatttatgcagccaaaagacccatgaaaaaattctcatcatcactggccatcagagaaatgcaaatcaaaaccactatgagatatcatctcacaccagttagaatggcaatcattaaaaagtcaggaaacaacagacatggtaggccaactgtgagcaaaaccttgagcaaagtgctgtggcccggtgcttcccaaacatcacattggccacctaaaatcccccagaagccttccaaacacagctctctgggtcccattcccagaagttttgacaagagaatctgtatgtttaacaagccacccagtaagaggcagttatctgggggatttctaccagatgtacagggttacgtgagactatttgtaccttatcaaccaaaacaagacagaatcaagaagttccacatccacgttgtgtgtcaggggagagttgggggtgggaggagaaccaagaaccttaacgcacccacaaggagaataaataaggaaaaagcagcacctaaacaaatcacagccaaactgctgaaaagcagcgctttgaagagagtagtggctctcccagaacggagtgtgagatctgagaacggacagactgcttccttaagtgggcccctgccccctgagtatcctaactgggagacacctcccagacaccatcatcaaagaccaaaggtagataaaaccacaaaggtggggagaatccagagcagaaaagctgaaaattctaaaaatcagagcgcctcttctcctccaaaggatcacagctcctcaccagcaatggaacaaacctggacggagaatgactttgacgagttgacagaagtaggcttcagaagatcggtaataacgaacttctccgagctaaagaaggatgttcgaacccattgcaaagaagctaaaaaccttgaaaaaagattacacgaatggctgactagaataaagagcgtagagaagaccttaaaggacctgatggagctgaaaaccatggcacaaaaactatgtgacgcatgcacaagcttcaggagccaatccgatcaagtggaagaaagggtatcagtgattaaagatcaaatgaatgaaatgaaagacacacataggctcaaagtaaaaggatggaggaagatctaccaaggaaatggaaaacaaaaaaaggcaggggttgcaatcctagtctctgataaaacagactttaagccaacaaagatcaaaagagacaaagaaggccattacatgatggtaaagggatcaattcaacaagaagagctaactatcctaaatatatatgcacccaatacaggagcacccagattcataaagcaagtcctgagtgacctacaaagagacttagactcccacacattaataatgggagactttaacaccccactgtcaacattagacagatcgacgagacagaaagtcaacaacaatacccaggaattgaactcagctctgcaccaagcagacctaatagacatctacagaactctctaccccaaatcaacagaatatacatttttttcagcaccacaccacacctattccaaaattgaccacatacttggaagtaaagctctcctcagcaaatgtaaaagaacagaaattataacaaactatctctcagaccacagtgcaatgaaactagaactcaggattaagaatctcactcaaaactgctcaactacatggaaactaaacaacctgctcctgaatgactacggggtacaaaacaaaatgaaggcagaaataaagatgttctttgaaaccaacgagaacaaagacacaacataccagaatctctgggacgcattcaaagcagtgtgtagagggaaatttatagcactaaatgcccacaagagaaagcaggaaagatccaaaattgacaccctaacatcacaattaaaagaactagaaaagcaagagcaaacacattcaaaagctagcagaagtcaagaaataactaaaatcagagcagaactgaaggaaatacagacacaaaaaacctttcaaaaaattaatgaatccaggagctggttttttgaaaggatcaacaaaattgatagaccactagctagactaataaagaaaaaaagagagaagaatcaaatagacgcaataaaaaatgataaaggggatatcaccaccgatcccacagaaatacaaactaccatcagagaatactacaaacacctctacgcaaataaactagaaaatctagaagaaatggatacattcctcgacacatgcactctcccaagactaaaccaggaagaagttgaatctccgaatagaccaataacaggatctgaaattgtggcaataatcaatagcttaccaaccaaaaagagtccaggaccaaatggattcacagccgaattctaccagaggtacaaggaggaactggtaccattccttctgaaactattccaatcaatagaaaaagagggaatcctccctaactcattttatgaggccagcatcaccctgataccaaaggcgggcagagacacaaccaaaaaagagaattttagaccaatatccttgatgaacattgatgcaaaaatcctcaataaaatactggcacaccgagtccagcagcacatcaaaaagcttatccaccatgatcaagtgggcttcatccctgggatgcaatgctggttcaatatatgcaaatcaataaatgtaatccagcatataaacagaaccaaagacaaaaaccacatgattatctcaatagatgcagaaaaggcctttgacaaaattcaacaacccttcattctaaaaactctcaataaattaggtattcatgggacatatctcaaaataataagagctacctatgacaaacccacagacaatatcaaactgaatgggcaaaaactggaagcattccctttgaaaactgacacaagacagggatgccctctctcaccactcctattcaacatagtgttggaagttctggccagggcaattaggcaggagaaggaaataaagggtattcaattaggaaaagaggaagtcaaattgtccctgtttgcagatgacatgattgtatatctagaaaaccccattgtctcagcccaaaatctcctaaagctgataagcaacttcagcaaagtctcaggatacaaaatcaatgtacaaaaatcacaagcattcttatacaccaacaaaagacaaacacagagccaaatcatgagtgaactcccattcacaattgcttcaaagagaagaaaatacctaggaatccaacttacaagggatgtgaaggacctcttcaaggagaactacaaaccactgctcaaggaaataaaagaggatacaaacaaatggaagaacattccatgctcatcggtaggaagaatcagttttgtgaaaatggccatactgcccaaggtaatttacagattcaatgccatccccatcaagctaccaatgcctttcttcccagaattggaaaaaactactttaaagttcatatggaaccaaaaaagagcccgcatagccaagtcaatcctaagccaaaagaacaaagctggaggcatcacactacctgacttcaaactatactacaaggctacagtaaccaaaacagcatggtactggtaccaaaacagagatatagatcaatggaacagaacagagccttcagaaataacgccgcatatctacaactatctgatctttgacaaacctgagaaaaacaagcaatggggaaaggattccctatttaataaatggtgctgggaaaactggctagccatatgtagaaagctgaaactggatcccttccttacaccttatacaaaaatcaattcaagatggattaaagacttaaacgttagacctaaaaccataaaaaccctagaagaaaacctaggcattaccattcaggacataggcatgggcaaggacttcatgtctaaaacacaaaaagcaatggcaacaaaagccacaattgacaaatgggatctaattaaactaaggagcttctgcacagcaaaagaaactaccatcagagtgaacaggcaacctacaaaatgggagaaaatttttgtaatctactcatctgacaaaggactaatattcagaatctacaatgaactcaaacaaatttacaagaaaaaaacaaacaactccatcaaaaagagggcgaaggacatgaacagacacttctcaaaagaagacatttatgcagccaaaaatcacatgaaaaaatgctcatcatcactggccatcagagaaatgcaaatcaaaaccacaatgagatatcatctcacaccagttagaatggcaatcattaaaaagtcaggaaacaacaggatcaacaaaattgatagaccactagtaagactaataaagaaaaaaagagagaagaatcaaatagatgcaataaaaaatgataaaggggatatcaccaccgattccacagaaatacaaactaccatcagagaatactacaaacacctctatgcaaataaactagaaaatctagaagaaatggataaattcctcaacacatacactctcccaagactaaaccaggaagaagttgaatctctgaatagaccaataacaggctctgaaattgtggcaataatcaatagcttaccaaccaaaaagagtccaggaccagatggattcacagcagaattctaccagaggtacaaggagaagctggtaccattccttctgaaactattccaatcaatagaaaaagagggaatcctccctaactcattttatgaggccagcatcatcgtgataccaaagcctggcagagacacaaccaaaaaagagaattttagaccaatatccttgatgaacattgatgcaaaaatcctcaataaaatactggcaaaccgaatccagcagcacatcaaaaagcttatccaccatgatcaagtgggcttcatccttgggatgcaaggctggttcaatatatgcaaatcaataaatgtaatccagcatataaacagaaccaaagacaaaaaaccacatgattatctcaatagatgcagaaaaggcctttga

SEQ ID NO: 2335 - DNA, 1980 bp, Homo sapiens
  SIMILAR (968)..(1207): 251254mologous to Homo sapiens rapa-1,accession number AJ277275,Smith-Waterman Score=52.
atgagacaacgtagagcagagctgctctccaaagacaaaagggtgagaacagacggcaacaacaaatgttcgccatcagcgataggaaagagaaaagagagaggcacaaacgactggatcgaaggggacaacaaccaggagagccaagggctcaactgcagcgacaccctcaaccgggatttgggtcccaacacgcgaggctttctttatgctggcctgagtggtctggacccggaccccagcctcccaacgcctgacatgtccagcgaggtgctggaggacaacttagacaccttgtccctgtactccgggaaggacagtgattctgtgaagctgctggaggagtacgcagattcggagtctcaggcatccttacaaggaagaagtcgctgttggcaacatccccacccagccccactctcctatcccccagctgctagtggctcccagctgtccctccaaggcaagtttccttcagcaaaaccacctctcctgggaggctacacctgcactgcgcagcgcacacagtgggcgctcaccaagcgctcgctaagggcaacgcgtgaatccgtgtcccgccagcagggcgtttacggcctggtggggcggaaacggacccgacaccaccgcggcgtcctggggcttctgggaatcccatcagcgcggccagagcggccggggacaggctccgaggcaggcccgacccgcctccccggcgccgccgtggctcgacggagaccagctaggcccgtgcggggccgtctcggagaccccgcgccgacggctgctcaaacatcaggccccgcgtctcttccaccaccgccgccgccccgatcctatggggacccccaccaaaacggatacccggacccagacccggcgcccagtgcctccccggacctcccgccggctgccggggatacaagaggaagcggcgggcgaagaaagaaacgcagaacaggaaccgcccgcctcaacacaccaggccgtaaagcacacaaaacagaaggcagcggcagggagaaaggggcgcgcgcaccagcccgcgccacgaacccccgaaccacagagaagacgccccatacgaccacccaaccagacagacagactgcgccacccacacaggcgcgcggggcgcggcccgccgcccggcggagccggcggcacagccaacccgagcacgggggcgaacggaggagcggcgaccgccaggcgcacggccggggcgcggacacggggcgcgcggggggcgagcgaaagggcgggccggcacggcagccgcccggcatcttggctcactgcaactccgcctcccggcacctgatgactcctgtgtgcctcctcttcctcatgtccttcttggaaacagtgaccgagctctgcaatgtggcatgctccagcgtgatgccaggagggggcaccaacctggagctcgctctgcactgcctgcacgaggctcagggcaacgttcaggtcgccctggagactcttctgctccgagggccccacaagccacggacacacctgctcgctgactatcgctacacagccatggctgtggtcccaggacaaatggccttccccctgttggctgtgttctttgataggttcagacgtctggacccctatgagaagaggctttttaagaaggcgttctatgcccacaagaaggacttctacttgatacacaagatgccctggggctcggccacagtcaaacttgatcatttttttccagatgtaataatactcaacgcactgagctaccgtctttgtctggatctagtgaaagaaaacaagcaggctgtggctgtgccacgcgggccctgggagtgtgaccttgccattgggccggccgcctcctttggaaagccctccggaagcacctcttcctttggcttggcgttaccactcaccacaaaggcacaggaccacaaaatccttcctggggacgagggcgttcaaactggagccacatag

SEQ ID NO: 2336 - DNA, 4269 bp, Homo sapiens
  SIMILAR (948)..(3038): 271254mologous to Xenopus laevis type I collagen alpha 1,accession number AB034701,Smith-Waterman Score=192.
atggaccagtacagccttggagacgagggtgccctcccatcagaaatgcacctcccttcattttcagagagccaagggctcaactgcagcgacaccctcaaccgggatttgggtcccaacacgcgaggctttctttatgctggcctgagtggtctggacccggaccccagcctcccaacgcctgacatgtccagcgaggtgctggaggacaacttagacaccttgtccctgtactccgggaaggacagtgattctgtgaagctgctggaggagtacgcagattcggagtctcaggcatccttacaaggcaaccaaacagacaagacacagaagaggacagacaccaaagaacagcagcgaaccaacgaacgaagaacaaagaagaagagaaacgagacccagcacaacagagaaaagaagaacagcagagacgacacagaaagaacggacgacgagacccgccaccgctatgcatgcactcagctgcacatcctgcagacactgatcggaccccccaggggaatcgctatcttcctgcctcatcgctctccccagtccctgaaggcacaacaccggctattcgcgctggagggctttcgggaatgtgcccacgctggggccaacaaaattcgtccgggtcttccaacggtgcccaaagcattccccgcgttgtcccccagggggatctccaaagaacgccagttgtcgtcccctggcctctccaagcccttcttcgcaaaaagtaaatatttgggagggcagttggacggcctatctctacgacccacaggccagtgcccaaactgcgaaatccttgtgatgatggcatttgccaacgtactgccacccccgatgcccacgagtgccgctgacactgcgcagcgcacacagtgggcgctcaccaagcgctcgctaagggcaacgcgtgaatccgtgtcccgccagcagggcgtttacggcctggtggggcggaaacggacccgacaccaccgcggcgtcctggggcttctgggaatcccatcagcgcggccagagcggccggggacaggctccgaggcaggcccgacccgcctccccggcgccgccgtggctcgacggagaccagctagggggacgcgcccaggacgcacggtgccccctccccagccggacggggtctgggagcgcggatccttcagctccccggcccagcatccggatcagggctcgaggcagtcgacaaactacaaccgagctcgagcaggcgcgcccctgaaaccccgggactggggcttgggggcgggggcggcgccggcgcggagggcccagtccccggacgtccgcaagactcccattggctccgggtcccggcgctccgcctggcggggccgtggcttgttccgccggacgcgagcgggggatcctgaagccctcctcggggcaggcggcaggcacaccgccgaggacgacgacctgtgcgggaaggtgttcagcagcgccagttctctgagcaagcactacctgacacacagccaggaaaggaagcacgtctgcaaaatctgcagcaaggcctttaagcgccaggaccacctgtatgtgggagtctggaccgggcacatgctcacccaccagaagacaaagcccttcgtgtgcatcgagcagggctgcagcaagagctactgcgactaccgctctctgcgccggcactacgaggtccatcacggcctgtgcatcctgaaggaagcccccccggaggaagaggcctgcggggactccccccacgcccacgagtcggccggccagccgccccccagcagcctgcggtccctggtgcccccagaggccaggtcccccggctccctcctgccccaccgggacctcctgcgccgcatcgtgagtagcatcgtccaccagaagaccccttctcctggcccagccccggcgggggcttcagacagcgaagggaggaacactgcctgtccctgccccgcctcatcggggtcctcgtcctgcaccccagccggcccccacgcggccccagcagcgctggacaccgagcttcccgaggagccttgcctcccacagaaagagccggccactgacgtgttcacagcccctaattccagtgccgccgagaacggcgcccccgacccgccagagccggagccagataccgcgctgctccaggcccggtccaccgcggagtgctggcccgaaggcggctccgtgcctgcctgcctgcctctcttccgaggccagacggtccctgccagttcccagccatcgagccacagcttccagtggctccggaacctgccgggctgtcccaaaagcaaaggcaacaacgtgtttgttgtccacaagccctcggccgtgccctcgcgggagggctccgagtctggcccgggacccagcagcggaagcccctcggaggagtccccgcccggccccggcggtggcctggaggatgctctgcccttccctgccgcgctcctcagggtccccgcggaggccccgagcgaccccaggtcggccagcggggaagatgacccctgcgcccccaagaaggtcaaggtcgactgcgactccttcctgtgccagaaccccggggagcccggcctccaggaggcccagaaggcaggcgggctccctgcggatgcctcgccgctcttccgccagctcttcctcaagtcgcaggaacctcttgtgagccacgagcagatgcaggtgttccagatgatcaccaagtcccagcggatcttctcccatgcccaggtggcagcagtctcctcccagctccctgcgcccgagggcaaaccagccgccctgaggccgctgcaggggccgtggccgcagcagcccccaccactggctcctgctgtggactctctccacgccggccctggaaaccccgaggcagagggctccccagcccgcaggagaaaaaccacacccggggttcccagagaggcctcccccggcagcacgagacgagacgcaaaggggggactgaaagtggccgcggttccaacgccccttgcagcaccgtctctggacccttccaggaatccagacatctcttctctggccaagcagctgcgatcctctaaagggaccttggacctggaggacatcttcccctccacaggccaacggcagacccagttaggtggggaggagccaccaggagcctcgctgccagggaagcaggccccagccgagaatggcgcggcttcaaggatcacaaaaggtgaaaagggcccagcctgctcccggggtggaggctaccggctcttgggcaaccccagggccccgcgattctccggcttccggaaagagaaggcgaagatggatatgtgctgtgcggcttctccgagccaggtagccatggcctccttctcatcggccgggcccccggcagatccctccaagtccaagctgacaatattcagcagaatccagggtggaaacatctacaggctcccccatccggtgaaggaagagaatgtggcaggcagaggtaaccagcaaaacggcagtcccacagactggacgaagcccaggagcacttttgtctgcaagaactgcagccagatgttttatacggagaaagggctgagcagccacatgtgttttcacagcgaccagtggccgtcacctcgagggaagcaggaaccgcaggtgtttggcacagagttttgcaagccgctaagacaggtgctgaggccagaaggggacaggcatagtcccccaggaaccaagaagcccttggaccccacagctgcagcccctttggtggtcccccaatcgatccccgtggttccagtgacccgacacatagggagcatggccatgcctgtactggaggaccccctactgaagaagctcctgctggactcggggacacagtccgtggacctgaagggacaagagaaagacggggaggagcgagacagcaaggagagcagccagcagagaaagcggaagaagcggcccccaccctccacggctggggagcctggccctgcaggatgccaccagagccgcctgcggtcacccatgttcctggtggactgcctcctgaagggcttattccagtgctccccctacacaccacccccaatgctcagccccatccgggagggctctggggtgtacttcaacaccctctgttccacgtccactcaggccagccctgaccagctcatcagctccatgctcgcctgggcacccactcatctgccttctctctttggatttgcctattcaggacatgccatgctagattga

SEQ ID NO: 2337 - DNA, 193 bp, Homo sapiens
  SIMILAR (7)..(81): 401254mologous to Homo sapiens Human secreted protein, SEQ ID NO: 5391,accession number G01310,Smith-Waterman Score=51.
atgggggccacaccgtggtccaatgagaagctgcaggaggagggaagtggagactcacagaggaaaactgacttgctcaaggtcatgcagcctgcagaagtggctttctgcatggccctggaggacggtgatttggacagaagcgtagggccagagacaggacgtgacggtggggctgctgcattggctccag

SEQ ID NO: 2338 - DNA, 573 bp, Homo sapiens
  SIMILAR (298)..(345): 521254mologous to Homo sapiens Human Zcytor5 epitope-bearing region,accession number W70854,Smith-Waterman Score=47.
atgggggccacactgtggtccaatgagaagctgcaggaggagggaagtggagactcacagaggaaaactgacttgctcaaggtcatgcaggtgattagacaaagaggcaggggccagactgaactggaggtcttgcattttatctgccaaccctacaactgctgcctctggggcgggaaatctagcaaaccggcttggccggccctgcatcagctcgggaccccccagaagaaggtggttcctctttctcattttcacaaaggcaccatctggctggcggggggcctgtggcctgcaccccatcactacccaccccccacatcaagagctgaccccaagccgggggagctgctcatctccgccctcagagctggaatttcatcttctgtttctggtgactcatactgtgagccccgcgatgaaattacacctgcctgccgctgccctccgggcctctggccccatgcgatcctcccgccgccatccaggagctgcttctgccggcctggctgtggcgttcagaggcatctggagggcagtggcgatggcagtgggggcagcttgtctctctga

SEQ ID NO: 2339 - DNA, 1101 bp, Homo sapiens
  SIMILAR (955)..(932): 751254mologous to Homo sapiens Human secreted protein sequence SEQ ID NO:134,accession number Y87095,Smith-Waterman Score =46.
ggtcgacccacgcgtccgactgcttcttcgaagattcttacctttttaattcactaagctgcctttacatgagaaaaaaacccatacagctaaaactggtaaaattgagtcactacatgtagcattcactgaagatgaaaccacttccattgaaaatggaatagaactcgttttcctgatgttttaagaaatcaatcactaacacctatcaatatccaaaatatctttcttgatcactgtgtacaagaaagagtgactgcaatttcatcaccccaggaatctactaagcatgtccgtgaggagatgccagatactgctactggttccatattttttccacattgtaattcagcttctactcgaatttttgggaaacaaacaaacaaaatggaaagttcaagaaagtttaaaactatgaaagatgtttatactggagaaaggctagaaaacattttaattctttcttccaagttttccaaacctaaaagtactcctggctcagttatcgctcaaaaacttgaggaaatgcaccctaagcatcaacctttaccagagagtccaggctatacttatcagcacatctcgagagacttaagtgcaacagtgccaagccctccacctatgactgtatctatgaaaccagaaggacagtggcctgaacattttaaatcaactgctacattgacactaagagttactgaatttccaggttttgtttccttgccaacaccagttttaccaagaaaacctcacaggcagtctgtgatagaaactcttgtaacagaaaatggaaatatagaaagtgtcccaaagcaaatcccaccaagaccacctgaaggtctcaccaaaactgaaaaaatagaatcagagatacacgttgtacgtggtgaaggttttaagactgttgcagcaacacgatatgaaacaataacagccatgaccaacctggccatagtaaactgtcaagtatatgggagaaatgcacttaatctgaaggattttgcttacataatccatcgggtatcttcctctagttcctgctcctatggacagtacagttctcccgtgactttccagatggttttcaagtttagtccctga

SEQ ID NO: 2340 - DNA, 354 bp, Homo sapiens
  SIMILAR (129)..(161): 541254mologous to Homo sapiens Human secreted protein encoded by gene 5,accession number Y36228,Smith-Waterman Score=37.
atggtggtggaagacagagagacacacagagggaatgaaggcagagattccaattatgcagctgtaagccacggaatgcccaagactcttggtgaacaccagaagctaagaagagtccccccaccagcagagcctgcccccttccgcaatctgtcaactgtgaacggtagtgacagaagatgcctcctgacttgtcaacagaataggctcctggggacctgggaatggatcagaacagcagtaaaggccctgggtccacgtcctgcagggggtcaggctgtcagagagcaggggtcaactccagcttttgagtgtgagaaactgctttactgtgccctcctgtttctgcaatga

SEQ ID NO: 2341 - DNA, 1057 bp, Homo sapiens
  SIMILAR (128)..(325): 981254mologous to Homo sapiens bK280A3B.1 (novel protein),accession number AL110121,Smith-Waterman Score=364.
tgtgggcctgtctgcatctcatgccaagaagcgtcgttgtacattcaccaaggacggggcagccgcagccgtagctggtgcctctgatagaggaacgaacaggatctgggcagcccatgctggcctgcagaggatgacactgaggttctgggacgacctgtgtctcacccaaggctgcctgggtaaaggggagcagaaacaggtagagggagctggtctcctgaatccgatccagccccgttttcctgccaagccctgggatgaggacctgagacgccttctcccacccactgctctgcgcattgcacagaagagcggctgctggtggcacccacacccctccatggcttgtggtacagaccatcctgctgtgctggtgacttcccgcctctgtacctgtgtcctgggctatactgcccctgccctcatcctccaggctggttcctgggaggtatccagaatgggaatcacgctgagaattcctaccttccacatctatagtgtccacccctgcaccttcctgcctccctggagcatccaaatggtcctcctgaatacgaacagacctggaagtcagaacaatacacccgcagacctgtcccagcaaagctacattgacaccaagcttctcctaatgggaaaattaaggcccttctcagactccaaactaggaaaggatctccccagctgtaaaaacgtggccaacctggcacttcagctgagacatcattccagtgataaagctgtgcacggcagccatggctatccagctggcccagcccaacagagatctgtggttcctcacttgcctgcaccttctctgccttctcctcttaccatcacctccaatatcagcagtgttaccagtattgtaagaagaagccatacccattcttacttctgccaaggtttccctaatgccaagattcgcctctttgacctgggttggaagaaggcaaaagtggatgagtttctactctgtggccacatggtgtcagatgaatatgagcagctctcctctggagccctggaggctgccctatttgtgccatgttag

SEQ ID NO: 2342 - DNA, 1637 bp, Homo sapiens
  SIMILAR (840)..(974): 841254mologous to Homo sapiens Q1Z 7F5,accession number M81806,Smith-Waterman Score=189.
atggtcctcctgaatacgaacagacctggaagtcagaacaatacacccgcagacctgtcccaggtcatttagtactcagtcactttgtagacagttgctcagcacacaccatctgcaagagaagcctgcagacacctggacagcaaagctacattgacaccaagcttctcctaatgggaaaattaaggcccttctcagactccaaactaggaaaggatctccccagctgtaaaaacgtggccaacctggcacttcagctgagacatcattccagtgataaagctgtgcacggcagccatggctatccagctggcccagcccaacagagatctgtggttcctcacttgcctgcaccttctctgccttctcctcttaccatcacctccaatatcagcagctgccagagcctggccccaccatcatcctctcccagctggacaggtgttcctgccttccaagtagggtcccagcctccacccttggaggtagacctacagccattggtcagtgccattcccacatcaggctgcaggttgacgggaggcttcttagggaaccaagaggaagaactacaggaattaaattacaaccctccactgagaataaaccagctagtaacaatgagagcagggcaggtgccccaggccctgcagtttcgggtacagcacccaggcacacccaggaatctggctcggcagctcccagaccctccagtggggcattggcagattgaggacgagtgtgagaatgagagactcctcagggccactgtcttaggaattgcacgctttcatgagcatcacgtccacggagccccccgggttcttggggtgcagatccaaggtttccctaatgccaagattcgcctctttgacctgggttggaagaaggcaaaagtggatgagtttctactctgtggccacatggtgtcagatgaatatgagcagctctcctctggagccctggaggctgccctatttgtgccatcttgccccactcaaaacctcagtgtaataatggaagcatcagatacatcccaacggagtaggattctgcaggatgcgtggcttacaactgctgaggccaacaaaaaggagaaaagtctgagacccggtcacagaccagaggagcctcaggagccacggcagccagatgtcatgtggtgtcctgggcgagatcctccatgggatcctctggctgctaaggacaggcagcttggaacagagtctcctgtgctttggcatgcatggaaggtggggagtcagaaaagacaaccagaaaggtgtgccaaggagcaaggttgggaatctacccatgaacggaagtgggcaggagagacacaccggctgctcagggcccttggtgacccccctgtacacaagaggagggcagcactcacctgccagctcctactaagaatgagaggtgatggggtttgtgccaccaaccaggctagagcaggaagtgagtcccagggagtggaggaaacccaggggccagttgttaactccacacaagaccgtgcccttgctactgaagcatatcagtgtggaaatcacctgacggcaccgttgctaataagccttcactttgctagaactggagaaatgattttctccttacagaccttttcttaa

SEQ ID NO: 2343 - DNA, 787 bp, Homo sapiens
  SIMILAR (730)..(786): 781254mologous to Homo sapiens Q1Z 7F5,accession number M81806,Smith-Waterman Score=70.
tctgagttcgggcacgcgtccggggcagttgttgtatattgcggtgccgttgctggttctcattccttttaggcctgttctcgtcttccgttccgactctttctttttcgttgcagccactgaagatcctggtgtcgccatgggccgccgccccgcccagtgttaccggtattgtaagaacaagccgcacccaaagtctcgcttctgccgaggtgtccctggtaagcagtggaagagcccctgcactggttggctctgcggactccgcgtccgtctgtgacaccccctgcacacttacccaatccttttagatgccaagattcgcatttttgacctggggcggtaaaaaggcaaaagtggatgagtttccgctttgtggccacatggtgtcagatgaatatgagcagctgtcctctgaagccctggaggctgcccgaatttgtgccaataagtacatggtaaaaagttgtggcaaagatggcttccatatccgggtgcggctccaccccttccacgtcatccgcatcaacaagatgttgtcctgtgctggggctgacaggctccaaacaggcatgcgaggtgcctttggaaagccccagggcactgtggccagggttcacattggccaagttatcatgtccatccgcaccaagctgcagaacaaggagcatgtgattgaggccctgcgcagggccaagttcaagtttcctggccgccagaagatccacatctcaaagaagtggggctttcaccaagttcaatgctgatgaatttgaagacatggtgg

SEQ ID NO: 2344 - DNA, 486 bp, Homo sapiens
  SIMILAR (169)..(429): 1001254mologous to Homo sapiens bA307L3.1 (similar to nuclear protein NP95),accession number AL133480,Smith-Waterman Score=460.
atgaagagatccacatctccaaggcctagtgggaatggggagacagttcatgctgatatagaaactaccctatacccagaaagcggtactctagaaatgaatgtcaaggatcttagaccacgagctagaaccattttgaaatggaatgaactaaatgttggtgatgtggtaaatgaattggtggatgccagagatgtcggccttggtgcttggtttgaagcacacatacatagtgttactagagcttctgatggacagtcacgtggcaaaactccactgaagaatggcagttcttgtaaaaggactaatggaaatataaagcataaatccaaagagaacacaaataaattggacagtgtaccctctacgtctaattcagactgtgttgctgctgatgaagacgttatttaccatatccagtatgatgagtgttaccttcatcttgtcgtctgtttcccagagtatccaacggacaaaatggcttaa

SEQ ID NO: 2345 - DNA, 726 bp, Homo sapiens
  SIMILAR (171)..(338): 421254mologous to Homo sapiens Human secreted protein, SEQ ID NO: 6683,accession number G02602,Smith-Waterman Score=66.
atgcctgatgaaaggaatccagtagcaagaattcctgttcctgtttatgtaagagggtcactagagggaggaaggctgaatcctctccgagaaatctttcggggccagcattatattagagctaaagtatatttcccaccaatttacccaactccctccctgctccagtaccaaatagctctacttctccaaagggcacttggagaagcctgcaaggacagaggtaaagatcaaaaaaaggtgatttctggtcacaaggcccttgagcagctggaggacttaggcagagtgcggagagcagccattcacatgagaagactccaccctggaggcagcgctaagcagccatccttccttaactgggcctctggggcaggcacctgtgaaatgccagcagggtcgttgcatgtagagggatcccactcagtgcacccctgggaatggctcagccgcactgtgggtcttcctaggtcttccacgtgttcaacggaaattcacaaattctctagtagcagaccctatcttctcactgtaacttcacatgtcagaagggacaaacaagctcccttaggcccctcttatgagggcactcatcccatgcgtgtggcctctaccctcaagaccaagtcaccttccgaaggctccgcctcctggtatcatcaccttggtgttgaggattttaatctgtcaattttggatggagacaaatgttcagaccaaggatag

SEQ ID NO: 2346 - DNA, 447 bp, Homo sapiens
  SIMILAR (126)..(185): 351254mologous to Gallus gallus homeobox protein,accession number L06621,Smith-Waterman Score=39.
tatgtagtacgcattctaccttttcctacaatgaatccaccagcagaaattcctgtacacatcttatcaacaaagaatttgaacctcaaagagactagcaagtacacaggaccactgtacagtaacagatcagttacactgagacaacagagtttacagcagagaaagagtttaatgctcaccggataccaagaaaggaatggggttaccccgtggggccttgatgctgacccttttgccctggggaagcttggcctcccaactgaaccagctgaggtttctgggctggttacttctgctccatacaacctgctctatttaccctcggaaggaaaaataaagcattggtttgagcaaagggaatcacatgagcttgcactgtgggtgcttttgtgccttgctttgcgagagctgtacacacggcaaggaacctgggtgaagatttga

SEQ ID NO: 2347 - DNA, 582 bp, Homo sapiens
  SIMILAR (364)..(242): 341254mologous to Paramecium bursaria Chlorella virus 1 a580R,accession number U42580,Smith-Waterman Score=67.
atgtaccaggtgctgttctatgcactgagggatgtagcaatgaacaatgctaacaaagtctctgctgtcatggagctttcattcaagatcctcacggaaatagtagatccttatgctgtctccaatgtgcaccaagatggctccctcctaggccaccagtctccttggagaagcatgcagttatttcagacacctaccttgcccaccagcaataccactaccctaactttccaatttacatcatcacctggaaagaaaaaaaatgatgagtggagacagatggagaagaaagggaaaaaagagaacagaagaatgggaagcaaaaggacaagaggaagaggagatactgagaataaaaagataaaaagagacagagtcattgccattggagagctaatccttgtaagggacaatacaaagaaagactctctaggcagaggacattgcatgtgtgcagagctactgaccttctttcttcctcaacccctctcttttgcttatcccaacaattccacactcacctattactcagattccactcccgaaacaacacaggcccttgagtttctccctgatccctag

SEQ ID NO: 2348 - DNA, 1194 bp, Homo sapiens
  SIMILAR (1194)..(430): 991254mologous to Homo sapiens Human foetal kidney secreted protein nn310_1,accession number Y31833,Smith-Waterman Score=1320.
tttactgtgaattacttttattgaaaaaaaatgttcactaaaaaggctgaatacatccctctacatgaatacacagctcagaagaggggaaatggaggtggggaggcatccaagtcataaagggtagaaaatgaatgcaagcttcttagaactcttcccaggaacacaggcaatgcttgcagtttcctgggtacccaatgggcagggaagatcaggaagagatccatgggacataaggaagttaggttactgcgcatagctcccaggagattgtcccctccatttctcccactcattcttttggctgtgggagtgttccctctaagctgatccactaccagcagctggaacactcccctaaaaagctagcttggcttcctgggcagccagttcttcaggagcaaggctgttaagttcttgaagctgtcactgctgcaggcccccccttagcgcacagaggacaatcctcaccaacacgccaccaaccactccaatggcaattcctattcccaaggctgacgccaccttctttttccactttgggtggtgaggcttggagtagctgtccagattaacttccaatccctcatctattaacttctgatcctcagtaagtgactgatggaaattcagattcaccaagttaggaggaaggaccctcaacccaaaatagagcctcttgacaagtctcaagttttttaccagctgcacatcacagcgatatgtcccagagtcatactcctgagcatatttaaacttcacaaagtgggagttggcttgaaagggtttgaagacctcatcgtcagtggagatgacacctcgagcaagtctccaggtgaaccggaaagcttcctgtccaaactccaagatgtctgaactcagacagctaagctcaaattccttgccaatgagaatggtgaaatggagcatcccacagatccagttggtcagacattctaagcgccgagtctgacatttccttctcactccatcagggcccacctcacagacggtctcctccttatagccaaggccacaggtgacagtacaggttgtggcattgatgataactttccccacagcttcttgcagcttctcagggatggccagtgttttaggtgtagtcaccaccaaaggcaggtagaaggccaaccccaggctcccaaggacaaaactagtggctaaaaccttcat

SEQ ID NO: 2349 - DNA, 560 bp, Homo sapiens
  SIMILAR (203)..(532): 301254mologous to Aeropyrum pernix 235aa long hypothetical protein,accession number AP000061,Smith-Waterman Score=89.
atgctcgcaagactgcagggccctattgctcctgctgccccgacccctgaccagcggggacaggagctggtgggcaccttcaggaagtccagccatccctgctttctggacattttgaaggccatgattgaaagctgcagccactacccaaagagaaatgtttcacttaacgatgtcccagcgaaaagtggtgggaaatctaggtcctcactacccaaggcgtggtcctcagacatcacccaggagctggttataaatggagagtctcaggccccgccctggaggccctggttcagaacctgcgtttcagcaagagctcgagtgattcaggcaggcacccccttctgcaggtctcagctccggtgaagaagaaggccagctgcccagcagacagggacaaggagtgtgcccacatctctggggcagagcaccccctccttgtcaaagccggcgactctgcaggcttctggtgcagacaatgtggtcaccagatgcacggcacccagcttgcggggatgccgggcaaatgttattacagcgataacagtgattctgcttag

SEQ ID NO: 2350 - DNA, 1139 bp, Homo sapiens
  SIMILAR (613)..(1137): 861254mologous to Homo sapiens putative p150,accession number U93563,Smith-Waterman Score=778.
atgccctattcccagtacaaatttactgtattaatctgttttcatgatgctgataaagacatatctgagactgggaagaaaaagaagtttaattggacttacaatttcacatggctgatgaggcatcagaatcatggtgcgaggcaaaacgcacttcttacatggcagcagcaagagaaaaatgaggaagaagcaaaagcagaaacccctgataaacccatcagatcttttatttccatgacaaacatgaagatccaagggactctcttctacaccaggatctattttgtttattatactgcggtcattcagtgtaattcctggtacatgatttcttctttgtttttggatccattgctggtgagctggtgtgatctttcgggggtgttaaagagccttgtttgtcatattaccagaattgcttttctggctccttctcatttagaaagtccacaggaagaaattcatagagggctgattcaccagatcagcattgtcatcctgaacccagggtcttcccttcatgccactctgcatcctcactatgagtctcatgctcagactgtcagaacaacagcagtgacactccagctgtcacattcagacgcatatctgaaagctcaaaatctcatgaagctgttaagcaacttcagcaaagtctcaggatacaaaatcaatgggcaaaaatcacaagcatgcccgtacaccaataacagacaaacagagagccaaatcatgagtgaactcccattcacaattgctacaaagagaataaaatacctaggaatccaacttacgagggatgtgaaggacctcttcaaggagaactacaaaccactgctcaacaaaataaaagaggacaaaaagaaatggaaaaacattcaatgctcatggataggaagaatcattatcatgaaaatggccatactgcccatggtaatttgtagattcaatgccatccccatcaagctaccaatgactttcttcacagaattggaaaaaactacgttaactttcatatggaaccaaaaaagagcctgcattgccaagaaaatcctaagcaaagagaacaaagctggaggcatcatgctacctgacttcaaactatactacaaggctacagtaaccaaaacagcatg

SEQ ID NO: 2351 - DNA, 1035 bp, Homo sapiens
  SIMILAR (1031)..(786): 571254mologous to Homo sapiens Human secreted protein, SEQ ID NO: 4473,accession number G00392,Smith-Waterman Score=240.
atgccctattcccagtacaaatttactgtattaatctgttttcatgatgctgataaagacatatctgagactgggaagaaaaagaagtttaattggacttacaatttcacatggctgatgaggcatcagaatcatggtgcgaggcaaaacgcacttcttacatggcagcagcaagagaaaaatgaggaagaagcaaaagcagaaacccctgataaacccatcagatcttttatttccatgacaaacatgaagatccaagggactctcttctacaccaggatctattttgtttattatactgcggtcattcagtgtaattcctggtacatgatttcttctttgtttttggatccattgctggtgagctggtgtgatctttcgggggtgttaaagagccttgtttgtcatattaccagaattgcttttctggctccttctcatttaggtctctcagccatggataccagcacctcatccagtagaggtaaaagaagagtgaagagtacctgctccagtggagaaagtccacaggaagaaattcatagagggctgattcaccagatcagcattgtcatcctgaacccagggtcttcccttcatgccactctgcatcctcactatgagtctcatgctcagactgtcagaacaacagcagtgacactccagctgtcacattcagacgcatatctgaaagcctattcaacccattcatattttcgtgaaagaagaaagtcaagacccctgcttcaggcagccatctgtgaagatccagctctcaaggatctacacagttctcctctgcctcctactacacttaggttccatccaagttcacacgtggttattgtgaggacagtcaggatagaaatgcctccactggtgataccgaggcaaacagagtctggagtggaactccagcaaactccaatagacctgcagctgagggacctgattgttagaaggaaaatgaacaaacagaaaggaatagcatcaacatcaacacaaaggacatctacaccaaaaccccatctctag

SEQ ID NO: 2352 - DNA, 309 bp, Homo sapiens
  SIMILAR (107)..(30): 501254mologous to Homo sapiens Secreted protein encoded by gene 29 clone HERAN63,accession number Y01411,Smith-Waterman Score= 60.
atggtgcgaggcaaaaggcacttcttacatggcggcggcaagagagaaatgaggaagaagcaaaagcggaaacccctgataaacacttcagatcttttgaacactactcagcgagaaaaaggaatgaacttgatgcgtgcaataactgagatggggctaaaggctattacgttgagtgcaaaaagccagtctcaaaagatcatatctttgaaaaacgtgtcaaggtcctatgtccggggtttggagcagcagtgccagcgtggaacactcctgttgcgaaaaagccatgcctccaagcctgtgatgtga

SEQ ID NO: 2353 - DNA, 673 bp, Homo sapiens
  SIMILAR (428)..(586): 291254mologous to Mus musculus stretch regulated skeletal muscle protein,accession number AJ290946,Smith-Waterman Score=68.
cacgcgtccgatcttcttaggccaccaaagcaaattatttttttaattatagtctcagtttaccttgtttccctctcagtgggtcaaccaaaaccgcatggcgtactactctctgaagcctctactaccctgctcctccgtgttgacatgtggccaggcaagccaggacttactcacatcagctacattagttactgggcaaatattgagtgtctaccatgctccaaacactatcctgaggacaagagagacaaagagaaccgtaggccctgccttcaaggagcacatggctagtggaaacagacatagtaggaagctagaaatcaataagagaaaggatcatggaaaattagcaaatatgtggaaattaattccccatgtgactgtgtttggaaatagggactttaaagaagtaactaagaatattcattgtgattatcctgtgaacaatccattcaaaaagggggacaatgagaggcacacagcagtcattgattggtccatagcaattctgaaaattgccaggtcttcctattctggaagaagagcaaccactgcacaacatccagagttggcattaaatccaaaagctttggagatgaatgacttcgttaagattcctctctgggaatgtgaagagatgggatctaaactcaaagactctgatccataa

SEQ ID NO: 2354 - DNA, 659 bp, Homo sapiens
  SIMILAR (214)..(366): 1001254mologous to Homo sapiens Alzheimer's disease protein encoded by DNA from plasmid pGCS2232,accession number W21578,Smith- Waterman Score=283.
tgcatcttctcctatcaacaaaaggaagtaggaagaaagaaacaccaagaagaggcctgcaaaaaggtcttctaaaagttttatctatggcagccctgcactcttccttctttccggtgaatagaaaagagctcaaaaatccataccttcacatctcaggtgaattgttcatacatcaaattcttgtaacatccaaaggcgagggaagaacaagctcatcagaaccgggtgtctgcgattatcttcagcttggccacagagtgggtgatcagtaccggccacgacaagtgtgtgagctggatgtgcacgcggagcgggaacatgctcgggaggcacttcttcacgtcctgggcttcgtgtctgcaatcaccctgctgaagcttgaacagaacacgtgttcagtcatcacaaccctcaaaggacatgaaggtagtgtcgcctgcctctggtgggaccctattcagcggttactcttctcaggagcatctgacaacagcatcatcatgtgggacatcggaggaaggaaaggccggacgctgttacttcagggccatcagtgcgtgaccacttgtgggggtggggaaagaatccgagttagtggggagctagtgaaaggcattaatagtctgataccactttctgcaaaccccacgttctaa

SEQ ID NO: 2355 - DNA, 860 bp, Homo sapiens
  SIMILAR (422)..(577): 1001254mologous to Homo sapiens Alzheimer's disease protein encoded by DNA from plasmid pGCS2232,accession number W21578,Smith- Waterman Score=290.
atgaaatactggggtggtgatggagaagaggctgtggcctcaagaactgtccgggaagcagggctgggggttgggagttccctgaacatagacgtcagtggaaactacaacggtggctgccgtgaactagagagagcaggtacattgagaaaagcagagggccaaggtcacattcctagggaaatgtcaatatttaaagaaaagccagaggactgggagcctaaaggagagacaggaagaatgggcaaagtgggaggagagccagccaggacagtgcagccacggaagctggagggcagtgagtttcagggaggagcttctggtggccatgcctgtggggagcagagggcaccgccttggagagagcctgtgctaagtgctgtttctggagatgacatctgttcacctttctgttcctgcagctcatcagaaccgggtgtctgcgattatcttcagcttggccacagagtgggtgatcagtaccggccacgacaagtgtgtgagctggatgtgcacgcggagcgggaacatgctcgggaggcacttcttcacgtcctgggcttcgtgtctgcagtatccttcagagccacggacctctccttcccctggcctctgcttctcagtgtttggttctgaatctcatcccaaatggctgagatctaaagactgaatgaaacctatttaagtttgtgcaaaagtaatgcattttttttttaccatggaaagtaattgcaaaaattgcaattacttttgcaccaacctaatacatatttcactgaaaatccgagaacttccgtaagtttgctgtaaattgggtttattaaaaataatgaaatgaattgttctgtgcaaaaaaaaaa

SEQ ID NO: 2356 - DNA, 440 bp, Homo sapiens
  SIMILAR (146)..(3): 421254mologous to Theileria annulata sporozoite surface antigen mAb 1A7,accession number M23460,Smith-Waterman Score=77.
tttcgtgttcttccgggtctgcagtctgtggtgtgtttgctgttcccaggtacggtttcggtgtcccaagggttgacaggtgtcgcgcctgtggtaggcgcgccgggtagagaggggggcctcggcgggtttgtggccagggaaggggcgtggagcgagagtcagaggtcaggcgccggcgcccagctcgtttgaagtcattgtttgttgcagggagactcggtcacatggtggggacgccagagggtcccgggagtaggggtaagctcctgatcctgagcccgaagcctcttgcagcggcaactcttccctctggccatcgcgttcccccgggatacggactccagtcagtaggcgaagcttgatcctagagtagactctacgctgcccaacagctgctgttaccgcatggtgccggacagttccaggctcttggtgtc

SEQ ID NO: 2357 - DNA, 580 bp, Homo sapiens
  SIMILAR (134)..(3): 751254mologous to Homo sapiens Human secreted protein, SEQ ID NO: 7678,accession number G03597,Smith-Waterman Score=166.
atgaagccacggaccctcacggtgagtgttacagttcttaaagcagcacgtctggagttgttcgttcctcccggtgggctcgtggtttcgctggcttcaggagtgaagctgcagatcttcgtggtgagtgttacagctcataaaagcagtgtggacacaaaaacagttggagctccaactgtacatgctgctacacagttgagggagagtgaaatggatattgtggagacaacacccactatgaccatccactatggtcctaagggcaaagagaaaacagtaatcggccagaagggtcaggacttaatctttaaccggcagcttccctatttcttgcccctgcttccagctctgggccaatcagagaaagccaaatgtgctcctcacaccaatcgcgcgctaactaaggccacatatgccaagcaccagcccagcacctggcatgtgaataaaacccagtcactccaacttgcaggcaaagctagaaaaactgcgctgcatttgcaaacaaaaagctcttggtggcgatgacgatacttgttttggtgtgaaactggcaattgctaactacgatctgtga

SEQ ID NO: 2358 - DNA, 670 bp, Homo sapiens
  SIMILAR (263)..(349): 651254mologous to Homo sapiens alternative HHLA3 protein,accession number AF126164,Smith-Waterman Score=95.
ctgggctctctctcgctcacacctcttcttctgcctctctctgtcacctttttcctccttcaggtctctcagcccagcatcaccttctcagagcagcctgcatccatcccctagactagaaatatccccctttcaaataacctcatggcacccacacctcaagacaggttgcaattgaatgtctgtttatccctgcctgtctccattctatccccagggcctcccactctgcctggcaaagaacggatgtgctcacatcaggaatattttaatgaaggtgctgttactggaaagggatcccaatccagaccccaagagagggttcttggatctcatgcaagaaagaattcaggttattacctgtcttttaaatacgcttcggatagttacaaggttgggttatgcaagaatctcccatgctgaactgagtgattcagaaattcagatggcaaaatttaggatccctgatgaccccactaattatagagacaaccagaaagttgtcatagacacagagaagtttctgagaaaattcattttaacccaggcaccaaccaaagaggtctctgctgccatctggcctttcaggtttggatatgacaatgaagggtggtctagtctagaaagatcagctcacctgctcaatgaaacaggaagtgccagagtttga

SEQ ID NO: 2359 - DNA, 635 bp, Homo sapiens
  SIMILAR (206)..(385): 201254mologous to Saccharomyces cerevisiae YCR017c, len:953,accession number X59720,Smith-Waterman Score=45.
  misc_feature (1)...(635): n = a,t,c or g
gtttcaaaactactgnaaagtagctctaatcaagtgatatttctgggatatatcacttcagcacctggctccagagattatctacagctcactgaacatggcaatgtgaaggatatcgacagcactgatcatgacagatggtgtgaatacattatgtatcgagggctgatcaggttgggttatgcaagaatctccccatgctgaactgagtgattcagaaattcagatggcaaaatttaggatccctgatgaccccactaattatagagacaaccagaaagtggtcatagaccacagagaagtttctgagaaaattcattttaatcccagatttggatcctacaaagaaggacccaattatgaaaacaaccataattttcatatgaatactccccaaatactttttatgaaacatttaaaacaagaagttattggctgggaaaatctaagaaaaaaagtatgtaagataaaaagaagagattaatgaaagtgggaaaatacacatgaagaacctcaacttaaaaaacacatggtatctatgcagtgggaaattacctccatttgtaaactatgttgcttaataaaaacatttctctaaacaaaaaaaaaaaaaaaaaaaaaaaaaaagtcgacgc

SEQ ID NO: 2360 - DNA, 738 bp, Homo sapiens
atgagcaaggagggcagcagggatattcaggccattgcctcagagacttgtgaatttgtagggagagctctgtgcggactcatctttctcgatgatatggaggaaggccttaaaagattaatgtgctttcttatcccctcaacacccatctgcccatcccttgttggtcttgcagctgtcatgaccccagaaaatctccatctgtttggagaagtactgcgtccttccggattatcttctacactatgccttattgttatctggctggttccaccaccggtcagaagaatgaaaattgcagatacctattctgtgtgtttctctccagaatggtggatgttagagaccctactaaggatttgtggactcactaacgtagtctctaaaagcgagcttccattcgcagtcttcaagaataactgccctacatctcccattattgtttcaactcatccttctgaaatggctcaccaagtagagagatgccgtaaaggtatggtcagcaatgaattattagtaagcagtataagcatggtgataaaccttttaaaacttgcatctatacggcaggcacttcagaaggaccccccagagacctcttccttcttttattctggtgctattgaatccctgctccatatagcagccacgatcattctttttggcttgcaagttggatcacatcagctcactcaaatcatggccctgacttccccttgcctggagcactcaacctga

SEQ ID NO: 2361 - DNA, 316 bp, Homo sapiens
  SIMILAR (18)..(182): 321254mologous to Guillardia theta Rbp1 protein,accession number AJ010592,Smith-Waterman Score=67.
cgcacgcctgcacggacccggacttaatgggtcgacccacgcgtccggtgaaggagaaatatgatgaccaaaacaaaaatgtattcttggagaaaaagaattggaaacacacaatagttactgagcagtggctactgtgtgatcctaattctgttcttccttccaactggatctatagcaatgagccatgccatgaagtagccacagcaaagaccctcctacctggcaggtcggtcgatggcttggtggtcccatcctgcagcctcagcttctgctccttgctttttgtccttggaggtcatatctggggtgggct

SEQ ID NO: 2362 - DNA, 668 bp, Homo sapiens
  misc_feature (1)...(668): n = a,t,c or g
cggaaatgtgcaataattgtttcacatttttttccaacatcagcaacagagaatgtttaaaacaaatgtgtttctctatttgttcatacagcatctctctctagcctattatctcctgttagacacagcccagaaaatgaatagagacaagtcctggctgggtctgggttcagaaacataatagaaggattcatctaatggaagggaattctttccacagttgctagttcctcacacctctgcctctatgggattcntcctggccccacatgctctgctgtgtcttctagctgtcggccactgtggaggaagtgaaccttctagatcctgctgactcatacaatgagttttgtgtggaccatcagacaaaagggctggctggtgaagataagggagaggcaaagcacttagaatggcaatcagacatggctatctgggaccaggaattaggaactgctgacacaaagaagcagggacagaagagaactcactcttgtggtgagcagaggcagctgtgcaaacaacctgctgttccggatgtgactgtggtggccgtggggtgcagagtccagggctcatggcgttggtcatgcaaattgtggttcctgggccttagcagaaacaaggaacctattcagtggcattgctttgggggctgctctggcttc

SEQ ID NO: 2363 - DNA, 759 bp, Homo sapiens
  SIMILAR (152)..(322): 271254mologous to Xylella fastidiosa hypothetical protein,accession number AE004025,Smith-Waterman Score=64.
ttttttaatggaatgcacaaaaagtgctattttaatagagagacacaaaatattacataattcatgggacttagggacaaaacgatgccttggaaattttctggaaaatcacataagcctccaaagaagttgatacaaaggcagctaaagatcttggtttgatagtggcaattctaccaatacaaatacaaaggaatcaacaaatggacaactctttaggattacagttatgacacaagcaatccacaggcattccagtgaaaactgcacagagctctctcttgttgttacttgcaaaaggctagcatgggaaatatcttgtggttcatgtgaagagttggcccatatttctttggcgtgttatcacaagcaggctaagggggcctccagtccttatgacatatattagaggagagctggggaggaattttccagacaacagccaccttcaccagccagcccttttgtctgatggtccacacaaaactcattgtatgagtcagcaggatctagaaggttcacttcctccacagtggccgacagtttagatgaatccttctattatgtttctgaacccagacccagccaggacttgtctctattcattttctgggctgtgtctaacaggagataataggctagagagagatgctgggaaggctttattcgacctgttccacagggcagtgaggcaccttcagctctgaatcaccgaaagagaatctgatttttttttaattgcttttccacctgcttccc

SEQ ID NO: 2364 - DNA, 1361 bp, Homo sapiens
  SIMILAR (498)..(463): 661254mologous to Homo sapiens Human secreted protein sequence encoded by gene 19 SEQ ID NO:142,accession number Y91469,Smith-Waterman Score=50.
tgggaacagtggtggttaagggactaatcaaacaggcatgagctctacaccctcatgaagttgtcacagtccggtggagataggctttctaaaaacacacaaatacagatttggatgagcactttgcaggaagagtacagagtacttttgagaggaagagagggagagtagcatggtgtaacttagatggggggcatacgaaggtctttcagatgtgaaagataaccatggctgaaaagaagagcatcccagcaaagggaacagaccttgcaaaggccctggggcagactgttccatctgcagatgttggaagccttactggtgcaaggtggctgggcttaatctctgcccaaatccactggctgaccactaaactaagcagccactcactcattagggaaatgcaaattaaagccataacaacaaccaccagaatggctaaaattaaaaagactgacaatccaagtgttgacaaggatatgcggaaaccagaatcctctcaaattgctgtctgggccctggacatccccaaaaatgcttctatgaagggaaatgtattgtcctcagtcattcttagtcacaaacaaatagggcttcacgttcagccagactctaagtctcaccgtccctctgggaggcagcagagagttccagctaactcgagaaaagacaacacagccagagaggatggctgcctgcaggctgacaacgctgtttcagagcaccctaacactttcgacacaagtagattacaccgggggaagagtttagggatgaacacgggaaaactagtcacagcgtggtcctcagaagggcagcatcagcgtcacctgggagcagagagtctcggtcctcactccagggctattgaatcagaatctgtagctcaacaaggttcccagagctgcaagcaaagaatggaaatttccaattgcagcatcgagggctgctgttctgctgactgtcttgctcagccggggtcatctgcttctctaagacatcaaggaatgccaagccctcttctcttactggctaacgcctacacgctgatcaaaactaagctcaatgatactgcctcttggaagacttccctgagtgcacttctacctcctcaccctcaaccttcagcccgcacactcaatctcagcatttattctactaaactcataattaagatagctaatgcttatatggtaccagacacttactatgggccaggcacagttacatcctgtcatttcattgaagttattggtatgcttgcctgtttccacaagacaatcatacgttcagaaacatttattgagtactttgcaactggcgtgctaggcaaagtaaataaaacagtgacagtaaagtaa

SEQ ID NO: 2365 - DNA, 548 bp, Homo sapiens
  SIMILAR (366)..(545): 331254mologous to Mus musculus Nedd4 WW domain-binding protein 1,accession number AF220205,Smith-Waterman Score=76.
taatatcttcaaatactttagaacagtggtccccaacctttttggcatcagggacctgttttgtggaagacagtttttccacggggttaggagtccttggctccgttaaacctctacacgtgcttttcatctgctcagcaaggagtggaagaccagctaaacagataacagggactaaggagtgctcaagctggtattactatgtaactatgccaatgccagcctccaccttcacaattgcagtgggatgctggacagaaatgaagatggagacatggtcatcaaatgatttggcaacagagagacccttctcaccttctgaggccaacttcaggtttgtgtttggggacttgctgggaaggaaaaaaaaaaaacacttgagggagcggtatgatgcatttcttccaagcactgggaatgttttcccaaccagccctgccccactggagttcctgctgcctccacatcccacagaagatcaggctcttcccataattactagccaccagggctcccctctgcccaagaatgagatccaaactccttag

SEQ ID NO: 2366 - DNA, 1202 bp, Homo sapiens
  SIMILAR (1129)..(995): 441254mologous to Homo sapiens Secreted protein encoded by gene 81 clone HNFJH45,accession number W88614,Smith-Waterman Score= 68.
agaagcaagccttgagctgctcagctgccctctgctccataccccctggtttctaacagtcacgtcctgcacccagacacttatccatgtgtgttcacgttccccatgccttgcctgtcctgctgggctccagtaactgctatactggagcaagaacagcaatgctggacactcaccatttagtgaagcctcacagtatcctgaaaaggaattggctcatgattcatccagttccaagtctagagaccccacatagaggctctggccccttggagcaatcaactctggttcacccagggggtatggacatggccaactgggcactggcccagccatcccgaggcctccttgactggcagcatttggcttatacgtcattagactttgtccaaagagctcaggttgcaggctcacctcctcaggatgcccgctcatgcactcaggagttgctgtccctcatcattgaagaacacttgcacctgggaggatttggcgatgctaaagagggatatggggcagctgctgaggaactgcagggctggctgccccgagccgccaccgggcacagaagtgccaagcagcagtcctacagcatgaccatggacattaactcactgactgctctgtgtgggagtcggtcagctccagagcgggggtgcttctattgtgcggttggaattagaagcgcagctggaattgagaggcacgggtccagtcattctgtgttgctcatcagaggactgaagcaggcccacctggaggtagctgacacttccttcatcatcgccgtttttggagagtggtcatacccgactttaccccagtttctccctgcccattcactccccaagccctgctgtatggcttccccgctgcccacgtctctgggaactgcctttcctcattctctccaagttctgtggaactttgaacttgagagagatgatttagggtatctggagggagaattttctaagctgcaaagcattcaagaggaagcagagcataaaagtttggaaaatttgcagcccgatgatgtgatagaaaagaaaaacacattttctggggagaaattcaagcctgctgcagaaatttgcctaataacaagaagccaaatgttaatcaccaaaacgatggggaaaatgtctccagggcatgtcagagactttggcagtgcccccatcaatgtcctggaggcctag

SEQ ID NO: 2367 - DNA, 406 bp, Homo sapiens
  SIMILAR (229)..(92): 411254mologous to Homo sapiens Human secreted protein, SEQ ID NO: 7589,accession number G03508,Smith-Waterman Score=71.
cgagtggccacggatccccggcaagatgagcaggaagcttgctgctagagccaaaaacactagaataacgatgagcagtggaacgctgaagcctgcggcatgccggggctgggggtaaaaaggcagtacgccgttccacagggtcatgctgcacgccggccgagtgctgcacgcaggcgggcaggcaagccagcaagctggggctgcctggacgcgggagagcgcgtccttgacgtctctttgcgtacaaggctgggaccgagtgggctggtgaagtctgagtcctgcacctctccgttaaggaagcgtggaggtgggctgctctcaacgctctggggttggtcccgacagagtttttctagccggcgagcgaaactatttctcactgtctgtagccgttactttc

SEQ ID NO: 2368 - DNA, 2889 bp, Homo sapiens
  SIMILAR (1455)..(2108): 861254mologous to Homo sapiens dJ667H12.2.1 (novel protein (isoform 1)),accession number AL035414,Smith-Waterman Score=996.
agttctaattatgtttaatattcggtttgctgcttggattgaataatctacatttgcttttaaaaaaaggaaattcacttaactgcatgtcagtcacccaagttttaagtgtacaaatgaaatggaaaacatttattacacaaatttaattacaattctaagaaataaacatgcaaattagatagagttcaatttgcagattgctaatcctcatccttgatcttgttccttcctcccttgattttcaagtctgtgcgtcttccttgattcctagggagccaggcagccagaggtctggtttttcacagtcggaggatcacctgggggcatcctgcagaacctctcctcggaaatccacggggaaatggcaaacaggattgacggggtttcacacgctcctcgctagacagagccgctcattaccataaaccgtctgcagcgacggcggcgcagcgccccagtcgcggcggcgggacctgccgggacccttgcccgccgcgcacccgcagtcaccgccgagcgggcggccgggccgggacccgcgagtgtgcaccggcggccgggctggcgccgagcccagagcggaccagcagcagctcaagcgctgcggccgccgcctccccgctgaccccgcgcaactttccgagtgcccagctgtggtcgcagaagcagggaataggcgtcctcgccgccaggtcccacgggcgcagggcgctcccgcaaccgcgggcttccagcgggtttggccggcaagggagggagggaaggccgggccgacatctgctgcgggctggagcgcgggggcccgggccagccccgccagagccctgccagccgctaaagacaacttgcctttgttcccggacacttggggtgttgtttactttctcctgcggccagcggccgaccgggcgctgctggctacccggggaggggctgagggctgcggcaccgacaccccgggggtgtgtctgtgcgggagccaggatgtggttggtggctgccgcccgccttcaagagatctgaggctgtcagagatgactctggttctgtccatgaatagattctgcgagcccattgtctcggaaggagctgctgaaattgctgggtaccaaacactatgggaggctgacagctacggaggcccaagccccccagggccagcacaagctcctttgcagggagaccggggagctggtcccccactgggcaggatcacattacaggggaatttcaaatcctattaacaacatccaagatcacatactttaaggagggaagtatgtgggaagaagagggatttttcaccccaccacttcaggcagctgtaggccataaaaccatctcaatttttgaggaacgagcccacatcctttatatgtccttagaaaagctaaagtttatcgatgatcctgaagtgtacctccgaagatctgtccttataaacaatttgactgaaaaggatccatggagaaattatcatgcagaataactggtgcttccctgcctgctctttcaatggcacctctgcccaagagtggtttatggctcaagactgcccttaccgaaaacgaccacggatggccaaagaggaatgtgaaaagtttcatgcctgctgcttttaccaagaatgtggtggccactacctaaatttacccctttctgtcaatgctaatgttggaagtgcctccactgctgcctcctctccctccgcctcttcttcctcctcatcttcctcttcctctccccctttgcctttaccgagttgttcccgccaggtggattttgatgtaggtagtgcatctatttacaagagtgatggccagatacctgccaatgaaatctttgtcactaatgtcagatcacttggtgttcaggaaaaggccaaattaaatgatgagaaagcaaatgatgacaccaacagagatggtggccccctcagccacgaacctgtgggaaatgaccttgcttttgagtgcaaagggccaattttatgattattttgagaccggatataatgaaagaaacaatggtaaatgaatcttggaaaaagtccttacggaaaaaggaaggcttcaccaccaagtaacaaactgtgctgcagccaaagggaagtaaaatatgagccatcttctcaccgaactttgaagcatgcacagcatgatcagttagctctcggtaaaattttatttttgaatggattttgtagttttgtacaacagataaaaattatgccatgaacatgccatgtcgttttaatgcctggagagcagattgcgtaaaacatctgtatagcaggcatcagcgagcttctttataaatgtggtgatttttaccaaggaaacgattgacttaatgcttaaaagtatatcatagttttcttacggaaaagatcagtagatgagattgggggacaatgtgcccttgcaatatttccattgccccccaaggagcctgtcactagctaagaaatttctacatgtttgccagttaattagggagttatttggtaagcaaatcaatataaccagcaaagatacctgcttcttctatatgatacaatattttttttaaataaaagactaaagacagggagctagatgaaatggcttaatggtgctgttaagtatttgtacctaacagtcttgtgtgacagatgaaaataggatgtaacataatgaaacacacctgtctaggggcggcaatcaacagtcttacacagagagggtattccctgcaagtttctggcttgcctgtgatgggtgatgaggcttttagagaggtgttatacagggcgatttttggtgccttacttttatcttaatttttgccaatgtgaaaattaaggataaatccagagttacagcagggatttaacaaacaggacaa

SEQ ID NO: 2369 - DNA, 359 bp, Homo sapiens
  SIMILAR (136)..(192): 731254mologous to Homo sapiens Human secreted protein, SEQ ID NO: 6705,accession number G02624,Smith-Waterman Score=68.
atcagtggcagcattagattctcaaagaagcgcgaatcctgttgtgaactgtgcatgtgagggatctaggttgtgcgctccttataagaatctaatgcctgatgatctgtcactgtctcccatcgcacccatacgggaccatctatttccaggaaaacaagctcagggctcccactgtttctacattatggtcgcacatcccggtcatgctgacgcaagagggtacagcctctctccctgctgctttcatggctggtgttgagcatctgtggcttttccaggtgaacggtgcaaactgtcagtggatctacccttctggggtctggaggacggtggccctcttctcacagctccactag

SEQ ID NO: 2370 - DNA, 414 bp, Homo sapiens
  SIMILAR (112)..(411): 221254mologous to Methanococcus jannaschii activator 1 (replication factor C), 53 KD subunit,accession number U67532,Smith -Waterman Score=91.
atgagccctattgtgaactgggcatgtgaaggatccaggttgcatgctctttatgagaatctaatgcctgatgatctgtcactgtctcccatcaccccagatgggacagtccagttgcaagaaaacaagctcagagctctcactgattctacattatgtcaattccacaagggcaccaaagaaaataaaagcaaaaactcatccaaacgacagcagtttcaaagattaaaggaacatcagcccacaaaggatagttccccaggaatgattcttaacaagggtgacatggctggaaggacagagatagaattcagaatccagatacgaacaaagatcatcgagattcaggagaagggcaaaacccaatccaagaaatctatggaatccagtaaaatgacacagacccgaaagtga

SEQ ID NO: 2371 - DNA, 1125 bp, Homo sapiens
  SIMILAR (1125)..(1015): 701254mologous to Canis familiaris microsomal signal peptidase,accession number J04067,Smith-Waterman Score=99.
tttttttttttttttttttgctgacctaaaagatttttaaaatgaagtagaataatgtacatcatataaagaggtatttagtctttaagtggaaagagttgttagtcacatgtaagaaaacgaagtattatgggccttcctaagacaaatggaataagttccatcacttttggcttttttataaaccagacttctaacaaatacccatattaattttccagtaatcaaacatatcctaaaagaggaaaaagagaatgtctacttttaaatcacatccaatgtgaatttgcgtgaatgcaaggcataaaatacagttattatgactctacaggcacctgaaagttttaactacctttcatgcttactttatattccataaagaataatggaaatacaggcaatgcttcaaatatgtattttttacaaatctgttttatgtagttcttattcttgtaagataatattccactgtggcagccttgtttttttgttttgttcataatattaagtagcccattaacctttccctttaaacaggccttttgatgttagttcttataccaaaaaaaaaaaaaaaaaaaaaacccaaaaccaaaaaacaaaccaacaatacatgaagatgtaagggaagagattaatgagatacaattcattaagtataaaaatatgttgtttcaaattcagaataactttaatggctcttcgttatttcataggtatcgggaaatgggacagatacgtgtcctgatcctgtcacaagaggtagaattccagcgtttggtatgacgttccaagacagggtcaaagtgacattcctgtttcccttgagaccatttccatcgtcaaagaaaaaatattctggttttcatatctttcagcagcagcttcggattatcacctctcaaaacaatcttgtcccataggacaacttggttcagagcattattttttgttgaatattctgctgataaataaagaaacaactgcttaacattccaatcaaatatattctcctagatcagcagttatatcaaatgtgataaatcccagatcacttctttctctagggtccagtggaaatccttcctacattttttaggcatgatccgccgagacgtgcagccg

SEQ ID NO: 2372 - DNA, 777 bp, Homo sapiens
  SIMILAR (63)..(251): 261254mologous to Bos taurus NADH dehydrogenase,accession number X63213,Smith-Waterman Score=72.
atggactccttgaacactaactgcgtgcagatccccaccagagcttacagaaaaacctggagaaaattaattggccaagcaccagagcctggagaatgtctgggcccaagtcaagaaggacacataggagactggccactggggggagctgcagcccctgtggattttgcctccaggaaagttggaaagggacaggaggacagcaaggtaatagggacttcccagctgtcacacagcctgggctctgctggtacagcaggcattcccatgctaatgcaaacatcctcaatgcagaaatctgaaactacgggactttatcggaatccaagcaggcacaggatgtacaattgtgccttctccccttcctccactctgcccagccactatctggaccttcactcaggacagcatcagtcttcaggccatgctgaccctataactcgaagaggcacatatctagctctctgggggtggtctgttgaagcttctgcagggcttgaagatgggacaggcacccctcactcctcctccctggcatcaagacgaagacaggcagccattgttggggagggagtcgacatcaagctggtatctcatctagctcgtgacttttctatactgagcaccttccaggtgtccagtgctgagcgaggtttaaacaaacaagcactcacacctgcagccaaggaagggcaagaagcagcagccaggtgtgggaacatgaacgccagacactcgggatccagacagtctcccaggagagcccatttccagtga

SEQ ID NO: 2373 - DNA, 249 bp, Homo sapiens
  SIMILAR (64)..(213): 351254mologous to Streptomyces coelicolor A3(2) putative regulatory protein,accession number AL391017,Smith-Waterman Score= 78.
atgtttgaagtcaatgactttcgaaaaatgagtgaaatccacgcaggaaaatccagcgctcttgttctaagggaagcaagctgctccatggaaagacccacagggcaagagctgatgtatctggccaaaggacagcaaagacttgaggcctgtcagcagctaagtgaaaaagtcacccgatcaaaccttgagatgactacagccccaggtggcaccttgattgcagctttggaagagaccctgagctag

SEQ ID NO: 2374 - DNA, 570 bp, Homo sapiens
  SIMILAR (171)..(230): 451254mologous to Bromheadia finlaysoniana extensin,accession number Y13142,Smith-Waterman Score=46.
atggccacgaccagcaaagtgggcctgatttccttaggaggggaagaagtgacggctgcagagcccttgaccatctcggtgtctgggctcgagtgtcccgccacccccagcgtctgcagatccccgggatctgtctgcctgttgacaagggagaagcctggtctcggttacctcctcctcagcgtcctgagcctggctggatcgccagcacactcagaccagcggccccaggctcttgtgacagcagccgtcagacccgtgggagttcagctctatcaagtgtacagcgtggtgtgtggggaaagatctgcatcccatgatgtttttgactatggagtgaccctggctctggtggcccagcttgcattgagtacttttagtcctattgccataaaagacctacatcaatacctgcctgaccccaagacccagattccagtcaatccaggctaccctcatccttccgagtttttgatccacgagtccagcaatatcactttggctttctctctttgtattttatctgtcactgctatgcgtttggaacagaggagatacacccgaacatga

SEQ ID NO: 2375 - DNA, 525 bp, Homo sapiens
  SIMILAR (102)..(1): 551254mologous to Homo sapiens Human secreted protein HCHPF68, SEQ ID NO:163,accession number Y86248,Smith-Waterman Score =94.
cgggccgccccccccttttttttttttttttttttttttttttttttttttttttctcctttaatatttgttttgatatttatttgaaggatgttttcttctgtgaaggcacgagttatggaggggacaagtggtttgagaaaacttctgaaggttttcaacttgagagtagtctgtgacccctagcttgattatcaggtcccaaaaatcctatcaccgcttaatgggaaccgctgtcacatccatattggcgaactctcccgcttcgtgttcgcgagccagacgctgtttccgcacggggccgccattttgagatcccaggcgtctcagtacaagcggaggactcgccaggcgctgagccggaatgtggactgtaccacagtgactgcgaagggaggggaagacgacggcaaggaggcctactacacgagcatatatagcaaatccagctttcagcagtatatcaagttttcttatagtgtctttggctttggtaacagagtaatgctatacctcatagaatga

SEQ ID NO: 2376 - DNA, 499 bp, Homo sapiens
  SIMILAR (280)..(438): 391254mologous to Saccharomyces cerevisiae ORF N0885,accession number X96722,Smith-Waterman Score=88.
tctcatattctaagaaaacatgaaggtccgctacggcagctctgaggctcctcctggggagaacctgcagaacaactcctgtcctgccattccatttatgggtaccaatttgaaaccgccaaaaaacccccaattattcttatgttggagtcttcctatggttacaatgacaggcacctccaagataatgacagagggtgacgctctcggctcggtcacggaaggaccgatggtggtgtcattcacagaaagtcagccaggactgcggagagatcatcgccagtggatgctttctctgacctttccttcctgcatgctgttgggaagactggccccaaatccaacgggaaggatatcagagaccaccgagtttggggcacagagaaactcacaaaaatgtgggagaagcagaaatagctacaccatacccgttttggaagaggctacatctacattcaagggaagtttatgccccattccccttgaactgtccatgtaa

SEQ ID NO: 2377 - DNA, 291 bp, Homo sapiens
  SIMILAR (130)..(255): 351254mologous to Homo sapiens Human secreted protein, SEQ ID NO: 5097,accession number G01016,Smith-Waterman Score=60.
atggaaaaagtcattttagtcgatgtaaattcagctcgactcagtgacatgaagctgctcttgggtccagatctctggcaacttgcttcgaatgactttgagaacaaaaaaatcaaggttttggacagtggtttggggttgactgagactcatatcctcacgttagaagatcccgttaatgtcacagactctcccacttggaaagagcgtgtgagtgtagacattcctgcatggagccaatgcttccacacttcaagatctgcagccagagagacactgtccttattgtag

SEQ ID NO: 2378 - DNA, 405 bp, Homo sapiens
  SIMILAR (381)..(136): 341254mologous to Cloning vector pKF298 modified alpha peptide of E. coli beta-galactosidase,accession number D63842,Smith -Waterman Score=87.
ttaaactaagaagttgggagcccagcaggccctaggaaatatgaaaattgctgctttgttgggctgcatgatgatggcagctcggtgtggaactctctctgccatgagagatctgagtttttcagatgaaaatcgccggctggctgtaggcacggctgctgctgctgtgagcacacacaaaggcgtgtggctctggagcctgtttgtctgtccctcaaggtctcttctttgtttttgtaactgttccaccgaactgagagccacagttgttctcatacgatgctctgtacttaaagggccttgttcaaaagtcccagttatacgggcagtaagcttgcatggcagcaacaatgaatgcctgcaggtcgactctagaggatcccaatgtgtcagtggagatttcat

SEQ ID NO: 2379 - DNA, 400 bp, Homo sapiens
  SIMILAR (95)..(400): 1001254mologous to Homo sapiens unnamed protein product,accession number AK001072,Smith-Waterman Score=533.
ggactgagagcaaatcgggacattcatcatgactttggctgccaagctggaagactttgagctgacactggagcacctgctcatggatgtgtttatgacggagggccgccgatgtcaagtacatcttcttgatgacaggaagctggaactcctagtacagcccaagctgttggccaaggagcttcttgaccttgtggcttctcacttcaatctgaaggaaaaggagtactttggaatagcattcacagatgaaacgggacacttaaactggcttcagctagatcgaagagtattggaacatgacttccctaaaaagtcaggacccgtggttttatacttttgtgtcaggttctatatagaaagcatttcatacctgaaggataatgctaccattgagctt

SEQ ID NO: 2380 - DNA, 564 bp, Homo sapiens
  SIMILAR (8)..(169): 341254mologous to Bacteriophage APSE-1 P52,accession number AF157835,Smith-Waterman Score=77.
atgactttggctgccaagctggaagactttgagctgacactggagcacctgctcatggatgtgtttgtggtaaggcagctgaaaggtcttctcgatccaagaacaacactgcgctgcccccgggaaggcggctgtgagctgttacctttccaggacccgccagtctgcgtctcgcagctggagaaggctatggaaggcagggccattgtacttctcatgttggcttctcaagagcgggtctatgagcaccccattccctttcttatttggaaagaaaacaacactcaccacggcattcacaatgctggggacctgatgaatgggaatggagaggctgcactaatggcccagtcccacagtgtcactgagtccagagtcgggactccaacaagccctccgcattccagcatgactgtgggcagggggtcaagctcccagtggggatccagtgacctgcaggtagaagcaggatggaagcaaagcctgcccgggaaaccttccattgcaggaacatctcggcctgaagctgtcatcagggagcaggatctgcttcctggactctga

SEQ ID NO: 2381 - DNA, 397 bp, Homo sapiens
  SIMILAR (148)..(53): 411254mologous to Homo sapiens keratin associated protein 4.9,accession number AJ406941,Smith-Waterman Score=71.
gcctgagcacctacctaccccagcctctattcttcctgcctccaaggatgcttggcgaacatgtctgggaacctttcaatgcagagcaaccagacctgtagcagttcggcctggggcaaccagacctggaacatccagtcctagaacagccattcctgaacactcagacctggtgcacccaatcctggaacaatcaggcctggaacaatcccttctatagctgtggagaggaatctctgcaagtcctgcatgcggttccagcaaattcttctctcagtgacttggaggctgccttggaaactgctgaagaaagctacaatggaatacagcagaccactaggtattttagtactccacaaaccatagatttattcctaaactattccaagaacatgca

SEQ ID NO: 2382 - DNA, 562 bp, Homo sapiens
  SIMILAR (240)..(386): 441254mologous to Volvox carteri extensin,accession number X65165,Smith-Waterman Score=104.
tcactgggccgaatgagcgtgcgctcctgatccgctttgcgcatcccagtgattcttgggttccgcgtgtagtttcggaaggagacatcgaagcagggcgaggcgcagagggcgttgcggactcatgccccagtcggcagtgcgggtaagggtgggagaagcaatgaggcgaatgcgagcagccgaagaaggcgacagtgtggctccaggcaatttctcagtccctgtgtacatcagaacctgccaccggccctcctgcaccaccgagggcaccaccagcccctggacagccatcgacctccagggctcctgctgtgaggggtacctctgcaacaggaaatccatgacccagcccttcaccagtgcttcagccaccacccctccccgagcactacaggtcctggccctgctcctcccagtcctcctgctggtggggctctcagcatagaccgcccctccaggatgctggggacagggctcacacacctcattcttgcttgcttcagcccctatcacataggttcactgggaaaatgattgttaaagtaagaatctgcacccc

SEQ ID NO: 2383 - DNA, 340 bp, Homo sapiens
  SIMILAR (101)..(139): 611254mologous to Homo sapiens insulin receptor,accession number S76825,Smith-Waterman Score=57.
tgctgcgcgtccgacagcccaactccggcctccaccgcgagtaaggcaacagggtatggcaccgaaaatggcaaggctgtggccccagcccctgggccccacgggtggacggcagcccctggcagtttggtggctttggaatgagtagggtgcatgtggcgctaagccccccccaccgccccggctttcctgcaggcttagcccgcgctttaggaccccatgagcaggcagatggcctggcacggcttgcttctggctctgcccttcctcagtctcccctcagaggcagggtttgtgggcaaggctgtgccaaaagtacggctcctgccactgcccccag

SEQ ID NO: 2384 - DNA, 486 bp, Homo sapiens
  SIMILAR (390)..(214): 581254mologous to Homo sapiens putative nuclear protein,accession number AF251040,Smith-Waterman Score=158.
cttacatcgatgacatgcggaaatgatagtattttggaaatactgggttaaatatactattcaaagtcatttcactttcttctcttaataactggctactaggaattttaaattatatatgtggcttgagttctggtttcactggactgcttcctctaagactcagccaccgcctgtaaaatggataacgatgtgccttcctcatggggctatctgtgccatcttggcaaggtctagagaaggcctctgctcttgcacttcttcagggcgccgccttttaacaccgaccttcttgtcgttaaggacacacggctgggagcggctgcgggaaaggccgctggagcgtctcgccagctctggtgttgaggcaggtgtgctgttggctgagggaggacagtattccacaaaggaaaactgctcatgtgagcaagagagggaccgctgcaggtccagccggcctcctcccacggagtgcaggtcaggggc

SEQ ID NO: 2385 - DNA, 2031 bp, Homo sapiens
  SIMILAR (1685)..(1909): 331254mologous to Caenorhabditis elegans final exon in repeat region; similar to long tandem repeat region of sialidase (SP:TCNA_TRYCR, P23253) and neurofilament H protein,accession number U23181,Smith-Waterman Score=87.
atggcggaaggggaagcaaacacatccttcttcacatggcggcaggtgagagaagtgctgaacaaagccccttataaaaccatcagctctcagtgtgccctccatggaagacaatatctggaacagagttgtgagctgctggggtggagcccagaggccgtgctcagcagtcctgtcttcagcaccccgatgtggccccaggcagctgaatgcgaacgagtgcccaccagcccctctgagagccttggacataccttctgcatcgctagtcctgctcagaagccacccccaaaactgccatctgccatctggggcctggtgcagaaacgtcgccaccgtgtggcctgtggggtgccctcggagaggggcccctgggttggccaccattcagaggacacgcgtggctctgggcctccaagggttcacagtccagttccacactcacagttgtcagcactgctgggaaagaaagaaaagggcctggagtctgagggcactgatgggagagggagtggggcaggactgagcggggcagggacgcttccggaaacagggacgttaaggctgagcactgctcccgtccatcgtccttgctgctgtccccccgagaatgggcgagttgctctctcttctgagcatgcagaatgtgccctccaaccaccccatgccatcaaagctgggggctgctctgccacttcatctgcagggcacacgcaggccagcaccgcctcctggggaacactgaccaagggagacggcttctctgaaggctgcttatcagatggtctgcaccggtacatcacacacactaggcctgtgcccatggggttccctgctgtccacgtgctggcccagcacggccaccctcaggacagcagcttgctggggcccagtgagtgggtggtgcccagggcccagagcctgccccggctgacctgtcctctggctagtggcagtgacactgatggggacttgctatcctgggtggtgacaccaatattcagcccagtaggcaaagaaactgaagctgaaggccagcctcgtgatgaaacatcacccacggatgccgtaggatggagtctggctgcacagaacaacacggatgaaatgaacgcaacttgtacccggttccccgaaacgccgactgaggccacctcatcaatcatagctgcaacgtcatcacctcataaactgtcaaagcggcccaagaagcaggctcaggaaggcgacatggcttccctcggtggcagaggaggcaggcaggtggcagcgctggggctggtgcccaccgtgtctcctctggcaagggctcagctgagccttgttggtgccactgtgggacagaacacctgtgaatgtggcctgcctggagaggggcagtggcagtggggctgtccgtcaaagctggtggccagtggaggtgggcaatgccagggtgaggctgtgtttatcacggccttcagccccagctccaccgggtctaggccagtcaagagggtggctgagaagcaggaggagcctcagagaccctcccctcgaaagcactggggcttccacctcacaagcggcaggttcgctttgggagctgctggtccatcgcccaggcctggccaggggcaggcgaggatcctggttgccgatccatcgtccaggcctggccaggagccgaactgtcagaccttcagcagcctcagctgcctgagcgcagggacagaggactgcggtccccagagccccttcgcccgccacgtcagcaacaccagggcctggaccgccctgctctcagcctccggcccagggggcaggacccccgctgggaccccggtccctgagcctcttcccccttccttcgacgaccacctcgcctgccaggaggacctgtcctgtgaggagtcagacagctgcgccctggacgaggattgtggcaggagagcggagccggctgcagcctggcgggaccgcggggcccctgggaacagcctctgctccctggacggcgagttggacattgagcagatagagaagaactga

SEQ ID NO: 2386 - DNA, 1527 bp, Homo sapiens
  SIMILAR (790)..(1392): 401254mologous to Homo sapiens putative nuclear protein,accession number AF251040,Smith-Waterman Score=285.
atgccccagcccttcatccagacctctgctgtgattgtgtcaggacctgtccctgcagtggactggaagctccagcttcttaatttgggtccctctggtttagctcagtgcagccagaattcacccagtgcctatgtgagtcgggcactgggctggcccaggggcctttggaatgaaggggacagtcggctggccatcacgggccttgcacagaagagagcaatgacctgccttcaggtttcaaaaggtccctctggccgctgtttgagagaaggtcacagtgggatgagggcagagcagggggactgctcaggaggcttttgcagtaaccgacggagtggtggcggtcactggcaccgagaagtgtacatgctgcaaagaaaatactctgttcaggagaccagaccacatgtgtcatctgcgtgcacatgtgtgaaacccgaaagacaagcagatgagacccgcctgccaaaatatttgctgccgcgcagaacaggcatttgcaagggagtagaacgaagaccaagtccgtgcaggggctgctggctctgtgctcagcacacgccccgtgaccacctcaggggcggctctgcgagtccccacttgacagaaaatgacagatggcgagacctggacaggaaatgccctcttcagattgaccaaccgagcaccagcatctgggaatgcctgcctgaaaaggacagctcactatggcaccgggaggcagtgaccgcctgcgctgtgaccagtctgatcaaagacctcagcatcagcgaccacaacgggaacccctcagcaccccctagcaagcgccagtgccgctcactgtccttctccgatgagatgtccagttgccggacatcatggaggcccttgggctccaaagtctggactcccgtggaaaagagacgctgctacagcgggggcagcgtccagcgctattccaacggcttcagcaccatgcagaggagttccagcttcagcctcccttcccgggccaacgtgctctcctcaccctgcgaccaggcaggactccaccaccgatttggagggcagccctgccaaggggtgccaggctcagccccgtgtggacaggcaggtgacacctggagccctgacctgcaccccgtgggaggaggccggctggacctgcagcggtccctctcttgctcacatgagcagttttcctttgtggaatactgtcctccctcagccaacagcacacctgcctcaacaccagagctggcgagacgctccagcggcctttcccgcagccgctcccagccgtgtgtccttaacgacaagaaggtcggtgttaaaaggcggcgccctgaagaagtgcaagagcagaggccttctctagaccttgccaagatggcacagaagaagtatctggccacacgcccctgtcacttggactttatcctctttgtcttggagctctgccttgtgctaacactgatcttggatattgatttgaatgagatgaacttggagttaatactctgtcatcaggagcgtctctga

SEQ ID NO: 2387 - DNA, 2892 bp, Homo sapiens
  SIMILAR (51)..(629): 321254mologous to Chlamydomonas reinhardtii vegetative cell wall protein gp1,accession number AF309494,Smith-Waterman Score= 167.
atgccagtaccagtggggatcgcttggctggccgtcccaagcacggccactctgctgctcctgaatgagcacacaccaaacaccctcacccgcacccgcttcattaacaccctcacccgctccaccagcaccctcacccgcaccctcacccgctccatcagcaccctcaccctcaccctcgcccgctccatcagcaccctcaccctcaccctcacccgctccatcagcaccctcaccctcaccctcacccgctccgtcaacaccctcaccctcaccctcaccctcacccgctccatcagcaccctcacccgcaccctcacccgctccatcagcaccctcacccgcaccctcacccgcttcatcagcaccctcaccctcaccctcacccgctccatcagcaccctcacctgcacccgcacccgcacccgctccaccagcaccctcacccgcaccctcacccgctccaccagcaccctcaccctcaccctcacccgctccaccagcaccctcacccgcaccctcacccgctccaccagcaccctcacccgcaccctcacccgctccatcagcaccctcacccgcacccacacccgcacccgctccattagcaaccccagcaagaacaacccgttatgtacacagcagaaatgcatcctcacgttcaccaaaggcacgttcaccaaaggcacactgctccacacagctttagttgcaatagcaaaagtcaaacactggacaaatgcccgccagggggaggatgggaaaacagaccacggcagaattgcacactggaatactccacaacggctcaatctgggtggtggaagcctaatggcagccgtcatgtttctgtgtgtgagccccaattcagctctacggcagccagccgtcggcacaaggcctgagagactcagctcaggtgtcaccacctccaggaagacctccacactccacactgagtcagaaaatgacagatggcgagacctggacaggaaatgccctcttcagattgaccaaccgagcaccagcatctgggaatgcctgcctgaaaaggacagctcactatggcaccgggaggcagtgaccgcctgcgctgtgaccagtctgatcaaagacctcagcatcagcgaccacaacgggaacccctcagcaccccctagcaagcgccagtgccgctcactgtccttctccgatgagatgtccagttgccggacatcatggaggcccttgggctccaaagtctggactcccgtggaaaagagacgctgctacagcgggggcagcgtccagcgctattccaacggcttcagcaccatgcagaggagttccagcttcagcctcccttcccgggccaacgtgctctcctcaccctgcgaccaggcaggactccaccaccgatttggagggcagccctgccaaggggtgccaggctcagccccgtgtggacaggcaggtgacacctggagccctgacctgcaccccgtgggaggaggccggctggacctgcagcggtccctctcttgctcacatgagcagttttcctttgtggaatactgtcctccctcagccaacagcacacctgcctcaacaccagagctggcgagacgctccagcggcctttcccgcagccgctcccagccgtgtgtccttaacgacaagaaggtcggtgttaaaaggcggcgccctgaagaagtgcaagagcagaggccttctctagaccttgccaagatggcacaggtgtgtgagagcctcgggttaaagctgcagagggccttttcagttagacctttggagcagctggccattctgaaaagctgcagctcccctagaggtcccgactggggcctagagcagatcttgaggagcatccccagtccaccttctttgctgaaatggaatttcctctacaaagcttctctgggaaagagccatttatatgactggttcttgtgctctcgacacaggaaacatgggtcaggtggcagctccgtggtgcggcccaccccctggtcagccggctggccatcggaatcccttgttccttgtgccttgtgtgaggaacttggtgtcctgtgttgctgtccccgaatccaagacacagctgccattttacagtccatcccagccacccagatgaagacgaggagcacctccaatacccaagcctccctccacccagtcaacactcttctccagagggagctagcccgtgccttcacccccgtcttctgcctgacggtaaacttgaggcctggctccccgggtcctgttgaccaccaggctgcagatcccaaggaatgcaggcatctgggtggccccacgtggagcaccagccatggggaggccgtgggctaccaggccctgcgtgcactcgcagcatgcaccactccttctccagcagtgctgacaactgtgagtgtggaactggactgtgaaccctggagggcagatggtggaggtgggagggggcagggccagcgccagggtgagctgcagggtccccaggtgtcacccatggaggctgcaggagcacctggcgtggtccaggggacacgaagccctggtgctggctcctcccaacgcccctgctcttggaccctcattgagaaccaggcaagaaattcccaagggcttcaggccccagcagttcacagcctccagtgctctgcacagttccacagccccctttctccactgaagggtaccaaaggcgtgggcatagccttctcttactgccccaaacttgtctatcacctgactggcattgggcccttccagaggaaaagggtctatggcagcaccaagtgggaaccaaggctgacccccaacccccccacactcttatacccgtaccccaaagccccactcagcaaagctacatgcagtcactga

SEQ ID NO: 2388 - DNA, 5700 bp, Homo sapiens
  SIMILAR (5142)..(4480): 381254mologous to Homo sapiens putative nuclear protein,accession number AF251040,Smith-Waterman Score=280.
  misc_feature (1)...(5700): n = a,t,c or g
gtcccccggcgtctccacagctctgtgatgtctgctagccccattttatcgattcagaccccgaggcttggaggggacagaagggtccagtctaggtctctctgcgccccagagctaatgctcctgtgagcaggggggacctgccagttcaccacacccaacagaaaccacacagctggcacccaggcacttgggtattgaacccnggaagctttatttacacagtacaagtaacaagcaaattcctcgagagactagagcggctggagtgcaagcctacagcctgtgcgcgggaggccaggctgcaggggcgggcagaccctgggccccgggtctacgctttctggttcgccacacttcctggaaggcacggcaacacccacaacatccagctcagggaagcccctgcagccccagaaacagcctatgtgctatctgtcgccccagccccccaggacaggcttccccacacactgaaaacacaaatcatttgccaaaaagactatggctagaaaggtcagacttatccctattctaggcttacaaagatcttccacttcggtctgccattaaaaaaaaaaaaaaaatctttctcttcttttctctttaaagaggctgacgagggggggtttgaccaacagcsgtgggacatggccaaggktgtggccatcattgccaagtgtggggcagaagagggtgcccgagcccccgggtgcgcggccagcctgctgcatccctgcgggcttgacgttgggaagtgaaaccgtcatttccaagggaaccaccccccatagccacagacggcacgtcagtggaaacgggggtgcagcaggcatgacaccaaggcagagcccgcagcagggggcccggggttccacagctagggaagcttgctcagacaggcagcacaacccagggcacggccactcacgcccccgcaccaggagacccatttggaagttagttagggtttgttttgttttctgtttaatgtggacttcccctttatttaaattttctttcagtgtacaaattcacaaaactggctacaaaaatttggttgaaaagtaaggctttctgagaatgaaaatctgtacgtctggtcagaacaagctccccacgggcccagtgtgcacgtctgcccgtgcaaatccggcctccaccgcgagtaaggcaagagggtatggcaacgaaaatgggcaaggctgtggccccagcccctgggccccacgggtggacggcagcccctggcagtttggtggctttggaatgagtggggtgcatgtggccactagcccccccccccccgccccggctttcctgcaggcttagcccgcgctttaggaccccatgagcaggcagatggcctggcacggcttgcttctggctctgcccttcctcagtctcccctcagaggcagggtttgtggcaaaggctgtgacaaaagtaaggctcctgccactgcccccagctggggccatcatgctggtgggggtgagctgtctgcctgctgcccatggggacaccaatgtggggggcacctcctaggcgaacctccctcccagaggactgagatcagaagtcctggggccagcagggtggagtgcaggaacaggctgctccgggcagtgtggcagcttggatgatggggtggcaccttatagatagggtctactccctccagtcaaaacacaaacatgaaaccagctaaaggccatttctttctctaagcagaagggatagccaccattttctcccctgactgctgcgtggtgggcacaggacaggcaggcggggtctgaggaggctgggtcatttctccctaagcgccctggggctgggcttgctggtcgatgggaccagcttgcggggaggtggggaggtggctgtgactcagccagctccacagcttgtcccttcctgccaccaggcctgaatggggaggtggcaggcaaggtttgagggcaggtcacccacaccccagtcccacgacatatacctgtcaccatgtgcctcccaccccagccctaagcaaaggtagctgggggctgctgcatgcctcagcctcagctggcaccgtccacctccctcactgcctctgccttccacaggaaggcctgctatagaggctgtgtgccctcggccacaccgggcatgtggtgccaggaccccccacgcccagtggtactccgggggcaagacatggccatgtgctctccacattcacccaacaactgccctggccgcctccacatttgctctaagaagacatggtctccatgacccccaggccagggacaggccaagatgtctctgtctgctcagagccaccagctcttgggttcggctgtccgggatcacaagtagacatgcctccggcaggaggtacagcaaccagaggtgagctggttccccggctctgggacctgcccagtgcccggcataccccatgtgtcagccacctgagctagcaacaccatctctcagggctgtggggctgggggctttctgccagctccttaaagctgatttttaagaagtgccacccacatattgggaacttgaaccaccatccttttgatgtagtaaaaaaataagatttaaacaacgtttcccaaaaagcatctttcttgaggagaaagaaggtgagaagcatctggactcaacctgcagaagcgaggcgttcactcgtccatgaagacgagcaaaagcaaagtgactacaaaagtgctttgaacgcgcgtgtcagccaacacaagggagcgcaccagttatttttagccttatgggaaaatgagccacttgctcctaagccagcccaattgctattgtttgcagaagacgccacattcgctaaaagccagattcccatagagcagagcccatgtggtggtgtctgcaaggcagccggagaggagctacaaaccttgagaggagagcaaaccctcagggggctaggctcctcggatgccccagggtgaggagccagggtggggtaggggcagggagcatgaatccagctttgtgccggtggctgggcctacaacagagatgcagccctcaggactgggctccccctaagctgacaagggcgtgggcttgtcttgaggtgggtgatgtgccctggttacagccagcagtcctcaaggacaaacgggaggtgcctggaatcctgcaggggcccctgcagagtggccagcggacgcccttcacccctgagtgcgcatagggccctcatctgcccacctgctcgcagctcccgtctcccgaggccgttttcaagaggctgccctggtatcgtgccatccctacactcaccggaaccaaccatgcttatcactcagtgacctgtcagccacagagaagggctgccatctgctaaccctgccccaacggtggcagagccatggggtcagcctctccatgctgtaggagaggcaagcaagtccatcttttcagccaacagatccaccaaatttctacccaacacgggaggccctaacaagcaccctccaaatcgttccttgggcccgagactccggacatggcttaccctctggagggccagtccagcaccccagggattctgtctctcacattggaattaaggccaaatggttctggtgttacagaaggaagcatctcccgaaccttcccaaagcctgaagcagggagacctgggagagaaggcacggagtaaaactgagtgaaagaagctgcggggccgactccccagaagtgaacctgagtgaggccaagaagggccctgacatagcagatggcccctggcccccaccccaggccctccctgacagcccccaccaccagggggatacagagcggtgcccagctctgccggggacaacagagactgcccaacatcccacagggaaagaggcagaaaagacgcaaacttcaaagctgtcctctgggctgcagtagttctgtggacctggtggctgccacgctcggggagccggtgagaggctgacacacccgctgtatgacgcggccaggccaggctctcccccaggcagcaggtgggctccctctctgggacccgacaccactcaggaagctttcatcaggcccacgagttgggctccccttcaagggcccacctagtgcccagagtgggggctgtcgatgccagcacaccccagccctgcctgggcccacaccccctcagttcttctctatctgctcaatgtccaactcgccgtccagggagcagaggctgttcccaggggccccgcggtcccgccaggctgcagccggctccgctctcctgccacaatcctcgtccagggcgcagctgtctgactcctcacaggacaggtcctcctggcagacgaggtggtcgtcgaaggaagggggaagaggctcagggaccggggtcccagcgggggtcctgccccctgggccggaggctgagagcagggcggtccaggccctggtgttgctgacgtggcgggcgaaggggctctggggaccgcagtcctctgtccctgcgctcaggcagctgaggctgctgaaggtctgacagttctgtgccatcttggcaaggtctagagaaggcctctgctcttgcacttcttcagggcgccgccttttaacaccgaccttcttgtcgttaaggacacacggctgggagcggctgcgggaaaggccgctggagcgtctcgccagctctggtgttgaggcaggtgtgctgttggctgagggaggacagtattccacaaaggaaaactgctcatgtgagcaagagagggaccgctgcaggtccagccggcctcctcccacggggtgcaggtcagggctccaggtgtcacctgcctgtccacacggggctgagcctggcaccccttggcagggctgccctccaaatcggtggtggagtcctgcctggtcgcagggtgaggagagcacgttggcccgggaagggaggctgaagctggaactcctctgcatggtgctgaagccgttggaatagcgctggacgctgcccccgctgtagcagcgtctcttttccacgggagtccagactttggagcccaagggcctccatgatgtccggcaactggacatctcatcggagaaggacagtgagcggcactggcgcttgctagggggtgctgaggggttcccgttgtggtcgctgatgctgaggtctttgatcagactggtcacagcgcaggcggtcactgcctcccggtgccatagtgagctgtccttttcaggcaggcattcccagatgctggtgctcggttggtcaatctgaagagggcatttcctgtccaggtctcgccatctgtcattttccataattccacaagagaaaagtgtaggtccttgactcatcttctttggcgtgtgcagttcacggctgaaggtcccacatgcaatggagtcagatttcccccgcgccgctgaggcttttacttatgaccattaccatgataagggcctcaagccgctgggctccatcccagggtgggtatcaaccatcttcacttgggcagacttggggtgagtacctcctggggaattgatgtcagcagaaacagctccccattggccactcacccttggggtggggcccttctgggaaatggccaaatgtggtcaactcctgtgcgcggcggggcgctccgggcgcggaccccgcgctgtcaccgccagcgctcgcacgaaatagtt

SEQ ID NO: 2389 - DNA, 746 bp, Homo sapiens
  SIMILAR (155)..(472): 321254mologous to Rhodococcus sp. CIR2 transposase,accession number AB024936,Smith-Waterman Score=90.
gaaatacacagaaatcccttaaaattccaggagttcccactctcttctcgaatatttaaggcctcctccgcacaacattggagtacacgtgtctagaaacaagacaaatctccaaggtctctggggtgcttgctggggtggagataagggaaagacctctccctgagtcttaaagcatcagtctgcacttctactcaacaagtcggcagccaaaagtgacgacgagagagcgactcctcgtagcggcgccaggcgcgagcccaagacaaccagaggcggtcacaaggtatacgcccttctcctctttccacgcttctcgagaggctcccgcggccagacccggaaaacaaggagtaacagtcgcgtttcaaatctcgcagacctgctggccgatttcgagtcttctgaaagaggaaggcgagcaaagccaaaattctcccagagcgcgaacccaaacacagatcgccgctggggtccaagcgcccttcaactccgcccgctagtgcccaagattaccgggaaggaattcaacgaatcagtggtgaggtgccgccgccatgcctactacgggcggaaatttgagagaaagcttcgcaccggtaggaaaactgaggagcaaccgagcacgattggaaaggttgacgatagtggttaagtggctcggccttgccctcagttaaaatggcaattttagttgcttcactgcggacgcgtgggcggacgcgtgggtcgcccggagagtccgg

SEQ ID NO: 2390 - DNA, 346 bp, Homo sapiens
  SIMILAR (1)..(240): 271254mologous to Penicillium purporogenum alpha- galactosidase,accession number AB008367,Smith-Waterman Score=84.
atgagaacaagtccacaaaagcatattaatatttatgagaccacagagaggacagctgagacaccccagctggcagctggcccacctccagaagtatggctatctggctttccacaactgaccaaagctcctggaagcccagagcgccggtggatcgcgagccaaggcggcgggtggagcctgagccgtgaggccgtggccaatcgcgccgctccgggggaggagccccaaagggggaaaagaaagtgcggcggaaaaccgctgctggaagcgccgaggacagaaggaagcggtgtgtcccagcacgcccactcggtatcacgtcgctctcagcgcagagctgtga

SEQ ID NO: 2391 - DNA, 524 bp, Homo sapiens
  SIMILAR (512)..(243): 331254mologous to Oryza sativa Similar to maize transposon MuDR mudrA-like protein. (AC002340),accession number AP000366,Smith -Waterman Score=87.
ctgtcaaaggcgcttttttcgaagacgcccgggagctcttgcttttgcttgagggtctttggtgttgactgagagcgaattaaaaggttctcagctttcgctaaggaacgcattctggagttcggagcacaggttacaacttccagaaacccttgggacgcgccgtcccaaacttgggtttctggcgtctcctgcgtttccggcccgggactacaattcccacaggtcactgggccgaatgagcgtgcgctcctgatccgctttgcgcatcccagtgattcttgggttccgcgtgtagtttcggaaggagacatcgaagcagggcgaggcgcagagggcgttgcggactcatgccccagtcggcagtgcgggtaagggtgggagaagcaatgaggcgaatgcgagcagccgaagaaggcgacagtgtggctgggtatgaagacttgagggagggggtggggcaaaacgaggtcaggcgtctccctggccgcgtgtgatggaccgtccgtggtggtgacagacat

SEQ ID NO: 2392 - DNA, 525 bp, Homo sapiens
  SIMILAR (438)..(500): 421254mologous to Canis familiaris brain-specific synapse associated protein, Bassoon,accession number AJ012166,Smith- Waterman Score=42.
tttcgtccggcgttccccgcgcaaagcagccgctgctcctaatgagctcatgggttcaccgcgctgagctagccagagcggacccggcttcgccaagggcctgctggctgtcctgacacctggcctacctcgggggtgcctggggacgctcttcctttgcctgcgggatagaagcacaatgaaaatggggtggacgtggctgggagacagccctgctctccggcaggctctggggagtgtgtggtacgtggcatccgcactgggggactggagggtactcaccgactagggcttcacagccgcatcaccgccggcgttaatcaagtcaccaacggaccaaaatctgaagtgaattccatcttcctagtagcaagacaccaggtgggatacttagaactaccaccacgatattgcaaaaccagggggcctgagttgctgctggagggcatggtgttgcagaaatcactgctgtcctgcgagctgcaggcccaccgcaacctcatcaatccttacctgaagtcttag

SEQ ID NO: 2393 - DNA, 3270 bp, Homo sapiens
  SIMILAR (913)..(3267): 711254mologous to Homo sapiens liprin-beta1,accession number AF034802,Smith-Waterman Score=2740.
atggagggtgtgggctgggtgtctgcaggctgtggtgcaccgagagccttcccgaaactgggctgcctggccacagctgctgcatccgagaactacaaatcttatattcagcatgtagccaattgtgcagttttgacattcatagctctccagtgctttggactgaatgtttattgcaagaacttgcagctgactttctatcaggtcattctgatgttgtccagggatgccgtcagagacaatcctagaggaaaacagaaactcccaaggagctgggtagccaagagaggagcccagaccttccatcttccatctggtgacctgatggttctggcatttgacctctctgaagatctgggttggaatttgcccctgacaaataataaaatgatgagtgatgcaagtgacatgttggctgcagcgttggagcagatggatggtatcatagcaggttctaaggctctggaatattccaatgggatttttgattgccaatctcccacctctccattcatgggaagtttgcgagctctgcaccttgtggaagacctgcgtggattgttagagatgatggaaacagatgagaaagaaggcttgagatgccagatcccagattcaacagcagaaacgcttgttgaatggcttcagagtcaaatgaaactaccagtggcatcacatcttactcagagtaaaaaccacagtgcttactgtgggctgcaaggcctcgtaggatttgccccccatgactttctgacttcatctcttgtcacacatctccttattcgctccacgccaagcacagtggctttttcactgattcttaaacatgccagatactgtcgctggcatatagcaaacagtgaattcaaggaagacctcacagaccaagccctgatagaggtggaccttaaggaatggggaaagaagaagaaagggtgggaaaagacggtaagtgtgttaacagaccaggtggaggctcagggagagaagattcgagatttggagttttgtcttgaagagcacagagagaaggtgaatgccacagaagaaatgctgcagcaggagcttctaagtaggacatccttagaaactcagaagttggatctgatggctgaaatatctaacttgaagttgaaactgacagctgtagagaaggacagattggattatgaagataagttcagagacacagaggggctgattcaggagatcaatgatttgaggttaaaagttagtgaaatggacagtgagagacttcagtatgaaaaaaagcttaaatcaaccaaagatgaactggcatctttaaaagaacaactagaagaaaaggaatctgaagtaaaaaggctacaagaaaaattggtttgcaagatgaaaggagaaggggttgaaattgttgatagagacatcgaagtacaaaaaatgaaaaaagctgtggagtccttgatggcagcaaatgaagaaaaggatcggaaaatagaagatcttcgacagtgcctgaacaggtacaagaaaatgcaagacacggtggtactggcccaaggcaaagatggagaatatgaagagctgctcaattccagttccatctcctctttgctggatgcacagggtttcagtgatctggagaaaagtccatcacccactccagtaatgggatctcccagttgtgacccatttaacacaagtgttcccgaagaggacagagctccggcagaaagcaggccatttgggacccttcctcccaggcccccagggcaggacacctccatggatgacaaccccttcggcactcgaaaagtcagatcttcctttggccggggcttttttaaaatcaaaagtaacaagagaacagcaagtgcaccaaacttagctgaaacagaaaaagagacagcagagcacctagatctggctggtgcttcttctcggccaaaagattcacagaggaacagtcccttccagataccgcctccatctccagattccaaaaagaaatccagaggtatcatgaaactctttggaaaacttaggagaagtcaatcaactacattcaacccagatgacatgtctgagcctgaattcaaaagaggagggacaagggcaaccgcggggccccgattaggttggtctcgagacttgggacagtctaacagtgacttggatatgccatttgccaagtggaccaaggagcaggtttgcaattggctgatggaacagggcttgggctcgtacctgaattctggcaagcactggattgcatctggccaaacgcttttgcaggcttctcaacaagatctagagaaggaacttggaatcaagcattcacttcatcgaaagaaactccagctagcactccaagccctgggatctgaagaagaaaccaatcatgggaagctggatttcaactgggtcactagatggttggatgacattggcctccctcaatataagacccagtttgatgaaggacgggttgatggtcgaatgctacattacatgactgttgatgacttactgtctctgaaggttgtaagtgtgctacaccatctcagtatcaaaagggccatccaggtcctgaggatcaataactttgaaccaaactgtctacggaggcggccatctgatgagaataccatcgccccatcagaagttcagaagtggactaaccatcgagtgatggagtggctgcgctccgtggacttggcagaatatgcgcccaatctcagaggcagtggtgtccatggtgggctcatggttctagagcctcgttttaacgtagaaacaatggctcagttattgaacatcccacccaataagactttgctgcgaagacatttggccactcatttcaaccttctgattggggctgaggcacagcaccagaagcgagatgccatggagctgccggattatgtacttctaacagctactgccaaagtgaagccaaagaaacttgcctttagcaattttgggaatttgagaaagaagaaacaggaagatggtgaagaatatgtttgtccaatggaattgggacaggcatcaggaagtgcatctaagaaaggatttaaacctggtttggatatgcgcctgtatgaggaagatgatttggaccggttagagcagatggaagattcagaagggacagtgagacagataggtgcattctctgaaggcatcaacaatctgacgcacatgttaaaagaagatgacatgtttaaagattttgctgcccgttcccccagtgccagcattacagatgaagactcaaacgtttga

SEQ ID NO: 2394 - DNA, 501 bp, Homo sapiens
  SIMILAR (52)..(204): 451254mologous to Homo sapiens Human secreted protein, SEQ ID NO: 7424,accession number G03343,Smith-Waterman Score=89.
ctgccgaacatcaatcattgctctgttcaccatctccatgctgtcgacctgcccgttagtcacttagtagccctctcagttatccgatcaactgtcagggtgttgcagtgcttgtgttcggtcacctttactttacttgagaatgccccaaagtacaggagtgatctgggttggaatttgcccctgaccaataagaaaatgatgagtgatgcaagtgacatattggctgcgacgttggagcagatggatggtatcatagcagagaagcccacatggcaaggaactgagagagatccagtcaacagccaccaaggaattcaggcccccagtccaacaacctgtgatgaactgaatactgccaataatcatagcagaaaccacccatgcgcggcaacacgaataccgcctagtccccgatcgtcggctcgatcagttaaatgcagctgctacgacatggtatcgccgactggcaagctggcaggtgcgcgccacgcagattga

SEQ ID NO: 2395 - DNA, 4064 bp, Homo sapiens
  SIMILAR (298)..(3291): 991254mologous to Homo sapiens liprin-beta1,accession number AF034802,Smith-Waterman Score=5078.
ggcacgaggtagtgcaggcagggtggggaaaggacggggaaggactcgtgtgctgcgagctggcggccgggccggagtgctggggctttgaactccgagaggaggtggaccagaacttttggaactagtgccggcggctctccaccccccagtataaaagaacgtgtggatcactttgctgagtacatccaagatttgaagaactgaaataaatcagctttaaacctgctttttaaaaatatctgggttggaatttgcccctgacaaataataaaatgatgagtgatgcaagtgaccatgttggctgcaacgttggagcagatggatggtatcatagcaggatctaaggctctggaatattccaatgggaattttgatggccaatctcccacctctccattcataggaagttagcgagctctgcaccttgtggaagacctgcgtggattgttagagatgatggaaacagatgagaaagaaggcttgagatgccagatcccagattcaacagcagaaacgcttgttgaatggcttcagagtcaaatgacaaatggacacctaccagggaacggagatgtgtatcaagaaaggctggcacgtttagaaaatgataaagaatccctcgttcttcaggtaagtgtgttaacagaccaggtggaggctcagggagagaagattcgagatttggagttttgtcttgaagagcacagagagaagttgaatgccacagaagaaatgctgcagcaggagcttctaagtaggacatccttagaaactcagaagttggatctgatggctgaaatatctaacttgaagttgaaactgacagctgtagagaaggacagattggattatgaagataagttcagagacacagaggggctgattcaggagatcaatgatttgaggttaaaagttagtgaaatggacagtgagagacttcagtatgaaaaaaagcttaaatcaaccaaagatgaactggcatctttaaaagaacaactagaagaaaaggaatctgaagtaaaaaggctacaagaaaaattggtttgcaagatgaaaggagaaggggttgaaattgttgatagagatgaaaattttaaaaagaagctcaaagaaaaaaacatcgaagtacaaaaaatgaaaaaagctgtggagtccttgatggcagcaaatgaagaaaaggatcggaaaatagaagatcttcgacagtgcctgaacaggtacaagaaaatgcaagacacggtggtactggcccaaggtaaaaaaggcaaagatggagaatatgaagagctgctcaattccagttccatctcctctttgctggatgcacagggtttcagtgatctggagaaaagtccatcacccactccagtaatgggatctcccagttgtgacccatttaacacaagtgttcccgaagagttccatactaccatcttgcaagtttccatcccttcattattgccagcaactgtaagcatggaaacttctgaaaaatcaaagttgactcctaagccagagacttcatttgaagaaaatgatggaaacataatccttggtgccactgttgatacccaactgcgtgataaacttttaacttcaagtctgcagaagtccagcagcctgggcaatctgaagaaagagacatctgatggggaaaaggaaactattcagaagacttcagaggacagagctccggcagaaagcaggccatttgggacccttcctcccaggcccccagggcaggacacctccatggatgacaaccccttcggcactcgaaaagtcagatcttcctttggccggggcttttttaaaatcaaaagtaacaagagaacagcaagtgcaccaaacttagatcgtaaacgaagtgccagtgcacccaccctagctgaaacagaaaaagagacagcagcgcacctagatctggctggtgcttcttctcggccaaaagattcacagaggaacagtcccttccagataccgcctccatctccagattccaaaaagaaatccagaggtatcatgaaactctttggaaaacttaggagaagtcaatcaactacattcaacccagatgacatgtctgagcctgaattcaaaagaggagggacaagggcaaccgcggggccccgattaggttggtctcgagacttgggacagtctaacagtgacttggatatgccatttgccaagtggaccaaggagcaggtttgcaattggctgatggaacagggcttgggctcgtacctgaattctggcaagcactggattgcatctggccaaacgcttttgcaggcttctcaacaagatctagagaaggaacttggaatcaagcattcacttcatcgaaagaaactccagctagcactccaagccctgggatctgaagaagaaaccaatcatgggaagctggatttcaactgggtcactagatggttggatgacattggcctccctcaatataagacccagtttgatgaaggacgggttgatggtcgaatgctacattacatgactgttgatgacttactgtctctgaaggttgtaagtgtgctacaccatctcagtatcaaaagggccatccaggtcctgaggatcaataactttgaaccaaactgtctacggaggcggccatctgatgagaataccatcgccccatcagaagttcagaagtggactaaccatcgagtgatggagtggctgcgctccgtggacttggcagaatatgcgcccaatctcagaggcagtggtgtccatggtgggctcatggttctagagcctcgttttaacgtagaaacaatggctcagttattgaacatcccacccaataagactttgctgcgaagacatttggccactcatttcaaccttctgattggggctgaggcacagcaccagaagcgagatgccatggagctgccggattatgtacttctaacagctactgccaaagtgaagccaaagaaacttgcctttagcaattttgggaatttgagaaagaagaaacaggaagatggtgaagaatatgtttgtccaatggaattgggacaggcatcaggaagtgcatctaagaaaggatttaaacctggtttggatatgcgcctgtatgaggaagatgatttggaccggttagagcagatggaagattcagaagggacagtgagacagataggtgcattctctgaaggcatcaacaatctgacgcacatgttaaaagaagatgacatgtttaaagattttgctgcccgttcccccagtgccagcattacagatgaagactcaaacgtttgaccgtagcacctggatgaacattaggagtgcttagtcttttttctacttgcttttccaaacactcacagtatatacaacaggcagcggattgtctattgtttgttgttctaacttctgctgtcgagaagtttaaacagaaagcaggagtaatgtgccgattctgaagttgccacaaaaaataagacactggtgaatgagagtataattgtttttcttctatttaatgtaaaaatctgtgatatattatatttaaagtgttgcatttaagatgagtattttaccagagtgtttccattcatatccgcggtatggaggatttgaggaacagtaaccaggatgtgaatgattttgttacatcagtgttcactgtagccacctaagtaggacattatatgatttcagaatcaatatgtggaacttctttaagcattcagtgtgcccactaaatgccagccacacctccacttgcctcttattgtcttatttttatatatttttctaaatatatgtatatatacagtacatagaaaatagaacttttattttgtgacctaaggacgatggtgaaaagatcacgttttcaaaacaatctggtgatcagaatgttcatataccagctggtttctgaagaggtcagaatgatctttctccatactgacttttaacaatgttgatcattgaggctaaattaatatatatgaaatattcctttttgatgacaccacaaaattgttgaacagtttaagaatttcaaccttaatcttggatcc

SEQ ID NO: 2396 - DNA, 460 bp, Homo sapiens
  SIMILAR (275)..(343): 301254mologous to Bacteriophage SPP1 promoter 3 protein,accession number M15348,Smith-Waterman Score=39.
caccggtccgtaattcccgagtcgacgatttcgcggagacagcagggtgacagaattggaaaatatttatttcttatctaatgaattccccacttgaactctgccgaattcctgtgccacctcctcctttagaaaactgatcttaatacagagataaaagaggagtcgaaggtaaaagaaaatgctgggaactgaccgatgtgttggggaagaatggttatcaaaattcaaggcattacctgacactcagatcaccagttatgcagcaactttacaccggaaaaaaacacttgtaccagccctctataaagttattcaagattcaaataatgagctcctggagcctgtctgccatcagctgtttgagctctatcgtagctcagaggttcgacttaagaggttcacactgcagttcttgccagaattgatgtgggtttatttaccggttacaggtagccgg

SEQ ID NO: 2397 - DNA, 2953 bp, Homo sapiens
  SIMILAR (1427)..(2797): 1001254mologous to Homo sapiens origin recognition complex 2 homolog,accession number U40268,Smith-Waterman Score=2317.
ggtttgtgtgagtggctttccacggcaacatgaaaaacactggaaagaactctgtggtcgaatagtattggatcctgaatttatggtgcaacttctcacaggggtttattatgccatgtataatggacagtgggaccttggccaggaagttcttgatgatatcatttatagagcccagctagagcttttttctcaaccactattggttgccaatgccatgaaaaactcattaccatttgatgctcctgattctacacaagaaggccagaaagtccttaaagttgaagtcactccaacagtgccgaggatttctcggactgcaattacaacagcttcaatccgtcgtcatagatggagaagagaagatggctttgacttctcaaacgaggctgactcgagtattcctggctccccgatccaacacggctccactgacctagggatcaaacgtgtgcaagagggggaggtgctggtgcgcaggacccctgagcatggctcgccggagcccaactcagcaacagccacaacagagggtgctgagggtgtaaatggaggagaggagtctgtaaacctgaatgatgcagatgaaggattttcatcaggggcttccctcagcagtcagccaattgggaccaaaccatcctcctcttctcagaggggaagcttaaggaaagtagcaactgggcgttcagccaaggataaagaaacagcctctgccatcaaatccagtgagagccctcgagattcagtagttcgcaagcagtatgtacagcaaccaactgatcttagtgtagattcagttgagctgacaccaatgaagaaacacctgagcctgcctgctggccaggtggtgccaaaaatcaatagcttaagtctaatccggacagccagtgcttcctcaagtaaatcatttgactatgtaaatggcagtcaagcaagtaccagcattggggttggcactgagggaggtactaatttagcagccaacaatgctaatcgatactcaactgtcagtctgcaggaagaccggctaggtcaagctggcgaagaacactttttaaagattgctacaagacaaacagctaccactcagccagctactgtgcaaacttcctcagatccaaacaacacttccttttcccttccccggaaacggaaagaagaaaggaaagggcgggagattcggtgtgccgcacgcaggcttcccatcccccagctggcctccggtgctccttacctccccggtggtcgggcgcgaattactggaaattggcttttcccgttggggccgaaggtaccttccctgcggcggcgactcagcggggtgtcgttcggccggcgtgacgcagccggatcggcgccagacggaaacctagcggtgactgtatctgaattttgcagctgcagaatgtgtagtaccttaaaaggagctaaattgaagaaggagcgagcgcagcttttggtcaaccccaaaaaaataataaagaagccagaatatgatttggaggaagatgaccaggaggtcttaaaagatcagaactatgtggaaattatgggaagagatgttcaagaatcattgaaaaatggctctgctacaggtggtggaaataaagtttattcttttcagaatagaaaacactctgaaaagatggctaaattagcttcagaactagcaaaaacaccacaaaaaagtgtttcattcagtttgaagaatgatcctgagattacgataaacgttcctcaaagtagcaagggccattctgcttcagacaaggttcaaccgaagaacaatgacaaaagtgaatttctgtcaacagcacctcgtagtctaagaaaaagattaatagttccaaggtctcattctgacagtgaaagcgaatattctgcttccaactcagaggatgatgaaggggttgcacaggaacatgaagaggacactaatgcagtcatattcagccaaaagattcaagctcagaatagagtagtttcagctcctgttggcaaagaaacaccttctaagagaatgaaaagagataaaacaagtgacttagtagaagaatattttgaagctcacagcagttcaaaagttttaacctctgatagaacactgcagaagctaaagagagctaaactggatcagcaaactttgcgtaacttattgagcaaggtttccccttccttttctgccgaacttaaacaactaaatcaacagtatgaaaaattatttcataaatggatgctgcaattacaccttgggttcaacattgtgctttatggtttgggttctaagagagatttactagaaaggtttcgaaccactatgctgcaagattccattcacgttgtcatcaatggcttctttcctggaatcagtgtgaaatcagtcctgaattctataacagaagaagtcctcgatcatatgggtactttccgcagtatactggatcagctagactggatagtaaacaaatttaaagaagattcttctttagaactcttccttctcatccacaatttggatagccagatgttgagaggagagaagagccagcaaatcattggtcagttgtcatctttgcataacatttaccttatagcatccattgaccacctcaatgctcctctcatgtgggatcatgcaaagcagagtctttttaactggctctggtatgaaactactacatacagtccttatactgaagaaacctcctatgagaactctcttctggtaaagcagtctggatccctgccacttagctcccttactcatgtcttacgaagccttacccctaatgcaagcatacaagatttaaatttgggaagggggggatgtcctcaattagaactttttgatcagcctggctggtaccgtctagtactatgcagcggtcctcaagttggagaaaatgtgcctttcattcattacctctctggagacttcttgctggaatga

SEQ ID NO: 2398 - DNA, 397 bp, Homo sapiens
  SIMILAR (112)..(8): 371254mologous to Anopheles quadrimaculatus A adenosine triphosphatase subunit 8,accession number L04272,Smith-Waterman Score=61.
tttcaccaaggttttgggttaatttaaatggggagaaatttatttttaggctttttaaaattttatacagatataggtgccttaaaaaaaaaaaaaacaacagttacaaccaaaagaattgaaatgaccagtgcactttattttccttttagctcctggagcctgtctgccatcagctgtttgagctctatcgtagctcagaggttcgacttaagaggttcacactgcagttcttgccagaattgatgtgggtttatttacggcttacagttagccgagacagacagagtaatggttgcattgaagcacttctgttaggaatttacaatttggtaagttgaagatgacagtttgggaaattttaagtattttttaaggtcctctgaaataatactta

SEQ ID NO: 2399 - DNA, 3106 bp, Homo sapiens
  SIMILAR (267)..(1997): 1001254mologous to Homo sapiens hORC2L,accession number U27459,Smith-Waterman Score=2940.
ggcgggagattcggtgtgccgcacgcaggcttcccatcccccagctggcctccggtgctccttacctccccggtggtcgggcgcgaattactggaaattggcttttcccgttggggccgatagttctcttccctgcggcggcgactcagcggggtgtcgttcggccggcgtgacgcagccggatcggcgccagacggaaacctagcggtgactgtatctgaattttgcagctgcagaatgtgtagtaccttaaaaggttggcaacaatgagtaaaccagaattaaaggaagacaagatgctggaggttcactttgtgggagatgatgatgttcttaatcacattctagatagagaaggaggagctaaattgaagaaggagcgagcgcagcttttggtcaaccccaaaaaaataataaagaagccagaatatgatttggaggaagatgaccaggaggtcttaaaagatcagaactatgtggaaattatgggaagagatgttcaagaatcattgaaaaatggctctgctacaggtggtggaaataaagtttattcttttcagaatagaaaacactctgaaaagatggctaaattagcttcagaactagcaaaaacaccacaaaaaagtgtttcattcagtttgaagaatgatcctgaggttacgataaacgttcctcaaagtagcaagggccattctgcttcagacaaggttcaaccgaagaacaatgacaaaagtgaatttctgtcaacagcacctcgtagtctaagaaaaagattaatagttccaaggtctcattctgacagtgaaagcgaatattctgcttccaactcagaggatgatgaaggggttgcacaggaacatgaagaggacactaatgcagtcatattcagccaaaagattcaagctcagaatagagtagtttcagctcctgttggcaaagaaacaccttctaagagaatgaaaagagataaactaagtgacttagtagaagaatattttgaagctcacagcagttcaaaagttttaacctctgatagaacactgcagaagctaaagagagctaaactggatcagcaaactttgcgtaacttattgagcaaggtttccccttccttttctgccgaacttaaacaactaaatcaacagtatgaaaaattatttcataaatggatgctgcaattacaccttgggttcaacattgtgctttatggtttgggttctaagagagatttactagaaaggtttcgaaccactatgctgcaagattccattcacgttgtcatcaatggcttctttcctggaatcagtgtgaaatcagtcctgaattctataacagaagaagtcctcgatcatatgggtactttccgcagtatactggatcagctagactggatagtaaacaaatttaaagaagattcttctttagaactcttccttctcatgcacaatttggatagccagatgttgagaggagagaagagccagcaaatcattggtcagttgtcatctttgcataacatttaccttatagcatccattgaccacctcaatgctcctctcatgtgggatcatgcaaagcagagtctttttaactggctctggtatgaaactactacatacagtccttatactgaagaaacctcctatgagaactctcttctggtaaagcagtctggatccctgccacttagctcccttactcatgtcttacgaagccttacccctaatgcaaggggaattttcaggctactaataaaataccagctggacaaccaggataacccttcttacattggcctttcttttcaagatttttaccagcagtgtcgggaggcattcctcgtcaatagtgatctgacactccgggcccagttaactgaatttagggaccacaagcttataagaacaaagaagggaactgatggagtagagtatttattaattcctgttgataatggaacattgactgatttcttggaaaaggaagaagaggaggcttgaagctttcctttattcttgaatctcccatggaagggttgtaccccagctgccactcctctagttgaaagtgttgtgtttacatctgacattaaattatttttccagcatacaagatttaaatttgggaagggggggatgtcctcaattagaactttttgatcagcctggctggtaccgtctagtactatgcagcggtcctcaagttggagaaaatgtgcctttcattcattacctctctggagacttcttgctggaatgaacagtgtgctcagggactatttggaactggatgtttttgaattattttatacttagagatattctgaattttttgagggccttttaacactccccgagctgattgtttgcaagtgtgtttgttccagagtgtggaagtataaagacatgggcatcacgtaaattggttttgtttgctattctgtgtgtcagaaccaacgagtgtaatggagagggcaggtcatctcttattgtttctaaaacaacttaaaaggtgtagattgggaagaggtgagtgatccagctttctcctttggattgaggctatgtacttggtggggcaggggagggaatatattataatactattcagttgggataatgggaaaaacagagtatatagggtatctacccagcctagaaagcacaggaacaatacgtcatatatttggaacagttattgtctgtgccatgaccttcatgataccagtgagaagcctggctagagaaataaaatcctgaattacattttagtaattgttttcaagacaacaaaaaataaaacatttcattattgtatattgacatatttttcttttcttgaaccacatgcaggtgagtagcatataatggctggctgtaaataattttgattcctctgtcaagtagaccctaaaactcaccgtaagatatttcagttttttccttaaagtgatgatttcaaacctcctgaatatttgcgcgagacttttttcttaggaaagaaaaaaggctcaccttggctactgttgtcagcttacagtcatcacataccccctgaaatatttgacacttggaaatgaagttcttcctgaaaatatcactgcaat

SEQ ID NO: 2400 - DNA, 856 bp, Homo sapiens
  SIMILAR (406)..(522): 431254mologous to Homo sapiens transcription factor SC1,accession number U25826,Smith-Waterman Score=78.
atgctgggaactgaccgttgtgttgtggaagaatggttatcagaattcaaggcattacctgacactcagatcaccagttatgcagcaactttacaccggaaaaaaacacttgtaccagccctctataaagttattcaagattcaaataatgagctcctggagcctgtctgccatcagctgtttgagctctatcgtagctcagaggttcgacttaagaggttcacactgcagttcttgccagaattgatgtgggtttatttacggcttacagttagccgagacagacagagtaatggttgcattgaagcacttctgttaggaatttacaatttgccttcaacaattggatccatggctttgacagaaggggcattgtgtcagcatgatctcatcagagttgtttatagtgatcttcatcctcagagggaaacattcactccccggtggtcgggcgcgaattactggaaattggcttttcccgttggggccgaaggtaccttccctgcggcggcgactcagcggggtgtcgttcggccggcgtgacgcagccggatcggcgccagacggaaacctaccggtgagtagtggggtgtcggggcagcctgcctcccttttctgcttagctcgcggcgtgtgaggtgcgtccaggtgcacccagccccgcgtcggagcttggcccctagcgtcccaagtcgcgcatctcaggactttccctcggcacttggggcatggtctttgcgcctcgctgccccccgcaggctgcccgggggctcgagaacccttactggtggagcgcagccaactggccagaggctggaggcgcaggccaaagtcctttaagacttgaggtgagagg

SEQ ID NO: 2401 - DNA, 428 bp, Homo sapiens
  SIMILAR (256)..(273): 831254mologous to Drosophila melanogaster Mst84Dc,accession number X67703,Smith-Waterman Score=37.
atttcgtggacgaagcagttgctgtgggaggtgtggtaactgctggaaggaagatgctcaattcttctgagcaacgaaggccacacggagtcctggattctgtgtggcctggcatccatggcgcactgtgtgctggcaggtggctcaggacggggcagttatcatgggacacccgccatatgctggcaaggaagatggtcagttcttctgagccacaaaggcccccaacatcctggagttggtgttgcctagcatccacggtgcgccccctgctggtggatggctcaggatggggcagttgccgtgggaggcccgctgcctgctggaaggaagatggtcagttcttctgaaccacaaaggccctgcagagtcctggagtctgtgtggcctggcttccagggttcacctcatgctggtggattgctcaa

SEQ ID NO: 2402 - DNA, 531 bp, Homo sapiens
  SIMILAR (270)..(341): 451254mologous to Homo sapiens Human prostate cancer- associated protein 73,accession number Y48376,Smith-Waterman Score= 71.
atggacctgggcctgtttctcaagtgtgtatttgatttctttacaattccccggagaagttgtcatgggaggccagccgcctgctggcaaggaagatggttgattcttctgatcaatggaggccctgcagagtcctgtagtcactgtggcctggcatccatggtgcacccaatgctggtggatggcttaggacgcttgtatgagcaaatactgctctggatcctctttcctgcttggaaagcagcttcagtcctgaaggtccagagtgaatgtgccctgaccctggctctggcccaagtctgtgccgtagaggcagttgctgtgggaggtgtggtaactgctggaaggaagatgctcaattcttctgagcaacgaaggccacacggagtcctggattctgtgtggcctggcatccatggcgcactgtgtgctggcaggtggctcaggacggtaagcatttctctgcccagtatgctgaatgagggtgtctttcggatttccaagacccgcaaggagcagtttctcagctaa

SEQ ID NO: 2403 - DNA, 495 bp, Homo sapiens
  SIMILAR (50)..(286): 321254mologous to Homo sapiens Polyproline-rich domain from dynamin,accession number Y56033,Smith-Waterman Score=69.
ctacatctgcactggagaaatcccaaaagcaaacggccagtgcaaacaagagcagtccgcagcagccgtcccgagcacagctcccaggtcgcggggctgcagcccaggccgcgtccgcagcggtttggtttgtgaacagacgccgagactcccgcagcatgacccgccacgccgatcgggtacggtatgcgcctctctctacccgtcctccattgcttgggctcccaggtcacagctgccattctgtcaagcagaaaaaccttgcaaagggcctccaggtttgccggaaagcagtccctgttgggctgtgttcccgtgcactcagctggagcaatttgcaggcgcgcaaatgcggagctcaactcatttcaagttttcattgccagagaatgagtttgtaaatatcgagtttgtctctggtttctggaaagcgagcccgtccaacttgcaggactctcggttcaccacggctcgactgcaagcgggcgaccctca

SEQ ID NO: 2404 - DNA, 405 bp, Homo sapiens
  SIMILAR (400)..(47): 271254mologous to Mus musculus plenty-of-prolines-101; POP101; SH3-philo-protein,accession number AF062655,Smith-Waterman Score=99.
tttcgtccggcgagggaggaagaagcgcgaagatccgttagtcatgccggtgtggtggcggcggcggagactgcgggcccgtagctgggctctgcgaggtgagagtgatcgcggtcttaggtccaactcctctacgtgccgggttcctccgccatatgggtgcccagcgcggcccctgtcccttccccgggcgcagcggagcgggcggctgctgcgtaggccaaaaggctacgctcccggtgcccccaaggcccacgagctttccccacaagccatttgcgcagtcgcgttttgtgagtaaccacctggaaggcttagctgacctttctccgtcaacaccggttcgctgtcctctgctcagaaactgggcaagggccttctgacttaaggaggtgcctgcaaggg

SEQ ID NO: 2405 - DNA, 438 bp, Homo sapiens
  SIMILAR (81)..(188): 361254mologous to Homo sapiens Human secreted protein encoded by gene 8 clone HLTFA64,accession number Y41315,Smith-Waterman Score=63.
gtgactatgagaatggagctatttagagttgatttaaaagaaaacactttattgttcagcaattaaaagttagccaaatatgtatttttctccataatttattgtgatgttatcaacatccaagtaaaatgctcattttcatcatttgcttctgttcatgttttcttgaacacgtcttcaattttccttccaaaatgctgcatgccacacctcaatacatgccgcgtgatcctagtagttttttcacaaccttctacaagtttttggaaaacatctgttatgatgcactttcatacaccttcacctcaaaggctttcttgcacctcgcagagcccagcttacgggcccgcagtctccgccgccgccaccacaccggcatgactaacggcttcttcgcgcttcttcctccctcgccggtcgcgcgcgatctagaaccag

SEQ ID NO: 2406 - DNA, 469 bp, Homo sapiens
  SIMILAR (84)..(152): 391254mologous to Leishmania tarentolae ribosomal protein S12,accession number L07546,Smith-Waterman Score=62.
agagttgatttaaaagaaaacactttattgttcagcaattaaaagttagccaaatatgtatttttctccataatttattgtgatgttatccacatcaagttaaatggctgatttccatcatttgcttctgttcatgttttcttgaacacgtcttcaattttccttccaaaatgctgcatggcaacacttgaggtaacgaagcagaagtatttttaaacaatacaagctaaaaacattcatctacagcaacctatatgctcaatacatgccgcgtgatcctagtagttttttcacaaccttctacaagtttttggaaaacatctgttatgatgactttcatacaccttcacctcaaaggctttcttgcacctcgcagagcccagctacggcgcccgcagtctccgccgccgccaccacaccggcatgaactaacggctcttcgcgcttcttcctccctcgccggacgaaa

SEQ ID NO: 2407 - DNA, 651 bp, Homo sapiens
  SIMILAR (164)..(532): 281254mologous to Mus musculus plenty-of-prolines-101; POP101; SH3-philo-protein,accession number AF062655,Smith-Waterman Score=100.
ttccttagtgaccctaggcctcttgcaggagagtccctggtcccagccagcgggagcggctatatccagtttgtggctctcggagagttcgcctcgtccctccctctcagataaccacctatttctgacctctggaggccgggctgagcccggaattttatgaccagcgcccgctggccgtcgtcaccctctaatttctcgcaaaactcccggggacccttcttaatgtcagtagccacagtcgccgccgctcctgcgcctagaagccttccacgaccctcaaccccacagagccccgagcaggctcgggttcccgcaggatacactgcccgcccagtggcctggagggcgcgtcccgggctcccctacgccttttggaatcagcgacagacgcagagcaaggcacccctagaagcttcaggctcctccacaggcgagtgcctacccacctatcaggtaagacgtgcaactgacactcagcgcgcggaggagcccgctgagaaagggtttacctgtccgaagagaactgcgcttgcatggctctggctgtgggccggctggctcttgtccgcagactacatttcccagggttgtctgcggctggagagatttagggtttggggcgtggctagcacaggcctgaggtcctaa

SEQ ID NO: 2408 - DNA, 241 bp, Homo sapiens
  SIMILAR (62)..(196): 321254mologous to West African cassava mosaic virus transcriptional activator,accession number AF112354,Smith-Waterman Score=58.
gtactgatcgccgcaccggagcccgaggacgctcaccgtgccgcctccccgcgggagccccgggagcggcccatcacctctgcagcctcgccaggagaagaaaagttcccacgtctctaccaggagaagcccgaagctcctgcgggagaagcctgaagctgctgctggagaagcggcagctgaggcaggactcccgatgtttgcccgcagccgcgcgcgcagtcggtgcgccccgacgaaa

SEQ ID NO: 2409 - DNA, 902 bp, Homo sapiens
  SIMILAR (29)..(106): 511254mologous to Homo sapiens Fragment of human secreted protein encoded by gene 92,accession number Y41590,Smith-Waterman Score=65.
atggaaggatgggttcagggttttctacgccgctttttcggcgactttttgctcttccgctttttgccaccgcccccaaccttctatatccttgcagcccctaccttttcttgtgttgctcctcccctggcagccgtgaggggggttagatctcagccggagccggagctgggcctagctgtcccacgggccaccactacctcctttggttcgggagaaagctacgaccaagtacgcccagctcgggccttagaacttctgaacgggcagtgcggcttgtctagagctgtgtcattacagcagctgacatatggaaatgtcagtccaatacagacctcagcttccccattatttcgaggaaggaagagattaagcgatgaaaaaaaccttcctcttgacggtaaacggcaacgtttccattcaccccaccaagagccaactgtagttaaccagatagtgcctttatcaggtgaacgaagatactcaatgccaccattgtttcatacacattatgtaccagatatagtcagatgtgttccaccttttcgagaaattgcatttttagaacctagagaaatcacactgcctgaggccaaagataaggtaataataatgtagattttagttttgccttttgggaatttagtataaataatgtattaatcaaaaatatttaatatcctggattaagtagaacgtgcctttttttgttgcaatgtttaaagtactattcagcctaattttctgcccaaacagtactttgatttttgttagctattcttttatagaaatgcagccatcaggaaatcagattttccctgatatatgaaaattttattagaacccagacactttctgagtttagagaactgtcttgttacttgtttttactgaaaaaaaaa

SEQ ID NO: 2410 - DNA, 424 bp, Homo sapiens
  SIMILAR (49)..(108): 601254mologous to Penaeus vannamei penaeidin-3b,accession number Y14927,Smith-Waterman Score=74.
gggcggagcaagcatcacaccatggcgtatgagtgttcctctgtgtagactcaacctgcgcctcgccgtcccccattcgcacacccgatgcccgggggtcgctacggacttaaaatctccgcaccgcaccctccacctcagaaacgttcctggatccgaacactgccccctgacgacctaaagagatcccggctcccagcccactgagtggcttcagcctcgctggcacctcccaactcctggcctctctgcacgaggcgcctgccccgggccccgcctacaggggacccagctcttcttgcagccactggaagctgatcacctggagtgaagacctcacacgaagaagtctggaagaagaggaagaggaaagaaaaggagtcagggatggcccttactcaggtacggttgacatttatggatg

SEQ ID NO: 2411 - DNA, 476 bp, Homo sapiens
  SIMILAR (387)..(304): 431254mologous to Arabidopsis thaliana F24O1.6,accession number AC003113,Smith-Waterman Score=54.
  misc_feature (1)...(476): n = a,t,c or g
gtcttcactccaggtgatcagcttccagtggcgcaagaagagctgggtcccctgtaggcggggcccgggcagggcgcctcgtgcagagagcccaggagttgggaggtgcctgagggatgaagtgggcgggggccttggggaaagggggcggtgcntgcgctcccctccctctcactcccaggagtctgtttccagagctttggaggagagacctaccagcgaggctgaagccactcagtgggctgggagccgggatctctctaggtcgtcagggggcagtgttcggatccaggaacgtttctgaggtggagggtgcggtgcggagctcttaagtccgtagcgaccccccggcatcgggtgtgcgaatgggggacggcgaggaacaggttgagtctacacagaggaacactcatacgccatggcctgatgcttgctccgcgnnttccnccgcactgagtacgatctcgatgggcggg

SEQ ID NO: 2412 - DNA, 642 bp, Homo sapiens
  SIMILAR (10)..(234): 701254mologous to Mus musculus Pro-Pol-dUTPase polyprotein,accession number Y12713,Smith-Waterman Score=265.
atgtctctggacttgaaagatccaggggtggtgattcccaccacatctccactcagctctcttatttggcctgtgcagaaggcaggtggatcttggagaatgacagtggattatcataagctcaaccaagtggtgcctccaatggcagctgctgtaccagatgtggtttcactgctcgagcacattaccacatctcctgccaagcatgcgtccttcctgttcctgggccgagcttgctcctgcctcaaggccttcacgtgggctgtgcctctgctggaactcgctggcccctcagctgcaggccttccgctggaggagcggcaagggggcgaacggcggagcgaacggccggcgcgccaggccagcccggggctaccccaggctgcggggagctcgccccgcctgcaggacgggcgtctttacctgctcacaaaaggcactttgcatttaaaccattttcaaattaagaagaaaaacagctccaccccctggaaaatgtactcctccaacatgcagacatcttactacaaaccctccagtgaatgtgtggcccaagggaatcaggagaaagagagacaaagagccactgagaggagatggaaaaaccaagaaagagaaaagaaaaatgagggagacccataa

SEQ ID NO: 2413 - DNA, 546 bp, Homo sapiens
  SIMILAR (369)..(506): 711254mologous to Homo sapiens HTRM clone 438283 protein sequence,accession number Y73345,Smith-Waterman Score=163.
ccaagcatgcgtccttcctgttcctggccgagcttgctcctgcctcaaggccttcacgtgggctgtgcctctgctgaactcgctggcccctcagctgcagttgccacagacccggaagtggatcgtgcggagcaagcatcacaccatggcgtatgagtgttcctctgtgtttatctcaacctgcgcctcgccgtcccccattcgcacacccgatgcccgggggtcgctacggacttaaaatctccgcaccggaccctccacctcagaaacgttcctggatccgaacactgccccctgacgacctagagagatcccggctcccagcccactgagtggcttcagcctcgctggaagaagtctggaagaagaggaagaggaaagaacaggagtcagggatggcccttactcaggtacggctggcatttaaggatgtggccatagaattctctcaggaggagtggaaatgcctggaccctgctcagaggatcttaaacagggacgcgatgtgggtaaaacactgggaaccttggttctctgggactgtgt

SEQ ID NO: 2414 - DNA, 1331 bp, Homo sapiens
  SIMILAR (1102)..(1260): 381254mologous to Conus striatus omega conotoxin SVIA mutant 1 precursor,accession number AF146360,Smith-Waterman Score=67.
gactggcaccactgtaagaaagccctttatgaaggtcatcatcccccacttgccatctctccccagatgcagatgtgcaagcttttaaaaacacttgagaagccaccatcctcgctttgcaagccctcttttaagaaatgtcattatcagaaatacaatttgatggcatcaagaggaagcaatgcctccaatatctggagaaaccctgaggaacactgcaatatgatggatttaagaccgtatattttggggaaaccaatatcccagaaagtctcgtaactggggaagatattagtgatggatatttcatacaaaccccaacttggtgtattgtgcatgctgcgggtagtcaaggatgggtgccttggaaatatcgggtgttcctaagagacgagctgtgtatcaaacaagaagacagcctcttctctgagttctgtgatgtggtgaggaaggcctatggaaatcattcactcatcaaatactggagcaccttctgtgtgcctggctgggtgcgtcagggccaggagtaccaaggaaaacaagcctggaccctcaaggtccaggtctggtgtggagactctccaccgtccatcctctggcttcactctgacacagatgagatctgcatgggggagctccctcatggtgtgatggtgcgtgtgtttccggcagtggactgtgtgaaacggctgaacctcttcttcacgcctgaggtcatcaccatgaacataacatcatcacgtgtggcatcccatgtgggacgctgtggctgccgcagtgtctggcgcatgaagagcacacgctggagtccactcaagctgacatttacatggcagaatctagaagggaataccaaagggatgagtaggaaatgtttgataagagtatacccgatgtttactgctcagcataaagacgcagtggagacgcacggcaagaggcagaagtgtggactgagaaggacgcagcacaagggcagcagaggtcaagaacattcacaggactctccggggaccaacaccgtaggcttgaaccaatcctgggccccgcccgggccacgtgccagccggaacacgctgctcaacgggttgacggcgcccgacggccaggtccagcaggggcgccccgcagcggaggctccagcgcctggccgcgcacaaaccacgacttctaccgtcctgccggggaaaactacaggtcccgaaatgcaccgctacgtgctcaggcgcagtgggccggtgccgccgacgagagtgcactactccgtgcgcaggcgcagtgggcccgggcagaagacctggggcgcgctgctcactgcgcaggcgcagtga

SEQ ID NO: 2415 - DNA, 950 bp, Homo sapiens
  SIMILAR (413)..(541): 371254mologous to Mytilus edulis metallothionein 10IV,accession number AJ007506,Smith-Waterman Score=76.
atgattaatgatgaagtggagatgaatgtggggagtgaagtagagggcagtgtcaagaataactccctggtctttggcctgcagaactgggtggatagagggcctcacttcagtagatatttacgaagagcctactatgaaccaggcacagagttctatgggctgaggatagagcagtggacacgacaaaacaaagctcctgctccaatagagcttcattctagtcgagagacagataataaacacacgaacaacgatatctttgaatctctttctctatctcctctgatcctgcccccaaacactcggcggagcggcggagcggagaatagaaggtccgcgcgcgaacaggaggcggggcctgccgccttcagtcgtacagggggtggtttctgcacatgcgctgtggctgtgcggcttcagctgccccctctctgcggccaatcagggcccgcggcgcgctcgggacgtatcaacgctctgtgggtcgtgtgcgtgcgaggggggcgactccgcctctgggccctgccggtgagtccccacggaaccctggggccccccattctctccccggcgggagaagacaaggaggatggcggtggccaggccgccgcccctgcccgttgttaaattcagaaaatgcaagcagtcatcttcatcacagtcctatggacttccaggctgaggtgacacgcagggcaggactgacagcaccttcagaggttcccatggcgacagtaaacaagtctccactgccttggccatgtgctgtgttcaccccactcctgatcttgttggctgctcaggggctgacagcccagatgtgcagctgtgatgagcagaaacagggaggaatggagcccccaggtgagcggcgaggcttggatttagggaagagcagcctggggatgtggatatggatggaagaggctctgagatttgggatctga

SEQ ID NO: 2416 - DNA, 498 bp, Homo sapiens
  SIMILAR (172)..(35): 361254mologous to Homo sapiens Human secreted protein encoded by Gene No. 15,accession number W73411,Smith-Waterman Score=68.
atggggaacactacctcgtgctgcgtgtcgtccagtcccaagctccggaggaatgcccactcccggctggagtcctaccggccagacacggacctgagccgcgaggacacgggctgcaacctgcagcacatcagcgaccgggagaacatagacggggcttccacgtccaccatctcatctgaacttcccagcaagcccatgaagtcacagagatggagctcaactagaaatttccccgagaaaaaggtttgctctttgatggacaaacagatcaaagctctgtttgctctgagggagcaaacagatcaaagcatgcatttcgaatgcagggagaaagctatctgttttgtccctaggaaacatttatcccacagcacagccaaaatacagctgcttgcaaacatgatggctgaggaggatccgtgccatcctaaactacaagctgaccttgatgacaggtcacactctgaggatggagaggcagaaacagcatcgtaa

SEQ ID NO: 2417 - DNA, 849 bp, Homo sapiens
  SIMILAR (610)..(729): 971254mologous to Homo sapiens apolipoprotein L-III splice variant alpha/d,accession number AY014904,Smith-Waterman Score=196.
atgtggctaccttataagagcgaccaccagggggcagccatgaggtgggccaaagcaaagactgtaggcttccctgcccactgtgcagataatctagcagctgttcagaaccccgggacctgttcatggctgcgactagaaaggttccctccacaccgggtcacatacatcgagccatacaacctgtgcgggactggcgagtcgattttattggcccccccgccccagagcggagggaaacggtatgacttaacctgtgtggatacaacaatgaggctactacaggccttcagtgtaaaacgtgccacccaactggagaccatgaagcgtctcaccgctcttagtgtcacgaatggcatggctaaaaggacagatagagatattaggtcccctgaagtcttgaagagacatattcatcttacttggtacgagagggccactgaaggctatactggagtggagtgcctagtgggcatgtcctgtcagacagcaataattcaagcatcccctgagaatggccctatgttccttggtgtatggggtggtggccacgaggctgcagggacatttgcccaggatgaaacagttcccagtgaaagggtcatgttgggtatatctcagagcctggagaacgtgtctggttattatgcagatgcacggctggaggtgggatccacacagctcagaacagctggatcttgctcacactctttcaagagaagcttccttggcctctgggtgatagagaagaaagaagctgtgctgttccctagtgggaaagatggcccagacaggggcagtgagaacggcatgttgcagaatggtgtctgccacatgatcccagcttga

SEQ ID NO: 2418 - DNA, 432 bp, Homo sapiens
  SIMILAR (210)..(278): 391254mologous to Homo sapiens Human thyrotropin receptor (TSHR) fragment (residues 367-418),accession number Y77802,Smith- Waterman Score=41.
ttttagagatgggggtctcactttcttgtctaggctgtaaattttcagtttaacaagtttcttatgtgatttgtggccacactgaagactcaccagaacagggtggggtggggaatacttaatcaatatttgtggaatttacccgatgaaatccagttattcctgctgaatttctctctcctccaggaggacatagcaaacgagctgaggaaggtgaatgctgcaaccctctctcctcagccctgcagccgatccctgacataaactccttgaagttcagtggcctctttccatgcacctaccacctacacctgctgctttcaaagaaaccacaacctggaccgggaacagaactggacgtgccaaaatgcctgaggacacttcatcgaatgtggctggcttgatgggacgctggcatgactagaaatgtca

SEQ ID NO: 2419 - DNA, 921 bp, Homo sapiens
atgcagacagttatagatttcaggggtcccagggtatctggaggcaaagcaactgggaccagtgcacgaagggagaaggtcctggaacaggttgtttgggactttaaaaaaaaatggcgtgaaagtgaaaagaatctgtccctgtccttacatgaaccggccatcgctcttatcccacctagttttcattgcattctccagagcatctttgtatatgatcttcctaatacccctgtgagagatgcagagcatctcacagatgtgcacctggataatctatattgtggcctatcctgggtgacacctatagtcccaacctctgtaatagatgcctctcctgggattttcatggaaaagaaaaatctgtttataaaatcgcgaaatcagcctgtgccctctatatctctgggaaaggtcctacctattaattcagccacattccgatgcctgacaactccttacacaaagctcttggtgttaccagtgggagaaaagctcaaatcagagaagaatgctggaagagaaaaccagtttgacaaaggagtgctggccgtcaattggctaaatataacacccacacttggaatccatggctttggcctagcagatgcttactactgtgttccacttaggccagagtttctcaatctcagcactactgacattttggtccagaacattctttatcatgaagggttgtctggaggacatagcaaacgagctgaggaaggtgaatgctgcaaccctctctcctcagccctgcagccgatccctgacataaactccttgaagttcagtggcctctttccatgcacctaccacctacacctgctgctttcaaagaaaccacaacctggaccgggaacagaactggacgtgccaaaatgcctgaggacacttcatcgaatgtggctggcttga

SEQ ID NO: 2420 - DNA, 852 bp, Homo sapiens
  SIMILAR (49)..(141): 581254mologous to Caenorhabditis elegans similar to RD tandem repeat region of RD protein (nuclear rna-binding protein),accession number U28971,Smith-Waterman Score=76.
atgggtacagagagcactgacccagtgtggagcaggggttgggaaggcaaggagcagttgggcaggcaaagagataatggggaaggaaggagggagaaagagagaaagggaagagagagggagagagagagagagagaggtgatttcagggtttgcacgaggctcagtgtgtctgaagcagtgtgtgctggcttgggagactgggagatggggctggaaagtcactttgtaccattatccgtggaacacagaatcatctgttcccaacgctccagccccttggtcttgtgcatggctggatcccaccggaaacgggcctgcacagcagcagcaccctcctggtgtggaggttatgtagctggtgagctgctcacagccatacactgcccatgccgagcacctcccacacagctctgctttcctttgagttggctttattctcgggctccatggtgtggccccacagcaccagttattggtaaaaagagctcccatttgctgacagaactgctggatttagttctcattggtccacacgaggaaggtatccagcctcaagtcatcactgtggccaaaagatggaatacactgagtggacaggcctggcatgtgtatccacagagactgagagttggtgctgatggtatggtggtggatgagattaccagaagaagggacaaatgggtgctgggcaggaaaaagcatcagctgcccagtttaggcctctcctctttccctggcgtcttcacttttcctccctatccctgctgttccttaccctctgcccagtctctcagtactcctggtcttgggaaggtgccttctgaggatgctcctggcacgggtacctga

SEQ ID NO: 2421 - DNA, 778 bp, Homo sapiens
  SIMILAR (452)..(559): 411254mologous to Homo sapiens Human secreted protein encoded from gene 30,accession number Y30840,Smith-Waterman Score=76.
gaacagcctgtcaccacacaattacttttataaccctggagatgaaaatctccttgtcctcaaaatacttccagaagaacaaccagatgggaaggaccttggttgggactctttccagttcacttggggcagagggaatttaatggctcacgtagctgaaaaggatgggctagattgggcttcaggctgcatcccaggactccaaacagggatctgtctctttggctctcagctctgctttcatttgagttggctttattcttgggcttcacagtgtggccccacagcaccagttattgataaaaagagctcccctttgctgacagaactgctggatttggttctcattggtccagacgaggaaggtatccagcctcaagtcatcatttgtggcccagggaagatggaatacaccaaatgggacaggcctggcatgtacccacagagactgagagttggtgctggtggttgtgggtggcagatgatattacctgaagaagggacggaatgggtgctgggcaggacaaagcatcagctgtccagttcaggcctctcctctttccctgggtgtcttcattttcctccgtctccctgctgtcccttaccctctgcccaatctctcattactcctgggtcttggggagttgccttcttgaggatactcccactggggggtacctgagcctgggattaggagggcagggggaggatattgccttagccaaagtggggtgtttcaataaaaaaccattttggagatggtttttaatatgggaaa

SEQ ID NO: 2422 - DNA, 401 bp, Homo sapiens
  SIMILAR (97)..(165): 471254mologous to Rhea americana adenine triphosphatase subunit 8,accession number Y16884,Smith-Waterman Score=48.
cccctggaatgtctggccagggcctgtaaaattgaaataggtcccccgcctctccttactgtggtggcagagacccctaagggtaaatgcagagggccgtggttctcggatggactgtggagctgggcactcaggaagtttcacatagcccagaagctgctttctcaggctcctctggcagggagcgtcaggatgagaatccagacctgactgccacccagccctctcacttcgcagatgcaaaaatccagactcagaaagggagcctctacaaggtggcccaatggctgctcaaaggaaggacattgcctccctacctcgacctctcccccgagcccctggagcccctctgggaagctacagtttatgccgcttacagtcacttctgtattgtcctctga

SEQ ID NO: 2423 - DNA, 377 bp, Homo sapiens
  SIMILAR (247)..(209): 381254mologous to Homo sapiens Amb a V sequence,accession number R58845,Smith-Waterman Score=35.
agatactatcatctattccatctctattgcaatttgcttccaggcagctgtcatggaagttcagactttgagaccatcttactggaagttccttttaagactcaccaagggcaaatttgctgtcatgaaccgaaaagtccttgatgtttttggtactggtgcatctaaacactttcaggatttcatccccaggttggatccaagatacacaactgtaacaccagagttgcccacagagttttcctgaagatgactgtaacttattaatgtgactaaatgtttcatcttgaagagttaattatgttgaacacaaaggagggggcccaagctcgaacttcagtgttatttcagttagagatactcttttcatttgtttt

SEQ ID NO: 2424 - DNA, 639 bp, Homo sapiens
  SIMILAR (251)..(213): 1001254mologous to Homo sapiens Human secreted protein, SEQ ID NO: 7102,accession number G03021,Smith-Waterman Score=66.
atgagcctgagacagctacagaaggaagatggcacatgtggccaggacaggccccaaagaggatcagctcgcctgcctgagtacatccgggcatcctctttgcagaaggctactctcaatctccctccaacacattgtgacacccattttttgcaagtcatctgttgctcagaggaaacgctagacagtggttgggccataattataaagacaggagtgaagctgcagacctttgcagtaagtgtcacagctcataaaagaagtgcggacctaaagagtgagcagcagcaagagacaatgtatttcaaaggcattgaagcagggaaggttccctattttcctcatgcagatactatcatctattccatctctacagcaatttgcttccaggcattttcatttatatttactaaaagaattctcaaatttaatactcaggctgtcatggaagttcagactttgagaccatcttactggaagttccttttaagactcaccaagggcaaatttgctgtcatgaaccgaaaagtccttgatgtttttggtactggtgcatctaaacactttcaggatttcatccccaggttggatccaagatacacaactgtaacaccagagttgcccacagagttttcctga

SEQ ID NO: 2425 - DNA, 816 bp, Homo sapiens
  SIMILAR (373)..(804): 661254mologous to Homo sapiens putative p150,accession number U93563,Smith-Waterman Score=464.
atgagtcaagtaaaacaggcgtcctctagaagctggaaaaggcaaggaacaaattatctccctggatctccagaaagaacagagcactgccaacaccttgattttagtcctgtaaaagtcatttcagacttccatccttcagaacgaccacagtggaataaaactggaaatcaactccaaaaggaaccttcaaaaccatgcaaatacatggaaatttacctgctcctgaatgagcattgggtcaaaaatgaaatcaagattgaaattaaaaaagtcttcaaactgaatgataatagtgacacaacctatcaaaacctctgggctacagcaaaggtggtgctgagaggaaagtccatagccctaaatgcctacatcaaaaaatctgaaagagcacaaacagacaatctaagaattaaaaacaaaaatctcatggtcatctcaatagatgcagaaaaaacatttggcaaaatccaacatccctttatgattaagactctcagcaaaatcggcatgcaggggacatcccttaatgtaataaaagccatctatggcaaacccacagccaatatactcaatggggaaaagttgaaagcattctctctggaaactggaacaagacaaggatgcccattctcactacttctcttcaacttagtactggaagtcctagccagagcaatcagcaaagagaaagaaataaagggcatccaaatcggtaaagcgaaagtcaaactgttgctgtttgctgatgatatgattgtttatgtagaaaaccctaaagactccagaaagctcctagaactgagaagagaatga

SEQ ID NO: 2426 - DNA, 534 bp, Homo sapiens
  SIMILAR (190)..(438): 491254mologous to Homo sapiens Human secreted protein clone bg249 1 protein,accession number W30650,Smith-Waterman Score=187.
ccaactgcgactgcagaggaacaggcagatgaacctgatggcccccttcctggctcagacaatggccaagaaaagaacgtaagattatctccagccaaaatgtcaaccaagaattctaccgatctagttgaatatgttgacaagagtcatgcttttctccccatcattccccacacccatagaggcccgctagaagacagactgaacaaccaggcgcgtaccatagctttccttcttgaacaagcctttcgcatcaaggaggacatctctgcttgcctgcaggggacccatggctttcgaaaagaggaatcgctcgccaggaagttactggagagccacatgcagaccatcaccagcatcgtcaaaaaactcagccaaaatattgagattttagaagaccaaataagagctcgagatcaggcggccacaggaactaactttggcagtacacgaggttaaacatcaaacaccttacaagggagttgggagatcttcgaggaagagtagccagatgtgattcaagcattgtgaact

SEQ ID NO: 2427 - DNA, 923 bp, Homo sapiens
  SIMILAR (401)..(562): 491254mologous to Homo sapiens Human secreted protein, SEQ ID NO: 6812,accession number G02731,Smith-Waterman Score=116.
cagaacagcgttgtggaattcgagaaattcaagctggctgcagaaatttgcacaagtaaggaggaactgaatgttaatccccaagacaatggagaaaatgtctccagggcatgttggaggtcttcatggcatcccctcctatcacaggcctagaggcctaggagaaaatggttttgttgaccaggcccgggtccctgtgctgtgtgtagcccagggacttggtgccctgtgtcccagctgctccagctgtggctgaaaggggccaacatagagtttgggccgtggcttcagagggtgcaagcccccaagccttggcagcttctatgtgctgttaagcctgcaggtgcacagaagtcaagaattgagatttggaaacctccgcctagttttcagaagatgtatggaaatgcctcaatgcccaggcaaaagtttgctgcaggggagaggccctctcagcggcaggggagagaacctctgctagggcagtgcagaagggaaatgtggggtcagagcccccacacagagtccacactggggcactgtctagtggagctgtgagaagagggccactgtcctccagactccagaatggtggatccactgacagcttgcaccatgcacctgggaaagccgcacacactcaatgccagcccgtcaaaacagccaggagcggggctataccctgcaaagcctcaggggtggagctgcccaagaccatgggaatccacctcttgcatcagcgtgacctggatgtgagacctaaagtcaaaggagaacattttggaactttaaaatttgactgctctgctggatttcggacttgcgtgggccctatagcccctttgttctggccaatttctccccttctaaatggctgtatttatcaaatacctgtactcctattgtatctaggaagtaactag

SEQ ID NO: 2428 - DNA, 412 bp, Homo sapiens
  SIMILAR (82)..(369): 1001254mologous to Homo sapiens TCRAV26S2,accession number AE000660,Smith-Waterman Score=510.
atggctgaaaggggccaacatagagctcaggccatggcttcagagggtgcaagcctcaagccttggcagcttccacttggtggtattatgggtgatgctaagaccacacagccaaattcaatggagagtaacgaagaagagcctgttcacttgccttgtaaccactccacaatcagtggaactgattacatacattggtatcgacagcttccctcccagggtccagagtacgtgattcatggtcttacaagcaatgtgaacaacagaatggcctctctggcaatcgctgaagacagaaagtccagtaccttgatcctgcaccgtgctaccttgagagatgctgctgtgtactactgcatcctgagagaccacagtgggacagatggggctgcagctgtgcaatatctccctg

SEQ ID NO: 2429 - DNA, 394 bp, Homo sapiens
  SIMILAR (14)..(103): 521254mologous to Homo sapiens Human secreted protein encoded by gene 63 clone HBJFV28,accession number Y02712,Smith-Waterman Score=79.
ctatgtgacatatctgctccccctttgcctttgccatgattggaaacttcctgttgcctctccagaagcagatgccactatgcttcctacacagcctgcagaactgcccacaggcctaggaggaaaaagtggttttgtgggccagccccagggtccccgtgctgtgtgcagcctagggacttggtgccctgcatcccagccactccagctgtggctgaaaggggccaatgtagagctcaggccatggcttcagagggtgcaagcctcaagccttggcagcttccacgtggtgttaagcctagcacctactttgtgccagactgttcaaggcactaaggaaagagcaatgaatgagaaagatcaagaacctacttttgtggtactttcagaatga

SEQ ID NO: 2430 - DNA, 956 bp, Homo sapiens
  SIMILAR (767)..(513): 511254mologous to Homo sapiens unnamed protein product,accession number AK024120,Smith-Waterman Score=208.
tcaggagcacagcggacaccctgctggatctggagggatgggagtcagcagcgggtctgcgagggcggcaaacagatacaattttgagcccctcttgcctctatgctcctttttcctccatttgccatatggacacagaagatccaacaggagactctcatgctctctacaggatagcggaaccacaagatggaaacaattctggattccagagtcaactcctgatagctgcccaccaaacacactcattgatcttttaccttctttcctcccacagcagatggaccaccaagaatgccttgctcttggggtacatccatccagtgagtggtctcttggaatggatataagcaaaatggctttaactttgctaccttctcctttgtctaggtgtgtatcagacaccctggtgcatccctttccagtgcccactgcttcctggatttgtaacttcagggaaatagagcagctgccttgagctgactcactcagagtacactcacaaaaacacagcctcccagcagcaaacttctacctgggcatccaggcatttccatacatctcctgaaacctaggaggacattcccaaacctcaattcttgacttctgtgcacccacaggctcaacaccacatggaagctgccaaggcttggggcttgcaccctctgaagccacggcccaaactctatgttggcccctttcagccacagctggagcagctgggacacagggcaccaagtccctgggctacacacagcacagggacccgggcctggtcaacaaaaccattttctcctaggcctctaggcctgtgataggaggggatgccatgaagacctccaacatgccctggagacattttctccattgtcttggggattaacattcagttcctccttacttgtgcaaatttctgcagccagcttgaatttctcgaattccacaacgctgttctg

SEQ ID NO: 2431 - DNA, 1068 bp, Homo sapiens
  SIMILAR (398)..(484): 371254mologous to Homo sapiens Polypeptide fragment encoded by gene 66,accession number W88825,Smith-Waterman Score=54.
  misc_feature (1)...(1068): n = a,t,c or g
ttttttttatgctcaagatttaccatttcatcaagaggtcttcaacactnatccaattgtgcaattatcattctacacacaggccagtgaataaagggagtaaaaaaaccacagcccatggatcgggagaccaaggtnccctccagaggagtcccagtgggtcccagaagccctttggatgttggtccagaggctcctcttgggcagagatcacagcagcagcccaacaggtctggtgaaatccttaagagttctcatggacaaagtttgtgaaggcatcttagacaagatcttgtctttgctggttttatgatcctctgcagatgggtctattctcattatctcagccacctttcacttcctatcagttcagttcaggtctctcatgatcccaggcagcagtagttgttatcatgtgagttcattcatatatgtttatctctttggggaagggggggaacaaactttcactgtggaccttaaattcctactggagatgagtgaacccccattttaaagacaacatgaatcacaaattaattatcacatatccagcagggcagacaatagctacgacctggggctgaaagcaggtaactccatttattctgcaaaaattctgtcttgattatggtgccagttgctgtgagggatttcctttctagaacctgtttttcacaaggtttgagtctgaactgttaacattctactgatttctgggtgaagggactgactgcaccatcctagcctgtcaaagcacttgccccaatacttccactttaagagttttccaccttggccaaaactacagtccactaatcccctcattttcttttttaagaaaataaacaggccaggtgcgggggctcacggccagactttaaaaaaaaaaaaaaaaaaaactactgggggaaaaaggattttatgtttagaaaagtctacacttcttgatacaactaactaaaaaaagcctgatacactaaacaaaacccaaataatgtcttccctaaaagtgagtaacttgaaaagcaattcgagcaaaaatcaaggggttcaattataaataag

SEQ ID NO: 2432 - DNA, 537 bp, Homo sapiens
  SIMILAR (96)..(188): 901254mologous to Homo sapiens Human secreted protein, SEQ ID NO: 4473,accession number G00392,Smith-Waterman Score=157.
atgagagttgaaaaactacctcttgggtactatgctcagtactgggatgacagaatcatttgtaccccaaatctgagcatcaagcaatatacacagtcaggtcgctcagctgcaggtccgttggagtttgctggagttccactccagaccctgtttgcctgggtatcaccagcggaggctgcagaacagcaaatactgcagaacagcaaaatattgctgcctgatccttcctcaggaaggctgcagcttcccaggttgatcccagactactgcactagcagtgagcaaggttccatgggtgtgggacctgccgagcccggcatgggagggaatctcctggtctgccggttgctaaaactgtgggaaaacacagtatttgggcagaaatgtaccattcctccagaccatttgcagctgcaatttgaaagtgatgtattctatgaagttcctgatactgccaagagcagaggctgggtttttgtggccttgatgattgttagccaaacacttgaattactggacttcaccaaagtataa

SEQ ID NO: 2433 - DNA, 798 bp, Homo sapiens
  SIMILAR (352)..(795): 871254mologous to Homo sapiens p40,accession number U93569,Smith-Waterman Score=659.
atgcaaacctggacttataaggagtcagcagttggtagtggggacagaggtaaaaagtgcatagagcgaagccaccagttagctgaatccaataaacagacatttgaggtagagagtgaattaaagcaccttgcgccagctttcccacctccgggttccctgggcaaagaaggagctttgtgggcagaagttcaagcactcctgaagagtgtggccactcggagcttggcaggaatgaggacaaagcttccagaggaaggatcaggcagcaacatttgccgttctgaaatatttgctgttctgcagcctccgctggtgatacccaggcaaacagggtctggagtggacctccagcaaactccaacagacctgcaggaaatacagagaacgtcacaaagatactcctcaagaagagcaactccaagacacataattgtcaggttcaccaaagttgaaatgagggaaaaaatgttaagggcagccagagagaaaggtcgggttactcacaaagggaagcgcatcagactaacagcagatctctcggtagaaactctacaagccagaagagagtgggggccagtattcaacgttcttaaagaaaagaattttcaacccagaatttcatatccagccaaactaagcttcataagtgaaggagaaataaaatcctttacaaacaagcaaatgctgagagattttgtcaccaccaggcctgccttacaagagctcctgaaggaagcactaaacatggaaaggaacaactggtaccagccactgcaaaaacatgccaaattgtaa

SEQ ID NO: 2434 - DNA, 861 bp, Homo sapiens
  SIMILAR (184)..(858): 721254mologous to Cloning vector pZC320 SopB,accession number U26464,Smith-Waterman Score=748.
atggataaattcttggacacacacactctcccaagactgactgagcaagatattgaatcactgaataaaccaataacaagttccaaaattgatgcagtaataaatagcctaccaaccaaaaaaagcacaagaccagatggatttgcagctgaattctaccagaggtacaaaaaggagctggtatcatttattttaaaactgttccaaacaattgaaaagtcaggtccctcagctgcaggtctgttggagtttgctggaggtccactccagatgctgtttgcctgggtttcaccagcggaggctgcagaacagcaaatattgcagaagagcaaatattgctgcctgatgcttcctctgaaagctttgtctcagaggggcactggcctgtatgaggatacaccgcacaatgaatttgctggaaatatttctgcgctggctgatgcggaaaatatttcacgtaagattattacccgctgtatcaacaccgccaaattgcctaaatcagttgttgctcttttttctcaccccggtgaactatctgcccggtcaggtgatgcacttcaaaaagcctttacagataaagaggaattacttaagcagcaggcatctaaccttcatgagcagaaaaaagctggggtgatatttgaagctgaagaagttatcactcttttaacttctgtgcttaaaacgtcatctgcatcaagaactagtttaagctcacgacatcagtttgctcctggagcgacagtattgtataagggcgataaaatggtgcttaacctggacaggtctcgtgttccaactgattgtatagagaaaatcgaggccattcttaaggaacttgaaaagccagcaccctga

SEQ ID NO: 2435 - DNA, 1191 bp, Homo sapiens
  SIMILAR (599)..(525): 761254mologous to Homo sapiens Human secreted protein, SEQ ID NO: 4473,accession number G00392,Smith-Waterman Score=95.
ccggtctgcaggaattcggcacgagaatatactcctgaccaaacactgacttttcctgcagtcttagcaaccgacagaccaggagataccctcccatgcctgcttcagcaggtcccgcacccacagagccttgctcactgctagcacatcaatctgagatcaacctgtgatgctgcagattggtggggggaggggcacccaccattgctaaggcttgagtagctcacactgtaaacaaacctgctgggaagctcaaactgggtggaccccacttgcagctcagcaaggcctactgcctctatagattccacctatgggggcagggcatagcttgaataaaaggcagcagacaacctctgcggacttaaacatccctgtctgattagctctgaagagagaagtggttctcccagcatggcgtttgagctctgagaatggacagactgcctcctcaagtgggtccctgatgcccgtgaaatggaactgggagacacctcccagtaggggtcgacaaacacctcatataggcagctgcccctctgggacgaagcttccagaggaaggatcaggcagcaatatttgctgttctgcaatatttgctgttctgcagcctccactggtgatacccaggcaaacagggtctggagtagaactccagcaaattccaacagacctgcagctgagggacctgactgattgcagctcctcaccagcaacggaacaaagctggatagagaatgactttgacgagttgacagaagtaggctttagaagattggtcataacaaacttctctgagctaaaggaggatgttcgaattcattgcaaggaagttaaaaccgtgaaaaacgggattataaacgcaccaatcagcaccctgtcaaaacggaccaatcagctctctgtaaaacggaccaatcagcaccctgtcaaaacagaccaatcagctctctgtaaaatggaccaatcagcaggatgaggcaagctttcttgaagaattctcagacagccaactgtatcaattccttactggaaccacagttatagagcacgtggatgtaggagtacaatggagagtgctcagtgagggccaaaactactggggaagctggggttggcttcctggagaagactgcagctttgtgccagcagacagcaggtggtttattgctgtgtacctggtacacaaag

(The sequence listing continues in the following parts.)
